United States Patent Application Publication US 2011/0182862 A1 - sequence listing, part 12

SEQ ID NO: 16624 - DNA, 1485 bp, Muscodor strobelii
  misc_feature: SGI cDNA ID NO. 565537
  misc_feature: Elevated expression when VOC is produced
  misc_feature: Encodes the peptide sequence at SEQ ID NO 16625
atgtcagcacggtcctcatcatcgccgagggcgacgactcccttgctcaacagacttgatggagaagaaggcggtctacctcatggtcaatgccgatacattctactcaatcctgaaatcaagggtcaacgttgtgcttgtgtcggcttcatgttgaaccgaagccttcctggcgtctcatgccaatgcggtcatctatcatgttatcacgtcaagacaactgagtcaccgccagaaaaagccgaagtggaggacttacggcggcgtatccaactgctggaagggcagttggaccgggagaatccatcgggaaccggcagcatgctgaatcaagtggtccagcgcgtcagcgacttggaggaacagttcgagatgaacaagagcgaagtcaatgaagaagtgcaaaaatgctacagtaacgtgagtcgtgtgtgggattccgtcacgcagctcgaaaggacccaaagtagctgggagaatcgatccggtcagtgcgacgaacggctagatgatcacgacgaccgcattcataggctcgacgatcgccttatagagattgacgaggccgccatggccaccgaagagcgtgtggaagtactagagggcaagcctatgtcatcgacatcccatcgtgggcggagaccagcttcaggctcggactctgagtctatcagtccgatcagccccaacgcactgcgaacacagagatcactcgccacaaaaaacgcggcgccgccacggcctgtccccgtctcctatccgtggtatgtacagggccgcacaggtagcggggtcgtgcttcatcagaccggaggctcgtggacggtgcacgtatctctattgcctacagcagctcagccgttcccgtttgaaaaggacaccaatgcgtacaagaggtgtctatctcgcgggctccaccagatgattgtcgtcgagggcacggacggcgagtcattcacatcagctgtgaccaaggcgtttggcaggctcctccggggtcgggaatgggtgcccctccaggcgcggctgtgtgatgccgtcacacttgagggtctgccgatgctacggcccctcgacacgaccctgatcagaggctcgtatgacctggagttcctgcgggatcactgtgcggtctgccaccctaacggcaagatcgagtcgctctacatcgcgatgctccaggagacgttctcgtggcactttctacgacggtctccagtgcacatggagggcctcgaggcaagttggggatacgacgcgcttctcgaccccgatgagaacttggacgacgggagcggggaggaggacagattagcggcgggggacatcatgccgctcccgtcgtctctcaaacgcacggcgtcggagatgtcgcgagcggccagtttcagcgcatcggagggatcggaaccgccacggccgaagttggcacggacagcgtgccttccggtagaggtgcgcaggcgcggggtggagacggtatag

SEQ ID NO: 16625 - protein, 494 aa, Muscodor strobelii
  misc_feature: SGI Peptide ID NO. 565537
  misc_feature (19)..(470): NCBI GI: 261360790 Blast Desc: conserved [Verticillium albo-atrum VaMs.102]
  misc_feature (22)..(491): NCBI GI: 171692155 Blast Desc: protein product [Podospora anserina] gi|170946026|emb|CAP72827.1| protein product [Podospora anserina]
  misc_feature (1)..(494): NCBI GI: 85102812 Blast Desc: NCU01309 [Neurospora crassa OR74A] gi|11595674|emb|CAC18295.1| conserved [Neurospora crassa] gi|28922940|gb|EAA32159.1| [Neurospora crassa OR74A]
  misc_feature (23)..(490): NCBI GI: 39978035 Blast Desc: MGG_06902 [Magnaporthe grisea 70-15] gi|145013530|gb|EDJ98171.1| MGG_06902 [Magnaporthe grisea 70-15]
  misc_feature (48)..(494): NCBI GI: 256728478 Blast Desc: NECHADRAFT_72392 [Nectria haematococca mpVI 77-13-4]
  misc_feature (80)..(494): NCBI GI: 46110040 Blast Desc: FG01902.1 [Gibberella zeae PH-1]
  misc_feature (14)..(476): NCBI GI: 154316261 Blast Desc: BC1G_03716 [Botryotinia fuckeliana B05.10] gi|150846502|gb|EDN21695.1| BC1G_03716 [Botryotinia fuckeliana B05.10]
  misc_feature (93)..(476): NCBI GI: 156037584 Blast Desc: SS1G_12506 [Sclerotinia sclerotiorum 1980] gi|154697914|gb|EDN97652.1| SS1G_12506 [Sclerotinia sclerotiorum 1980]
  misc_feature (294)..(464): NCBI GI: 116206640 Blast Desc: CHGG_02613 [Chaetomium globosum CBS 148.51] gi|88183210|gb|EAQ90678.1| CHGG_02613 [Chaetomium globosum CBS 148.51]
  misc_feature (22)..(197): NCBI GI: 116206640 Blast Desc: CHGG_02613 [Chaetomium globosum CBS 148.51] gi|88183210|gb|EAQ90678.1| CHGG_02613 [Chaetomium globosum CBS 148.51]
  misc_feature: Useful for introducing or modulating the production of volatile compounds
MSARSSSSPRATTPLLNRLDGEEGGLPHGQCRYILLNPEIKGQRCACVGFMLNRSLPGVSCQCGHLSCYHVKTTESPPEKAEVEDLRRRIQLLEGQLDRENPSGTGSMLNQVVQRVSDLEEQFEMNKSEVNEEVQKCYSNVSRVWDSVTQLERTQSSWENRSGQCDERLDDHDDRIHRLDDRLIEIDEAAMATEERVEVLEGKPMSSTSHRGRRPASGSDSESISPISPNALRTQRSLATKNAAPPRPVPVSYPWYVQGRTGSGVVLHQTGGSWTVHVSLLPTAAQPFPFEKDTNAYKRCLSRGLHQMIVVEGTDGESFTSAVTKAFGRLLRGREWVPLQARLCDAVTLEGLPMLRPLDTTLIRGSYDLEFLRDHCAVCHPNGKIESLYIAMLQETFSWHFLRRSPVHMEGLEASWGYDALLDPDENLDDGSGEEDRLAAGDIMPLPSSLKRTASEMSRAASFSASEGSEPPRPKLARTACLPVEVRRRGVETV

SEQ ID NO: 16626 - DNA, 3955 bp, Muscodor strobelii
  misc_feature: SGI EST ID NO. CUFF.39422.0
  misc_feature: Variant of the nucleotide sequence at SEQ ID NO 16624
gtgatcacgacatggttgtggatatacgtcagggagttgtgttcattgaaatttgaacggctcgatctttaaccatgggacaggtactgtactgtacttcttgttgcgatctgatgccagtaataactaaggcacatgcgtgctccgcccaaaactcgccgggtcccttatcttgtcccccacaactcatttcgtccggtacaagcagaggacgagctctatcttgggctggacttgtacatacttagtcgcatctgaatcatggcatccccatccctcgacccgttccccatgctggagagtatgtctggtccccccaatcccgctcgcacttctggccgctcccgtcacgtccgtcggtcaagccagcctggaaagagatagggcagcccatgccatgtttgcacgtagtacataggccggggaaagagcagtcgatgttatcagagactcgatgggtttcgaagttcgtccccacctcgagctatccgcggcggctgttgtggtaggttggttagctgatgtggtatttcgttatcgagctgcgtgttgcgccttcgagctttgcagggtttcgtccatcttctcggccccttttctacgcgtaggtaccgtctccattttccttcgctgcccgcgctatgcgacgttatctgctgaggtcgtccgctacctacccggtccccccatgcccctccaaaagaaaaacccgccaaacggctggtgctgtgccaagtcgaatctcgtcggacagacagacaggtccctgcgttccaattaaggccatgccatgatagcagcaggacacagcagcgggtcatcatccatgctcccgcagctgctacgaggtacctcgaccaccgcacactcgtcatattcaccattactagcgccatcaacaccaccaccgtcaaccccatacctctactgtatctactctttatctcacccatcactctcctctgccattacacgactctacatagacttcggagcctccccctgtctctcaccgccattcatcatcctcgcgcagagcctcgcctcgctggctcactgctgataagagtctacgagggcgcgacaccgagataggagacagagatatacttatacatactaacccacggattctcgatccgaattggcgagttggcgccggaaactcttgtcacatccaccaccttatgatctatctcttgtacagacccctgttctgcctgtcgctcggtagataggtgtacagcatatcatatctcagccactaccttggtcctaccggttctatctctccagcagcagccccggccatcgcgaccgcatcgcttatcatccttaaaagtctcatacgtacagcacatgcgtcccgggaacgacctcagcgatctgccacactttatgccttacacctatctctattgtgctccccgttgaacttctctgcgcacgtcgccgtgataagattgctcttttgacgctcggcacgtcgcatgctacattgccatcgtgccatcatcccacgctctgtgcaggccaacgacacgaccgctgtgaacgtatctgcctgcaagataaccagaacatctactctaccctatcattttcttcctctcctcccttgcaaattttgatttttattctcctcctccttcgtccttctcttttcttgcctattcatctttactcgccgtctgtgccaaccaccgcgcttcgattcacgcaccctcttcacccggtgcagaggtgccgcgggacccattccatggaccgagcattcctaagaagctcattgcctgctcgctggccccgcgttcgatagtacaggctggattgtgtactcgggtgtcaaaggacataaagacccaccccagcacttacaatcaccattagcgtatatatcaatacgaagagattatcatgtcagcacggtcctcatcatcgccgagggcgacgactcccttgctcaacagacttgatggagaagaaggcggtctacctcatggtcaatgccgatacattctactcaatcctgaaatcaagggtcaacgttgtgcttgtgtcggcttcatgttgaaccgaagccttcctggcgtctcatgccaatgcggtcatctatcatgttatcacgtcaagacaactgagtcaccgccagaaaaagccgaagtggaggacttacggcggcgtatccaactgctggaagggcagttggaccgggagaatccatcgggaaccggcagcatgctgaatcaagtggtccagcgcgtcagcgacttggaggaacagttcgagatgaacaagagcgaagtcaatgaagaagtgcaaaaatgctacagtaacgtgagtcgtgtgtgggattccgtcacgcagctcgaaaggacccaaagtagctgggagaatcgatccggtcagtgcgacgaacggctagatgatcacgacgaccgcattcataggctcgacgatcgccttatagagattgacgaggccgccatggccaccgaagagcgtgtggaagtactagagggcaagcctatgtcatcgacatcccatcgtgggcggagaccagcttcaggctcggactctgagtctatcagtccgatcagccccaacgcactgcgaacacagagatcactcgccacaaaaaacgcggcgccgccacggcctgtccccgtctcctatccgtggtatgtacagggccgcacaggtagcggggtcgtgcttcatcagaccggaggctcgtggacggtgcacgtatctctattgcctacagcagctcagccgttcccgtttgaaaaggacaccaatgcgtacaagaggtgtctatctcgcgggctccaccagatgattgtcgtcgagggcacggacggcgagtcattcacatcagctgtgaccaaggcgtttggcaggctcctccggggtcgggaatgggtgcccctccaggcgcggctgtgtgatgccgtcacacttgagggtctgccgatgctacggcccctcgacacgaccctgatcagaggctcgtatgacctggagttcctgcgggatcactgtgcggtctgccaccctaacggcaagatcgagtcgctctacatcgcgatgctccaggagacgttctcgtggcactttctacgacggtctccagtgcacatggagggcctcgaggcaagttggggatacgacgcgcttctcgaccccgatgagaacttggacgacgggagcggggaggaggacagattagcggcgggggacatcatgccgctcccgtcgtctctcaaacgcacggcgtcggagatgtcgcgagcggccagtttcagcgcatcggagggatcggaaccgccacggccgaagttggcacggacagcgtgccttccggtagaggtgcgcaggcgcggggtggagacggtatagaaaggcggccacaggtggtcccaggggacacacgatagaaatgccgaggcgcacggatagaccggagcacggcgttcctcagatcggggcacgggtggactcgacggagcatacatataccacgtacctagtgtcacgttcctctttttcctttgtctttgtttcagcgaaagcctttattccctcagtgtcgctcccattatgccttcgcaagccgtatccctagagcccttcatttcttggtcttatgctgcatttgtttcacggcaggacgacggaatggaatgcactggaatgcaggaggccaccgtgtttttaaagattgaggaaagagagaaggctttcggttccaggcagggagaggagggcagatgtacatagagaaagaaatgccgcgttcacaagaccctgggcgttgacgatatgaatgtgctatgccacaacaatgtagatagatgggaccgccttgctctagaatgacggctattgaatcaaagagggatgtctgccgatagtctttgttcgtaagcgacgctgcaatgcaagacatgag

SEQ ID NO: 16627 - DNA, 1911 bp, Muscodor strobelii
  misc_feature: SGI cDNA ID NO. 565538
  misc_feature: Encodes the peptide sequence at SEQ ID NO 16628
atggctgaccccgcggccagcctcgcggcgctgctgcggcaagctggggtgcgcgaccacgacgaggtcgtcaagctggccaacgcagccatcaaggccaacaagggcaatctcgacgcccaccacgcccgcgtcgtcgccctgctcaagctcgaccgcttcgacgacgccctgcgcgccatcgccgacgccggcagcccgctcgagtcgcgctgccagctcgagaagacctacgccctgtacaaggccggccagctcgacgccgcccagaagacggccgcatccgcatcctcgtcctcgtcctcgtcgtcccgtgcctttcgccacctcgccggtcagatcgcctaccgcgccgagcaatggcccgaagccgccgccatctaccgcggcctcgccgatagcagcgccgacgacgacgcggacgacaacgacatcaacatcaacctcctcgccaccaccgtccagttgcagtgggcccgccacggccacccgctccccgacagcgagtcccggccctctcgcgacgacctcgacgccttcgagacggcctacaatgcctcctgcgcccacatcgcccgcgccgacttcgccaaggcctctgtgctcctgaagcgcgcccgcgacctctgcgaggccagcgacgacctgtccgccgacgacaagcgcgccgagctgctccccatcatggtccagcacatctacgtcctgtcgcagctgggaaaacacgccgacgccgccgctctccagaagcaggtcgtcgtgtccgacatcccagaggctccgacaagagccgttgctcaaaacaatgaggctgccctggctgcggcccagagcaacccatacttgacccagcgcatcgccgacgccgcagtatccctctctggcaacgacaagctgttccagtaccagcagtccatcatggaacgcaaccggctcgcgctaggtctgcagatgcagaaattcaagggcaccgaggcatccacgcacagccagatccgtgccgcggcctcgtccgccgccctgctcgacgccgctcccctcggtgtcatcaacgccgctgctcgagctcaactcggcgccggcaaggacgccatccaggccatcttgccggccttggaaaagaggccaaatgacatcggtctcctcctcaccactttcctcaaacgtctcgagactgccaccaccccagactacgccgacgtgcgctttgctcctgggctcgtggccgtggctgtcgcgctgtatcggacccaagggcggcataactccattcgtgccgagctggccaaggcgtcggcctactggcgctccagatccgaccgctcgtccgtctctctcctgctcgagtccggcatcgagctcctccgctcctctaacccctccgacgtcgaggccgcaggctccaccttcgaaaagctcgtgtctaccttcacccaggatgccactgcggccgccggtctcgtggcttcgttcgcaacccgcgactacgacaaagtctcgccttacctgtccaagctcacgcccgtcgagcggctcaccgctggcatcgatatctcgtctcttgtgactgcaggtgtcgccacggtgtcgcccgcggcacccagcaccaagaaacgtgctgcgactgatgaacccgagcgggagaaagccacgaaacggcgcaggaagaagaggctacccaaggactatgacgaaaccaagcagcccgatccggagcgctggctaccgttgcgggatcgtagctcgtatcggccgaagggcaagaaaggcaagaagagagcgcaggacacacaaggtggcgtagtcaaggaggaggagactctcgagctggttggtggtgcgggtgcggtcaaggtagaaaaggctacgggggggcaaggcggtaaaaagaagaagaaaggcaagaaatga

SEQ ID NO: 16628 - protein, 636 aa, Muscodor strobelii
  misc_feature: SGI Peptide ID NO. 565538
  misc_feature (532)..(585): Pfam Id: PF08492 Pfam Desc: SRP72 RNA-binding domain
  misc_feature (1)..(623): NCBI GI: 85075921 Blast Desc: NCU01455 [Neurospora crassa OR74A] gi|28916865|gb|EAA26607.1| conserved [Neurospora crassa OR74A] gi|28950329|emb|CAD70954.1| related to SIGNAL RECOGNITION 72 KDA
  misc_feature (1)..(622): NCBI GI: 116199299 Blast Desc: CHGG_07805 [Chaetomium globosum CBS 148.51] gi|88179084|gb|EAQ86552.1| CHGG_07805 [Chaetomium globosum CBS 148.51]
  misc_feature (1)..(620): NCBI GI: 171692743 Blast Desc: protein product [Podospora anserina] gi|170946320|emb|CAP73121.1| protein product [Podospora anserina]
  misc_feature (1)..(621): NCBI GI: 39978039 Blast Desc: MGG_06904 [Magnaporthe grisea 70-15] gi|145013527|gb|EDJ98168.1| MGG_06904 [Magnaporthe grisea 70-15]
  misc_feature (2)..(622): NCBI GI: 261360792 Blast Desc: conserved [Verticillium albo-atrum VaMs.102]
  misc_feature (1)..(619): NCBI GI: 156048400 Blast Desc: SS1G_08931 [Sclerotinia sclerotiorum 1980] gi|154693328|gb|EDN93066.1| SS1G_08931 [Sclerotinia sclerotiorum 1980]
  misc_feature (1)..(616): NCBI GI: 154300656 Blast Desc: BC1G_10916 [Botryotinia fuckeliana B05.10] gi|150856523|gb|EDN31715.1| BC1G_10916 [Botryotinia fuckeliana B05.10]
  misc_feature (7)..(605): NCBI GI: 261193160 Blast Desc: signal recognition particle protein [Ajellomyces dermatitidis SLH14081] gi|239589121|gb|EEQ71764.1| signal recognition particle protein [Ajellomyces dermatitidis SLH14081]
  misc_feature (3)..(622): NCBI GI: 256728659 Blast Desc: NECHADRAFT_64117 [Nectria haematococca mpVI 77-13-4]
  misc_feature (8)..(605): NCBI GI: 240273856 Blast Desc: signal recognition particle protein [Ajellomyces capsulatus H143]
MADPAASLAALLRQAGVRDHDEVVKLANAAIKANKGNLDAHHARVVALLKLDRFDDALRAIADAGSPLESRCQLEKTYALYKAGQLDAAQKTAASASSSSSSSSRAFRHLAGQIAYRAEQWPEAAAIYRGLADSSADDDADDNDININLLATTVQLQWARHGHPLPDSESRPSRDDLDAFETAYNASCAHIARADFAKASVLLKRARDLCEASDDLSADDKRAELLPIMVQHIYVLSQLGKHADAAALQKQVVVSDIPEAPTRAVAQNNEAALAAAQSNPYLTQRIADAAVSLSGNDKLFQYQQSIMERNRLALGLQMQKFKGTEASTHSQIRAAASSAALLDAAPLGVINAAARAQLGAGKDAIQAILPALEKRPNDIGLLLTTFLKRLETATTPDYADVRFAPGLVAVAVALYRTQGRHNSIRAELAKASAYWRSRSDRSSVSLLLESGIELLRSSNPSDVEAAGSTFEKLVSTFTQDATAAAGLVASFATRDYDKVSPYLSKLTPVERLTAGIDISSLVTAGVATVSPAAPSTKKRAATDEPEREKATKRRRKKRLPKDYDETKQPDPERWLPLRDRSSYRPKGKKGKKRAQDTQGGVVKEEETLELVGGAGAVKVEKATGGQGGKKKKKGKK

SEQ ID NO: 16629 - DNA, 3872 bp, Muscodor strobelii
  misc_feature: SGI EST ID NO. CUFF.39484.0
  misc_feature: Variant of the nucleotide sequence at SEQ ID NO 16627
ctcagggccagcggtacttttggggtcagagtctcgcatggcaattcacgaaagtgtaatatatagggtacacgacggcgtgcctagttgcgacacgatgataggcgtgcatgagcagtggtacgtgtgttaggtagatgcaggtcgatgataagttgcagcacttggtgggctatgcacacatgtatccaggcgagcaggccaacgacccagcagagtgacgattgggagataggcgggtggagggcggcagtggtgtaacacttcaggttctaaaaaggccaacggcctcccgtgcgcccccacgctctgcagcccatgtcaaatggcgccgagcggcatagttacccgaaggacgggtcgagaatgattatgactacctaccactcgcctaccatctgctagctcggcgctctctgatcgaatggcacggtgtcgtgttcgcagagtcaagagttaaaaagccttcccctggcagcaggctctgattcaggtctgacaagctgatacgcttggatgacttgatttgtcgttctctctgaagcctaagacgtgatcgctgcaaggtgagacgggcatgcaaagacgggccagagatatgagccatcatggattgtcttgtcctggtctattggaaatgatgacatcgcccgtccagcaacataccgcttctatgatgtaggcaatctccccttgcacggatgcgtgctacgagatacaatggccgcaagcattcatgtaggggatatggccaatgaagggcagagacaaggtgatgagagatggttctgctcatggcaaaacgggatggacgggctcatgtccgtgagatgagttgtgagaagcagatgtttcctagcttgagatgggtccggatatagccgcgtgtgagggagtgggagaaaatgggctacggtatcagtcggtgccatcaaatgccctgcagatcatgtcacgatttacggtgcaatttacgggcgagaaggttggatctatgttaacaacgcgctctcagatatatagcatgttatccgtacggaatgatttgggtgtgttgagatagcaaggtcaagccaggttcagcgtgatggtgaatcttggcgcttaagcttaagatgaatgatgaagcgattattctacgcatggaagtcgacactaggcagctaacacgagaatggcgaaaggtagacttctgggaggacagacgatggtcgtcgggatagtgttgactcttgagagttgaaggccgagattgtgtcaacatgtgctcgagcaatgtggcccttggagaaatgacatggcttggcgcatatactaggtaggtacatatctaatcgggaacccctccaaccgagatattggggccctcatctcccccaccaccggctgactgcacgacggcttgcatgcaccggtggcatccacccacgaacggcggcaacgtggagaaccagccaccctcgacggcaagctgtggcatctctttgtagatgctgggaagtgcacacaatattgtcccgccatgctgacttgacgtgggagcttgacacacaagactgctgccctgctgccctgctgccgcctgtcgagacgggagaggccatagcccgattttgagaggtggggaaaaacaaggagcgaaagagagacagagagcacgagagcgagcgagggagacgaaaagaggaagaagaaacgggccgtaatggctgaccccgcggccagcctcgcggcgctgctgcggcaagctggggtgcgcgaccacgacgaggtcgtcaagctggccaacgcagccatcaaggccaacaagggcaatctcgacgcccaccacgcccgcgtcgtcgccctgctcaagctcgaccgcttcgacgacgccctgcgcgccatcgccgacgccggcagcccgctcgagtcgcgctgccagctcgagaagacctacgccctgtacaaggccggccagctcgacgccgcccagaagacggccgcatccgcatcctcgtcctcgtcctcgtcgtcccgtgcctttcgccacctcgccggtcagatcgcctaccgcgccgagcaatggcccgaagccgccgccatctaccgcggcctcgccgatagcagcgccgacgacgacgcggacgacaacgacatcaacatcaacctcctcgccaccaccgtccagttgcagtgggcccgccacggccacccgctccccgacagcgagtcccggccctctcgcgacgacctcgacgccttcgagacggcctacaatgcctcctgcgcccacatcgcccgcgccgacttcgccaaggcctctgtgctcctgaagcgcgcccgcgacctctgcgaggccagcgacgacctgtccgccgacgacaagcgcgccgagctgctccccatcatggtccagcacatctacgtcctgtcgcagctgggaaaacacgccgacgccgccgctctccagaagcaggtcgtcgtgtccgacatcccagaggctccgacaagagccgttgctcaaaacaatgaggctgccctggctgcggcccagagcaacccatacttgacccagcgcatcgccgacgccgcagtatccctctctggcaacgacaagctgttccagtaccagcagtccatcatggaacgcaaccggctcgcgctaggtctgcagatgcagaaattcaagggcaccgaggcatccacgcacagccagatccgtgccgcggcctcgtccgccgccctgctcgacgccgctcccctcggtgtcatcaacgccgctgctcgagctcaactcggcgccggcaaggacgccatccaggccatcttgccggccttggaaaagaggccaaatgacatcggtctcctcctcaccgtcatccagctctatgtgcaaaccaagaacccggccccgccttggccctcctcgagactttcctcaaacgtctcgagactgccaccaccccagactacgccgacgtgcgctttgctcctgggctcgtggccgtggctgtcgcgctgtatcggacccaagggcggcataactccattcgtgccgagctggccaaggcgtcggcctactggcgctccagatccgaccgctcgtccgtctctctcctgctcgagtccggcatcgagctcctccgctcctctaacccctccgacgtcgaggccgcaggctccaccttcgaaaagctcgtgtctaccttcacccaggatgccactgcggccgccggtctcgtggcttcgttcgcaacccgcgactacgacaaagtctcgccttacctgtccaagctcacgcccgtcgagcggctcaccgctggcatcgatatctcgtctcttgtgactgcaggtgtcgccacggtgtcgcccgcggcacccagcaccaagaaacgtgctgcgactgatgaacccgagcgggagaaagccacgaaacggcgcaggaagaagaggctacccaaggactatgacgaaaccaagcagcccgatccggagcgctggctaccgttgcgggatcgtagctcgtatcggccgaagggcaagaaaggcaagaagagagcgcaggacacacaaggtggcgtagtcaaggaggaggagactctcgagctggttggtggtgcgggtgcggtcaaggtagaaaaggctacgggggggcaaggcggtaaaaagaagaagaaaggcaagaaatgacgatagaaaaatggaaatccatcatgacagactcggttattctcgaattttttttagatatatcacttccagtcggccatgtctccggcttcgagcttgcaagtatcgtcaagtgaatcaagatgaatgcacttagctccttattgcattccccggtgaagtgagagaagggacaggctccgttggaaacgcaaacctta

SEQ ID NO: 16630 - DNA, 3237 bp, Muscodor strobelii
  misc_feature: SGI cDNA ID NO. 565539
  misc_feature: Reduced expression when VOC is produced
  misc_feature: Encodes the peptide sequence at SEQ ID NO 16631
atgtccggctcccccgccaccgccctcttccgccccagctctcgaaattcgggccaggcttctcccacgcgcatgcatctgagcctccgcggccgatcctccaccatgagctccaccggcgagagctttctcgaccctcacagtaccggcaccacccggacctccatctccacggggcgcaagagcttcggcgatctgctgggtctgagccgtgcacgtcagaacacagatcccgggcgacaggggagcctgacaccagccacgccagggtccaacacgtccaaggataactcattgcagctgactcgggaggttgtggcattgccgaagcggaaagacgacgagtcgccagccaaatacttgtctcgcattgaaggcctactacctcggggcactattgccgcagctctgtccaaggagacggacgtcttcttcgcgtccgtcttgcgcagttacatgcgatccttcagcttcttcgaagagcccatggacatggccattcgcaagctcctcatggaggccgagctgcccaaggagacccagcagatcgacaggtgtctgcaggcattcgccaaccgctatcacgagtgcaatcccgggatctatgctacccccgatcaggcctatttcattgccttttcgctgcttatcttgcacacggatgtatacaacaagaacaacaagcacaagatgcaaaagaatgcctatctcaaaaacaccgctggcgaaggcatattcgatgacatactgggctgcttctacgacaacattagctacacacccttcatccacgtcgaggacgacctggccaaccacaccaacggggaccgcgccggtagcatcaggtcacggcagaggttcgctatgcccaaggggagcacgcagtctcttagaagacaccaggaccccattgacccctatacactcatcatagatggcaaattagacctattacgctcacctctcaaagaccaaattcctctcgaggagcactacagctacttaggcacagcccaccggctcaatctgaaggaactgcagaagaccttcttcaggacgggcgtgctccagatcgtgtctgctcgatcgcgtccggatgcattcatgacggagaagacgcaacataaccccgaggcagcagagccaggcatcgtcgacatcaaagtcaccaaagtcggcttgctctggcgcaagggcaccaagagacagagaggccggtccccttggcaagaatggggtgccatcttgaccggagctcagctgtatttcttccggaacaccgcctgggtgaagaacctggtacaccaatacgagacccacatcaagttggggcacgacggtgtgccgctcatcttcaaaccaccgcttgaccacttcaaacccgacggtttgatgtcgacagatggtgccgttgctttgtgggatactaactataaaaaacacaagaatgcatttgtctacgttcgacatggcgggctcgaagaggtcttactggcacagagcgaagaagacaggaatgactggctggccaagctcaactatgcggcggcattcagaacatcgggcgtgcggatgcgcggtgttgttgggggcaattatgagggtcaaagtcgccgcgccatccgccggctggacagtactgcggccacgcagctcattcaaacaccgtccggagatgtcacaatcaaccggggtaagattgatcatcaaatggcgcgcgatattcttctggcgcggagaggaattatggccgagaagattgaagaagccgaagacaagctccaagccgcacagaagcacctcgacacccaacttcggaatgcgcgacatctcctcatcttagcacccattcaagagagaacacgagaagatgtacgcctcggcgcagccaagatcatcgcccaactaagatggtcgcggaacgacctctggagattgaaatgccaccgagatgtcctggctctagatctggcagaagagaaagaaatgaatggcgatatatcggacggctcgggtgactcgtccacgccggcgacggattcgaaagaggcgaggactgggacacctctttcagatcctcggtctccggccaccctttctccaccaccctcctccgagggccagcagccatcaaaaccggaatcgccgtcatccgaagtgtttcgtacacctccgacgagcgccacgcttccgagctttggggactcattgcctcctccggctggtcagaatggggacaggaaaacctctgtttctagcgtcgcctcgtccgcacctgagggtgccccagtgacaccatgtgcacacgcgtcgacgtctcctaccagaccacgattagacggggatgattctgaagatgcgcacgaaagaagggtgcttgaacaagccgggcttctcgaattagagtctgctcgaaccgctgatcgtcgacccagctcggcttacaccaacgacgaaacaccggaccgttccaagaggggcagcgtcactgggcacgagaaggacaagtcggacaagggcaaagtgcgtcgtagcttacagcggacgctacgagacggcgcagggcatctttcgcaccaccgaagcagcaggagaggcaaagagtcgatgcccagcggtggtgcggtgtcggacgagaatgcgcgcgacgaggttctcgaccgaggtaccggcagcttcaccgtacacgggaagaaggcctcggtcatcaattttggcaacggactacaaggcatctcgactgatccgcagatgatgagacatcgcaagaatgcacagggtgatgatccgggtcctctttcacccaccagtgtcgacgatgattttgtctccgtaatgggggaaacgcccgaacggcgggaccggcgtgggtccggaacatccgcgagtacagccacggcacgttctttccgagaactgcaccgcaagtattcatcgtcgcgacctcccaagacggggagtaatcttgtggtaccttcggatgaggacagcgacgccgccatcagcttctcggagggtcgccgctctccgttacctccactagatgacgaggacgaggatgggggtgccgcgttggagacacccatgcaggctgagttctacacaccagatcctccagcttctcctgctgatgcctcggatgcggaaggagacgaggaggaagatgagaacgaaggggaagaaaagaaagaggctagacccgtgactcgttccgcgatccaggaagtgcaagcttga

SEQ ID NO: 16631 - protein, 1078 aa, Muscodor strobelii
  misc_feature: SGI Peptide ID NO. 565539
  misc_feature (389)..(517): Pfam Id: PF00169 Pfam Desc: PH domain
  misc_feature (77)..(262): Pfam Id: PF01369 Pfam Desc: Sec7 domain
  misc_feature (147)..(262): Pfam Id: PF01369 Pfam Desc: Sec7 domain
  misc_feature (4)..(1017): NCBI GI: 256728477 Blast Desc: NECHADRAFT_180 [Nectria haematococca mpVI 77-13-4]
  misc_feature (2)..(1051): NCBI GI: 39978041 Blast Desc: MGG_06905 [Magnaporthe grisea 70-15] gi|145013526|gb|EDJ98167.1| MGG_06905 [Magnaporthe grisea 70-15]
  misc_feature (2)..(1067): NCBI GI: 116199301 Blast Desc: CHGG_07806 [Chaetomium globosum CBS 148.51] gi|88179085|gb|EAQ86553.1| CHGG_07806 [Chaetomium globosum CBS 148.51]
  misc_feature (2)..(1030): NCBI GI: 171692723 Blast Desc: protein product [Podospora anserina] gi|170946310|emb|CAP73111.1| protein product [Podospora anserina]
  misc_feature (5)..(1019): NCBI GI: 85081561 Blast Desc: NCU01465 [Neurospora crassa OR74A] gi|28917818|gb|EAA27506.1| conserved [Neurospora crassa OR74A] gi|38566830|emb|CAE76136.1| related to sec7-domain protein
  misc_feature (27)..(1038): NCBI GI: 154300660 Blast Desc: BC1G_10918 [Botryotinia fuckeliana B05.10] gi|150856525|gb|EDN31717.1| BC1G_10918 [Botryotinia fuckeliana B05.10]
  misc_feature (2)..(1038): NCBI GI: 156048396 Blast Desc: SS1G_08929 [Sclerotinia sclerotiorum 1980] gi|154693326|gb|EDN93064.1| SS1G_08929 [Sclerotinia sclerotiorum 1980]
  misc_feature (2)..(1009): NCBI GI: 239606332 Blast Desc: guanyl-nucleotide exchange factor [Ajellomyces dermatitidis ER-3]
  misc_feature (2)..(1009): NCBI GI: 261190064 Blast Desc: guanyl-nucleotide exchange factor [Ajellomyces dermatitidis SLH14081] gi|239591270|gb|EEQ73851.1| guanyl-nucleotide exchange factor [Ajellomyces dermatitidis
  misc_feature (28)..(975): NCBI GI: 240105928 Blast Desc: Sec7 domain containing protein [Coccidioides posadasii C735 delta SOWgp]
  misc_feature: Useful for introducing or modulating the production of volatile compounds
MSGSPATALFRPSSRNSGQASPTRMHLSLRGRSSTMSSTGESFLDPHSTGTTRTSISTGRKSFGDLLGLSRARQNTDPGRQGSLTPATPGSNTSKDNSLQLTREVVALPKRKDDESPAKYLSRIEGLLPRGTIAAALSKETDVFFASVLRSYMRSFSFFEEPMDMAIRKLLMEAELPKETQQIDRCLQAFANRYHECNPGIYATPDQAYFIAFSLLILHTDVYNKNNKHKMQKNAYLKNTAGEGIFDDILGCFYDNISYTPFIHVEDDLANHTNGDRAGSIRSRQRFAMPKGSTQSLRRHQDPIDPYTLIIDGKLDLLRSPLKDQIPLEEHYSYLGTAHRLNLKELQKTFFRTGVLQIVSARSRPDAFMTEKTQHNPEAAEPGIVDIKVTKVGLLWRKGTKRQRGRSPWQEWGAILTGAQLYFFRNTAWVKNLVHQYETHIKLGHDGVPLIFKPPLDHFKPDGLMSTDGAVALWDTNYKKHKNAFVYVRHGGLEEVLLAQSEEDRNDWLAKLNYAAAFRTSGVRMRGVVGGNYEGQSRRAIRRLDSTAATQLIQTPSGDVTINRGKIDHQMARDILLARRGIMAEKIEEAEDKLQAAQKHLDTQLRNARHLLILAPIQERTREDVRLGAAKIIAQLRWSRNDLWRLKCHRDVLALDLAEEKEMNGDISDGSGDSSTPATDSKEARTGTPLSDPRSPATLSPPPSSEGQQPSKPESPSSEVFRTPPTSATLPSFGDSLPPPAGQNGDRKTSVSSVASSAPEGAPVTPCAHASTSPTRPRLDGDDSEDAHERRVLEQAGLLELESARTADRRPSSAYTNDETPDRSKRGSVTGHEKDKSDKGKVRRSLQRTLRDGAGHLSHHRSSRRGKESMPSGGAVSDENARDEVLDRGTGSFTVHGKKASVINFGNGLQGISTDPQMMRHRKNAQGDDPGPLSPTSVDDDFVSVMGETPERRDRRGSGTSASTATARSFRELHRKYSSSRPPKTGSNLVVPSDEDSDAAISFSEGRRSPLPPLDDEDEDGGAALETPMQAEFYTPDPPASPADASDAEGDEEEDENEGEEKKEARPVTRSAIQEVQA

SEQ ID NO: 16632 - DNA, 4902 bp, Muscodor strobelii
  misc_feature: SGI EST ID NO. CUFF.39617.1
  misc_feature: Variant of the nucleotide sequence at SEQ ID NO 16630
atgcccattgcccactgtccactgcccactgcccatcgccgtctcggagctgtgctggccgccgccccggacgcctcgaccacactcgctagctctccgtctccatctccatctccatttccatctccatttcccgtctgccatccgtctcgacgcctcctatccgcccagcttgccgcgcctcccgtgtctgtaccacctgcaggcctctatccccgcaacggcaccgctgcccgccgcccacgccgaggacaatgggttgtcgccgctgtgcttgttgacgccgagcgagcccagccctagcatcaccgcccgtgtcggcagccagcgcgggagcctccttcacttccgccagccaccatgccgtttctgcgccgccgcggcgtcatggccagcgagtccgacatgcgcagacacacggccgtcatcgaccccaaggcccacgacgacgccttcttgactccaaagtccgccgccgctcggcccccggcagcagcagcagcaacaacaacaacatcaacaacagcagcagcgagaacaacggcaacggcacccgtgcaggtgcaggtgcatctgaccaccaggccgacgacagcaaccacgaccgcgatgcgtcgaccgacagccagtccgcgcgtggcagccaggacccctccgaccggcccgagtcgccccccgtccaggacgagacgcccaagcaccgccgcttcagcatgttaaggtttcgcaatgcctcggattcccagctctctgcccgctggaggcagcaggagaagccgccgcccatgccccaacctcccaccatcatcaccaccgctcccacctcgcacatctccactgccgactccgcctcggccaagaagccctccggcgtgaggatccccatgcgcatccgccgctccatcgacatcccgacctctcagcaggagccccagcctcgcctgcgcgtctcctcgggcgccaagaaggacaagcggagggtcatgcctccacgcaccgactcctccgccagcaagcagaccgtggtcaccttcgaggagccctcgaggggcagctcggtgctctcgcagcgccccagcgccgacgaccacgcctccgtctccgccgcctccgtcgcccgcatgtccgagtcctcgcggtcggacaacggctccaccgagcacgccctgcctatccaccacagctccagctccctgttccgctttggccgtcgccgccacaagacccccggagcccctgttccccgtcgcccatctggcccccaggtccaagacgcccgctctgtcggccgccagctccaacgcaccctctctcgcccgccattccacctcctcccgcccctccacgagccacgatagagccctcgcgcctggctcccctggccccagcgttgccaagatgtccggctcccccgccaccgccctcttccgccccagctctcgaaattcgggccaggcttctcccacgcgcatgcatctgagcctccgcggccgatcctccaccatgagctccaccggcgagagctttctcgaccctcacagtaccggcaccacccggacctccatctccacggggcgcaagagcttcggcgatctgctgggtctgagccgtgcacgtcagaacacagatcccgggcgacaggggagcctgacaccagccacgccagggtccaacacgtccaaggataactcattgcagctgactcgggaggttgtggcattgccgaagcggaaagacgacgagtcgccagccaaatacttgtctcgcattgaaggcctactacctcggggcactattgccgcagctctgtccaaggagacggacgtcttcttcgcgtccgtcttgcgcagttacatgcgatccttcagcttcttcgaagagcccatggacatggccattcgcaagctcctcatggaggccgagctgcccaaggagacccagcagatcgacaggtgtctgcaggcattcgccaaccgctatcacgagtgcaatcccgggatctatgctacccccgatcaggcctatttcattgccttttcgctgcttatcttgcacacggatgtatacaacaagaacaacaagcacaagatgcaaaagaatgcctatctcaaaaacaccgctggcgaaggcatattcgatgacatactgggctgcttctacgacaacattagctacacacccttcatccacgtcgaggacgacctggccaaccacaccaacggggaccgcgccggtagcatcaggtcacggcagaggttcgctatgcccaaggggagcacgcagtctcttagaagacaccaggaccccattgacccctatacactcatcatagatggcaaattagacctattacgctcacctctcaaagaccaaattcctctcgaggagcactacagctacttaggcacagcccaccggctcaatctgaaggaactgcagaagaccttcttcaggacgggcgtgctccagatcgtgtctgctcgatcgcgtccggatgcattcatgacggagaagacgcaacataaccccgaggcagcagagccaggcatcgtcgacatcaaagtcaccaaagtcggcttgctctggcgcaagggcaccaagagacagagaggccggtccccttggcaagaatggggtgccatcttgaccggagctcagctgtatttcttccggaacaccgcctgggtgaagaacctggtacaccaatacgagacccacatcaagttggggcacgacggtgtgccgctcatcttcaaaccaccgcttgaccacttcaaacccgacggtttgatgtcgacagatggtgccgttgctttgtgggatactaactataaaaaacacaagaatgcatttgtctacgttcgacatggcgggctcgaagaggtcttactggcacagagcgaagaagacaggaatgactggctggccaagctcaactatgcggcggcattcagaacatcgggcgtgcggatgcgcggtgttgttgggggcaattatgagggtcaaagtcgccgcgccatccgccggctggacagtactgcggccacgcagctcattcaaacaccgtccggagatgtcacaatcaaccggggtaagattgatcatcaaatggcgcgcgatattcttctggcgcggagaggaattatggccgagaagattgaagaagccgaagacaagctccaagccgcacagaagcacctcgacacccaacttcggaatgcgcgacatctcctcatcttagcacccattcaagagagaacacgagaagatgtacgcctcggcgcagccaagatcatcgcccaactaagatggtcgcggaacgacctctggagattgaaatgccaccgagatgtcctggctctagatctggcagaagagaaagaaatgaatggcgatatatcggacggctcgggtgactcgtccacgccggcgacggattcgaaagaggcgaggactgggacacctctttcagatcctcggtctccggccaccctttctccaccaccctcctccgagggccagcagccatcaaaaccggaatcgccgtcatccgaagtgtttcgtacacctccgacgagcgccacgcttccgagctttggggactcattgcctcctccggctggtcagaatggggacaggaaaacctctgtttctagcgtcgcctcgtccgcacctgagggtgccccagtgacaccatgtgcacacgcgtcgacgtctcctaccagaccacgattagacggggatgattctgaagatgcgcacgaaagaagggtgcttgaacaagccgggcttctcgaattagagtctgctcgaaccgctgatcgtcgacccagctcggcttacaccaacgacgaaacaccggaccgttccaagaggggcagcgtcactgggcacgagaaggacaagtcggacaagggcaaagtgcgtcgtagcttacagcggacgctacgagacggcgcagggcatctttcgcaccaccgaagcagcaggagaggcaaagagtcgatgcccagcggtggtgcggtgtcggacgagaatgcgcgcgacgaggttctcgaccgaggtaccggcagcttcaccgtacacgggaagaaggcctcggtcatcaattttggcaacggactacaaggcatctcgactgatccgcagatgatgagacatcgcaagaatgcacagggtgatgatccgggtcctctttcacccaccagtgtcgacgatgattttgtctccgtaatgggggaaacgcccgaacggcgggaccggcgtgggtccggaacatccgcgagtacagccacggcacgttctttccgagaactgcaccgcaagtattcatcgtcgcgacctcccaagacggggagtaatcttgtggtaccttcggatgaggacagcgacgccgccatcagcttctcggagggtcgccgctctccgttacctccactagatgacgaggacgaggatgggggtgccgcgttggagacacccatgcaggctgagttctacacaccagatcctccagcttctcctgctgatgcctcggatgcggaaggagacgaggaggaagatgagaacgaaggggaagaaaagaaagaggctagacccgtgactcgttccgcgatccaggaagtgcaagcttgagagccagtacatgtgagatgtgataatgtactgatagccacttagtgggagacaggaacggtaaaaatagagttggcgggaggttttgggagggatcggatgtgggtttcgaaccgcccaccgcatttaatgagtgatggtgtcatgtgagcatatcgtcgtacttttggaccatggatgccttgaacaaagcacaaaagaaaactttggtagacttagcgacttactgtagagatgaatatatccatatatttcactgcttccggg

SEQ ID NO: 16633 - DNA, 939 bp, Muscodor strobelii
  misc_feature: SGI cDNA ID NO. 565540
  misc_feature: Reduced expression when VOC is produced
  misc_feature: Encodes the peptide sequence at SEQ ID NO 16634
atgccgtttctgcgccgccgcggcgtcatggccagcgagtccgacatgcgcagacacacggccgtcatcgaccccaaggcccacgacgacgccttcttgactccaaacagcagcgagaacaacggcaacggcacccgtgcaggtgcaggtgcatctgaccaccaggccgacgacagcaaccacgaccgcgatgcgtcgaccgacagccagtccgcgcgtggcagccaggacccctccgaccggcccgagtcgccccccgtccaggacgagacgcccaagcaccgccgcttcagcatgttaaggtttcgcaatgcctcggattcccagctctctgcccgctggaggcagcaggagaagccgccgcccatgccccaacctcccaccatcatcaccaccgctcccacctcgcacatctccactgccgactccgcctcggccaagaagccctccggcgtgaggatccccatgcgcatccgccgctccatcgacatcccgacctctcagcaggagccccagcctcgcctgcgcgtctcctcgggcgccaagaaggacaagcggagggtcatgcctccacgcaccgactcctccgccagcaagcagaccgtggtcaccttcgaggagccctcgaggggcagctcggtgctctcgcagcgccccagcgccgacgaccacgcctccgtctccgccgcctccgtcgcccgcatgtccgagtcctcgcggtcggacaacggctccaccgagcacgccctgcctatccaccacagctccagctccctgttccgctttggccgtcgccgccacaagacccccggagcccctgttccccgtcgcccatctggcccccaggtccaagacgcccgctctgtcggccgccagctccaacgcaccctctctcgcccgccattccacctcctcccgcccctccacgagccacgatag

SEQ ID NO: 16634 - protein, 312 aa, Muscodor strobelii
  misc_feature: SGI Peptide ID NO. 565540
  misc_feature (10)..(165): NCBI GI: 46110034 Blast Desc: FG01899.1 [Gibberella zeae PH-1]
  misc_feature (1)..(165): NCBI GI: 256728477 Blast Desc: NECHADRAFT_180 [Nectria haematococca mpVI 77-13-4]
  misc_feature (1)..(213): NCBI GI: 39978041 Blast Desc: MGG_06905 [Magnaporthe grisea 70-15] gi|145013526|gb|EDJ98167.1| MGG_06905 [Magnaporthe grisea 70-15]
  misc_feature (1)..(210): NCBI GI: 154300660 Blast Desc: BC1G_10918 [Botryotinia fuckeliana B05.10] gi|150856525|gb|EDN31717.1| BC1G_10918 [Botryotinia fuckeliana B05.10]
  misc_feature (89)..(269): NCBI GI: 171692723 Blast Desc: protein product [Podospora anserina] gi|170946310|emb|CAP73111.1| protein product [Podospora anserina]
  misc_feature (1)..(135): NCBI GI: 85081561 Blast Desc: NCU01465 [Neurospora crassa OR74A] gi|28917818|gb|EAA27506.1| conserved [Neurospora crassa OR74A] gi|38566830|emb|CAE76136.1| related to sec7-domain protein
  misc_feature (79)..(127): NCBI GI: 169621291 Blast Desc: SNOG_13856 [Phaeosphaeria nodorum SN15] gi|160704221|gb|EAT78880.2| SNOG_13856 [Phaeosphaeria nodorum SN15]
  misc_feature (84)..(135): NCBI GI: 189206720 Blast Desc: protein transport protein sec73 [Pyrenophora tritici-repentis Pt-1C-BFP] gi|187975787|gb|EDU42413.1| protein transport protein sec73 [Pyrenophora tritici-repentis Pt-1C-BFP]
  misc_feature (96)..(288): NCBI GI: 145246478 Blast Desc: An12g04140 [Aspergillus niger] gi|134080204|emb|CAK46184.1| protein product [Aspergillus niger]
  misc_feature (93)..(247): NCBI GI: 212532831 Blast Desc: guanyl-nucleotide exchange factor, [Penicillium marneffei ATCC 18224] gi|210071936|gb|EEA26025.1| guanyl-nucleotide exchange factor, [Penicillium marneffei ATCC
  misc_feature: Useful for introducing or modulating the production of volatile compounds
MPFLRRRGVMASESDMRRHTAVIDPKAHDDAFLTPNSSENNGNGTRAGAGASDHQADDSNHDRDASTDSQSARGSQDPSDRPESPPVQDETPKHRRFSMLRFRNASDSQLSARWRQQEKPPPMPQPPTIITTAPTSHISTADSASAKKPSGVRIPMRIRRSIDIPTSQQEPQPRLRVSSGAKKDKRRVMPPRTDSSASKQTVVTFEEPSRGSSVLSQRPSADDHASVSAASVARMSESSRSDNGSTEHALPIHHSSSSLFRFGRRRHKTPGAPVPRRPSGPQVQDARSVGRQLQRTLSRPPFHLLPPLHEPR

SEQ ID NO: 16635 - DNA, 4902 bp, Muscodor strobelii; identical to SEQ ID NO: 16632
  misc_feature: SGI EST ID NO. CUFF.39617.1
  misc_feature: Variant of the nucleotide sequence at SEQ ID NO 16633

SEQ ID NO: 16636 - DNA, 1239 bp, Muscodor strobelii
  misc_feature: SGI cDNA ID NO. 565541
  misc_feature: Encodes the peptide sequence at SEQ ID NO 16637
atgcgtgacaaccacaccatcctcatctccgacctcgccgctgccgtcgccgccacctacccctccgccgccccccggcctgccccggccaagacgagtccattccccgtcggcggccgtgtgtccgtcggcgagcttctcgcccgtgaccagtccgagtccgatctggccgatgtcttcttcggctcgtaccagcccttggctgccatggacaactggatgcgcctgctcgagtccatgttccccgcccaggtccgcatgatcagcatcggccagtcctacgaggggcgcgacatccccgccctgcgaatcggcacacggccagacgaggactcgcccggccgcctgcgcgaggccatcctcgtcaccggcggcatgcacgcccgcgaatggatctcggtgagcaccgccaactacctcgcctggtccttcatccatctggccgcgcgcgatcccatggtcgccaagatcctcgagcgcttcgatctggtcttcgtgcccgtcctgaacccggatggctacgcgtacacgtgggaggtagatcggctctggcggaagtcccgccagagcacaaagatggccttctgccccggcttcgacctcgaccatgctttcggctatcagtgggactccgtacaccaccagaccgagccctgctcccagagctacggtggcgacgagccctttcaggccgtcgaggcgcttcgcttggcggactgggccaagaacgagacggcccatggcactcacttcgtcggctatctcgatcttcactcctattcccagcaggtcctcgtcccctacgcctactcctgccaccatctccctcccaacctggagaagctcaccgaggtcgccatgaatctggccaaacacatgaggctcgtcaacggcgagtcctacacggtcacatcggcatgcgaaggggctgccacgtctagctccaaccagcgttctcggcgtgctgaggcgcgaggcggatccgccatcgactatgtcttccatcagctccaggcgcattacagctaccagatcaagttgcgagacaccggtagttacggcttcctgctgcccagcgacgacattatacccaccggcgaggaggtcttccaggccatgaaataccttggcgattacttgctaggcaatgatggtcatgaaggttggctgcggcacgaatcaacacaggagcctctcgagaccgagaacacgataccagagcttcgacggcgcagatga

SEQ ID NO: 16637 - protein, 412 aa, Muscodor strobelii
  misc_feature: SGI Peptide ID NO. 565541
  misc_feature (70)..(372): Pfam Id: PF00246 Pfam Desc: Zinc carboxypeptidase
  misc_feature (6)..(412): NCBI GI: 116199303 Blast Desc: CHGG_07807 [Chaetomium globosum CBS 148.51] gi|88179086|gb|EAQ86554.1| CHGG_07807 [Chaetomium globosum CBS 148.51]
  misc_feature (1)..(412): NCBI GI: 261360794 Blast Desc: ECM14 [Verticillium albo-atrum VaMs.102]
  misc_feature (1)..(387): NCBI GI: 256728658 Blast Desc: [Nectria haematococca mpVI 77-13-4]
  misc_feature (4)..(412): NCBI GI: 46110032 Blast Desc: FG01898.1 [Gibberella zeae PH-1]
  misc_feature (7)..(412): NCBI GI: 171692721 Blast Desc: protein product [Podospora anserina] gi|170946309|emb|CAP73110.1| protein product [Podospora anserina]
  misc_feature (1)..(387): NCBI GI: 85081557 Blast Desc: NCU01464 [Neurospora crassa OR74A] gi|28917817|gb|EAA27505.1| conserved [Neurospora crassa OR74A] gi|28950317|emb|CAD70942.1| related to ECM14 protein [Neurospora
  misc_feature (1)..(399): NCBI GI: 156048392 Blast Desc: SS1G_08927 [Sclerotinia sclerotiorum 1980] gi|154693324|gb|EDN93062.1| SS1G_08927 [Sclerotinia sclerotiorum 1980]
  misc_feature (1)..(388): NCBI GI: 261190060 Blast Desc: zinc carboxypeptidase [Ajellomyces dermatitidis SLH14081] gi|239591268|gb|EEQ73849.1| zinc carboxypeptidase [Ajellomyces dermatitidis SLH14081]
  misc_feature (1)..(388): NCBI GI: 239606330 Blast Desc: zinc carboxypeptidase [Ajellomyces dermatitidis ER-3]
  misc_feature (54)..(406): NCBI GI: 225684195 Blast Desc: mast cell carboxypeptidase A [Paracoccidioides brasiliensis Pb03]
  misc_feature (63)..(380): SWISSPROT Homolog: EC 3.4.17.2 Carboxypeptidase B
MRDNHTILISDLAAAVAATYPSAAPRPAPAKTSPFPVGGRVSVGELLARDQSESDLADVFFGSYQPLAAMDNWMRLLESMFPAQVRMISIGQSYEGRDIPALRIGTRPDEDSPGRLREAILVTGGMHAREWISVSTANYLAWSFIHLAARDPMVAKILERFDLVFVPVLNPDGYAYTWEVDRLWRKSRQSTKMAFCPGFDLDHAFGYQWDSVHHQTEPCSQSYGGDEPFQAVEALRLADWAKNETAHGTHFVGYLDLHSYSQQVLVPYAYSCHHLPPNLEKLTEVAMNLAKHMRLVNGESYTVTSACEGAATSSSNQRSRRAEARGGSAIDYVFHQLQAHYSYQIKLRDTGSYGFLLPSDDIIPTGEEVFQAMKYLGDYLLGNDGHEGWLRHESTQEPLETENTIPELRRRR

SEQ ID NO: 16638 - DNA, 2994 bp, Muscodor strobelii
  misc_feature: SGI EST ID NO. CUFF.39398.0
  misc_feature: Variant of the nucleotide sequence at SEQ ID NO 16636
agctgagtcctctgcaaggctcgacgacctgtccatcgcgcaggtgtccgagcacccaatgagtataacttcgtgtagcatatctatcacccgtaccactgcctaagttcgcaacgtctatcttgtgaattcaaacatgaccagacgttgcccacgtgcctcctccacctcgcctgctactacacaccatccagggtgagttgccatcggccgtggcatcgatttacaggttaaatattcgacatgggcaagcactcccagcaaaccgtgagaggcgccagtgcactcgggtatggaacgtagcagcatcgaatggatcgaagtgtactaaaccgattcgtatgcgggcagaggcgggatgctcttgctctgctcttggctgccaatggcggtgggttttggtggagggcctaatcaggcaacctcttattttgcttcgttatcttgagcagtgtcgcataggccctcgatagcttcaacccacggcaaagcactgcagagctgggccacacactctgcctcacaatagaactgacaagtattctatgagcatagaggggcagaagatcaggttgctcatctagtatttgattcccacagctgccctcccttgccggcgctggcctgacaccgccgttgcccgccatgaagttggcttcaagtcccatctgcccgccacggccctcttcgctcgtcgcctggctctgcctatgcctcgtcgtccttgagtccgccgcggcctggcagctgccgggcctccccatcaagcgccatcccccacggggcccccctgcctcggccaccctcccgtctgccgtcgcctcgccgtcgccgacctcgtcttggaccgtgtcgtggtggcgccgcatcttgtcgcccgagcccatccgcaacgacgccgccctcagcccctggctggcccgcccgtccccggctcctcgagtctctgaagcgctacgagggcgacgtcgtcatacggctcaacgtctcgacggcagcccagaagactgcgctgcgccgcctcgtcgacccccatgccgctcgacctctggcacttctccgacagccacgccgacgtccgtctccccgcccgtcgcgtgccctctctgacccgcgccctgccccccgacatgcgtgacaaccacaccatcctcatctccgacctcgccgctgccgtcgccgccacctacccctccgccgccccccggcctgccccggccaagacgagtccattccccgtcggcggccgtgtgtccgtcggcgagcttctcgcccgtgaccagtccgagtccgatctggccgatgtcttcttcggctcgtaccagcccttggctgccatggacaactggatgcgcctgctcgagtccatgttccccgcccaggtccgcatgatcagcatcggccagtcctacgaggggcgcgacatccccgccctgcgaatcggcacacggccagacgaggactcgcccggccgcctgcgcgaggccatcctcgtcaccggcggcatgcacgcccgcgaatggatctcggtgagcaccgccaactacctcgcctggtccttcatccatctggccgcgcgcgatcccatggtcgccaagatcctcgagcgcttcgatctggtcttcgtgcccgtcctgaacccggatggctacgcgtacacgtgggaggtagatcggctctggcggaagtcccgccagagcacaaagatggccttctgccccggcttcgacctcgaccatgctttcggctatcagtgggactccgtacaccaccagaccgagccctgctcccagagctacggtggcgacgagccctttcaggccgtcgaggcgcttcgcttggcggactgggccaagaacgagacggcccatggcactcacttcgtcggctatctcgatcttcactcctattcccagcaggtcctcgtcccctacgcctactcctgccaccatctccctcccaacctggagaagctcaccgaggtcgccatgaatctggccaaacacatgaggctcgtcaacggcgagtcctacacggtcacatcggcatgcgaaggggctgccacgtctagctccaaccagcgttctcggcgtgctgaggcgcgaggcggatccgccatcgactatgtcttccatcagctccaggcgcattacagctaccagatcaagttgcgagacaccggtagttacggcttcctgctgcccagcgacgacattatacccaccggcgaggaggtcttccaggccatgaaataccttggcgattacttgctaggcaatgatggtcatgaaggttggctgcggcacgaatcaacacaggagcctctcgagaccgagaacacgataccagagcttcgacggcgcagatgaggctcgcgcttgcctccaaaaacagaactcgaacctcaaatatgataattttgtacacttcagaaatgatagcataatcatggcgttgagcggttggtattactttgattttggcgcgcatatcacggtgtggtcagggctcgcatatgctcggttacagacacgggacgggtgaatatgttttcaccaaccaaaatagatagagatgccccaggcaataatatacatatcttgagccagagaagctttacacgaaccatctaatgcatcaggtgtatatggatatatgaccagttctctggtggataggggagggtatcgaacctgacagatgccggagacactaccaacccacaagcttttctcctgaccagccctgaccctggctttctgttttcttccgcaaatccatcttcgagaacgaaagccccatcagcgatatacactggcagcttcctcgttacatgtcctggatcatgtgccagcaggtcaagaccgccgaccaagtcaaaatgctcttagcgacgagcgccgtgacatagccagggagtctgcccttgggaccgtagttggtataggcatacgcgtaggcaaatcgcccagccacccactaccacacttggag

SEQ ID NO: 16639 - DNA, 450 bp, Muscodor strobelii
  misc_feature: SGI cDNA ID NO. 565542
  misc_feature: Encodes the peptide sequence at SEQ ID NO 16640
atgaccttcacactccaattgccaacggaatacccctacgtgatcgccgtagcgacctccacaatcttcgtcaacagcttacacaagatcctcacgtcgagggctcgggctgcctcaggtctgaaatatcccacgccctacgcgacacaagagcaagccgacaaggacccgaaagcctacaagttcaatctagcgcagcgcgcccacggcaactttggcgaaaactacaactcgttcatcatcccgctgttggtctccggactgcgctacccgacgctcgcttactggtctggtgccgcttgggtggctgggcgatttgcctacgcgtatgcctataccaactacggtcccaagggcagactccctggctatgtcacggcgctcgtcgctaagagcattttgacttggtcggcggtcttgacctgctggcacatgatccaggacatgtaa

SEQ ID NO: 16640 - protein, 149 aa, Muscodor strobelii
  misc_feature: SGI Peptide ID NO. 565542
  misc_feature (9)..(145): Pfam Id: PF01124 Pfam Desc: MAPEG family
  misc_feature (1)..(141): NCBI GI: 46110030 Blast Desc: FG01897.1 [Gibberella zeae PH-1]
  misc_feature (4)..(142): NCBI GI: 171692151 Blast Desc: protein product [Podospora anserina] gi|170946024|emb|CAP72825.1| protein product [Podospora anserina]
  misc_feature (4)..(141): NCBI GI: 116206618 Blast Desc: CHGG_02602 [Chaetomium globosum CBS 148.51] gi|88183199|gb|EAQ90667.1| CHGG_02602 [Chaetomium globosum CBS 148.51]
  misc_feature (4)..(145): NCBI GI: 145605718 Blast Desc: microsomal glutathione S-transferase 3, [Magnaporthe grisea 70-15] gi|145013524|gb|EDJ98165.1| microsomal glutathione S-transferase 3, [Magnaporthe grisea 70-15]
  misc_feature (1)..(120): NCBI GI: 85102858 Blast Desc: NCU01320 [Neurospora crassa OR74A] gi|11595590|emb|CAC18210.1| related to MICROSOMAL GLUTATHIONE S-TRANSFERASE 3 [Neurospora crassa] gi|28922951|gb|EAA32170.1|
  misc_feature (3)..(120): NCBI GI: 145246368 Blast Desc: An12g03580 [Aspergillus niger] gi|134080148|emb|CAK46129.1| protein product [Aspergillus niger]
  misc_feature (1)..(123): NCBI GI: 119192968 Blast Desc: CIMG_00861 [Coccidioides immitis RS]
  misc_feature (1)..(123): NCBI GI: 240105891 Blast Desc: MAPEG family protein [Coccidioides posadasii C735 delta SOWgp]
  misc_feature (4)..(146): NCBI GI: 189206672 Blast Desc: glutation S-transferase [Pyrenophora tritici-repentis Pt-1C-BFP] gi|187975763|gb|EDU42389.1| glutation S-transferase [Pyrenophora tritici-repentis Pt-1C-BFP]
  misc_feature (4)..(113): NCBI GI: 226281544 Blast Desc: conserved [Paracoccidioides brasiliensis Pb01]
  misc_feature (7)..(123): SWISSPROT Homolog: EC 2.5.1.18 Glutathione transferase
MTFTLQLPTEYPYVIAVATSTIFVNSLHKILTSRARAASGLKYPTPYATQEQADKDPKAYKFNLAQRAHGNFGENYNSFIIPLLVSGLRYPTLAYWSGAAWVAGRFAYAYAYTNYGPKGRLPGYVTALVAKSILTWSAVLTCWHMIQDM

SEQ ID NO: 16641 - DNA, 3654 bp, Muscodor strobelii
  misc_feature: SGI EST ID NO. CUFF.39399.1
  misc_feature: Variant of the nucleotide sequence at SEQ ID NO 16639
aagggaacagtgtcagtgtgagtttgggcggaattcctccgcaggcattatatcaggacacggagttccgaggtatgaataaatgttgtcctgacttcgtaaatcgtttcgataaagattggcatctcaaacgctggtttcatacacagcgtactcctgctagcccactattgattgaccagacttcccccaaccacaaatccaaaagctccccatcaaccaacgtcgcacaaaccaccatttcggaattgttaccaaagacacggatctctgatcactcaagatgaccttcacactccaattgccaacggaatacccgtaagtacacccaggtgtttggtcgagatgtgggtggtcgggatcccccttgcggccgacattgcacatgttgacaatagaccgtgaaaaagctacgtgatcgccgtagcgacctccacaatcttcgtcaacagcttacacaagatcctcacgtcgagggctcgggctgcctcaggtctgaaatatcccacgccctacgcgacacaagagcaagccgacaaggacccgaaagcctacaagttcaatctagcgcagcgcgcccacggcaactttggcgaaaactacaactcgttcatcatcccgctgttggtctccggactgcgctacccgacgctcgcttactggtctggtgccgcttgggtggctgggcgatttgcctacgcgtatgcctataccaactacggtcccaagggcagactccctggctatgtcacggcgctcgtcgctaagagcattttgacttggtcggcggtcttgacctgctggcacatgatccaggacatgtaacgaggaagctgccagtgtatatcgctgatggggctttcgttctcgaagatggatttgcggaagaaaacagaaagccagggtcagggctggtcaggagaaaagcttgtgggttggtagtgtctccggcatctgtcaggttcgataccctcccctatccaccagagaactggtcatatatccatatacacctgatgcattagatggttcgtgtaaagcttctctggctcaagatatgtatattattgcctggggcatctctatctattttggttggtgaaaacatattcacccgtcccgtgtctgtaaccgagcatatgcgagccctgaccacaccgtgatatgcgcgccaaaatcaaagtaataccaaccgctcaacgccatgattatgctatcatttctgaagtgtacaaaattatcatatttgaggttcgagttctgtttttggaggcaagcgcgagcctcatctgcgccgtcgaagctctggtatcgtgttctcggtctcgagaggctcctgtgttgattcgtgccgcagccaaccttcatgaccatcattgcctagcaagtaatcgccaaggtatttcatggcctggaagacctcctcgccggtgggtataatgtcgtcgctgggcagcaggaagccgtaactaccggtgtctcgcaacttgatctggtagctgtaatgcgcctggagctgatggaagacatagtcgatggcggatccgcctcgcgcctcagcacgccgagaacgctggttggagctagacgtggcagccccttcgcatgccgatgtgaccgtgtaggactcgccgttgacgagcctcatgtgtttggccagattcatggcgacctcggtgagcttctccaggttgggagggagatggtggcaggagtaggcgtaggggacgaggacctgctgggaataggagtgaagatcgagatagccgacgaagtgagtgccatgggccgtctcgttcttggcccagtccgccaagcgaagcgcctcgacggcctgaaagggctcgtcgccaccgtagctctgggagcagggctcggtctggtggtgtacggagtcccactgatagccgaaagcatggtcgaggtcgaagccggggcagaaggccatctttgtgctctggcgggacttccgccagagccgatctacctcccacgtgtacgcgtagccatccgggttcaggacgggcacgaagaccagatcgaagcgctcgaggatcttggcgaccatgggatcgcgcgcggccagatggatgaaggaccaggcgaggtagttggcggtgctcaccgagatccattcgcgggcgtgcatgccgccggtgacgaggatggcctcgcgcaggcggccgggcgagtcctcgtctggccgtgtgccgattcgcagggcggggatgtcgcgcccctcgtaggactggccgatgctgatcatgcggacctgggcggggaacatggactcgagcaggcgcatccagttgtccatggcagccaagggctggtacgagccgaagaagacatcggccagatcggactcggactggtcacgggcgagaagctcgccgacggacacacggccgccgacggggaatggactcgtcttggccggggcaggccggggggcggcggaggggtaggtggcggcgacggcagcggcgaggtcggagatgaggatggtgtggttgtcacgcatgtcggggggcagggcgcgggtcagagagggcacgcgacgggcggggagacggacgtcggcgtggctgtcggagaagtgccagaggtcgagcggcatgggggtcgacgaggcggcgcagcgcagtcttctgggctgccgtcgagacgttgagccgtatgacgacgtcgccctcgtagcgcttcagagactcgaggagccggggacgggcgggccagccaggggctgagggcggcgtcgttgcggatgggctcgggcgacaagatgcggcgccaccacgacacggtccaagacgaggtcggcgacggcgaggcgacggcagacgggagggtggccgaggcaggggggccccgtgggggatggcgcttgatggggaggcccggcagctgccaggccgcggcggactcaaggacgacgaggcataggcagagccaggcgacgagcgaagagggccgtggcgggcagatgggacttgaagccaacttcatggcgggcaacggcggtgtcaggccagcgccggcaagggagggcagctgtgggaatcaaatactagatgagcaacctgatcttctgcccctctatgctcatagaatacttgtcagttctattgtgaggcagagtgtgtggcccagctctgcagtgctttgccgtgggttgaagctatcgagggcctatgcgacactgctcaagataacgaagcaaaataagaggttgcctgattaggccctccaccaaaacccaccgccattggcagccaagagcagagcaagagcatcccgcctctgcccgcatacgaatcggtttagtacacttcgatccattcgatgctgctacgttccatacccgagtgcactggcgcctctcacggtttgctgggagtgcttgcccatgtcgaatatttaacctgtaaatcgatgccacggccgatggcaactcaccctggatggtgtgtagtagcaggcgaggtggaggaggcacgtgggcaacgtctggtcatgtttgaattcacaagatagacgttgcgaacttaggcagtggtacgggtgatagatatgctacacgaagttatactcattgggtgctcggacacctgcgcgatggacaggtcgtcgagccttgcagaggactcagct

SEQ ID NO: 16642 - DNA, 1155 bp, Muscodor strobelii
  misc_feature: SGI cDNA ID NO. 565543
  misc_feature: Encodes the peptide sequence at SEQ ID NO 16643
atggagtctctgcggacccagctcgccgaaatccaaggcgcactgaccgagcgagacaagaagtttcgtcaactacgtgccgaaaaacagcaagcagaggcagagtgggaagaagcgcgacaaaagttagaagcgcgcatccaattcctcgagaataggaatggaagcccatcacgagcacctccctcacctgtctgcgatcaactagctagtccagcggcttgcggggctcgcatttctggagtggttgcagcgcctagtgacagcgcattaagaggggatgatggagcgatgaccgggccagataccgttatcatgtctcgtcagggcgttctgcaggcagagacgaagtatgccgaagtaaaaaaagagctgcttgcgatgactaagctttacacagatctcaaggctgaagtagccgaatggaacccagagaatgatggcgaggtaaatgatgacgaagtcataagacgatggaatatgcttcgagagcaaattcgcactctgaccgcagaccgtctcaaccggccgatcccagccaagctcatttctgacaagtgcaaagaggagtttaaaacactctcgcctcactggaagacctacacgagcacatcggatctcgtacgctacttattccaggcgctgatctggagataccttctacgactcttcgaagttccctgtcgctcatgtgggcgcgacatcagcaatagactgcaacagctagccacgactcttgtgcccaagctctccgagaacaagtaccagaagtggcgcatacacacatcatctcttattcatgaaacatatcccatcgatgcagacattgtcgacgagatgacaacgaagattttccaggcgatcataccattgatgccaaatatagacaatatgattatcagagacgcgctacactctatcgtcaagacatcgagcgagatgagtgcactattagaccgaacgcaatttagagtattaatgcacagcgaacctggaagcatcattactcactcgttcccctacgtggaagacttaatggacatcagaggaaaattgggtacgctaggaatagtggacttgatgattacacctagtcttttgaagaagaagagtaattattctgtgtctgtcaaggcggaagtgatctccggttga

SEQ ID NO: 16643 - protein, 384 aa, Muscodor strobelii
  misc_feature: SGI Peptide ID NO. 565543
MESLRTQLAEIQGALTERDKKFRQLRAEKQQAEAEWEEARQKLEARIQFLENRNGSPSRAPPSPVCDQLASPAACGARISGVVAAPSDSALRGDDGAMTGPDTVIMSRQGVLQAETKYAEVKKELLAMTKLYTDLKAEVAEWNPENDGEVNDDEVIRRWNMLREQIRTLTADRLNRPIPAKLISDKCKEEFKTLSPHWKTYTSTSDLVRYLFQALIWRYLLRLFEVPCRSCGRDISNRLQQLATTLVPKLSENKYQKWRIHTSSLIHETYPIDADIVDEMTTKIFQAIIPLMPNIDNMIIRDALHSIVKTSSEMSALLDRTQFRVLMHSEPGSIITHSFPYVEDLMDIRGKLGTLGIVDLMITPSLLKKKSNYSVSVKAEVISG

SEQ ID NO: 16644 - DNA, 602 bp, Muscodor strobelii
  misc_feature: SGI EST ID NO. CUFF.39307.0
  misc_feature: Variant of the nucleotide sequence at SEQ ID NO 16642
ccgttatcatgtctcgtcagggcgttctgcaggcagagacgaagtatgccgaagtaaaaaaagagctgcttgcgatgactaagctttacacagatctcaaggctgaagtagccgaatggaacccagagaatgatggcgaggtaaatgatgacgaagtcataagacgatggaatatgcttcgagagcaaattcgcactctgaccgcagaccgtctcaaccggccgatcccagccaagctcatttctgacaagtgcaaagaggagtttaaaacactctcgcctcactggaagacctacacgagcacatcggatctcgtacgctacttattccaggcgctgatctggagataccttctacgactcttcgaagttccctgtcgctcatgtgggcgcgacatcagcaatagactgcaacagctagccacgactcttgtgcccaagctctccgagaacaagtaccagaagtggcgcatacacacatcatctcttattcatgaaacatatcccatcgatgcagacattgtcgacgagatgacaacgaagattttccaggcgatcataccattgatgccaaatatagacaatatgattatcagagacgcg

SEQ ID NO: 16645 - DNA, 1380 bp, Muscodor strobelii
  misc_feature: SGI cDNA ID NO. 565544
  misc_feature: Encodes the peptide sequence at SEQ ID NO 16646
atggcaatcaccaactccgagctcatcttcccatcgcaagcaagccataacttctcacatatcctaaatgatctaaagaaagcgaacttcactatatcaaatcgcctacactccataaggcaagatgcagattttgttctcgaggttgcccacgcacttggtcgccctcttgtagcaaatgagcgatgcggtagttggtatatccacccaaaagataaagccgcctctgcatactttaagagcactgatggtcacatgaaccaatggagtttcagttccaggcggctgaacttcaacctcctatctatcatcggcgagaatgacgggtgtataattgttgactcgactcgaagagggaagcagatgcccgatgctctgagcaagacggtgcctatttggtcctgcgttatcaacagagcattatttcctgaacgtatacaatgtcacattttacatacacctccgagcgtggtctcaagatccgaacactctcaaattgaggctcgcattccggaattcgtggcctcgataaaacgccttgatattgatgctgtggccctgcgaaaacgaatatccaagcctctacgtccgatgtgggtgacgcaggaatctctactcgcgacgacagagcacatcttcgacgagtttcatcctgtcatatgttgcactagctcacaacgagtgcccgagggtgagatgggcggaagtaggtatgtgatctcccctatacaaggtgcaggtgacgacactgagaactgggccctcggattgagcgcaccattattctgggctcacgaagaaactctgctgtcgactgcggagactgatctggcagacctcattcgctcgttagttgagagtcagaacatgatcgtacagaccaatacccctattcgcgtcgctccaagcatatcagtcggtcaaactccagtgacagtgcaaccttcaccaacttgcttggtcaagtttgttccgcagaataccgaccaaaatatgtgggccaaaaatgcaaccgagatggaggtcggtatcggcaagcagaaaactgcaagtcggagtctgcgggtagctttaccttcgatatgcgagtttgtccgtcagtctctcgacaagagcatattgcccagagacgagaagaccacaatgcaacagcatgttctcattacctgtgaaacgggaaaagatctatgtgtaggcgtcgccctcgcacttttgtgcaagctctttgacgaggggggttactacgatccgcgagaaatcggatactctcctaacaagagcatcatcaaaacgaagctcgggcgcataatgatggcgtatcccgaggccaatccttcgcggtcgacgctgcaaagcgtgaatagctacctcatgggttga

SEQ ID NO: 16646 - protein, 459 aa, Muscodor strobelii
  misc_feature: SGI Peptide ID NO. 565544
  misc_feature (2)..(458): Pfam Id: PF04179 Pfam Desc: Initiator tRNA phosphoribosyl transferase
  misc_feature (2)..(285): Pfam Id: PF04179 Pfam Desc: Initiator tRNA phosphoribosyl transferase
  misc_feature (319)..(458): Pfam Id: PF04179 Pfam Desc: Initiator tRNA phosphoribosyl transferase
  misc_feature (4)..(458): NCBI GI: 171693651 Blast Desc: protein product [Podospora anserina] gi|170946774|emb|CAP73578.1| protein product [Podospora anserina]
  misc_feature (3)..(458): NCBI GI: 39946094 Blast Desc: MGG_08167 [Magnaporthe grisea 70-15] gi|145019423|gb|EDK03651.1| MGG_08167 [Magnaporthe grisea 70-15]
  misc_feature (2)..(458): NCBI GI: 85103370 Blast Desc: NCU03730 [Neurospora crassa OR74A] gi|28923052|gb|EAA32270.1| conserved [Neurospora crassa OR74A]
  misc_feature (2)..(433): NCBI GI: 16944492 Blast Desc: related to 2'-O-ribosyl phosphate transferase RIT1 [Neurospora crassa]
  misc_feature (6)..(458): NCBI GI: 46121505 Blast Desc: FG05131.1 [Gibberella zeae PH-1]
  misc_feature (6)..(458): NCBI GI: 256731063 Blast Desc: NECHADRAFT_96314 [Nectria haematococca mpVI 77-13-4]
  misc_feature (1)..(458): NCBI GI: 154320021 Blast Desc: BC1G_01991 [Botryotinia fuckeliana B05.10] gi|150854730|gb|EDN29922.1| BC1G_01991 [Botryotinia fuckeliana B05.10]
  misc_feature (3)..(458): NCBI GI: 145235375 Blast Desc: An03g04550 [Aspergillus niger] gi|134058018|emb|CAK38247.1| protein product [Aspergillus niger]
  misc_feature (6)..(458): NCBI GI: 225557916 Blast Desc: tRNA a64-2'-O-ribosylphosphate transferase [Ajellomyces capsulatus G186AR]
  misc_feature (6)..(458): NCBI GI: 154271548 Blast Desc: conserved [Ajellomyces capsulatus NAm1] gi|150409297|gb|EDN04747.1| conserved [Ajellomyces capsulatus NAm1]
MAITNSELIFPSQASHNFSHILNDLKKANFTISNRLHSIRQDADFVLEVAHALGRPLVANERCGSWYIHPKDKAASAYFKSTDGHMNQWSFSSRRLNFNLLSIIGENDGCIIVDSTRRGKQMPDALSKTVPIWSCVINRALFPERIQCHILHTPPSVVSRSEHSQIEARIPEFVASIKRLDIDAVALRKRISKPLRPMWVTQESLLATTEHIFDEFHPVICCTSSQRVPEGEMGGSRYVISPIQGAGDDTENWALGLSAPLFWAHEETLLSTAETDLADLIRSLVESQNMIVQTNTPIRVAPSISVGQTPVTVQPSPTCLVKFVPQNTDQNMWAKNATEMEVGIGKQKTASRSLRVALPSICEFVRQSLDKSILPRDEKTTMQQHVLITCETGKDLCVGVALALLCKLFDEGGYYDPREIGYSPNKSIIKTKLGRIMMAYPEANPSRSTLQSVNSYLMG

SEQ ID NO: 16647 - DNA, 1671 bp, Muscodor strobelii
  misc_feature: SGI EST ID NO. CUFF.39319.0
  misc_feature: Variant of the nucleotide sequence at SEQ ID NO 16645
tgactgccagctggtctattctagcttcatgctctatcgatcacagacattgatgggtacaggtgtccaacatttagaccttcacccaatacttttcgaacctggagactgaaaattcaagttggtcgtcgctcagagtgctcccgggttacgatctacctcgtcgtataagtgcgcggcctccatggcaatcaccaactccgagctcatcttcccatcgcaagcaagccataacttctcacatatcctaaatgatctaaagaaagcgaacttcactatatcaaatcgcctacactccataaggcaagatgcagattttgttctcgaggttgcccacgcacttggtcgccctcttgtagcaaatgagcgatgcggtagttggtatatccacccaaaagataaagccgcctctgcatactttaagagcactgatggtcacatgaaccaatggagtttcagttccaggcggctgaacttcaacctcctatctatcatcggcgagaatgacgggtgtataattgttgactcgactcgaagagggaagcagatgcccgatgctctgagcaagacggtgcctatttggtcctgcgttatcaacagagcattatttcctgaacgtatacaatgtcacattttacatacacctccgagcgtggtctcaagatccgaacactctcaaattgaggctcgcattccggaattcgtggcctcgataaaacgccttgatattgatgctgtggccctgcgaaaacgaatatccaagcctctacgtccgatgtgggtgacgcaggaatctctactcgcgacgacagagcacatcttcgacgagtttcatcctgtcatatgttgcactagctcacaacgagtgcccgagggtgagatgggcggaagtagatacaaggtgcaggtgacgacactgagaactgggccctcggattgagcgcaccattattctgggctcacgaagaaactctgctgtcgactgcggagactgatctggcagacctcattcgctcgttagttgagagtcagaacatgatcgtacagaccaatacccctattcgcgtcgctccaagcatatcagtcggtcaaactccagtgacagtgcaaccttcaccaacttgcttggtcaagtttgttccgcagaataccgaccaaaatatgtgggccaaaaatgcaaccgagatggaggtcggtatcggcaagcagaaaactgcaagtcggagtctgcgggtagctttaccttcgatatgcgagtttgtccgtcagtctctcgacaagagcatattgcccagagacgagaagaccacaatgcaacagcatgttctcattacctgtgaaacgggaaaagatctatgtgtaggcgtcgccctcgcacttttgtgcaagctctttgacgaggggggttactacgatccgcgagaaatcggatactctcctaacaagagcatcatcaaaacgaagctcgggcgcataatgatggcgtatcccgaggccaatccttcgcggtcgacgctgcaaagcgtgaatagctacctcatgggttgaaagactcgcgatggtattctaaaatgcgttctacttgattctgatacccgacgtctgagtcatgctttgtatatatgaagcagaagagcaagcttagcagaaagaattgacattgtaagcaag

SEQ ID NO: 16648 - DNA, 2196 bp, Muscodor strobelii
  misc_feature: SGI cDNA ID NO. 565545
  misc_feature: Encodes the peptide sequence at SEQ ID NO 16649
atggggtcttctgatttgcactctaccaaggccaaccttcccccgtcctacgacgccagccaggcacaaccctcaacctcggatcatccgtttcaaggcctgtataatgatcctcgcacatcatctacacagtctctaacgccttctctgcctccttatgaggagctcgagaggcgaaagctgttagtcatctacattcatggcttcatgggcaacgacacctcctttcagtctttcccggctcatgtccataagtaccttaaacttgccctgttcgactcccacgtcatccattccaagatatatcctaggtacaagacatacaagtccatagagattgctcgcgacaacttcagcaaatggctcgagccccatgagtctcctaacaccgatgtaatcctcatcggccactccatgggaggccttctggccgccgatgttgttctgatgcaatctccggatcaaggacatcacggttacttcaagcatcggattctgggccaactggccctagacgctcctttgctcggcatgcatccgggcattgttgtgtctggaatctcgagcctattccgaaagaatgagccaccgaagcgggctggtgaacctagcacactcgctccacagagtccagataccactggccttccttctcccagcttatccacgttttcagtgccatctaccctctctgaaacatcttcatccttacctcaggttccagccccgtttgcccgaccggcgcccacttttgatgctaactttgattccccattccctaacgatgttcgcatccaagagaggagttggtggaagaatgttgtccacttcgtgaaaaagcacaattcagagggattgattgacgccgcaaccaagcatgtcatgtcgcacatggagttcggtagctccttgcttgatatcaactttcttaaaactcgttacgatgctgttcgtagactggaggatatggacgacttgagaaatcatggcttcctccatgtgcctccccaggttcgcttcgtgcaatattatacaatatgtaacggatacccaaagaaacccaaagaacaggattctaaacggaatgtaacatctacgtcagacgcagttatcatgagcgaacagtcttccatgtatccgtccttgactgatcacgcaccagctcatcatgtatccgaggaaacaacagttctagataccgtttcgattagctcatctcaaagcagaaggtcaagcttagagcttcttagtccggagcctattcttgatcaagacgagtccattacagccgaccattccgctcactccgaacggaaagaggaaacgaagtcgaatgatagccttacgacagttcaacgggaagaatctcctataggctcgcctccatcgacggaccttggagcagaaataaacccaaaaacagcggtatcggctgatgagccagctctccctgaacttgacttcgatcttccggcggtgcccgaattaccaccaaagccagagccacctaatttagaactatactcggataaggattccagaaagcaagccgagaaggagggcaagcgagcacagaaagcgtacgatcaagcagtcaaggaccgccaaaaagcaattaaggagcgagagaagatcgttgaaaagcgtcggaagaagagagtgcaagaagaagagaggaaggcaaaagaggagcaaaggagagccaaagaggaagaaaagacaaggaagaaggacgaagccgcagcggcagcagctcttacaagcccgactcccgcgactgtgcttgagtcgaatatcgcgacagcgactctggaaaaggacacgccggagaagcaaaagctcttgatacccacgaccgagatgtcggagctctcacttgtcgggtcgccacggaagtctcttgagtccgagataaacccagagaaagacatgaaaggtgcagacagtacgacgggcaagaagaaggaggagaagaggaaggaacgcaagttttgcaatctagccaaagtgaatggccaggttgattctaagtggatacaggttttcatgaaggatatggatgaagtcgctgctcatactggtcttttctttgccggtgagcattacgacaagctcgttggtgacgttggaaacactatcactgagtgggttcaagcggatatgaccaaacgcgctatagtaatgggagtggactga

SEQ ID NO: 16649 - protein, 731 aa, Muscodor strobelii
  misc_feature: SGI Peptide ID NO. 565545
  misc_feature (125)..(144): Pfam Id: PF07819 Pfam Desc: PGAP1-like protein
  misc_feature (1)..(727): NCBI GI: 261351702 Blast Desc: conserved [Verticillium albo-atrum VaMs.102]
  misc_feature (24)..(726): NCBI GI: 46124859 Blast Desc: FG06807.1 [Gibberella zeae PH-1]
  misc_feature (37)..(730): NCBI GI: 85081606 Blast Desc: NCU01476 [Neurospora crassa OR74A] gi|28917829|gb|EAA27517.1| [Neurospora crassa OR74A] gi|38566842|emb|CAE76148.1| [Neurospora crassa]
  misc_feature (13)..(727): NCBI GI: 154319911 Blast Desc: BC1G_01936 [Botryotinia fuckeliana B05.10] gi|150854675|gb|EDN29867.1| BC1G_01936 [Botryotinia fuckeliana B05.10]
  misc_feature (37)..(573): NCBI GI: 256731000 Blast Desc: NECHADRAFT_101631 [Nectria haematococca mpVI 77-13-4]
  misc_feature (7)..(729): NCBI GI: 156065079 Blast Desc: SS1G_00550 [Sclerotinia sclerotiorum 1980] gi|154691409|gb|EDN91147.1| SS1G_00550 [Sclerotinia sclerotiorum 1980]
  misc_feature (8)..(399): NCBI GI: 171692687 Blast Desc: protein product [Podospora anserina] gi|170946292|emb|CAP73093.1| protein product [Podospora anserina]
  misc_feature (37)..(726): NCBI GI: 226278500 Blast Desc: conserved [Paracoccidioides brasiliensis Pb01]
  misc_feature (37)..(726): NCBI GI: 225684067 Blast Desc: conserved [Paracoccidioides brasiliensis Pb03]
  misc_feature (32)..(339): NCBI GI: 116199355 Blast Desc: CHGG_07833 [Chaetomium globosum CBS 148.51] gi|88179112|gb|EAQ86580.1| CHGG_07833 [Chaetomium globosum CBS 148.51]
MGSSDLHSTKANLPPSYDASQAQPSTSDHPFQGLYNDPRTSSTQSLTPSLPPYEELERRKLLVIYIHGFMGNDTSFQSFPAHVHKYLKLALFDSHVIHSKIYPRYKTYKSIEIARDNFSKWLEPHESPNTDVILIGHSMGGLLAADVVLMQSPDQGHHGYFKHRILGQLALDAPLLGMHPGIVVSGISSLFRKNEPPKRAGEPSTLAPQSPDTTGLPSPSLSTFSVPSTLSETSSSLPQVPAPFARPAPTFDANFDSPFPNDVRIQERSWWKNVVHFVKKHNSEGLIDAATKHVMSHMEFGSSLLDINFLKTRYDAVRRLEDMDDLRNHGFLHVPPQVRFVQYYTICNGYPKKPKEQDSKRNVTSTSDAVIMSEQSSMYPSLTDHAPAHHVSEETTVLDTVSISSSQSRRSSLELLSPEPILDQDESITADHSAHSERKEETKSNDSLTTVQREESPIGSPPSTDLGAEINPKTAVSADEPALPELDFDLPAVPELPPKPEPPNLELYSDKDSRKQAEKEGKRAQKAYDQAVKDRQKAIKEREKIVEKRRKKRVQEEERKAKEEQRRAKEEEKTRKKDEAAAAAALTSPTPATVLESNIATATLEKDTPEKQKLLIPTTEMSELSLVGSPRKSLESEINPEKDMKGADSTTGKKKEEKRKERKFCNLAKVNGQVDSKWIQVFMKDMDEVAAHTGLFFAGEHYDKLVGDVGNTITEWVQADMTKRAIVMGVD

SEQ ID NO: 16650 - DNA, 7995 bp, Muscodor strobelii
  misc_feature: SGI EST ID NO. CUFF.39591.0
  misc_feature: Variant of the nucleotide sequence at SEQ ID NO 16648
taagaccaaggcaactggatcaggagacgcgttgaaatcgaagctgcagacatgcagaaatcttcgggctggctccaatgtgtctctactacctaattgatcaggctgcctgtgctcaggtgtcaggtatgtttgcagggagaggtgttgttgagatgagatctctctgatttcaatagcagtctaattgcggttcaatatgtctcagtcatcgcaactaatcgagtggtgaaagggagagcgggcaggcaggcaatatgtagatgtacctggtaacaatgaaacgttgacaccacacactgggctgtgacctgttacggcctagaaaggctgttgaatagcagccaggcgagccaggcccagcagaggtgtagtggggagccgtccaccgtttctttgcagcgagaggctttctacccgcaagttcctccgtcatccagtcaaggcaggcgacccgccccagggcctttgcacccaggcctgctgccaatctcagcaccagccgactccattcttccacaccaccacaacatcatcatcccccgacgacaccacccgaccgaccgccctcagacgtcgccctttccgctcgcgacgactggagcacgccaccacgcacagcgccgccgcatcatatcgccagcgagcgcgcatctgcaccatctcggcgccccctcgacaccagcgaccgccttggcactcgggcctgcatgctgctggactcgggggcctctcgaccaacgaaccggtcgccctgacggcgcggcccgccatcgacaatcctcctcccgtttctccgctctgctctcttccctcttctacgctgcggccctcacatcttggggactcacaagtgactcgcccgagagctcgccgtcgctacgccacgtctcgaccgccgcaccgtctttgtccgccgcacgagaggcatttccaccctcgcgtccgccgcggcttcccgaccctcccctcctctgcgcatcgacgtcttgtccgtcattccatcggtggcctcgcattgctcgcccgtcggccccttcgagcctcacctgcttgccgtccgctgcagcgaccatgtcctttcatccccagacgccccagagcccttcccagttctctccgagtgtgatggatcagggttcgagcatcaacacatccatgacctccatcgccacctccctgcccacccccgcccacagcgtgaatggctctcacatgccttccgacgggtcacacgatactagcatgaccgacgtctcctccaacaagcgcaagaactcgttcgacgacgccggtgctcgggaccacaagaaagccctccacgaggatccccgcaagattggcattcaagatctccatctggacgtcggcgagaagctccttctttgcagaactccccacttcatctcgtccccacgcatgtccgatgacttgtttgagaagtttggcctgacgggcatcgccgccgacgtcgcccgcaccaagccagatggaagcaagaatgcgctgcgcaagacgtacaagggtcagatcaagaccctcggtctgagtggacacttcgatgtggtcaagaaggatccctcgcccctcatggagctcctgggcgttgccgaggaagactggcagaaccgcgtcgtctccggaaaggacgtcgcgcatggcctcaccctctcacaatctacgatggccaaggccatgaccatggccaagggacagataccgaagacggtatgggacagctcagtgctgggggatctggcgcctggtcaagcgcccaagaggaaccaggaccagccttcgcggccgacggcgcccggtactccgaacctgtcgacaggtgcaggtgcgacctcgaaagcaggcaagcccgtcgccaaccaggtggaccgcgcgcgacgattgggcaaaaagagaagctaccaggatagcagcttcgaaggctatggtgaaggatacgaggacgacaccggaggatactccacaggtgacggtgatgaccggtcgtccaagctcaagaggagaaaacagaatccctagcggcggtaatgcctcatagagtaagaggcgacgaggaaaaatgatacccacgtaagcaggccgtcgcgatccacggcagacgtgtaaccgagttactccggcaggaaaggacgggaactaggcgtgaccagcatgctcttcctagcctctgaataggttatggctcttggatctggactgcattgtgtttttgtatgggttcagcgtggcgccgggcgtttgtttgagttttattttatttacttatttatttttccgttcgaggctggtatatttctcagtccgctacggcacaaggtgtctgcctagacaagaccgaaaaagacgaaagggcagagacggggatcattcatatcagatatgaacatacacaagcagatgcctgtcgaatagcagctacactatgaaaaaatgagtattaataccattgccgctatccacagtgagtcttcgttgtggtcacgagcagatatgacagctcagcctgcgcctgtctccgaagaaagacattacaatgcaaattcatgaagtggtactaactgatttttgacgtgaaaatatattcatgttgaattatacaatatcttaactatgtttaatgttgttactaacccaagatctaaatcgtcttgagttgatgctgcagtcttacacgacgcgggaggcaacgcatccttcatcatcaaagagcttggtatcttataaatcatatagccatatcgcagagcgatcggagatggggccaccagtcatcctgcgagcgcaactccacgtcggctctccagaagagatagcggagctcctcccattccgcctcgttgaatgtctccggggcggcccagtcctcgctcggtctcggcttgggagggccgcccgaaatggacacggtgcgcagatcggggaactcttcacttatggcgcactcggctagatgtctcacggctcggaacatgtgccgcgagacgttgaccagcgtcagcgcgacgagagatgtgggcagcttgtccgctagtatgcccggatgcatggcgggatcgtggaccgggtccgggaggtcactgcgcgtgaatagggcgcccgggttcagagccacggtcctgagcacggggaagtcccgtagcgtctctatgccctggtggagctcccgctgcccgctgcgggcgaaatggaagatttcgaggcgttccagcgtctccctcgcgggctccagagcgacgacgatctcggcagggagccggtccatggcccagtgggggccgaaagaaatatacgtgaagtgctcaagccgtatgcaattcctgcagagaaacagaccctcgcggtggaagcggctctcgatgatgcgcagccgccttagattccgcaggtccagggcataatctgtagtggtgctgtagcatctcttcaaagagaggtactcgaggttcggggcgtagcggatgaggtcctggacataggagaagttgaagcgccgggagatgctctcgtcctcgatctccagttcggagagggtccacagacggttcgagggcgccttggcccagatggagagacagtcgctaaagcctgacgaggacgaagggaccctcagcttcagcgagcggaggttgggcagcgagcagacgaggagctggtgcatgaagctgctggtgctggagatggtccacagggcgcccgagctcatcctgatgttggccgggggcacgccgaggcggcgggcgacgtcgccgatgagggccgagtcgtactgcgagtagcggtcgaacagatcctcgcggttgtagtgcttggtgaaggccgaggtggtgcagttcctagcggcacgggggcagtcagtgagcaggggcggcgacaacgcgcagcgggcagcgggcagcgtgcggcatacgtacatctcagtgacgatctcggccaggtgggggtggttggtgacggtgcggatgaaggcggacaggctctggtactgcagcgacacgccgtcgtcgttgagggcgaaggtctcgaagcggcggtacagcagggggatggtcagctctctgaagaacttgcaggtccgcccgacgcgggcgatggtggccttgtcgcggatgacgtcgagcacgagctgccagatctcggtgggcatgtccatcttggcgggtgtgactgtcgatatcgcgtcatctgcgaggagcaggcccccggctacatagctgtgcgtcgccctgcaccgttgccccacgatgcacggcagagcgggaagccgcgacggcagcgatgggtttcggcggcggaggatcagcggcgctgggtgtggatgacgacggaagcgatgacgacggcgatggcgatggcgagggcgagggcaagagcagcgagcattcggggatcgcggtgagtggaggaaacagcatcacgcaagcggtggcagttgtccgggcagtggtcggggatagatagatacctggtcgcgatatgcagtcatcgtctggggacagatctagatatataaatatctcgagccatccccgggccatccatcgtcgtcctcggctgctgccatgctctgcctctcgcttggtctcgcttggtctcagactcggctccgtaagcggcgccccgccagatgcgcacacgcccatcattacataggtacgtaggaccacatgctttcaatataggtcagatagtcggcttggacgtgtaccagctcgatggttctcgaataccgcctacatgtaggcactataattgcgctaccagatatacggcacagatatccacggcattggtaaatgtatcggaccaactcatctaatcaattcgtcgtggtacttgtacatccgactggttggactgtcctagtgaagccactacctgatatgggagacaaactggagaaagcacatgcaatgaataacgtgccccgctacacgtggattgtacctatggtagtactacccgccttattgaggtgctgtcactggctacacgtaagtctaggaggcctcgaccatcacccaacaacacgatacggtacgtctcaacacctctacagcaaacaaccatgtactaccatcatcgtgtctattttcggtgaatttcaacagatgtatctgcatactcatgcagagttgtatctgaatttatccatggacttggatgttgcaatagattttatgatacttgagtgaacctcaatcatttatgcattccgcgcgcatgagctcagctacatgaccaacatctcaactgcgtatctcatgctgtctcgcctccttcgcagactcgcgataaacttataacctaaatattgcagttctagagttctcatcgattcttatcgcttctgccatcctcgacggctccatcgaggggtaacaatggggtcttctgatttgcactctaccaaggccaaccttcccccgtcctacgacgccagccaggcacaaccctcaacctcggatcatccgtttcaaggcctgtataatgatcctcgcacatcatctacacagtctctaacgccttctctgcctccttatgaggagctcgagaggcgaaagctgttagtcatctacattcatggcttcatgggcaacgacacctcctttcagtctttcccggctcatgtccataagtaccttaaacttgccctgttcgactcccacgtcatccattccaagatatatcctaggtacaagacatacaagtccatagagattgctcgcgacaacttcagcaaatggctcgagccccatgagtctcctaacaccgatgtaatcctcatcggccactccatgggaggccttctggccgccgatgttgttctgatgcaatctccggatcaaggacatcacggttacttcaagcatcggattctgggccaactggccctagacgctcctttgctcggcatgcatccgggcattgttgtgtctggaatctcgagcctattccgaaagaatgagccaccgaagcgggctggtgaacctagcacactcgctccacagagtccagataccactggccttccttctcccagcttatccacgttttcagtgccatctaccctctctgaaacatcttcatccttacctcaggttccagccccgtttgcccgaccggcgcccacttttgatgctaactttgattccccattccctaacgatgttcgcatccaagagaggagttggtggaagaatgttgtccacttcgtgaaaaagcacaattcagagggattgattgacgccgcaaccaagcatgtcatgtcgcacatggagttcggtagctccttgcttgatatcaactttcttaaaactcgttacgatgctgttcgtagactggaggatatggacgacttgagaaatcatggcttcctccatgtgcctccccaggttcgcttcgtgcaatattatacaatatgtaacggatacccaaagaaacccaaagaacaggattctaaacggaatgtaacatctacgtcagacgcagttatcatgagcgaacagtcttccatgtatccgtccttgactgatcacgcaccagctcatcatgtatccgaggaaacaacagttctagataccgtttcgattagctcatctcaaagcagaaggtcaagcttagagcttcttagtccggagcctattcttgatcaagacgagtccattacagccgaccattccgctcactccgaacggaaagaggaaacgaagtcgaatgatagccttacgacagttcaacgggaagaatctcctataggctcgcctccatcgacggaccttggagcagaaataaacccaaaaacagcggtatcggctgatgagccagctctccctgaacttgacttcgatcttccggcggtgcccgaattaccaccaaagccagagccacctaatttagaactatactcggataaggattccagaaagcaagccgagaaggagggcaagcgagcacagaaagcgtacgatcaagcagtcaaggaccgccaaaaagcaattaaggagcgagagaagatcgttgaaaagcgtcggaagaagagagtgcaagaagaagagaggaaggcaaaagaggagcaaaggagagccaaagaggaagaaaagacaaggaagaaggacgaagccgcagcggcagcagctcttacaagcccgactcccgcgactgtgcttgagtcgaatatcgcgacagcgactctggaaaaggacacgccggagaagcaaaagctcttgatacccacgaccgagatgtcggagctctcacttgtcgggtcgccacggaagtctcttgagtccgagataaacccagagaaagacatgaaaggtgcagacagtacgacgggcaagaagaaggaggagaagaggaaggaacgcaagttttgcaatctagccaaagtgaatggccaggttgattctaagtggatacaggttttcatgaaggatatggatgaagtcgctgctcatactggtcttttctttgccggtgagcattacgacaagctcgttggtgacgttggaaacactatcactgagtgggttcaagcggatatgaccaaacgcgctatagtaatgggagtggactgagcgtgggcaattacggtcttaatttcatgtgtcggaactctatatgtagagtcgtgatgaacttgaccgggctacgtacaagtggattatgtgattcgtgtgacatttgctcgtcaaagaggcgagacgaagtatcagcaagaacggaagcgagcatatcaatcgatgcttaatagtcggaagtcaatatcgactccgtttcccgccttgtcatcagtccatatatgatagatgacactgacactggatgattcgatgcagcctccggatagtagcattcgactaagccgtgtcgaaatttctcaaaatactacgtgccatgcgccgaaccttctgaccttcaataggtatccgctcatccaagatttatgaaatcacatgtcattaaacaggactcgac

SEQ ID NO: 16651 - DNA, 336 bp, Muscodor strobelii
  misc_feature: SGI cDNA ID NO. 565546
  misc_feature: Encodes the peptide sequence at SEQ ID NO 16652
atgtcggagctctcacttgtcgggtcgccacggaagtctcttgagtccgagataaacccagagaaagacatgaaaggtgcagacagtacgacgggcaagaagaaggaggagaagaggaaggaacgcaagttttgcaatctagccaaagtgaatggccaggttgattctaagtggatacaggttttcatgaaggatatggatgaagtcgctgctcatactggtcttttctttgccggtgagcattacgacaagctcgttggtgacgttggaaacactatcactgagtgggttcaagcggatatgaccaaacgcgctatagtaatgggagtggactga

SEQ ID NO: 16652 - protein, 111 aa, Muscodor strobelii
  misc_feature: SGI Peptide ID NO. 565546
  misc_feature (34)..(106): NCBI GI: 46124859 Blast Desc: FG06807.1 [Gibberella zeae PH-1]
  misc_feature (39)..(111): NCBI GI: 256731000 Blast Desc: NECHADRAFT_101631 [Nectria haematococca mpVI 77-13-4]
  misc_feature (39)..(110): NCBI GI: 85081606 Blast Desc: NCU01476 [Neurospora crassa OR74A] gi|28917829|gb|EAA27517.1| [Neurospora crassa OR74A] gi|38566842|emb|CAE76148.1| [Neurospora crassa]
  misc_feature (11)..(107): NCBI GI: 154319911 Blast Desc: BC1G_01936 [Botryotinia fuckeliana B05.10] gi|150854675|gb|EDN29867.1| BC1G_01936 [Botryotinia fuckeliana B05.10]
  misc_feature (40)..(107): NCBI GI: 261351702 Blast Desc: conserved [Verticillium albo-atrum VaMs.102]
  misc_feature (27)..(98): NCBI GI: 189188288 Blast Desc: conserved [Pyrenophora tritici-repentis Pt-1C-BFP] gi|187972089|gb|EDU39588.1| conserved [Pyrenophora tritici-repentis Pt-1C-BFP]
  misc_feature (44)..(105): NCBI GI: 169617009 Blast Desc: SNOG_11680 [Phaeosphaeria nodorum SN15] gi|160703313|gb|EAT80724.2| SNOG_11680 [Phaeosphaeria nodorum SN15]
  misc_feature (44)..(109): NCBI GI: 156065079 Blast Desc: SS1G_00550 [Sclerotinia sclerotiorum 1980] gi|154691409|gb|EDN91147.1| SS1G_00550 [Sclerotinia sclerotiorum 1980]
  misc_feature (35)..(109): NCBI GI: 116199355 Blast Desc: CHGG_07833 [Chaetomium globosum CBS 148.51] gi|88179112|gb|EAQ86580.1| CHGG_07833 [Chaetomium globosum CBS 148.51]
  misc_feature (44)..(109): NCBI GI: 39972289 Blast Desc: MGG_07446 [Magnaporthe grisea 70-15] gi|145016632|gb|EDK01062.1| MGG_07446 [Magnaporthe grisea 70-15]
MSELSLVGSPRKSLESEINPEKDMKGADSTTGKKKEEKRKERKFCNLAKVNGQVDSKWIQVFMKDMDEVAAHTGLFFAGEHYDKLVGDVGNTITEWVQADMTKRAIVMGVD

SEQ ID NO: 16653 - DNA, 7995 bp, Muscodor strobelii; identical to SEQ ID NO: 16650
  misc_feature: SGI EST ID NO. CUFF.39591.0
  misc_feature: Variant of the nucleotide sequence at SEQ ID NO 16651

SEQ ID NO: 16654 - DNA, 978 bp, Muscodor strobelii
  misc_feature: SGI cDNA ID NO. 565547
  misc_feature: Encodes the peptide sequence at SEQ ID NO 16655
atgagctcgggcgccctgtggaccatctccagcaccagcagcttcatgcaccagctcctcgtctgctcgctgcccaacctccgctcgctgaagctgagggtcccttcgtcctcgtcaggctttagcgactgtctctccatctgggccaaggcgccctcgaaccgtctgtggaccctctccgaactggagatcgaggacgagagcatctcccggcgcttcaacttctcctatgtccaggacctcatccgctacgccccgaacctcgagtacctctctttgaagagatgctacagcaccactacagattatgccctggacctgcggaatctaaggcggctgcgcatcatcgagagccgcttccaccgcgagggtctgtttctctgcaggaattgcatacggcttgagcacttcacgtatatttctttcggcccccactgggccatggaccggctccctgccgagatcgtcgtcgctctggagcccgcgagggagacgctggaacgcctcgaaatcttccatttcgcccgcagcgggcagcgggagctccaccagggcatagagacgctacgggacttccccgtgctcaggaccgtggctctgaacccgggcgccctattcacgcgcagtgacctcccggacccggtccacgatcccgccatgcatccgggcatactagcggacaagctgcccacatctctcgtcgcgctgacgctggtcaacgtctcgcggcacatgttccgagccgtgagacatctagccgagtgcgccataagtgaagagttccccgatctgcgcaccgtgtccatttcgggcggccctcccaagccgagaccgagcgaggactgggccgccccggagacattcaacgaggcggaatgggaggagctccgctatctcttctggagagccgacgtggagttgcgctcgcaggatgactggtggccccatctccgatcgctctgcgatatggctatatga

SEQ ID NO: 16655 - protein, 325 aa, Muscodor strobelii
  misc_feature: SGI Peptide ID NO. 565547
MSSGALWTISSTSSFMHQLLVCSLPNLRSLKLRVPSSSSGFSDCLSIWAKAPSNRLWTLSELEIEDESISRRFNFSYVQDLIRYAPNLEYLSLKRCYSTTTDYALDLRNLRRLRIIESRFHREGLFLCRNCIRLEHFTYISFGPHWAMDRLPAEIVVALEPARETLERLEIFHFARSGQRELHQGIETLRDFPVLRTVALNPGALFTRSDLPDPVHDPAMHPGILADKLPTSLVALTLVNVSRHMFRAVRHLAECAISEEFPDLRTVSISGGPPKPRPSEDWAAPETFNEAEWEELRYLFWRADVELRSQDDWWPHLRSLCDMAI

SEQ ID NO: 16656 - DNA, 6042 bp, Muscodor strobelii
  misc_feature: SGI EST ID NO. CUFF.39590.2
  misc_feature: Variant of the nucleotide sequence at SEQ ID NO 16654
tgaggattacatcggtgttaggagactcatggggctcgagccatttgctgaagttgtcgcgagcaatctctatggacttgtatgtcttgtacctaggatatatcttggaatggatgacgtgggagtcgaacagggcaagtttaaggtacttatggacatgagccgggaaagactgaaaggaggtgtcgttgcccatgaagccatgaatgtagatgactaacagctttcgcctctcgagctcctcataaggaggcagagaaggcgttagagactgtgtagatgatgtgcgaggatcattatacaggccttgaaacggatgatccgaggttgagggttgtgcctggctggcgtcgtaggacgggggaaggttggccttggtagagtgcaaatcagaagaccccattgttacccctcgatggagccgtcgaggatggcagaagcgataagaatcgatgagaactctagaactgcaatatttaggttataagtttatcgcgagtctgcgaaggaggcgagacagcatgagatacgcagttgagatgttggtcatgtagctgagctcatgcgcgcggaatgcataaatgattgaggttcactcaagtatcataaaatctattgcaacatccaagtccatggataaattcagatacaactctgcatgagtatgcagatacatctgttgaaattcaccgaaaatagacacgatgatggtagtacatggttgtttgctgtagaggtgttgagacgtaccgtatcgtgttgttgggtgatggtcgaggcctcctagacttacgtgtagccagtgacagcacctcaataaggcgggtagtactaccataggtacaatccacgtgtagcggggcacgttattcattgcatgtgctttctccagtttgtctcccatatcaggtagtggcttcactaggacagtccaaccagtcggatgtacaagtaccacgacgaattgattagatgagttggtccgatacatttaccaatgccgtggatatctgtgccgtatatctggtagcgcaattatagtgcctacatgtaggcggtattcgagaaccatcgagctggtacacgtccaagccgactatctgacctatattgaaagcatgtggtcctacgtacctatgtaatgatgggcgtgtgcgcatctggcggggcgccgcttacggagccgagtctgagaccaagcgagaccaagcgagaggcagagcatggcagcagccgaggacgacgatggatggcccggggatggctcgagatatttatatatctagatctgtccccagacgatgactgcatatcgcgaccaggtatctatctatccccgaccactgcccggacaactgccaccgcttgcgtgatgctgtttcctccactcaccgcgatccccgaatgctcgctgctcttgccctcgccctcgccatcgccatcgccgtcgtcatcgcttccgtcgtcatccacacccagcgccgctgatcctccgccgccgaaacccatcgctgccgtcgcggcttcccgctctgccgtgcatcgtggggcaacggtgcagggcgacgcacagctatgtagccgggggcctgctcctcgcagatgacgcgatatcgacagtcacacccgccaagatggacatgcccaccgagatctggcagctcgtgctcgacgtcatccgcgacaaggccaccatcgcccgcgtcgggcggacctgcaagttcttcagagagctgaccatccccctgctgtaccgccgcttcgagaccttcgccctcaacgacgacggcgtgtcgctgcagtaccagagcctgtccgccttcatccgcaccgtcaccaaccacccccacctggccgagatcgtcactgagatgaactgcaccacctcggccttcaccaagcactacaaccgcgaggatctgttcgaccgctactcgcagtacgactcggccctcatcggcgacgtcgcccgccgcctcggcgtgcccccggccaacatcaggatgagctcgggcgccctgtggaccatctccagcaccagcagcttcatgcaccagctcctcgtctgctcgctgcccaacctccgctcgctgaagctgagggtcccttcgtcctcgtcaggctttagcgactgtctctccatctgggccaaggcgccctcgaaccgtctgtggaccctctccgaactggagatcgaggacgagagcatctcccggcgcttcaacttctcctatgtccaggacctcatccgctacgccccgaacctcgagtacctctctttgaagagatgctacagcaccactacagattatgccctggacctgcggaatctaaggcggctgcgcatcatcgagagccgcttccaccgcgagggtctgtttctctgcaggaattgcatacggcttgagcacttcacgtatatttctttcggcccccactgggccatggaccggctccctgccgagatcgtcgtcgctctggagcccgcgagggagacgctggaacgcctcgaaatcttccatttcgcccgcagcgggcagcgggagctccaccagggcatagagacgctacgggacttccccgtgctcaggaccgtggctctgaacccgggcgccctattcacgcgcagtgacctcccggacccggtccacgatcccgccatgcatccgggcatactagcggacaagctgcccacatctctcgtcgcgctgacgctggtcaacgtctcgcggcacatgttccgagccgtgagacatctagccgagtgcgccataagtgaagagttccccgatctgcgcaccgtgtccatttcgggcggccctcccaagccgagaccgagcgaggactgggccgccccggagacattcaacgaggcggaatgggaggagctccgctatctcttctggagagccgacgtggagttgcgctcgcaggatgactggtggccccatctccgatcgctctgcgatatggctatatgatttataagataccaagctctttgatgatgaaggatgcgttgcctcccgcgtcgtgtaagactgcagcatcaactcaagacgatttagatcttgggttagtaacaacattaaacatagttaagatattgtataattcaacatgaatatattttcacgtcaaaaatcagttagtaccacttcatgaatttgcattgtaatgtctttcttcggagacaggcgcaggctgagctgtcatatctgctcgtgaccacaacgaagactcactgtggatagcggcaatggtattaatactcattttttcatagtgtagctgctattcgacaggcatctgcttgtgtatgttcatatctgatatgaatgatccccgtctctgccctttcgtctttttcggtcttgtctaggcagacaccttgtgccgtagcggactgagaaatataccagcctcgaacggaaaaataaataagtaaataaaataaaactcaaacaaacgcccggcgccacgctgaacccatacaaaaacacaatgcagtccagatccaagagccataacctattcagaggctaggaagagcatgctggtcacgcctagttcccgtcctttcctgccggagtaactcggttacacgtctgccgtggatcgcgacggcctgcttacgtgggtatcatttttcctcgtcgcctcttactctatgaggcattaccgccgctagggattctgtcataaccggtcagctagaggggttctagaagacggatgatctggaggatgcacctgttttctcctcttgagcttggacgaccggtcatcaccgtcacctgtggagtatcctccggtgtcgtcctcgtatccttcaccatagccttcgaagctgctatcctggtagcttctctttttgcccaatcgtcgcgcgcggtccacctggttggcgacgggcttgcctgctttcgaggtcgcacctgcacctgtcgacaggttcggagtaccgggcgccgtcggccgcgaaggctggtcctggttcctcttgggcgcttgaccaggcgccagatcccccagcactgagctgtcccataccgtcttcggtatctgtcccttggccatggtcatggccttggccatcgtagattgtgagagggtgaggccatgcgcgacgtcctttccggagacgacgcggttctgccagtcttcctcggcaacgcccaggagctccatgaggggcgagggatccttcttgaccacatcgaagtgtccactcagaccgagggtcttgatctgacccttgtacgtcttgcgcagcgcattcttgcttccatctggcttggtgcgggcgacgtcggcggcgatgcccgtcaggccaaacttctcaaacaagtcatcggacatgcgtggggacgagatgaagtgggctagatagagcacagtgtcaacacgcatcctaccatgtgccaagcacgtgtactgcataccgcccaggcggcgggcaggctgctgaagagggggcggtgggactctggagacgttagaggagccttacgagttctgcaaagaaggagcttctcgccgacgtccagatggagatcttgaatgccaatcttgcggggatcctcgtggagggctttcttgtggtcccgagcaccggcgtcgtcgaacgagttcttgcgcttgttggaggagacgtcggtcatgctagtatcgtgtgacccgtcggaaggcatgtgagagccattcacgctgtgggcgggctgcgcgagagtgatgttagcgatcaaatatgtccattccgcagcctggtcgctgtggtgctggtagacacgagccgcagcgtcgaagagaaagaaaagacaccaaagggagaagggaagggacggcgctcacggtgggcagggaggtggcgatggaggtcatggatgtgttgatgctcgaaccctgatccatcacactcggagagaactgggaagggctctggggcgtctggggatgaaaggacatggtcgctgcagcggacggcaagcaggtgaggctcgaaggggccgacgggcgagcaatgcgaggccaccgatggaatgacggacaagacgtcgatgcgcagaggaggggagggtcgggaagccgcggcggacgcgagggtggaaatgcctctcgtgcggcggacaaagacggtgcggcggtcgagacgtggcgtagcgacggcgagctctcgggcgagtcacttgtgagtccccaagatgtgagggccgcagcgtagaagagggaagagagcagagcggagaaacgggaggaggattgtcgatggcgggccgcgccgtcagggcgaccggttcgttggtcgagaggcccccgagtccagcagcatgcaggcccgagtgccaaggcggtcgctggtgtcgagggggcgccgagatggtgcagatgcgcgctcgctggcgatatgatgcggcggcgctgtgcgtggtggcgtgctccagtcgtcgcgagcggaaagggcgacgtctgagggcggtcggtcgggtggtgtcgtcgggggatgatgatgttgtggtggtgtggaagaatggagtcggctggtgctgagattggcagcaggcctgggtgcaaaggccctggggcgggtcgcctgccttgactggatgacggaggaacttgcgggtagaaagcctctcgctgcaaagaaacggtggacggctccccactacacctctgctgggcctggctcgcctggctgctattcaacagcctttctaggccgtaacaggtcacagcccagtgtgtggtgtcaacgtttcattgttaccaggtacatctacatattgcctgcctgcccgctctccctttcaccactcgattagttgcgatgactgagacatattgaaccgcaattagactgctattgaaatcagagagatctcatctcaacaacacctctccctgcaaacatacctgacacctgagcacaggcagcctgatcaattaggtagtagagacacattggagccagcccgaagatttctgcatgtctgcagcttcgatttcaacgcgtctcctgatccagttgccttggtctta

SEQ ID NO: 16657 - DNA, 1347 bp, Muscodor strobelii
  misc_feature: SGI cDNA ID NO. 565548
  misc_feature: Reduced expression when VOC is produced
  misc_feature: Encodes the peptide sequence at SEQ ID NO 16658
atggacatgcccaccgagatctggcagctcgtgctcgacgtcatccgcgacaaggccaccatcgcccgcgtcgggcggacctgcaagttcttcagagagctgaccatccccctgctgtaccgccgcttcgagaccttcgccctcaacgacgacggcgtgtcgctgcagtaccagagcctgtccgccttcatccgcaccgtcaccaaccacccccacctggccgagatcgtcactgagatgaactgcaccacctcggccttcaccaagcactacaaccgcgaggatctgttcgaccgctactcgcagtacgactcggccctcatcggcgacgtcgcccgccgcctcggcgtgcccccggccaacatcaggatgagctcgggcgccctgtggaccatctccagcaccagcagcttcatgcaccagctcctcgtctgctcgctgcccaacctccgctcgctgaagctgagggtcccttcgtcctcgtcaggctttagcgactgtctctccatctgggccaaggcgccctcgaaccgtctgtggaccctctccgaactggagatcgaggacgagagcatctcccggcgcttcaacttctcctatgtccaggacctcatccgctacgccccgaacctcgagtacctctctttgaagagatgctacagcaccactacagattatgccctggacctgcggaatctaaggcggctgcgcatcatcgagagccgcttccaccgcgagggtctgtttctctgcaggaattgcatacggcttgagcacttcacgtatatttctttcggcccccactgggccatggaccggctccctgccgagatcgtcgtcgctctggagcccgcgagggagacgctggaacgcctcgaaatcttccatttcgcccgcagcgggcagcgggagctccaccagggcatagagacgctacgggacttccccgtgctcaggaccgtggctctgaacccgggcgccctattcacgcgcagtgacctcccggacccggtccacgatcccgccatgcatccgggcatactagcggacaagctgcccacatctctcgtcgcgctgacgctggtcaacgtctcgcggcacatgttccgagccgtgagacatctagccgagtgcgccataagtgaagagttccccgatctgcgcaccgtgtccatttcgggcggccctcccaagccgagaccgagcgaggactgggccgccccggagacattcaacgaggcggaatgggaggagctccgctatctcttctggagagccgacgtggagttgcgctcgcaggatgactggtggccccatctccgatcgctctgcgatatggctatatga

SEQ ID NO: 16658 - protein, 448 aa, Muscodor strobelii
  misc_feature: SGI Peptide ID NO. 565548
  misc_feature (20)..(393): NCBI GI: 121713408 Blast Desc: F-box domain protein [Aspergillus clavatus NRRL 1] gi|119402468|gb|EAW12889.1| F-box domain protein [Aspergillus clavatus NRRL 1]
  misc_feature (11)..(392): NCBI GI: 145604881 Blast Desc: [Magnaporthe grisea 70-15] gi|145012789|gb|EDJ97443.1| [Magnaporthe grisea 70-15]
  misc_feature (4)..(335): NCBI GI: 145250000 Blast Desc: An14g07160 [Aspergillus niger] gi|134082024|emb|CAK46709.1| [Aspergillus niger]
  misc_feature (204)..(391): NCBI GI: 115492837 Blast Desc: [Aspergillus terreus NIH2624] gi|114197906|gb|EAU39606.1| [Aspergillus terreus NIH2624]
  misc_feature (2)..(74): NCBI GI: 46124137 Blast Desc: FG06446.1 [Gibberella zeae PH-1]
  misc_feature: Useful for introducing or modulating the production of volatile compounds
MDMPTEIWQLVLDVIRDKATIARVGRTCKFFRELTIPLLYRRFETFALNDDGVSLQYQSLSAFIRTVTNHPHLAEIVTEMNCTTSAFTKHYNREDLFDRYSQYDSALIGDVARRLGVPPANIRMSSGALWTISSTSSFMHQLLVCSLPNLRSLKLRVPSSSSGFSDCLSIWAKAPSNRLWTLSELEIEDESISRRFNFSYVQDLIRYAPNLEYLSLKRCYSTTTDYALDLRNLRRLRIIESRFHREGLFLCRNCIRLEHFTYISFGPHWAMDRLPAEIVVALEPARETLERLEIFHFARSGQRELHQGIETLRDFPVLRTVALNPGALFTRSDLPDPVHDPAMHPGILADKLPTSLVALTLVNVSRHMFRAVRHLAECAISEEFPDLRTVSISGGPPKPRPSEDWAAPETFNEAEWEELRYLFWRADVELRSQDDWWPHLRSLCDMAI

SEQ ID NO: 16659 - DNA, 6042 bp, Muscodor strobelii; identical to SEQ ID NO: 16656
  misc_feature: SGI EST ID NO. CUFF.39590.2
  misc_feature: Variant of the nucleotide sequence at SEQ ID NO 16657

SEQ ID NO: 16660 - DNA, 963 bp, Muscodor strobelii
  misc_feature: SGI cDNA ID NO. 565549
  misc_feature: Encodes the peptide sequence at SEQ ID NO 16661
atgtcctttcatccccagacgccccagagcccttcccagttctctccgagtgtgatggatcagggttcgagcatcaacacatccatgacctccatcgccacctccctgcccacccccgcccacagcgtgaatggctctcacatgccttccgacgggtcacacgatactagcatgaccgacgtctcctccaacaagcgcaagaactcgttcgacgacgccggtgctcgggaccacaagaaagccctccacgaggatccccgcaagattggcattcaagatctccatctggacgtcggcgagaagctccttctttgcagaactccccacttcatctcgtccccacgcatgtccgatgacttgtttgagaagtttggcctgacgggcatcgccgccgacgtcgcccgcaccaagccagatggaagcaagaatgcgctgcgcaagacgtacaagggtcagatcaagaccctcggtctgagtggacacttcgatgtggtcaagaaggatccctcgcccctcatggagctcctgggcgttgccgaggaagactggcagaaccgcgtcgtctccggaaaggacgtcgcgcatggcctcaccctctcacaatctacgatggccaaggccatgaccatggccaagggacagataccgaagacggtatgggacagctcagtgctgggggatctggcgcctggtcaagcgcccaagaggaaccaggaccagccttcgcggccgacggcgcccggtactccgaacctgtcgacaggtgcaggtgcgacctcgaaagcaggcaagcccgtcgccaaccaggtggaccgcgcgcgacgattgggcaaaaagagaagctaccaggatagcagcttcgaaggctatggtgaaggatacgaggacgacaccggaggatactccacaggtgacggtgatgaccggtcgtccaagctcaagaggagaaaacagaatccctag

SEQ ID NO: 16661 - protein, 320 aa, Muscodor strobelii
  misc_feature: SGI Peptide ID NO. 565549
  misc_feature (109)..(317): Pfam Id: PF08633 Pfam Desc: Rox3 mediator complex subunit
  misc_feature (1)..(318): NCBI GI: 39972287 Blast Desc: MGG_07445 [Magnaporthe grisea 70-15] gi|145016631|gb|EDK01061.1| MGG_07445 [Magnaporthe grisea 70-15]
  misc_feature (1)..(317): NCBI GI: 171692685 Blast Desc: protein product [Podospora anserina] gi|170946291|emb|CAP73092.1| protein product [Podospora anserina]
  misc_feature (1)..(317): NCBI GI: 116199353 Blast Desc: CHGG_07832 [Chaetomium globosum CBS 148.51] gi|166215053|sp|Q2GW22.3|MED19_CHAGB RecName: Full=Mediator of RNA polymerase II transcription subunit 19; AltName: complex 19
  misc_feature (1)..(318): NCBI GI: 212286374 Blast Desc: CHGG_07832 [Chaetomium globosum CBS 148.51] gi|166215053|sp|Q2GW22.3|MED19_CHAGB RecName: Full=Mediator of RNA polymerase II transcription subunit 19; AltName: complex 19
  misc_feature (1)..(320): NCBI GI: 46124867 Blast Desc: FG06811.1 [Gibberella zeae PH-1]
  misc_feature (1)..(320): NCBI GI: 256730999 Blast Desc: [Nectria haematococca mpVI 77-13-4]
  misc_feature (1)..(318): NCBI GI: 38566841 Blast Desc: [Neurospora crassa]
  misc_feature (5)..(318): NCBI GI: 154297433 Blast Desc: BC1G_12313 [Botryotinia fuckeliana B05.10] gi|150858509|gb|EDN33701.1| BC1G_12313 [Botryotinia fuckeliana B05.10]
  misc_feature (6)..(318): NCBI GI: 164429353 Blast Desc: NCU01475 [Neurospora crassa OR74A] gi|157073447|gb|EAA27516.2| [Neurospora crassa OR74A]
  misc_feature (5)..(318): NCBI GI: 156048604 Blast Desc: SS1G_09034 [Sclerotinia sclerotiorum 1980] gi|154693430|gb|EDN93168.1| SS1G_09034 [Sclerotinia sclerotiorum 1980]
MSFHPQTPQSPSQFSPSVMDQGSSINTSMTSIATSLPTPAHSVNGSHMPSDGSHDTSMTDVSSNKRKNSFDDAGARDHKKALHEDPRKIGIQDLHLDVGEKLLLCRTPHFISSPRMSDDLFEKFGLTGIAADVARTKPDGSKNALRKTYKGQIKTLGLSGHFDVVKKDPSPLMELLGVAEEDWQNRVVSGKDVAHGLTLSQSTMAKAMTMAKGQIPKTVWDSSVLGDLAPGQAPKRNQDQPSRPTAPGTPNLSTGAGATSKAGKPVANQVDRARRLGKKRSYQDSSFEGYGEGYEDDTGGYSTGDGDDRSSKLKRRKQNP

SEQ ID NO: 16662 - DNA, 7995 bp, Muscodor strobelii; identical to SEQ ID NO: 16650
  misc_feature: SGI EST ID NO. CUFF.39591.0
  misc_feature: Variant of the nucleotide sequence at SEQ ID NO 16660

SEQ ID NO: 16663 - DNA, 1008 bp, Muscodor strobelii
  misc_feature: SGI cDNA ID NO. 565550
  misc_feature: Reduced expression when VOC is produced
  misc_feature: Encodes the peptide sequence at SEQ ID NO 16664
atgtcctttcatccccagacgccccagagcccttcccagttctctccgagtgtgatggatcagggttcgagcatcaacacatccatgacctccatcgccacctccctgcccacccccgcccacagcgtgaatggctctcacatgccttccgacgggtcacacgatactagcatgaccgacgtctcctccaacaagcgcaagaactcgttcgacgacgccggtgctcgggaccacaagaaagccctccacgaggatccccgcaagattggcattcaagatctccatctggacgtcggcgagaagctccttctttgcagaactccccacttcatctcgtccccacgcatgtccgatgacttgtttgagaagtttggcctgacgggcatcgccgccgacgtcgcccgcaccaagccagatggaagcaagaatgcgctgcgcaagacgtacaagggtcagatcaagaccctcggtctgagtggacacttcgatgtggtcaagaaggatccctcgcccctcatggagctcctgggcgttgccgaggaagactggcagaaccgcgtcgtctccggaaaggacgtcgcgcatggcctcaccctctcacaatctacgatggccaaggccatgaccatggccaagggacagataccgaagacggtatgggacagctcagtgctgggggatctggcgcctggtcaagcgcccaagaggaaccaggaccagccttcgcggccgacggcgcccggtactccgaacctgtcgacaggtgcaggtgcgacctcgaaagcaggcaagcccgtcgccaaccaggtggaccgcgcgcgacgattgggcaaaaagagaagctaccaggatagcagcttcgaaggctatggtgaaggatacgaggacgacaccggaggatactccacaggtgacggtgatgaccggtcgtccaagctcaagaggagaaaacaggtgcatcctccagatcatccgtcttctagaacccctctagctgaccggttatga

SEQ ID NO: 16664 - protein, 335 aa, Muscodor strobelii
  misc_feature: SGI Peptide ID NO. 565550
  misc_feature (109)..(317): Pfam Id: PF08633 Pfam Desc: Rox3 mediator complex subunit
  misc_feature (1)..(320): NCBI GI: 39972287 Blast Desc: MGG_07445 [Magnaporthe grisea 70-15] gi|145016631|gb|EDK01061.1| MGG_07445 [Magnaporthe grisea 70-15]
  misc_feature (1)..(319): NCBI GI: 171692685 Blast Desc: protein product [Podospora anserina] gi|170946291|emb|CAP73092.1| protein product [Podospora anserina]
  misc_feature (1)..(319): NCBI GI: 116199353 Blast Desc: CHGG_07832 [Chaetomium globosum CBS 148.51] gi|166215053|sp|Q2GW22.3|MED19_CHAGB RecName: Full=Mediator of RNA polymerase II transcription subunit 19; AltName: complex 19
  misc_feature (1)..(319): NCBI GI: 212286374 Blast Desc: CHGG_07832 [Chaetomium globosum CBS 148.51] gi|166215053|sp|Q2GW22.3|MED19_CHAGB RecName: Full=Mediator of RNA polymerase II transcription subunit 19; AltName: complex 19
  misc_feature (1)..(318): NCBI GI: 46124867 Blast Desc: FG06811.1 [Gibberella zeae PH-1]
  misc_feature (1)..(318): NCBI GI: 256730999 Blast Desc: [Nectria haematococca mpVI 77-13-4]
  misc_feature (1)..(319): NCBI GI: 38566841 Blast Desc: [Neurospora crassa]
  misc_feature (5)..(327): NCBI GI: 154297433 Blast Desc: BC1G_12313 [Botryotinia fuckeliana B05.10] gi|150858509|gb|EDN33701.1| BC1G_12313 [Botryotinia fuckeliana B05.10]
  misc_feature (6)..(319): NCBI GI: 164429353 Blast Desc: NCU01475 [Neurospora crassa OR74A] gi|157073447|gb|EAA27516.2| [Neurospora crassa OR74A]
  misc_feature (5)..(327): NCBI GI: 156048604 Blast Desc: SS1G_09034 [Sclerotinia sclerotiorum 1980] gi|154693430|gb|EDN93168.1| SS1G_09034 [Sclerotinia sclerotiorum 1980]
  misc_feature: Useful for introducing or modulating the production of volatile compounds
MSFHPQTPQSPSQFSPSVMDQGSSINTSMTSIATSLPTPAHSVNGSHMPSDGSHDTSMTDVSSNKRKNSFDDAGARDHKKALHEDPRKIGIQDLHLDVGEKLLLCRTPHFISSPRMSDDLFEKFGLTGIAADVARTKPDGSKNALRKTYKGQIKTLGLSGHFDVVKKDPSPLMELLGVAEEDWQNRVVSGKDVAHGLTLSQSTMAKAMTMAKGQIPKTVWDSSVLGDLAPGQAPKRNQDQPSRPTAPGTPNLSTGAGATSKAGKPVANQVDRARRLGKKRSYQDSSFEGYGEGYEDDTGGYSTGDGDDRSSKLKRRKQVHPPDHPSSRTPLADRL

SEQ ID NO: 16665 - DNA, 7995 bp, Muscodor strobelii; identical to SEQ ID NO: 16650
  misc_feature: SGI EST ID NO. CUFF.39591.0
  misc_feature: Variant of the nucleotide sequence at SEQ ID NO 16663

SEQ ID NO: 16666 - DNA, 1053 bp, Muscodor strobelii
  misc_feature: SGI cDNA ID NO. 565551
  misc_feature: Reduced expression when VOC is produced
  misc_feature: Encodes the peptide sequence at SEQ ID NO 16667
atgtcctttcatccccagacgccccagagcccttcccagttctctccgagtgtgatggatcagggttcgagcatcaacacatccatgacctccatcgccacctccctgcccacccccgcccacagcgtgaatggctctcacatgccttccgacgggtcacacgatactagcatgaccgacgtctcctccaacaagcgcaagaactcgttcgacgacgccggtgctcgggaccacaagaaagccctccacgaggatccccgcaagattggcattcaagatctccatctggacgtcggcgagaagctccttctttgcagaactcgtaaggctcctctaacgatgcgtgttgacactgtgctctatctagcccacttcatctcgtccccacgcatgtccgatgacttgtttgagaagtttggcctgacgggcatcgccgccgacgtcgcccgcaccaagccagatggaagcaagaatgcgctgcgcaagacgtacaagggtcagatcaagaccctcggtctgagtggacacttcgatgtggtcaagaaggatccctcgcccctcatggagctcctgggcgttgccgaggaagactggcagaaccgcgtcgtctccggaaaggacgtcgcgcatggcctcaccctctcacaatctacgatggccaaggccatgaccatggccaagggacagataccgaagacggtatgggacagctcagtgctgggggatctggcgcctggtcaagcgcccaagaggaaccaggaccagccttcgcggccgacggcgcccggtactccgaacctgtcgacaggtgcaggtgcgacctcgaaagcaggcaagcccgtcgccaaccaggtggaccgcgcgcgacgattgggcaaaaagagaagctaccaggatagcagcttcgaaggctatggtgaaggatacgaggacgacaccggaggatactccacaggtgacggtgatgaccggtcgtccaagctcaagaggagaaaacaggtgcatcctccagatcatccgtcttctagaacccctctagctgaccggttatga

SEQ ID NO: 16667 - protein, 350 aa, Muscodor strobelii
  misc_feature: SGI Peptide ID NO. 565551
  misc_feature (124)..(332): Pfam Id: PF08633 Pfam Desc: Rox3 mediator complex subunit
  misc_feature (1)..(334): NCBI GI: 171692685 Blast Desc: protein product [Podospora anserina] gi|170946291|emb|CAP73092.1| protein product [Podospora anserina]
  misc_feature (1)..(335): NCBI GI: 39972287 Blast Desc: MGG_07445 [Magnaporthe grisea 70-15] gi|145016631|gb|EDK01061.1| MGG_07445 [Magnaporthe grisea 70-15]
  misc_feature (1)..(334): NCBI GI: 116199353 Blast Desc: CHGG_07832 [Chaetomium globosum CBS 148.51] gi|166215053|sp|Q2GW22.3|MED19_CHAGB RecName: Full=Mediator of RNA polymerase II transcription subunit 19; AltName: complex 19
  misc_feature (1)..(334): NCBI GI: 38566841 Blast Desc: [Neurospora crassa]
  misc_feature (1)..(334): NCBI GI: 212286374 Blast Desc: [Neurospora crassa]
  misc_feature (6)..(334): NCBI GI: 164429353 Blast Desc: NCU01475 [Neurospora crassa OR74A] gi|157073447|gb|EAA27516.2| [Neurospora crassa OR74A]
  misc_feature (1)..(333): NCBI GI: 46124867 Blast Desc: FG06811.1 [Gibberella zeae PH-1]
  misc_feature (1)..(333): NCBI GI: 256730999 Blast Desc: [Nectria haematococca mpVI 77-13-4]
  misc_feature (5)..(342): NCBI GI: 154297433 Blast Desc: BC1G_12313 [Botryotinia fuckeliana B05.10] gi|150858509|gb|EDN33701.1| BC1G_12313 [Botryotinia fuckeliana B05.10]
  misc_feature (5)..(342): NCBI GI: 156048604 Blast Desc: SS1G_09034 [Sclerotinia sclerotiorum 1980] gi|154693430|gb|EDN93168.1| SS1G_09034 [Sclerotinia sclerotiorum 1980]
  misc_feature: Useful for introducing or modulating the production of volatile compounds
MSFHPQTPQSPSQFSPSVMDQGSSINTSMTSIATSLPTPAHSVNGSHMPSDGSHDTSMTDVSSNKRKNSFDDAGARDHKKALHEDPRKIGIQDLHLDVGEKLLLCRTRKAPLTMRVDTVLYLAHFISSPRMSDDLFEKFGLTGIAADVARTKPDGSKNALRKTYKGQIKTLGLSGHFDVVKKDPSPLMELLGVAEEDWQNRVVSGKDVAHGLTLSQSTMAKAMTMAKGQIPKTVWDSSVLGDLAPGQAPKRNQDQPSRPTAPGTPNLSTGAGATSKAGKPVANQVDRARRLGKKRSYQDSSFEGYGEGYEDDTGGYSTGDGDDRSSKLKRRKQVHPPDHPSSRTPLADRL

SEQ ID NO: 16668 - DNA, 7995 bp, Muscodor strobelii; identical to SEQ ID NO: 16650
  misc_feature: SGI EST ID NO. CUFF.39591.0
  misc_feature: Variant of the nucleotide sequence at SEQ ID NO 16666

SEQ ID NO: 16669 - DNA, 705 bp, Muscodor strobelii
  misc_feature: SGI cDNA ID NO. 565552
  misc_feature: Reduced expression when VOC is produced
  misc_feature: Encodes the peptide sequence at SEQ ID NO 16670
atgtcgtcgtccagatttgttggcggggccaagcatcgcctcatgatggagatgcaggatctctctaaagagaaatgggtcaacattgatctccccgacggcaacattctccgctggcacctgggcctcattgtcgtcaacccggacagcgccttcgatggcggctacttcaaggccgaaatgacgttcagcgaagactacccgatctcgcccccgactttccgcttcctcgtacccatctaccatccgaacgtctatcccgacggcaagttgtgcatctcgatcctgcacacgcccggcgaagacatcatgtcaggcgagcaggcaagcgagcgctggtcgccgctgcagggcgtggagtcggtgctgcgctccgtgctcctgctcctcgactaccccgagatcaactcgcccgccaacgtggatgccagcgtcatgtaccgagacaagcgggaggcctacaacgccagggccaaggagatcgtggagagatcgaagcgggacataccggatgggttccagctgccgacgtcgctggagccgccgccgccgccgccgtccaagtcgcaggacgacgacgcggctttctgggcggagagcgacgaagagctcgactttggaggcagcgacacgggggacgaggacatgggggactttgacgacgacggcgacgaggaggggccgagtgacgaggaggacgcctga

SEQ ID NO: 16670 - protein, 234 aa, Muscodor strobelii
  misc_feature: SGI Peptide ID NO. 565552
  misc_feature (13)..(162): Pfam Id: PF00179 Pfam Desc: Ubiquitin-conjugating enzyme
  misc_feature (9)..(214): NCBI GI: 156065243 Blast Desc: SS1G_00632 [Sclerotinia sclerotiorum 1980] gi|154691491|gb|EDN91229.1| SS1G_00632 [Sclerotinia sclerotiorum 1980]
  misc_feature (9)..(212): NCBI GI: 154311349 Blast Desc: BC1G_06527 [Botryotinia fuckeliana B05.10] gi|150850924|gb|EDN26117.1| BC1G_06527 [Botryotinia fuckeliana B05.10]
  misc_feature (1)..(212): NCBI GI: 85103599 Blast Desc: NCU01188 [Neurospora crassa OR74A] gi|28923101|gb|EAA32318.1| conserved [Neurospora crassa OR74A]
  misc_feature (1)..(212): NCBI GI: 18376280 Blast Desc: ubiquitin-conjugating enzyme CDC34 [Neurospora crassa]
  misc_feature (1)..(212): NCBI GI: 116199129 Blast Desc: CHGG_07720 [Chaetomium globosum CBS 148.51] gi|88178999|gb|EAQ86467.1| CHGG_07720 [Chaetomium globosum CBS 148.51]
  misc_feature (1)..(212): NCBI GI: 171693871 Blast Desc: protein product [Podospora anserina] gi|170946884|emb|CAP73688.1| protein product [Podospora anserina]
  misc_feature (10)..(211): NCBI GI: 261351668 Blast Desc: ubiquitin-conjugating enzyme [Verticillium albo-atrum VaMs.102]
  misc_feature (10)..(227): NCBI GI: 67515889 Blast Desc: AN0226.2 [Aspergillus nidulans FGSC A4] gi|40746943|gb|EAA66099.1| AN0226.2 [Aspergillus nidulans FGSC A4] gi|259489560|tpe|CBF89932.1| TPA: ubiquitin conjugating FGSC
  misc_feature (10)..(209): NCBI GI: 256731458 Blast Desc: [Nectria haematococca mpVI 77-13-4]
  misc_feature (10)..(208): NCBI GI: 119479483 Blast Desc: ubiquitin conjugating enzyme (UbcC), [Neosartorya fischeri NRRL 181] gi|119407924|gb|EAW17873.1| ubiquitin conjugating enzyme (UbcC), [Neosartorya fischeri NRRL 181]
  misc_feature (33)..(209): SWISSPROT Homolog: EC 6.3.2.19 Ubiquitin--protein ligase
  misc_feature: Useful for introducing or modulating the production of volatile compounds
MSSSRFVGGAKHRLMMEMQDLSKEKWVNIDLPDGNILRWHLGLIVVNPDSAFDGGYFKAEMTFSEDYPISPPTFRFLVPIYHPNVYPDGKLCISILHTPGEDIMSGEQASERWSPLQGVESVLRSVLLLLDYPEINSPANVDASVMYRDKREAYNARAKEIVERSKRDIPDGFQLPTSLEPPPPPPSKSQDDDAAFWAESDEELDFGGSDTGDEDMGDFDDDGDEEGPSDEEDA

SEQ ID NO: 16671 - DNA, 2243 bp, Muscodor strobelii
  misc_feature: SGI EST ID NO. CUFF.39928.0
  misc_feature: Variant of the nucleotide sequence at SEQ ID NO 16669
acaatttggtgcaaatctttgcatataagcacgagtcagcggcgccaaatcacgtcaaatcgcccctgttgcgttctgatatgtctgcacttgtgcactaggcactgtttattccattcttccatcctcctatccattcatttaaacaagtttcctgttcattcgagaggaaagagtccaagacgcaaaagtaagtatctacattcacctagcccatacatatgtgcctacctactagcactactggccccagcaaggttggtctagctgcaagggtctctccaccgctaccgagacatccacccccatcaagtccattccgtccttgtctcctttgacacactcgcttccgcattcccgcatgttggctcatgcaacaggcacagttggctctttgggcatcgcacctctcccacccagcaagcgcctgaccatacaccactgtcactgtcaccacctctcgcgtcgctcaccatacccctcgacacatctcctcggatcaagtgtaagtgcacccagccaattctcctctcggcttcgccttctgtattaggtcctcgacgtctccgggtgccccgcggccctatctctcttgctcgccgccccttccctctcctccatccaggcacaccgaggcacgcgacacactgtagcacatctacacacatacactcacttggctgctttgttatcaccactgctgaccacgttgttgcagaccgccaacctgcgagtcggaccgagcctactcccgctggctgtcccacactacaagtcccacgtcaccgatacaccagagacagcaacagcagaggcaacagaaagaggctctgcgccatgtcgtcgtccagatttgttggcggggccaagcatcgcctcatgatggagatgcaggatctctctaaagagaaatgggtcaacattgatctccccgacggcaacattctccgctggcacctgggcctcattgtcgtcaacccggacagcgccttcgatggcggctacttcaaggccgaaatgacgttcagcgaagactacccgatctcgcccccgactttccgcttcctcgtacccatctaccatccgaacgtctatcccgacggcaagttgtgcatctcgatcctgcacacgcccggcgaagacatcatgtcaggcgagcaggcaagcgagcgctggtcgccgctgcagggcgtggagtcggtgctgcgctccgtgctcctgctcctcgactaccccgagatcaactcgcccgccaacgtggatgccagcgtcatgtaccgagacaagcgggaggcctacaacgccagggccaaggagatcgtggagagatcgaagcgggacataccggatgggttccagctgccgacgtcgctggagccgccgccgccgccgccgtccaagtcgcaggacgacgacgcggctttctgggcggagagcgacgaagagctcgactttggaggcagcgacacgggggacgaggacatgggggactttgacgacgacggcgacgaggaggggccgagtgacgaggaggacgcctgaggacagggagcacgtttttcctttgttactcgtataccttgcacacttcacacacttggttctttgcatagcgttgggatgacggcgtcacgcgggcagtctttcagtgcttagacaaaggggacggggcttttgcttttaccgggattgcattcggctctggctccccacacgtggcacatggcagagatggaggggcgaggggagagacggatcataattactgcctacctagcacctgagctatcatcatcaacttagctatcatcagacatctatacagccaggccatctcggacactttgaaggggctgtggccagatgccgccagggcaggagacagaacacaatagactgctggctgctattcagactcataaaggctatcgtgacgcaagaagaaataggagagagtggaacgacaaagacgacaaagacgacacattgtgtgacacatataataaagctttgaagatgttgaagtacctacattatgcacagttgtggggcttttctatgttcacttctagatggctgctctctgtgcctattgtatctgtattcatcattgctcacttgatgtagcagagtatatgtaagcatgcagtgtgtagaaggttgcagacgaagaaatcgagcagaatgggtaggatttgtagatcagctggatgcaatgcaatgcttgtggtgctgcactcgtc

SEQ ID NO: 16672 - DNA, 2694 bp, Muscodor strobelii
  misc_feature: SGI cDNA ID NO. 565553
  misc_feature: Reduced expression when VOC is produced
  misc_feature: Encodes the peptide sequence at SEQ ID NO 16673
atggtgccttcgtacgacccttcagaagccgacgttgctcagctgcaagagctgctcaacctgtctcgcaacgacgctgtcagccgactgcgcgccaacggcaacgaccttgaaagagctgtcgacgactattttgcaaaccccgaccccaacaagtaccaatatgacgagtcagcctggaactcagatcgcgatggtggccatactgctggcaacaactttgctttcaacatccagggtcctgatgagcaccctccgcccctgagcttcatcaacagcgctgctcccacgcgtccgccctcgcgcaccaacaatccctccccgctgggcaagcttgtcgatctgaccgcagacgaggccaccgcaggagctcccaccacctttgcccaagaggacgccgatctgcagagggcccttgccgcctccgccgccgagtccggcatccagccccaggagaccggcttcgtcgaccgcgacaccgacgccaaacacttcggccccgccaaccgaccccagtacgacgcggaccagtgggccatggtcccgaccgggcccatggctgaccccaaacactccctgcctgccccctccgcccgcaggcgagaagccggcgtccctgtcatcctgcgccagtccaaagaccaccaccatctggcacccctcatctccgtatacagccagatccccctcgccagaaatgccctcctcgcgtgcggcctgtccgcccgcgagtacggccacaatccggactggtggagagggactcccatactgacgcagactacccatcctgggccctggggcgacgacatacagacagacctctttgaagagcttcatcgtctcatggcatttctagacaagtcagacaggagctatggcaatgcagatatgctcgctgacgctagggctaacatcgaggatctcagctcgtgggatcatgacgcggatctgcgattttgcaaggccattaagggttgggccaggcaacatccaggatccgatatggagtctatgacgaccacggggtctttgacgtgtatcggcccggccgaagacgaagacccggaggatcatgacttcactctcttagcgattgagtttcaggacgacaacacttatgacgatgtgtccacgttatacgacgctctcgatcatatgatgtgggatgtggcgctctcgtcggacgtggacaggtttgcagtgctgtctcagcctgctgatgttttcacgatacgctttagtggtggaggacttagaaaagcctgcgacatacctgctattttctatctggaccggtatatggaggagcgcaaacatctcgctgtccactttcgacggcagatccatctcatcaagactaaattgcgagatctggatgctcaagccactaggcggctcagatgccgcggtggatatgggtgtgcggtactcaaggacctcgccgtagagcacagcaccctcgactgtgcccaaaagatgatcgatttagcccaagaactcatcacgcgccagagcagagacgcgcaatggcgctaccgtcaagagcaatgggtcggaggatcagcttatagtatggatgatctccgtctcattcatacctgggcaggacctttcaagctacacgaggaagagtcggccgagctcagaagtcttcaacggttgatcgcggacctggaagaggaaaagcggcaagtcacactccatacgagcgggtatgaagaagagaaagaggaactgaatggatatctcgacgtcgtccgcaaacgactgacttgccaggaacatgaagttgacgatgagctatttgtttttcgggcagacaaggccgcctatcgcgccgagtactggaatccgtgccgaaagtacctactgcgcggcgcggtgctctcgaaggagctctcgtatgtatgcgtccgcggtggttcagctcaagatggaacgagtgatcagtggtggaaattggattgctcggaaggcggtacaacaccacccatccctgaaaggacaacactcgacgatgtcctggtcatggctgggactcatgcgaaaatgccaattcttgtatatgcttctgaggaggctttacaggctgaaccaaccacacttcctgatgccttgcggatgtttatcaaggccgacaaccgtgcatttcaacaagagcttgcacaggagcagaactcgggtggggactcggctggtttgaaacaagacgagccaggcgccccaaatgtaccagaagtgtccatggctggttcgtcctatgaccaaaatcagcagcccgcagctgtgacggcggccaatctagcacagatcacggaggctactcataagaggaaacacacgtcgaactcatccatcgccacgcgtggcagtcttcgtagcgacttgggggatgtggagctatgtttcgatgatgagccagaggccatggcaacggacgacgatgccccagatggggcgttggtcggcagtagcccgcagtcaaagctaggtggtatagtcgagtcattcgccaagtgccaaacacaagagcagaccgcgcaattctccgcggagacggtcaaagtaccagagatgcgtgagcgggagggtggtagactgccgcccatcttctcgcaaggcaacacgagccagcagaagcccattgattccatggatctggatacagagcaaggactcattgatgattag

SEQ ID NO: 16673 - protein, 897 aa, Muscodor strobelii
  misc_feature: SGI Peptide ID NO. 565553
  misc_feature (7)..(42): Pfam Id: PF00627 Pfam Desc: UBA/TS-N domain
  misc_feature (74)..(744): NCBI GI: 256731064 Blast Desc: NECHADRAFT_84928 [Nectria haematococca mpVI 77-13-4]
  misc_feature (76)..(865): NCBI GI: 261351669 Blast Desc: conserved [Verticillium albo-atrum VaMs.102]
  misc_feature (7)..(743): NCBI GI: 154311347 Blast Desc: BC1G_06526 [Botryotinia fuckeliana B05.10] gi|150850923|gb|EDN26116.1| BC1G_06526 [Botryotinia fuckeliana B05.10]
  misc_feature (74)..(727): NCBI GI: 85103603 Blast Desc: NCU01189 [Neurospora crassa OR74A] gi|18376279|emb|CAD21392.1| [Neurospora crassa] gi|28923102|gb|EAA32319.1| [Neurospora crassa OR74A]
  misc_feature (8)..(735): NCBI GI: 116199127 Blast Desc: CHGG_07719 [Chaetomium globosum CBS 148.51] gi|88178998|gb|EAQ86466.1| CHGG_07719 [Chaetomium globosum CBS 148.51]
  misc_feature (23)..(810): NCBI GI: 156065247 Blast Desc: SS1G_00634 [Sclerotinia sclerotiorum 1980] gi|154691493|gb|EDN91231.1| SS1G_00634 [Sclerotinia sclerotiorum 1980]
  misc_feature (4)..(745): NCBI GI: 225554568 Blast Desc: ubiquitin interaction domain-containing protein [Ajellomyces capsulatus G186AR]
  misc_feature (1)..(721): NCBI GI: 154285774 Blast Desc: [Ajellomyces capsulatus NAm1] gi|150407323|gb|EDN02864.1| [Ajellomyces capsulatus NAm1]
  misc_feature (4)..(721): NCBI GI: 240277146 Blast Desc: ubiquitin interaction domain-containing protein [Ajellomyces capsulatus H143]
  misc_feature (1)..(721): NCBI GI: 239612022 Blast Desc: ubiquitin interaction domain-containing protein [Ajellomyces dermatitidis ER-3]
  misc_feature: Useful for introducing or modulating the production of volatile compounds
MVPSYDPSEADVAQLQELLNLSRNDAVSRLRANGNDLERAVDDYFANPDPNKYQYDESAWNSDRDGGHTAGNNFAFNIQGPDEHPPPLSFINSAAPTRPPSRTNNPSPLGKLVDLTADEATAGAPTTFAQEDADLQRALAASAAESGIQPQETGFVDRDTDAKHFGPANRPQYDADQWAMVPTGPMADPKHSLPAPSARRREAGVPVILRQSKDHHHLAPLISVYSQIPLARNALLACGLSAREYGHNPDWWRGTPILTQTTHPGPWGDDIQTDLFEELHRLMAFLDKSDRSYGNADMLADARANIEDLSSWDHDADLRFCKAIKGWARQHPGSDMESMTTTGSLTCIGPAEDEDPEDHDFTLLAIEFQDDNTYDDVSTLYDALDHMMWDVALSSDVDRFAVLSQPADVFTIRFSGGGLRKACDIPAIFYLDRYMEERKHLAVHFRRQIHLIKTKLRDLDAQATRRLRCRGGYGCAVLKDLAVEHSTLDCAQKMIDLAQELITRQSRDAQWRYRQEQWVGGSAYSMDDLRLIHTWAGPFKLHEEESAELRSLQRLIADLEEEKRQVTLHTSGYEEEKEELNGYLDVVRKRLTCQEHEVDDELFVFRADKAAYRAEYWNPCRKYLLRGAVLSKELSYVCVRGGSAQDGTSDQWWKLDCSEGGTTPPIPERTTLDDVLVMAGTHAKMPILVYASEEALQAEPTTLPDALRMFIKADNRAFQQELAQEQNSGGDSAGLKQDEPGAPNVPEVSMAGSSYDQNQQPAAVTAANLAQITEATHKRKHTSNSSIATRGSLRSDLGDVELCFDDEPEAMATDDDAPDGALVGSSPQSKLGGIVESFAKCQTQEQTAQFSAETVKVPEMREREGGRLPPIFSQGNTSQQKPIDSMDLDTEQGLIDD

SEQ ID NO: 16674 - DNA, 3720 bp, Muscodor strobelii
  misc_feature: SGI EST ID NO. CUFF.39430.1
  misc_feature: Variant of the nucleotide sequence at SEQ ID NO 16672
caacaggcgatagatttttctctagactgaggtatcagacatgatcacgtagacactcgcctcgctgccatacttgctttgatactacctaggtatctttctacagcccggttgctgagctataagcatcgagcgcaaaggcaatcacataagttggcgcagttcgattttgtccggtttcgatgtcaatggacgacgggccagctcgtcacacagagtagtcgggtctggaagacagtgcagcagcgcctgttgtccgcttgaccgtgacccaacacatgtcgtgactcgacgtaccgagcagacaagcagacaagcagacaagcgcagttagcctgcgacagtcgtggatgccgtgggtagtcgacgcccgtagattacctaggttgcctgttcctaccgacacaatcgcacccactcgctcctgctctttcgctgcctccccttcctatataatcgggctttcgaggagcattgagccaggcatcgcggccctcgcggctatccttcgccatggtgccttcgtacgacccttcagaagccgacgttgctcagctgcaagagctgctcaacctgtctcgcaacgacgctgtcagccgactgcgcgccaacggcaacgaccttgaaagagctgtcgacgactattttgcaaaccccgaccccaacaagtaccaatatgacgagtcagcctggaactcagatcgcgatggtggccatactgctggcaacaactttgctttcaacatccagggtcctgatgagcaccctccgcccctgagcttcatcaacagcgctgctcccacgcgtccgccctcgcgcaccaacaatccctccccgctgggcaagcttgtcgatctgaccgcagacgaggccaccgcaggtatgcacccgcacatccaccccaatctctcgacccccacctccaccacacactcagcctgaccctcatctcgccccttgcccaggagctcccaccacctttgcccaagaggacgccgatctgcagagggcccttgccgcctccgccgccgagtccggcatccagccccaggagaccggcttcgtcgaccgcgacaccgacgccaaacacttcggccccgccaaccgaccccagtacgacgcggaccagtgggccatggtcccgaccgggcccatggctgaccccaaacactccctgcctgccccctccgcccgcaggcgagaagccggcgtccctgtcatcctgcgccagtccaaagaccaccaccatctggcacccctcatctccgtatacagccagatccccctcgccagaaatgccctcctcgcgtgcggcctgtccgcccgcgagtacggccacaatccggactggtggagagggactcccatactgacgcagactacccatcctgggccctggggcgacgacatacagacagacctctttgaagagcttcatcgtctcatggcatttctagacaagtcagacaggagctatggcaatgcagatatgctcgctgacgctagggctaacatcgaggatctcagctcgtgggatcatgacgcggatctgcgattttgcaaggccattaagggttgggccaggcaacatccaggatccgatatggagtctatgacgaccacggggtctttgacgtgtatcggcccggccgaagacgaagacccggaggatcatgacttcactctcttagcgattgagtttcaggacgacaacacttatgacgatgtgtccacgttatacgacgctctcgatcatatgatgtgggatgtggcgctctcgtcggacgtggacaggtttgcagtgctgtctcagcctgctgatgttttcacgatacgctttagtggtggaggacttagaaaagcctgcgacatacctgctattttctatctggaccggtatatggaggagcgcaaacatctcgctgtccactttcgacggcagatccatctcatcaagactaaattgcgagatctggatgctcaagccactaggcggctcagatgccgcggtggatatgggtgtgcggtactcaaggacctcgccgtagagcacagcaccctcgactgtgcccaaaagatgatcgatttagcccaagaactcatcacgcgccagagcagagacgcgcaatggcgctaccgtcaagagcaatgggtcggaggatcagcttatagtatggatgatctccgtctcattcatacctgggcaggacctttcaagctacacgaggaagagtcggccgagctcagaagtcttcaacggttgatcgcggacctggaagaggaaaagcggcaagtcacactccatacgagcgggtatgaagaagagaaagaggaactgaatggatatctcgacgtcgtccgcaaacgactgacttgccaggaacatgaagttgacgatgagctatttgtttttcgggcagacaaggccgcctatcgcgccgagtactggaatccgtgccgaaagtacctactgcgcggcgcggtgctctcgaaggagctctcgtatgtatgcgtccgcggtggttcagctcaagatggaacgagtgatcagtggtggaaattggattgctcggaaggcggtacaacaccacccatccctgaagtaagaaacgatgtttattggccatgatgtagcaagaggaatatgctgactccctccgaagaggacaacactcgacgatgtcctggtcatggctgggactcatgcgaaaatgccaattcttgtatatgcttctgaggaggctttacaggctgaaccaaccacacttcctgatgccttgcggatgtttatcaaggccgacaaccgtgcatttcaacaagagcttgcacaggagcagaactcgggtggggactcggctggtttgaaacaagacgagccaggcgccccaaatgtaccagaagtgtccatggctggttcgtcctatgaccaaaatcagcagcccgcagctgtgacggcggccaatctagcacagatcacggaggctactcataagaggaaacacacgtcgaactcatccatcgccacgcgtggcagtcttcgtagcgacttgggggatgtggagctatgtttcgatgatgagccagaggccatggcaacggacgacgatgccccagatggggcgttggtcggcagtagcccgcagtcaaagctaggtggtatagtcgagtcattcgccaagtgccaaacacaagagcagaccgcgcaattctccgcggagacggtcaaagtaccagagatgcgtgagcgggagggtggtagactgccgcccatcttctcgcaaggcaacacgagccagcagaagcccattgattccatggatctggatacagagcaaggactcattgatgattaggcagacagcatcttgctacgtagttgggatggagtccatgcgcattctttggaggttgggatttttgcatcagttgtggattagcatagcttgaggggtgtaggctcggatagtcttagattcatcgcattggcgtttgaggagtttgagaattccgaggaggctcggtaggtcactcgtagattggcatgctggcaactttttgatacccctatctagctggcaccgtatcagcaggctggacaaaagtgcatcatcatcattactcattactatagagcatcgtgcatgatgtataagagcgaacggcgtgcatgcactatcagtatcatacatgggcatggctaatattgaaggtggtttctca

SEQ ID NO: 16675 - DNA, 1116 bp, Muscodor strobelii
  misc_feature: SGI cDNA ID NO. 565554
  misc_feature: Reduced expression when VOC is produced
  misc_feature: Encodes the peptide sequence at SEQ ID NO 16676
atggtcagggagaccaagctgtacgaccagttgagcgtcaagcctgatgcctcgccagaggagatcaaaaaggcataccggaaagctgctctgaaatggcaccccgacaagaacaaggacaatcccaacgcgagcgagaagttcaaggagtgctcgcaggcctacgagattctatctgacccggagaagcgcaagacctacgacgcacatgggcttgagttcttgcttcgtggtggcgtcccacctccgtccggcggcgacaacccctttgccggcggcggcggaggtggcatgcctggtggcttccagggcttcgacttctctagcggcggcatgcctagtggtggtagccgctttcacttcaccacgagcggcggcggcgggaatcctttcaactttagtaacccggaggacatctttgccgaattcatgcgcggccccgccggcggcagcgctatgggcgttgacgacgacgacattctcttcggcatgccgcgcgcctccgccgggcggtctggccggtcccgcagcaccttcgccggcgccgatcccttccgcgcccaccccagagataacactcccgaggtcaccaccgtcgagcgtgctctgccactgacactagaggaactgttcaatggtatcaccaagaagatgaagatcaagcgcaagacgtttgacgacacgggcaagcggacgacttcggatcaagtgcttgaggtccccatcaagcccggtctgaagaaaggcagtaagatcaagttcaagggtgtcggcgaccaggaggaaggcggcaagcaggatcttcatttcatcgtagaggaaaaaccacatccgctgttcactcgtgacggcgacgacctcatccacacggtcgatctggacctcaaggaggccttgactggctggaagcggactgtgactactattgatggtaaacagctcaccctcgacaagagtggccccaccggtcccggcatgtccgatacctatcctgatctgggcatgcccatctcaaagaagccgggcacgcgggggaagttcatcatcaaatacaacgtcaagttcccgtcctctttaacagctcaacagaagcagcaactccgagagatcctatga

SEQ ID NO: 16676 - protein, 371 aa, Muscodor strobelii
  misc_feature: SGI Peptide ID NO. 565554
  misc_feature (6)..(68): Pfam Id: PF00226 Pfam Desc: DnaJ domain
  misc_feature (250)..(371): Pfam Id: PF01556 Pfam Desc: DnaJ C terminal region
  misc_feature (250)..(317): Pfam Id: PF01556 Pfam Desc: DnaJ C terminal region
  misc_feature (1)..(371): NCBI GI: 261351670 Blast Desc: psi1 [Verticillium albo-atrum VaMs.102]
  misc_feature (1)..(371): NCBI GI: 46121509 Blast Desc: FG05133.1 [Gibberella zeae PH-1]
  misc_feature (1)..(371): NCBI GI: 85103380 Blast Desc: NCU03732 [Neurospora crassa OR74A] gi|12718276|emb|CAC28838.1| related to DNAJ-like protein homolog [Neurospora crassa] gi|28923054|gb|EAA32272.1| conserved crassa
  misc_feature (1)..(371): NCBI GI: 256731457 Blast Desc: NECHADRAFT_84927 [Nectria haematococca mpVI 77-13-4]
  misc_feature (1)..(371): NCBI GI: 171693647 Blast Desc: protein product [Podospora anserina] gi|170946772|emb|CAP73576.1| protein product [Podospora anserina]
  misc_feature (1)..(371): NCBI GI: 154311345 Blast Desc: BC1G_06525 [Botryotinia fuckeliana B05.10] gi|150850922|gb|EDN26115.1| BC1G_06525 [Botryotinia fuckeliana B05.10]
  misc_feature (1)..(371): NCBI GI: 269927016 Blast Desc: DJ1 [Cryphonectria parasitica]
  misc_feature (1)..(371): NCBI GI: 39946120 Blast Desc: MGG_08180 [Magnaporthe grisea 70-15] gi|145019436|gb|EDK03664.1| MGG_08180 [Magnaporthe grisea 70-15] gi|187373271|gb|ACD03299.1| SIS1 [Magnaporthe oryzae]
  misc_feature (1)..(371): NCBI GI: 156065249 Blast Desc: SS1G_00635 [Sclerotinia sclerotiorum 1980] gi|154691494|gb|EDN91232.1| SS1G_00635 [Sclerotinia sclerotiorum 1980]
  misc_feature (1)..(371): NCBI GI: 169612297 Blast Desc: SNOG_09267 [Phaeosphaeria nodorum SN15] gi|111062339|gb|EAT83459.1| SNOG_09267 [Phaeosphaeria nodorum SN15]
  misc_feature: Useful for introducing or modulating the production of volatile compounds
MVRETKLYDQLSVKPDASPEEIKKAYRKAALKWHPDKNKDNPNASEKFKECSQAYEILSDPEKRKTYDAHGLEFLLRGGVPPPSGGDNPFAGGGGGGMPGGFQGFDFSSGGMPSGGSRFHFTTSGGGGNPFNFSNPEDIFAEFMRGPAGGSAMGVDDDDILFGMPRASAGRSGRSRSTFAGADPFRAHPRDNTPEVTTVERALPLTLEELFNGITKKMKIKRKTFDDTGKRTTSDQVLEVPIKPGLKKGSKIKFKGVGDQEEGGKQDLHFIVEEKPHPLFTRDGDDLIHTVDLDLKEALTGWKRTVTTIDGKQLTLDKSGPTGPGMSDTYPDLGMPISKKPGTRGKFIIKYNVKFPSSLTAQQKQQLREIL

SEQ ID NO: 16677 - DNA, 2924 bp, Muscodor strobelii
  misc_feature: SGI EST ID NO. CUFF.40020.0
  misc_feature: Variant of the nucleotide sequence at SEQ ID NO 16675
ccaggagagagcattaaggttatcaaaggttaggtagcttatcgtttgtctggcctgctgataccccgcgaccccgccagcggaattacctgacggacggggattggacgtcatcagtactgcacaaggagagaattagcggtatccaccgcactttgcaacgaagaaagggaaagggttcgtaaagagaagacaatcgcacaggggagaggagagcattgcgcaattgaagtctatagactcccaccactgtttcttggtcattcttgtggacatcgttccttaacagaaacaaagcaacagctgcagaagcaagacggacccgacctatactagttgaggccccactgtggcattgtcggttgcggaaacacaagtgacaagtcgacctactacccacgccaagcacaggatatctcagggtgtctggaaagtgtcgtcgacctttcacctctgcactcggccaactcattgttgtcgtgagagaatagcggtgtctctgcggtgttgcctggaacttgggattgcacaagttgcaccttgaccttgcggcgtggcgccttctcctcgggcccagggcaggccaccaccttcgcgaagcttccagctacttcgcccagctggtgcttgatacaacgacactcgggcaccagccagacgcctgaacttagccctgtgctccttcatccggagcatctcaatcgtcttcctctcctcctcctcttcttcttactttccctcccacatgccacacattgctagcgttgttctctgcatcgcgcaaggcattccattctggttctgattcgtcaatcctacaacgcaccaccaccaccaccactaccaccaccgcccacgcctccaatccccaatccccaattcccagctctcaactcccgactgccccagcccggagcggcacacctctcaccgcgactcggcccctgattgccttgcagctcgtcactattccgacctgatacctatatcctaccctctttgctcatcctcattctcatccccgtccccatctctgtccctgtcccttcctatccgtcaccatggtcagggagaccaagctgtacgaccagttgagcgtcaagcctgatgcctcgccagaggagatcaaaaaggcataccggaaagctgctctgaaatggcaccccgacaagaacaaggacaatcccaacgcgagcgagaagttcaaggagtgctcgcaggcctacgagattctatctgacccggagaagcgcaagacctacgacgcacatgggcttgagttcttgcttcgtggtggcgtcccacctccgtccggcggcgacaacccctttgccggcggcggcggaggtggcatgcctggtggcttccagggcttcgacttctctagcggcggcatgcctagtggtggtagccgctttcacttcaccacgagcggcggcggcgggaatcctttcaactttagtaacccggaggacatctttgccgaattcatgcgcggccccgccggcggcagcgctatgggcgttgacgacgacgacattctcttcggcatgccgcgcgcctccgccgggcggtctggccggtcccgcagcaccttcgccggcgccgatcccttccgcgcccaccccagagataacactcccgaggtcaccaccgtcgagcgtgctctgccactgacactagaggaactgttcaatggtatcaccaagaagatgaagatcaagcgcaagacgtttgacgacacgggcaagcggacgacttcggatcaagtgcttgaggtccccatcaagcccggtctgaagaaaggcagtaagatcaagttcaagggtgtcggcgaccaggaggaaggcggcaagcaggatcttcatttcatcgtagaggaagtaggtcgcgcctcggtttctttttcttcatcattctcgcctcgcttctcctcccccgtcccgcttcatctggatcccgtcagttgctaacatgtgtactagaaaccacatccgctgttcactcgtgacggcgacgacctcatccacacggtcgatctggacctcaaggaggccttgactggctggaagcggactgtgactactattgatggtaaacagctcaccctcgacaagagtggccccaccggtcccggcatgtccgatacctatcctgatctgggcatgcccatctcaaagaagccgggcacgcgggggaagttcatcatcaaatacaacgtcaagttcccgtcctctttaacagctcaacagaagcagcaactccgagagatcctatgagcaaagacgccagggatgagtaatcaaaacgcatatgcccagaaaagatgagggcgggatgggtgtggagcgaaggcggaagcagaattgtttgacgacatgcatgaccacacgagattcacgactttacctttgtttcagtatctataccggatgtgcgatgccggcagggcatctgtatcgccaacaacaatggttaggacggccagtggggtttcgatttgctatcctcgacgctgcattgtcccattgttccagatcaaatacgtgttaggattaaatatttgcataggagggaggttctttgtcggcagctctcttcccgtgatcattagcccgacttattgttcacactattcagggtgttcctgcctcggaaaacggggaatgatgggctccggatgctgggtttagctcggtcagactaggtagtattgaataggtctggacagggcactgttttaatgcgacagtcggttctgttctcatgttaacagacactcgccgaggaaattcagtgaaggaggctagggtagggccacgccgacattagggtagtaatgaatgaataggacgaatcaaacttaatatgatgatcattgcttgcacgtatcaatcgccgtgctttgtctagctgtcttcctg

SEQ ID NO: 16678 - DNA, 897 bp, Muscodor strobelii
  misc_feature: SGI cDNA ID NO. 565555
  misc_feature: Encodes the peptide sequence at SEQ ID NO 16679
atgacgcggcacagcgggaacagcaccgactttcagaatcgaggtggtaggccagtgagtactggaaatcagaaccatcgcaataaccaaggtatccagggaaatcaaggcatttcgggtggccgtggtaactataagggcaagaactttgacccgaactaccatgctaggaagaagctgaacaacgatcagactgctcagcatcacttccagattcgcggctcaggagctccagacaagcagccgcgataccgcaatcagcagcaagatcgccgccactatggtgcccaaccctcctcaggtccgttttccatgccacagactttgcagcaacactttggaaacgcaggccaaggttggcaacctcaatcccagcagacccagcaccatctccagcgccaggatactcagcagaaccaggggcgacaccagcagttccgacgtcagcgggatcaggagcatcaggggttcaaggcgccatatcaacaacagcaacagaaacagcagccgccacctccaccacggttctttcccctttctcgctgggaccaacttcctgaacccgagcgagacccaatgccaagagacctacttagcgctgcatttgatctcgtgtatctcatgatcgacgacagtcacggaaaagatgaggaaggagatacgacgatgtgcgactgtccttctccaggagattatgagtgcagtcacttgcttaggcccctaatgacggatgcgatcgaagcattgaaagaatgggaagatacgcgagatagtaggtatgctgaacatatcgaccgatttatgggcacacatccgaattctactcttcagaatattgcgagagaattagaagatgtctcggactcgggtctctcctacgacgctgatctatactaa

SEQ ID NO: 16679 - protein, 298 aa, Muscodor strobelii
  misc_feature: SGI Peptide ID NO. 565555
MTRHSGNSTDFQNRGGRPVSTGNQNHRNNQGIQGNQGISGGRGNYKGKNFDPNYHARKKLNNDQTAQHHFQIRGSGAPDKQPRYRNQQQDRRHYGAQPSSGPFSMPQTLQQHFGNAGQGWQPQSQQTQHHLQRQDTQQNQGRHQQFRRQRDQEHQGFKAPYQQQQQKQQPPPPPRFFPLSRWDQLPEPERDPMPRDLLSAAFDLVYLMIDDSHGKDEEGDTTMCDCPSPGDYECSHLLRPLMTDAIEALKEWEDTRDSRYAEHIDRFMGTHPNSTLQNIARELEDVSDSGLSYDADLY

SEQ ID NO: 16680 - DNA, 599 bp, Muscodor strobelii
  misc_feature: SGI EST ID NO. CUFF.39329.0
  misc_feature: Variant of the nucleotide sequence at SEQ ID NO 16678
cgggaacagcaccgactttcagaatcgaggtggtaggccagtgagtactggaaatcagaaccatcgcaataaccaaggtatccagggaaatcaaggcatttcgggtggccgtggtaactataagggcaagaactttgacccgaactaccatgctaggaagaagctgaacaacgatcagactgctcagcatcacttccagattcgcggctcaggagctccagacaagcagccgcgataccgcaatcagcagcaagatcgccgccactatggtgcccaaccctcctcaggtccgttttccatgccacagactttgcagcaacactttggaaacgcaggccaaggttggcaacctcaatcccagcagacccagcaccatctccagcgccaggatactcagcagaaccaggggcgacaccagcagttccgacgtcagcgggatcaggagcatcaggggttcaaggcgccatatcaacaacagcaacagaaacagcagccgccacctccaccacggttctttcccctttctcgctgggaccaacttcctgaacccgagcgagacccaatgccaagagacctacttagcgctgcatttgatctcg

SEQ ID NO: 16681 - DNA, 654 bp, Muscodor strobelii
  misc_feature: SGI cDNA ID NO. 565556
  misc_feature: Encodes the peptide sequence at SEQ ID NO 16682
atggtaacttcaaagagaccaattcgcgttggcggcgcctccagcggctttacggaccgccagcgtgccattcatgatttggccaaaaactgcgatgtcgatatcatcgtcggcggagagactaactatttgacttcagactggatgtcagaatgtaccatgacaattcatggcgcagccagatttgcgaacgcggttaaagctctcgtcgaccagacttcgacatatgaccaatgcttccttggaagtatcggtcccggcctgaaagctcttcaggagaccggtacaaaaaccgccgtcaatgccggtgctagcgatccctcattattagcgagagatgtgaagaatgagatcacgaggcaaggtctaagattggaagttgcctacatcgagggtgatgaggtcacagagcaattcaacaagctgagaaaacaaggctataagttcacgagcattgatacgggcaagacgatcgatgagtgggattatacacctatctgcgctcagtatcactcactcttttctcgttctcgtgttcctatgctgacttggctagagtgtatcttggtgctcctgggaaagaacctctgcgaatacatccgatgcaaagttgtagacattccaaagacattcctcgagcgcggtagaatctga

SEQ ID NO: 16682 - protein, 217 aa, Muscodor strobelii
  misc_feature: SGI Peptide ID NO. 565556
  misc_feature (1)..(173): NCBI GI: 261358937 Blast Desc: conserved [Verticillium albo-atrum VaMs.102]
  misc_feature (5)..(171): NCBI GI: 261355824 Blast Desc: conserved [Verticillium albo-atrum VaMs.102]
  misc_feature (2)..(171): NCBI GI: 261354680 Blast Desc: conserved [Verticillium albo-atrum VaMs.102]
  misc_feature (5)..(171): NCBI GI: 189197007 Blast Desc: PTRG_04508 [Pyrenophora tritici-repentis Pt-1C-BFP] gi|187980789|gb|EDU47415.1| PTRG_04508 [Pyrenophora tritici-repentis Pt-1C-BFP]
  misc_feature (5)..(171): NCBI GI: 169616404 Blast Desc: SNOG_11374 [Phaeosphaeria nodorum SN15] gi|160703171|gb|EAT81082.2| SNOG_11374 [Phaeosphaeria nodorum SN15]
  misc_feature (14)..(169): NCBI GI: 169624294 Blast Desc: SNOG_15403 [Phaeosphaeria nodorum SN15] gi|111056216|gb|EAT77336.1| SNOG_15403 [Phaeosphaeria nodorum SN15]
  misc_feature (1)..(171): NCBI GI: 226278633 Blast Desc: conserved [Paracoccidioides brasiliensis Pb01]
  misc_feature (1)..(171): NCBI GI: 225680267 Blast Desc: conserved [Paracoccidioides brasiliensis Pb03]
  misc_feature (1)..(171): NCBI GI: 226293580 Blast Desc: conserved [Paracoccidioides brasiliensis Pb18]
  misc_feature (4)..(169): NCBI GI: 240108773 Blast Desc: CPC735_022780 [Coccidioides posadasii C735 delta SOWgp]
MVTSKRPIRVGGASSGFTDRQRAIHDLAKNCDVDIIVGGETNYLTSDWMSECTMTIHGAARFANAVKALVDQTSTYDQCFLGSIGPGLKALQETGTKTAVNAGASDPSLLARDVKNEITRQGLRLEVAYIEGDEVTEQFNKLRKQGYKFTSIDTGKTIDEWDYTPICAQYHSLFSRSRVPMLTWLECILVLLGKNLCEYIRCKVVDIPKTFLERGRI

SEQ ID NO: 16683 - DNA, 1713 bp, Muscodor strobelii
  misc_feature: SGI cDNA ID NO. 565557
  misc_feature: Reduced expression when VOC is produced
  misc_feature: Encodes the peptide sequence at SEQ ID NO 16684
atggctggccctggcggtggtccatctcgacgcagccacaccaagtcgcgcaaagggtgcgagagctgcaaacgtcggcacattcgttgcgacgaaaactttcctcaatgccggaattgcaccaaacacaaagtgcgctgcccatacaacgatgcacctccggacgagaaggcttccaccccggacaggcccctagggccagacctgatgttgacacctcagattgaggccgcaattttggagtggcagcaatccggagaattccctttcccaaatctcgtctacccggctcctcatcctaagtggtttaccttcgagcaattgtgtctcatcttccatgtcgccgcaatctgctatgagctcaacgccctcgacgccaacggtgtcactatctggactcgccatatccccacaattcttgcgatcggtgccaatcatcgctacgtcatagatgccctgcttgccttctccgctgagcatatagcaaacttgacaaattgtccgatagtcggcagtatggctttcgagtaccgtggcatggccttcaagggactgcaggaagcaatcagtgccttctcgcctgataatgccgatgctgtcttggcttgctcactcgtactgtcatggcaggcgacagattggaaaacctggacacagcttatgcaaggaacctcgagcatcattgatgctatggagcctttcaagcatgagtccaaatttaccgatttcatcaacgaaagtagcacctttcccacggctccgccgtcacctcaacccgaccgcaagcctaagcagccccacaaggacgacttggatgcatttcagcgtaatatcgcgcagctcgccaaggttgaggcgtacttgaagcagcacaaagcagaccatcaactcatccagcagctggcacagttcctcaaaggtgctcgcaaggttagtcccatccaatccatcgaggaacagtttgatcggctgcgacccctgcggacctggctattctggcttccggtggattgcctccagagcatcgggttttccccgagttctctggtcgtgatcggacactactatacagccgctatgatgatggaacgcctcttcccggagattggtgccgcctattttggcagtatgtcaatagcaccactggaagaaattgggaaacggctattgtctttcacggtcgccggcaacaatgacaccttgttcgcggagcacctgagcctgatggaatttccaatcaacactatcagcgagttccgctatcgacagggttggcatcaacccatccgcacgctatctttccctcagtttgatccgccgaatttcgtcatgaccgaacacatgtcgcacgagacgccgccaatgacagccgcattcctgccttatgctggaagcccggcgttcactttgagcacggaagatctttctacgcctgcaccagaacatgactcaggcagtgccgccagtcctatgactctgtcgtcaccctatctcagtggccattatctcgggattccgtctccgtcattcgcgccttatagcccgacttcctctttcggcgaagggtcaacgggatacagcgaccacgaagagtatggttcgttcgacagcacatacgacggtggattcgacagctatatgagttactgctcgccggagccgaacaatttgggtgttgggtttgtctccccagtccaatctgtgtggatctaa

SEQ ID NO: 16684 - protein, 570 aa, Muscodor strobelii
  misc_feature: SGI Peptide ID NO. 565557
  misc_feature (18)..(57): Pfam Id: PF00172 Pfam Desc: Fungal Zn(2)-Cys(6) binuclear cluster domain
  misc_feature (1)..(570): NCBI GI: 46109942 Blast Desc: FG01853.1 [Gibberella zeae PH-1]
  misc_feature (1)..(569): NCBI GI: 85103181 Blast Desc: NCU03686 [Neurospora crassa OR74A] gi|16944558|emb|CAD11346.1| [Neurospora crassa] gi|28923008|gb|EAA32226.1| conserved [Neurospora crassa OR74A]
  misc_feature (1)..(570): NCBI GI: 256728507 Blast Desc: [Nectria haematococca mpVI 77-13-4]
  misc_feature (1)..(569): NCBI GI: 145605537 Blast Desc: MGG_11764 [Magnaporthe grisea 70-15] gi|145013356|gb|EDJ97997.1| MGG_11764 [Magnaporthe grisea 70-15]
  misc_feature (1)..(555): NCBI GI: 116198329 Blast Desc: CHGG_07320 [Chaetomium globosum CBS 148.51] gi|88178599|gb|EAQ86067.1| CHGG_07320 [Chaetomium globosum CBS 148.51]
  misc_feature (1)..(569): NCBI GI: 171692377 Blast Desc: protein product [Podospora anserina] gi|170946137|emb|CAP72938.1| protein product [Podospora anserina]
  misc_feature (1)..(570): NCBI GI: 156051192 Blast Desc: SS1G_07003 [Sclerotinia sclerotiorum 1980] gi|154704781|gb|EDO04520.1| SS1G_07003 [Sclerotinia sclerotiorum 1980]
  misc_feature (1)..(497): NCBI GI: 261360888 Blast Desc: conserved [Verticillium albo-atrum VaMs.102]
  misc_feature (1)..(531): NCBI GI: 154299206 Blast Desc: BC1G_11781 [Botryotinia fuckeliana B05.10] gi|150857484|gb|EDN32676.1| BC1G_11781 [Botryotinia fuckeliana B05.10]
  misc_feature (1)..(425): NCBI GI: 189209105 Blast Desc: conserved [Pyrenophora tritici-repentis Pt-1C-BFP] gi|187976978|gb|EDU43604.1| conserved [Pyrenophora tritici-repentis Pt-1C-BFP]
  misc_feature: Useful for introducing or modulating the production of volatile compounds
MAGPGGGPSRRSHTKSRKGCESCKRRHIRCDENFPQCRNCTKHKVRCPYNDAPPDEKASTPDRPLGPDLMLTPQIEAAILEWQQSGEFPFPNLVYPAPHPKWFTFEQLCLIFHVAAICYELNALDANGVTIWTRHIPTILAIGANHRYVIDALLAFSAEHIANLTNCPIVGSMAFEYRGMAFKGLQEAISAFSPDNADAVLACSLVLSWQATDWKTWTQLMQGTSSIIDAMEPFKHESKFTDFINESSTFPTAPPSPQPDRKPKQPHKDDLDAFQRNIAQLAKVEAYLKQHKADHQLIQQLAQFLKGARKVSPIQSIEEQFDRLRPLRTWLFWLPVDCLQSIGFSPSSLVVIGHYYTAAMMMERLFPEIGAAYFGSMSIAPLEEIGKRLLSFTVAGNNDTLFAEHLSLMEFPINTISEFRYRQGWHQPIRTLSFPQFDPPNFVMTEHMSHETPPMTAAFLPYAGSPAFTLSTEDLSTPAPEHDSGSAASPMTLSSPYLSGHYLGIPSPSFAPYSPTSSFGEGSTGYSDHEEYGSFDSTYDGGFDSYMSYCSPEPNNLGVGFVSPVQSVWI

SEQ ID NO: 16685 - DNA, 3882 bp, Muscodor strobelii
  misc_feature: SGI EST ID NO. CUFF.40490.3
  misc_feature: Variant of the nucleotide sequence at SEQ ID NO 16683
cgccaatgtgcatgctgctgctggcccctagctgctcggccgtgaccccatcaggtataacaacccaggcctctcccctccaactcgctccgtctcgatttagtcccatccatccataatccaagataccatctcggctttgccaacctcaccaccacactcgctttttgcaacccaactcctaggaagtcctcgtcgactcctgtcattcgcttgttcctttttttgtgtttgggagattttggatagctatagtcacttctaaccaagttactcataaccacccatcgtactcttgccaacccctcttgtctgccatagcattaccatcgtcgctcccgactcgatagtaaaagcgctaagagcctctcaaccggcccggcctgcaacgatcgaaactctctggtgctcgctcttgttgtcgccgccgctcttagcttgtatatgacggtacagccatcccattagaacagaacctcgtggtcgctattcggggtattcaatcgctttaaacaccattaaagaatagggaatcttcgcctgaacaacaacacatttgatccgtcccgaaccactcttcgcagagtgtggttaatcctgtaccgtgctggactgctgccacgaacgctgtgggcactgccaatcaacaccaagcccgtgtgtttatgacttgtccactatagcctgattcgactcactctcactctccgagccacatcaaaaagctggtgaccaagcagctcgtatgacggatctatactaaagaaacaaactactcaaatcaaccacccacgctcgcttcgcatttggtacgatattctgttcgtgccttgttttacattttttttcgttcgtttcattttaaagacattcagtttttgcaatggctggccctggcggtggtccatctcgacgcagccacaccaagtcgcgcaaagggtgcgagagctgcaaacgtcggcacattcgttgcgacgaaaactttcctcaatgccggaattgcaccaaacacaaagtgcgctgcccatacaacgatgcacctccggacgagaaggcttccaccccggacaggcccctagggccagacctgatgttgacacctcagattgaggccgcaattttggagtggcagcaatccggagaattccctttcccaaatctcgtctacccggctcctcatcctaagtggtttaccttcgagcaattgtgtctcatcttccatgtcgccgcaatctgctatgagctcaacgccctcgacgccaacggtgtcactatctggactcgccatatccccacaattcttgcgatcggtgccaatcatcgctacgtcatagatgccctgcttgccttctccgctgagcatatagcaaacttgacaaattgtccgatagtcggcagtatggctttcgagtaccgtggcatggccttcaagggactgcaggaagcaatcagtgccttctcgcctgataatgccgatgctgtcttggcttgctcactcgtactgtcatggcaggcgacagattggaaaacctggacacagcttatgcaaggaacctcgagcatcattgatgctatggagcctttcaagcatgagtccaaatttaccgatttcatcaacgaaagtagcacctttcccacggctccgccgtcacctcaacccgaccgcaagcctaagcagccccacaaggacgacttggatgcatttcagcgtaatatcgcgcagctcgccaaggttgaggcgtacttgaagcagcacaaagcagaccatcaactcatccagcagctggcacagttcctcaaaggtgctcgcaaggttagtcccatccaatccatcgaggaacagtttgatcggctgcgacccctgcggacctggctattctggcttccggtggattgcctccagagcatcgggttttccccgagttctctggtcgtgatcggacactactatacagccgctatgatgatggaacgcctcttcccggagattggtgccgcctattttggcagtatgtcaatagcaccactggaagaaattgggaaacggctattgtctttcacggtcgccggcaacaatgacaccttgttcgcggagcacctgagcctgatggaatttccaatcaacactatcagcgagttccgctatcgacagggttggcatcaacccatccgcacgctatctttccctcagtttgatccgccgaatttcgtcatgaccgaacacatgtcgcacgagacgccgccaatgacagccgcattcctgccttatgctggaagcccggcgttcactttgagcacggaagatctttctacgcctgcaccagaacatgactcaggcagtgccgccagtcctatgactctgtcgtcaccctatctcagtggccattatctcgggattccgtctccgtcattcgcgccttatagcccgacttcctctttcggcgaagggtcaacgggatacagcgaccacgaagagtatggttcgttcgacagcacatacgacggtggattcgacagctatatgagttactgctcgccggagccgaacaatttgggtgttgggtttgtctccccagtccaatctgtgtggatctaagcggcgcgtcgcgtagttccagagccgtggatgtggactcatggttgaccgaactcaggaccaatagtgctcagcatgttgcaccaccgggctacccccggcttcaaattccgtttcatcgccacaacacggatgattcggtcgcaactgtgcagtccagcgcttttcagactgtgccctccccattcttagggcccgagcaatggtctgcggctcatcgccacgaatccaccacgccgctttcgatctcggcaccttcgccagtcttcacctacccacaccacatacaacaccaccgccacagttcgtcgacatcgtctgctcctccacatctgaagagagaagaagagagttgagatgtcagaccgctcaagtcgaaccgcaacgcactaactgaatgttcttttttttcacgcttatacattttaatacaacttcgacacagacgccatggtacaccacgctcctttgacaggacctacgatcgcacatgttcgcatcgacacaatgattgcacgcattccttatctattacaactattaccagtccttaatcagtacaccataatgatccagcttacgacgttccttacgaagatacccgggaaatacccactagacactccttacgcaagtatcgcctcatagaccggcctccacgttccttacgactcacggcgatttctataccatggtcatagaaggtcatccattcctttgagagttgaattatctggaattacaatacccaaacccttgttaccaaaatgcatagcgactgattaccacctttacaccggagcacaaaattgcacgattgcgcaggctattattacttgcatggatggcgtttttgttttgcttttatgaaaatttccgggctctcagttggacacgacatgtcgcttttgattaattggaggcgcttgacttatctatttgctagggtgacagctgacgcctcgtgtgctggctctgagaggatgaatttatggagtaaatggcgtttatttatttattttttccacccaagacaacagtagagatcgggaacaagagacacattgcgagtatggtcttgagttcattaccggatgtttgatgcttcccgactactcggagatatcgagagaccaaaagaagcaaatgcacacaacgcgaatgaagactattataccagtcttgtcagtcgacggttagctaattctaataataatccgtactgagttatttgtcatcgatctcgaaccctacatgtgaaagtgaatatagtacaatgaatgaag

SEQ ID NO: 16686 - DNA, 1977 bp, Muscodor strobelii
  misc_feature: SGI cDNA ID NO. 565558
  misc_feature: Reduced expression when VOC is produced
  misc_feature: Encodes the peptide sequence at SEQ ID NO 16687
atggctggccctggcggtggtccatctcgacgcagccacaccaagtcgcgcaaagggtgcgagagctgcaaacgtcggcacattcgttgcgacgaaaactttcctcaatgccggaattgcaccaaacacaaagtgcgctgcccatacaacgatgcacctccggacgagaaggcttccaccccggacaggcccctagggccagacctgatgttgacacctcagattgaggccgcaattttggagtggcagcaatccggagaattccctttcccaaatctcgtctacccggctcctcatcctaagtggtttaccttcgagcaattgtgtctcatcttccatgtcgccgcaatctgctatgagctcaacgccctcgacgccaacggtgtcactatctggactcgccatatccccacaattcttgcgatcggtgccaatcatcgctacgtcatagatgccctgcttgccttctccgctgagcatatagcaaacttgacaaattgtccgatagtcggcagtatggctttcgagtaccgtggcatggccttcaagggactgcaggaagcaatcagtgccttctcgcctgataatgccgatgctgtcttggcttgctcactcgtactgtcatggcaggcgacagattggaaaacctggacacagcttatgcaaggaacctcgagcatcattgatgctatggagcctttcaagcatgagtccaaatttaccgatttcatcaacgaaagtagcacctttcccacggctccgccgtcacctcaacccgaccgcaagcctaagcagccccacaaggacgacttggatgcatttcagcgtaatatcgcgcagctcgccaaggttgaggcgtacttgaagcagcacaaagcagaccatcaactcatccagcagctggcacagttcctcaaaggtgctcgcaaggttagtcccatccaatccatcgaggaacagtttgatcggctgcgacccctgcggacctggctattctggcttccggtggattgcctccagagcatcgggttttccccgagttctctggtcgtgatcggacactactatacagccgctatgatgatggaacgcctcttcccggagattggtgccgcctattttggcagtatgtcaatagcaccactggaagaaattgggaaacggctattgtctttcacggtcgccggcaacaatgacaccttgttcgcggagcacctgagcctgatggaatttccaatcaacactatcagcgagttccgctatcgacagggttggcatcaacccatccgcacgctatctttccctcagtttgatccgccgaatttcgtcatgaccgaacacatgtcgcacgagacgccgccaatgacagccgcattcctgccttatgctggaagcccggcgttcactttgagcacggaagatctttctacgcctgcaccagaacatgactcaggcagtgccgccagtcctatgactctgtcgtcaccctatctcagtggccattatctcgggattccgtctccgtcattcgcgccttatagcccgacttcctctttcggcgaagggtcaacgggatacagcgaccacgaagagtatggttcgttcgacagcacatacgacggtggattcgacagctatatgagttactgctcgccggagccgaacaatttgggtgttgggaccaatagtgctcagcatgttgcaccaccgggctacccccggcttcaaattccgtttcatcgccacaacacggatgattcggtcgcaactgtgcagtccagcgcttttcagactgtgccctccccattcttagggcccgagcaatggtctgcggctcatcgccacgaatccaccacgccgctttcgatctcggcaccttcgccagtcttcacctacccacaccacatacaacaccaccgccacagttcgtcgacatcgtctgctcctccacatctgaagagagaagaagagagttga

SEQ ID NO: 16687 - protein, 658 aa, Muscodor strobelii
  misc_feature: SGI Peptide ID NO. 565558
  misc_feature (18)..(57): Pfam Id: PF00172 Pfam Desc: Fungal Zn(2)-Cys(6) binuclear cluster domain
  misc_feature (1)..(560): NCBI GI: 46109942 Blast Desc: FG01853.1 [Gibberella zeae PH-1]
  misc_feature (1)..(536): NCBI GI: 85103181 Blast Desc: NCU03686 [Neurospora crassa OR74A] gi|16944558|emb|CAD11346.1| [Neurospora crassa] gi|28923008|gb|EAA32226.1| conserved [Neurospora crassa OR74A]
  misc_feature (1)..(560): NCBI GI: 145605537 Blast Desc: MGG_11764 [Magnaporthe grisea 70-15] gi|145013356|gb|EDJ97997.1| MGG_11764 [Magnaporthe grisea 70-15]
  misc_feature (1)..(560): NCBI GI: 256728507 Blast Desc: [Nectria haematococca mpVI 77-13-4]
  misc_feature (1)..(608): NCBI GI: 116198329 Blast Desc: CHGG_07320 [Chaetomium globosum CBS 148.51] gi|88178599|gb|EAQ86067.1| CHGG_07320 [Chaetomium globosum CBS 148.51]
  misc_feature (1)..(542): NCBI GI: 171692377 Blast Desc: protein product [Podospora anserina] gi|170946137|emb|CAP72938.1| protein product [Podospora anserina]
  misc_feature (1)..(531): NCBI GI: 156051192 Blast Desc: SS1G_07003 [Sclerotinia sclerotiorum 1980] gi|154704781|gb|EDO04520.1| SS1G_07003 [Sclerotinia sclerotiorum 1980]
  misc_feature (1)..(497): NCBI GI: 261360888 Blast Desc: conserved [Verticillium albo-atrum VaMs.102]
  misc_feature (1)..(531): NCBI GI: 154299206 Blast Desc: BC1G_11781 [Botryotinia fuckeliana B05.10] gi|150857484|gb|EDN32676.1| BC1G_11781 [Botryotinia fuckeliana B05.10]
  misc_feature (1)..(425): NCBI GI: 189209105 Blast Desc: conserved [Pyrenophora tritici-repentis Pt-1C-BFP] gi|187976978|gb|EDU43604.1| conserved [Pyrenophora tritici-repentis Pt-1C-BFP]
  misc_feature: Useful for introducing or modulating the production of volatile compounds
MAGPGGGPSRRSHTKSRKGCESCKRRHIRCDENFPQCRNCTKHKVRCPYNDAPPDEKASTPDRPLGPDLMLTPQIEAAILEWQQSGEFPFPNLVYPAPHPKWFTFEQLCLIFHVAAICYELNALDANGVTIWTRHIPTILAIGANHRYVIDALLAFSAEHIANLTNCPIVGSMAFEYRGMAFKGLQEAISAFSPDNADAVLACSLVLSWQATDWKTWTQLMQGTSSIIDAMEPFKHESKFTDFINESSTFPTAPPSPQPDRKPKQPHKDDLDAFQRNIAQLAKVEAYLKQHKADHQLIQQLAQFLKGARKVSPIQSIEEQFDRLRPLRTWLFWLPVDCLQSIGFSPSSLVVIGHYYTAAMMMERLFPEIGAAYFGSMSIAPLEEIGKRLLSFTVAGNNDTLFAEHLSLMEFPINTISEFRYRQGWHQPIRTLSFPQFDPPNFVMTEHMSHETPPMTAAFLPYAGSPAFTLSTEDLSTPAPEHDSGSAASPMTLSSPYLSGHYLGIPSPSFAPYSPTSSFGEGSTGYSDHEEYGSFDSTYDGGFDSYMSYCSPEPNNLGVGTNSAQHVAPPGYPRLQIPFHRHNTDDSVATVQSSAFQTVPSPFLGPEQWSAAHRHESTTPLSISAPSPVFTYPHHIQHHRHSSSTSSAPPHLKREEES

SEQ ID NO: 16688 - DNA, 3882 bp, Muscodor strobelii; identical to SEQ ID NO: 16685
  misc_feature: SGI EST ID NO. CUFF.40490.3
  misc_feature: Variant of the nucleotide sequence at SEQ ID NO 16686

SEQ ID NO: 16689 - DNA, 393 bp, Muscodor strobelii
  misc_feature: SGI cDNA ID NO. 565559
  misc_feature: Encodes the peptide sequence at SEQ ID NO 16690
atggtggtacctcgttctgaaagcaccagtttgcagtgggccccagctgctctactggtagcagccggtcaagtagagtttctaagcttggagatggtgctcgttggcgctggcgttggcgctggtgcgaatgcccgcgttggctcgggtttggttggcgagcgtgagggcgcaggcccgcactcgcaagcgcttgtacctaggacggcgctggtacctccgctcgaccctgacgagcctgaccacatcagacccgacccccagtcgtgcacacactgcgctgctctcatcctcggccgtcctgcgctgccacagcctccttcctctgcccatcctctctgcccatctggtctgcccatgcgcgccaatgtgcatgctgctgctggcccctag

SEQ ID NO: 16690 - protein, 130 aa, Muscodor strobelii
  misc_feature: SGI Peptide ID NO. 565559
MVVPRSESTSLQWAPAALLVAAGQVEFLSLEMVLVGAGVGAGANARVGSGLVGEREGAGPHSQALVPRTALVPPLDPDEPDHIRPDPQSCTHCAALILGRPALPQPPSSAHPLCPSGLPMRANVHAAAGP

SEQ ID NO: 16691 - DNA, 618 bp, Muscodor strobelii
  misc_feature: SGI cDNA ID NO. 565560
  misc_feature: Encodes the peptide sequence at SEQ ID NO 16692
atgcagtacagactctcgctttttgcttttggcagcaccgctattgccgcctcctcgtgtcccgatggcagtggcgaaagcagcatcaacgactataccttctgctgccccgggagtctgtatacctccaacaccaatggccaaatcacagaagcagcctgtatagtaggctgtgatgtcgaggacgtccgcccggactgctggccactctgcgaagacggcgaccaaggatacaccacgacaatcggaagctgcaccaccgttccactcaccgcgagcaactactccgagcgcgtgggttacagcaccgggggcgctgccatcactgtctcaggctccgctggaacaaccacaaaagactccagctcagccacaaccacacaagaaagtacgagcacgctcgatgcgtcatcgaatttctccacggtcgtctctaccagcgctgcgggtgattcgactacactcgctaccactggctcctcctccacctctggaatctctccctcaagctctagcaactctccgacaagttccagttccgagggcagtgctccagtcatcactcaagcgcccgtccttgctctggctggcgcgcttgccgggatcgccttgctctag

SEQ ID NO: 16692 - protein, 205 aa, Muscodor strobelii
  misc_feature: SGI Peptide ID NO. 565560
MQYRLSLFAFGSTAIAASSCPDGSGESSINDYTFCCPGSLYTSNTNGQITEAACIVGCDVEDVRPDCWPLCEDGDQGYTTTIGSCTTVPLTASNYSERVGYSTGGAAITVSGSAGTTTKDSSSATTTQESTSTLDASSNFSTVVSTSAAGDSTTLATTGSSSTSGISPSSSSNSPTSSSSEGSAPVITQAPVLALAGALAGIALL

SEQ ID NO: 16693 - DNA, 1323 bp, Muscodor strobelii
  misc_feature: SGI cDNA ID NO. 565561
  misc_feature: Encodes the peptide sequence at SEQ ID NO 16694
ctctgcctctcagaggacgacgtcgcccgctgctcccagcgcctcctcgacggccgcctcttcagcgccaacccgggctacgtgcgcacccagatcatccacagcctgctgcaggacgacgagcccgcccacctgtaccccatcgccatcttcctgctgctcgccggccgcgccgacaacgcctgcttccgcaacatggttgacgagggctgcttcccgcgcctcgtcaccctcgtccgcggccgcaacgacgcagacccggccctgcaccacgtcctgctcgagctggtctacgacatgtcgcgcatcgagcagctgcgccccgatgacctgggccacgtcgacgacggcttcgtgtcctatctgttcgacacgatcgagaacagcgccgacgacgtcaacgactcgtggcactaccccgtcatccgcgtgctgctggtgctcaacgagcagtacatggtcgcttctgccacggccgtcgccgaccccgcctcgcccaccgcgccgctcaccaacagagttgtcaagtgcctgagtctccatggcgagacctacaggacctttggcgaatgcatcatcctgatgctcaaccgcgaaaccgaaacctcgatgcagctgctcatcttgaagctgttctatctccttttcaccaccagggcgacgtacgaatacttctacaccaacgatctccgcgtcctcgtcgatgtcatcattcggaaccttctggatctccccaatgagctcacttctctgaggcacacctatcttcgcgtcctatacccgctacttgcccacacacaactcagccagcccccgcactacaagaagtacgaactccagaagacgatcgcgctgttgtctagaaacgacaacgcccactttgaagccgccgatgagaccaccctccgtctcgtcgaccgcgtttctaaggtcccgtggctgctagaagatggagctggcaatggcgagatggctcgcagattcctgggcatcactttatccccaaccgccgctgccagcagcgttagtgttgtcgacgtggcagcggtgacagagaagccgggcgtgcaaacgcctagccgaagaactgatggagacggcggcaagaatcacgtatcacatgagcccaggaccgctccacccagacccaaagccgccaagccgcctcctcctgaggtccctaggcacaaatatggcataccctttgcgaagacaccgcccgcgaacgagaatgcaccacgacggaagaagccaccgactccgccgccgacaagacgaaaaggtaggctgcatttgacttcctcggtatcgggtccttcatag

SEQ ID NO: 16694 - protein, 440 aa, Muscodor strobelii
  misc_feature: SGI Peptide ID NO. 565561
  misc_feature (133)..(282): Pfam Id: PF09431 Pfam Desc: Domain of function (DUF2013)
  misc_feature (1)..(403): NCBI GI: 261361178 Blast Desc: LDB17 [Verticillium albo-atrum VaMs.102]
  misc_feature (4)..(430): NCBI GI: 46123993 Blast Desc: FG06374.1 [Gibberella zeae PH-1]
  misc_feature (1)..(404): NCBI GI: 256732439 Blast Desc: [Nectria haematococca mpVI 77-13-4]
  misc_feature (4)..(426): NCBI GI: 154300306 Blast Desc: BC1G_11342 [Botryotinia fuckeliana B05.10] gi|150856665|gb|EDN31857.1| BC1G_11342 [Botryotinia fuckeliana B05.10]
  misc_feature (4)..(430): NCBI GI: 156042366 Blast Desc: SS1G_10980 [Sclerotinia sclerotiorum 1980] gi|154695367|gb|EDN95105.1| SS1G_10980 [Sclerotinia sclerotiorum 1980]
  misc_feature (4)..(399): NCBI GI: 39942958 Blast Desc: MGG_03559 [Magnaporthe grisea 70-15] gi|145009878|gb|EDJ94534.1| MGG_03559 [Magnaporthe grisea 70-15]
  misc_feature (4)..(416): NCBI GI: 116179642 Blast Desc: CHGG_00449 [Chaetomium globosum CBS 148.51] gi|88184746|gb|EAQ92214.1| CHGG_00449 [Chaetomium globosum CBS 148.51]
  misc_feature (5)..(399): NCBI GI: 189091800 Blast Desc: [Podospora anserina] gi|188219253|emb|CAP49233.1| protein product [Podospora anserina]
  misc_feature (5)..(399): NCBI GI: 27803010 Blast Desc: protein product [Podospora anserina]
  misc_feature (3)..(397): NCBI GI: 212534684 Blast Desc: conserved [Penicillium marneffei ATCC 18224] gi|210069897|gb|EEA23987.1| conserved [Penicillium marneffei ATCC 18224]
LCLSEDDVARCSQRLLDGRLFSANPGYVRTQIIHSLLQDDEPAHLYPIAIFLLLAGRADNACFRNMVDEGCFPRLVTLVRGRNDADPALHHVLLELVYDMSRIEQLRPDDLGHVDDGFVSYLFDTIENSADDVNDSWHYPVIRVLLVLNEQYMVASATAVADPASPTAPLTNRVVKCLSLHGETYRTFGECIILMLNRETETSMQLLILKLFYLLFTTRATYEYFYTNDLRVLVDVIIRNLLDLPNELTSLRHTYLRVLYPLLAHTQLSQPPHYKKYELQKTIALLSRNDNAHFEAADETTLRLVDRVSKVPWLLEDGAGNGEMARRFLGITLSPTAAASSVSVVDVAAVTEKPGVQTPSRRTDGDGGKNHVSHEPRTAPPRPKAAKPPPPEVPRHKYGIPFAKTPPANENAPRRKKPPTPPPTRRKGRLHLTSSVSGPS

SEQ ID NO: 16695 - DNA, 1710 bp, Muscodor strobelii
  misc_feature: SGI EST ID NO. CUFF.39395.0
  misc_feature: Variant of the nucleotide sequence at SEQ ID NO 16693
ctctgcctctcagaggacgacgtcgcccgctgctcccagcgcctcctcgacggccgcctcttcagcgccaacccgggctacgtgcgcacccagatcatccacagcctgctgcaggacgacgagcccgcccacctgtaccccatcgccatcttcctgctgctcgccggccgcgccgacaacgcctgcttccgcaacatggttgacgagggctgcttcccgcgcctcgtcaccctcgtccgcggccgcaacgacgcagacccggccctgcaccacgtcctgctcgagctggtctacgacatgtcgcgcatcgagcagctgcgccccgatgacctgggccacgtcgacgacggcttcgtgtcctatctgttcgacacgatcgagaacagcgccgacgacgtcaacgactcgtggcactaccccgtcatccgcgtgctgctggtgctcaacgagcagtacatggtcgcttctgccacggccgtcgccgaccccgcctcgcccaccgcgccgctcaccaacagagttgtcaagtgcctgagtctccatggcgagacctacaggacctttggcgaatgcatcatcctgatgctcaaccgcgaaaccgaaacctcgatgcagctgctcatcttgaagctgttctatctccttttcaccaccagggcgacgtacgaatacttctacaccaacgatctccgcgtcctcgtcgatgtcatcattcggaaccttctggatctccccaatgagctcacttctctgaggcacacctatcttcgcgtcctatacccgctacttgcccacacacaactcagccagcccccgcactacaagaagtacgaactccagaagacgatcgcgctgttgtctagaaacgacaacgcccactttgaagccgccgatgagaccaccctccgtctcgtcgaccgcgtttctaaggtcccgtggctgctagaagatggagctggcaatggcgagatggctcgcagattcctgggcatcactttatccccaaccgccgctgccagcagcgttagtgttgtcgacgtggcagcggtgacagagaagccgggcgtgcaaacgcctagccgaagaactgatggagacggcggcaagaatcacgtatcacatgagcccaggaccgctccacccagacccaaagccgccaagccgcctcctcctgaggtccctaggcacaaatatggcataccctttgcgaagacaccgcccgcgaacgagaatgcaccacgacggaagaagccaccgactccgccgccgacaagacgaaaaggtaggctgcatttgacttcctcggtatcgggtccttcatagtatcaaaggatatagactttatgaggcgcgacgtttcacaaatgcgtaggcgagtagcaggtcggggacacagatgtccgaaaagtgacgacaaaggagaatgaagtaaggaatatactatccctcccgtgaagaaagttgtggacgcaacggggacgtctgggcacgggaatgagacacgatgcacgaagcatggcgctcgataggaatgaaacagcggcggatggttcaagacatcgcatttacatgagcacggtgttgggtgtgtctagtttgttttcgccatggggtttgattagctggccttttgtatttttgctgtggtagacgttaccaatcaattctcgacagaagaattatacaacattacacattgacggacttacg

SEQ ID NO: 16696 - DNA, 1251 bp, Muscodor strobelii
  misc_feature: SGI cDNA ID NO. 565562
  misc_feature: Encodes the peptide sequence at SEQ ID NO 16697
atgggcgccggaaagtcacttattggggccgccttagtctttggaggcgcaattaacgcgctgactctacgaccagcaaggcggaagaccgagtatactgagaatccaagcactgcttatccggagtatcatccgtttcagtactactcattacctgaccctactcgccagatccgactcgtacggattgacggtgacctcgccccaggagacttcatccgatgcgagacaaagatcatcagcatcgatggtgattctacttactattctgccctctcttatacctgggggaatccaaaccgaaagaagcaaataatactaaatggcggactctttgaagttacggagaaccttcatgagtttttagagcatgccgtcgagcggattaacgcaaacggcaaatcaaggggaagtaagaaatgggctgggtggtggtggattgatgccatctgcatcaaccagaatgatgtctatgtggagaagagcgcgcagttggccttgatgggcaacatttttacaaatgcgtgggaagtcattgcatggattggagaagcaggggacaacactgagcttacattccatcgtatcagggagttgtgccgaatcgacgaagacaaacgcggtagacgacctagcgtggaagaaaacaagctccttaaggagctgcaacaagataaacaactcacgagcggcattggtcacatgtttaagaagccatactgggaacgaatgtggatcctgcaggaattggctctgtcaagctggacgattctcgtctgtggtagacacgagctgaagtggaccaccatggtcgactttgcgatgcagatgcaactgtccatgcgaggcgatcccacaaaatccaacgcagtcaccatactaggcagcgcgcggaaagctgtcgagaatacacgtaatgtgtggctcatctcccaaattcaacgtcacacgcgaggtcacatagacttcagccttattctttacctatctcgatatcaactgacccgggaggagaaagatcgaatctatgggctcttgagtcttgtctctaagcgatacaaagacttgataggacgtccgcgacaaaatcagtcaccatgccagctttttggctacgtggctcggatcgtgtacagcgacatgcagcagttcagtgatgggaagtcaggacggctcaaggagatacagatcgccagacagggatacggcctattcatcacgtggaagaagttctcacagaaggtagattag

SEQ ID NO: 16697 - protein, 416 aa, Muscodor strobelii
  misc_feature: SGI Peptide ID NO. 565562
  misc_feature (89)..(249): Pfam Id: PF06985 Pfam Desc: Heterokaryon incompatibility protein (HET)
  misc_feature (146)..(187): Pfam Id: PF06985 Pfam Desc: Heterokaryon incompatibility protein (HET)
  misc_feature (22)..(262): NCBI GI: 169614413 Blast Desc: SNOG_10347 [Phaeosphaeria nodorum SN15] gi|111061562|gb|EAT82682.1| SNOG_10347 [Phaeosphaeria nodorum SN15]
  misc_feature (89)..(348): NCBI GI: 46127365 Blast Desc: FG08060.1 [Gibberella zeae PH-1]
  misc_feature (86)..(386): NCBI GI: 171692617 Blast Desc: protein product [Podospora anserina] gi|170946257|emb|CAP73058.1| protein product [Podospora anserina]
  misc_feature (27)..(348): NCBI GI: 238507802 Blast Desc: conserved [Aspergillus flavus NRRL3357] gi|220688621|gb|EED44973.1| conserved [Aspergillus flavus NRRL3357]
  misc_feature (89)..(352): NCBI GI: 256733030 Blast Desc: NECHADRAFT_78922 [Nectria haematococca mpVI 77-13-4]
  misc_feature (56)..(353): NCBI GI: 256721799 Blast Desc: NECHADRAFT_53281 [Nectria haematococca mpVI 77-13-4]
  misc_feature (44)..(349): NCBI GI: 169604370 Blast Desc: SNOG_05197 [Phaeosphaeria nodorum SN15] gi|111066468|gb|EAT87588.1| SNOG_05197 [Phaeosphaeria nodorum SN15]
  misc_feature (48)..(350): NCBI GI: 154292443 Blast Desc: BC1G_14540 [Botryotinia fuckeliana B05.10] gi|150846126|gb|EDN21319.1| BC1G_14540 [Botryotinia fuckeliana B05.10]
  misc_feature (46)..(350): NCBI GI: 238483469 Blast Desc: conserved [Aspergillus flavus NRRL3357] gi|220701023|gb|EED57361.1| conserved [Aspergillus flavus NRRL3357]
  misc_feature (46)..(348): NCBI GI: 169764315 Blast Desc: [Aspergillus oryzae RIB40] gi|83764483|dbj|BAE54627.1| protein product [Aspergillus oryzae]
MGAGKSLIGAALVFGGAINALTLRPARRKTEYTENPSTAYPEYHPFQYYSLPDPTRQIRLVRIDGDLAPGDFIRCETKIISIDGDSTYYSALSYTWGNPNRKKQIILNGGLFEVTENLHEFLEHAVERINANGKSRGSKKWAGWWWIDAICINQNDVYVEKSAQLALMGNIFTNAWEVIAWIGEAGDNTELTFHRIRELCRIDEDKRGRRPSVEENKLLKELQQDKQLTSGIGHMFKKPYWERMWILQELALSSWTILVCGRHELKWTTMVDFAMQMQLSMRGDPTKSNAVTILGSARKAVENTRNVWLISQIQRHTRGHIDFSLILYLSRYQLTREEKDRIYGLLSLVSKRYKDLIGRPRQNQSPCQLFGYVARIVYSDMQQFSDGKSGRLKEIQIARQGYGLFITWKKFSQKVD

SEQ ID NO: 16698 - DNA, 2338 bp, Muscodor strobelii
  misc_feature: SGI EST ID NO. CUFF.39434.1
  misc_feature: Variant of the nucleotide sequence at SEQ ID NO 16696
gagcatcagagccgcttcatagatacatttggatatgtcaaggcagaatcaggttgactgctgacagccgacatgagaatcgagaggtttacgcgaaggctttgcgaatgcatcatgcatcctgcgtagtattgagtagtgtctgcgccaccctccccagagtcgctggtagtttgggtgccccgcactcaattcgaggctgtatattaggtagactagaacgtccaaaagaaacgaatgcatttgtgcttaaaaacaggtggctctgcggtgctcctcccatcatgtcttctaccatgatcgctgcagcgggaagagggtctgtcgacaagtatgggcgccggaaagtcacttattggggccgccttagtctttggaggcgcaattaacgcgctgactctacgaccagcaaggcggaagaccgagtatactgagaatccaaggtataggtcttccacctttacgcgaccacgacgaagtcgctctagaacttcacgacgtagcactgcttatccggagtatcatccgtttcagtactactcattacctgaccctactcgccagatccgactcgtacggattgacggtgacctcgccccaggagacttcatccgatgcgagacaaagatcatcagcatcgatggtgattctacttactattctgccctctcttatacctgggggaatccaaaccgaaagaagcaaataatactaaatggcggactctttgaagttacggagaaccttcatgagtttttagagcatgccgtcgagcggattaacgcaaacggcaaatcaaggggaagtaagaaatgggctgggtggtggtggattgatgccatctgcatcaaccagaatgatgtctatgtggagaagagcgcgcagttggccttgatgggcaacatttttacaaatgcgtgggaagtcattgcatggattggagaagcaggggacaacactgagcttacattccatcgtatcagggagttgtgccgaatcgacgaagacaaacgcggtagacgacctagcgtggaagaaaacaagctccttaaggagctgcaacaagataaacaactcacgagcggcattggtcacatgtttaagaagccatactgggaacgaatgtggatcctgcaggaattggctctgtcaagctggacgattctcgtctgtggtagacacgagctgaagtggaccaccatggtcgactttgcgatgcagatgcaactgtccatgcgaggcgatcccacaaaatccaacgcagtcaccatactaggcagcgcgcggaaagctgtcgagaatacacgtaatgtgtggctcatctcccaaattcaacgtcacacgcgaggtcacatagacttcagccttattctttacctatctcgatatcaactgacccgggaggagaaagatcgaatctatgggctcttgagtcttgtctctaagcgatacaaagacttgataggacgtccgcgacaaaatcagtcaccatgccagctttttggctacgtggctcggatcgtgtacagcgacatgcagcagttcaggttcgcggaaatcttgaaacatgcaccaaaggactatcccgatctcgacacattgtatcgcagcccggacgcgcggagatatacattacaaaccatgcgagataccatggagagaagctcatgtcacaaccctttcgctgagccaactcatcactgcccaacgagcgaatgttcccaatttggttgtacatcgtatcgttgtcaagggaccgactgcctacttgctttgtacaggtttctggaaagcatttacgatccagcaacagtatataccaggttttcaggcgaccagcaaatagagcttggtggtcacgaagcctcgatatctcgcagccgatctagatctcgcaacaggtcgaggtccaaacgaaggttaaaacgtcgaagtagcgtcaggaggctagtatcctcagtgatgggaagtcaggacggctcaaggagatacagatcgccagacagggatacggcctattcatcacgtggaagaagttctcacagaaggtagattagatacccaggctcggtaggttcagattgttagtacatcaggttaggttgcctcacggaggtgagactagtggtcgtggacgcttgcggaagtgctgtagacgcttatgtgggatgaatgataacaagatgactttctaactaccttccgaatacaccgatgaataacgctggtacctatatacatctaaaactcctgtatcatgctctctggagcgtaccgtattaccttatgtggtggtctgaatgagcgggctactttgtgacagactgtaacatactcg

SEQ ID NO: 16699 - DNA, 981 bp, Muscodor strobelii
  misc_feature: SGI cDNA ID NO. 565563
  misc_feature: Encodes the peptide sequence at SEQ ID NO 16700
atggaggtcactgggaagaggaaacttgatgcttcggaaggatcacaaggtccacaaggacctagtcacaagaagagcaaaggaggtaatcacgggaaatggaagactccaagctatcaagccaagcttgacgccacaaaaggtcgatctcttgaaattggagatgtgggaatctgggtgacttgtcaaagggccaaggagatgagagctgtcgatgagattgctgcattgtgcgaagactacgttcaaaagctctttgatgtcaaccccgacgcttcaagcgacaaagagaccgaagatgcagaagatattgaggcatcaatcgagaaggaactcgcgacactgaaaccttccaataaacccaagaatgccccattcgagattctgaagatgaatcttgactgtctaatctttgtgcggacgcatgcacctgtggatcctttagtactggcacgtgaaatcgtcaatgatgctgcggcaacgacggataagagtcagtggcgatcacggttcatcaacaagctcacacctatcacgcatgcaggcaaagccactgaaaaggggttggaagaggtcgctaagaagctgttgccgagtcattttcgcctagcagagggtgagacggaggaagcgagtgatgaggaggaaaagctttgctcgtatgccattcggccctcatttcgggcacacacaacgctcaagcgcgatgtagtcatagacaatgtcgccaaaatgatatcgaagcgccacaaggtcgatctcaaaagcccagacaaagtgattattatcgacttcttccagactttctgtggcatgagcatagttgggaaggattgggaggctacaaagagatacaatatacacgaaatgtatatagcaggactgaagtcaaaatcaaagggagataccgatggttcgaaagcggtgaccgacgtaccgggagggaacaatagtagagaaaacgaccagctatcgacatag

SEQ ID NO: 16700 - protein, 326 aa, Muscodor strobelii
  misc_feature: SGI Peptide ID NO. 565563
  misc_feature (249)..(276): Pfam Id: PF02926 Pfam Desc: THUMP domain
  misc_feature (22)..(307): NCBI GI: 145602678 Blast Desc: MGG_13006 [Magnaporthe grisea 70-15] gi|145011073|gb|EDJ95729.1| MGG_13006 [Magnaporthe grisea 70-15]
  misc_feature (34)..(291): NCBI GI: 85093507 Blast Desc: NCU02385 [Neurospora crassa OR74A] gi|28921155|gb|EAA30469.1| [Neurospora crassa OR74A]
  misc_feature (5)..(300): NCBI GI: 46136639 Blast Desc: FG09835.1 [Gibberella zeae PH-1]
  misc_feature (11)..(267): NCBI GI: 256732879 Blast Desc: NECHADRAFT_78627 [Nectria haematococca mpVI 77-13-4]
  misc_feature (50)..(300): NCBI GI: 189091828 Blast Desc: [Podospora anserina] gi|27803025|emb|CAD60728.1| protein product [Podospora anserina] gi|188219267|emb|CAP49247.1| protein product [Podospora anserina]
  misc_feature (24)..(299): NCBI GI: 261361165 Blast Desc: conserved [Verticillium albo-atrum VaMs.102]
  misc_feature (1)..(267): NCBI GI: 116179616 Blast Desc: CHGG_00436 [Chaetomium globosum CBS 148.51] gi|88184733|gb|EAQ92201.1| CHGG_00436 [Chaetomium globosum CBS 148.51]
  misc_feature (34)..(293): NCBI GI: 119187485 Blast Desc: CIMG_03790 [Coccidioides immitis RS]
  misc_feature (34)..(293): NCBI GI: 240108178 Blast Desc: THUMP domain containing protein [Coccidioides posadasii C735 delta SOWgp]
  misc_feature (5)..(301): NCBI GI: 156042378 Blast Desc: SS1G_10986 [Sclerotinia sclerotiorum 1980] gi|154695373|gb|EDN95111.1| SS1G_10986 [Sclerotinia sclerotiorum 1980]
MEVTGKRKLDASEGSQGPQGPSHKKSKGGNHGKWKTPSYQAKLDATKGRSLEIGDVGIWVTCQRAKEMRAVDEIAALCEDYVQKLFDVNPDASSDKETEDAEDIEASIEKELATLKPSNKPKNAPFEILKMNLDCLIFVRTHAPVDPLVLAREIVNDAAATTDKSQWRSRFINKLTPITHAGKATEKGLEEVAKKLLPSHFRLAEGETEEASDEEEKLCSYAIRPSFRAHTTLKRDVVIDNVAKMISKRHKVDLKSPDKVIIIDFFQTFCGMSIVGKDWEATKRYNIHEMYIAGLKSKSKGDTDGSKAVTDVPGGNNSRENDQLST

SEQ ID NO: 16701 - DNA, 1591 bp, Muscodor strobelii
  misc_feature: SGI EST ID NO. CUFF.39405.0
  misc_feature: Variant of the nucleotide sequence at SEQ ID NO 16699
tgtggaccctcacggctattacctaagcgcacaggccagcgaactttgagggactggaaatgtctaccatttcactacttccactctcaagacccacctacaagacctcatataaatactactacatgtacaatctaagctcactcaagtgtcgcaaatttcacccaaatctctagctcagtacagttcctttcaacaacagtatggaggtcactgggaagaggaaacttgatgcttcggaaggatcacaaggtccacaaggacctagtcacaagaagagcaaaggaggtaatcacgggaaatggaagactccaagctatcaagccaagcttgacgccacaaaaggtcgatctcttgaaattggagatgtgggaatctgggtgacttgtcaaagggccaaggagatgagagctgtcgatgagattgctgcattgtgcgaagactacgttcaaaagctctttgatgtcaaccccgacgcttcaagcgacaaagagaccgaagatgcagaagatattgaggcatcaatcgagaaggaactcgcgacactgaaaccttccaataaacccaagaatgccccattcgagattctgaagatgaatcttgactgtctaatctttgtgcggacgcatgcacctgtggatcctttagtactggcacgtgaaatcgtcaatgatgctgcggcaacgacggataagagtcagtggcgatcacggttcatcaacaagctcacacctatcacgcatgcaggcaaagccactgaaaaggggttggaagaggtcgctaagaagctgttgccgagtcattttcgcctagcagagggtgagacggaggaagcgagtgatgaggaggaaaagctttgctcgtatgccattcggccctcatttcgggcacacacaacgctcaagcgcgatgtagtcatagacaatgtcgccaaaatgatatcgaagcgccacaaggtcgatctcaaaagcccagacaaagtgattattatcgacttcttccagactttctgtggcatgagcatagttgggaaggattgggaggctacaaagagatacaatatacacgaaatgtatatagcaggactgaagtcaaaatcaaagggagataccgatggttcgaaagcggtgaccgacgtaccgggagggaacaatagtagagaaaacgaccagctatcgacatagtacacccatagactgctgacaatgcgatattgcctcgaacccgacgagcagaaacgcagatgttgtccagaaaacaccttgcccagagatcgagagaaatcgtaaaccttacagacgttgccatttacccagactgttctattcttcagtcatcaatttcccgagccaagctacaatgccaatgcttggtgcaaaggaatgcaactggtacaaggccatcatgcctgctggatagcccgtggttaacgcttctttcctagttttggccagttacagaggcgattccggaagctaagcaatgctatatttattccagtaattcgaggctttattgcgaaggcaggtggaaagcgtgtagatgcagacgctgaccttcgagactgtggcacacactgagagtttgatat

SEQ ID NO: 16702 - DNA, 879 bp, Muscodor strobelii
  misc_feature: SGI cDNA ID NO. 565564
  misc_feature: Encodes the peptide sequence at SEQ ID NO 16703
atgtattggcgatctcttcttagtgtagcggctgttgctgcaccattcgtggatgctgctgcgactctccggttctcatgctcgcaacttgtggtcgagcgccttgatcctattgtgaatccgggtgtcaatccttcgcctcatctacaccaggtcgttggcggaaataccttcaatgcgtcgatggatcctacagttcaaccctcgacgacggcgacatgcacctcttgcactccaacagaagacttttcgaactactggacggccgtcttgttcttccgagcgagaaatggaactctccaccgggtcaatacattcggcaatgaacttggtttcacgcaggcgagtggtgggcaaacagtttattatctgtcctccggcaaagtcactgcattcgcccctggatgtaagtcttgtgctgggattatggcatcgatccgatttccaacatgctggaacggtaaagacctcgatagtcccgatcatcaaagccacgtagcgtacccaagtggtagcgcatgtcctgcgagtcatccagttgccgtcccccaggtgttttacgagacctactgggatacgcgtccattcaacaatcaagcagactggcctaccgatggctcgcagcctttcgtttggagcttcggcgacaagacgggttacggattccatgccgactatgttttcggctggaaaggggatgcgctgcaacgggcaatggacacaaattgtaacagcgatctatttgccaacaagatcaactgcaacacactgaagacgcaatcactagccgatgcgaataagtgtactgtgtcgagggtggtcgatgaaaatctggatgggtggatgacacagcttcccggcggcatgcctatcatgtaa

SEQ ID NO: 16703 - protein, 292 aa, Muscodor strobelii
  misc_feature: SGI Peptide ID NO. 565564
  misc_feature (36)..(230): Pfam Id: PF09362 Pfam Desc: Domain of function (DUF1996)
  misc_feature (134)..(230): Pfam Id: PF09362 Pfam Desc: Domain of function (DUF1996)
  misc_feature (36)..(132): Pfam Id: PF09362 Pfam Desc: Domain of function (DUF1996)
  misc_feature (1)..(288): NCBI GI: 171686640 Blast Desc: protein product [Podospora anserina] gi|170943281|emb|CAP68934.1| protein product [Podospora anserina]
  misc_feature (1)..(287): NCBI GI: 18376214 Blast Desc: conserved [Neurospora crassa]
  misc_feature (15)..(289): NCBI GI: 116208360 Blast Desc: CHGG_03473 [Chaetomium globosum CBS 148.51] gi|88184070|gb|EAQ91538.1| CHGG_03473 [Chaetomium globosum CBS 148.51]
  misc_feature (21)..(291): NCBI GI: 171685434 Blast Desc: protein product [Podospora anserina] gi|170942678|emb|CAP68330.1| protein product [Podospora anserina]
  misc_feature (1)..(287): NCBI GI: 39941238 Blast Desc: MGG_05530 [Magnaporthe grisea 70-15] gi|145022203|gb|EDK06223.1| MGG_05530 [Magnaporthe grisea 70-15]
  misc_feature (1)..(292): NCBI GI: 116182716 Blast Desc: CHGG_01986 [Chaetomium globosum CBS 148.51] gi|88186283|gb|EAQ93751.1| CHGG_01986 [Chaetomium globosum CBS 148.51]
  misc_feature (1)..(291): NCBI GI: 164427037 Blast Desc: NCU02341 [Neurospora crassa OR74A] gi|157071579|gb|EAA30531.2| conserved [Neurospora crassa OR74A]
  misc_feature (4)..(291): NCBI GI: 189206938 Blast Desc: conserved [Pyrenophora tritici-repentis Pt-1C-BFP] gi|187975896|gb|EDU42522.1| conserved [Pyrenophora tritici-repentis Pt-1C-BFP]
  misc_feature (1)..(287): NCBI GI: 171680460 Blast Desc: protein product [Podospora anserina] gi|170939857|emb|CAP65082.1| protein product [Podospora anserina]
  misc_feature (19)..(289): NCBI GI: 116194852 Blast Desc: CHGG_04024 [Chaetomium globosum CBS 148.51] gi|88179937|gb|EAQ87405.1| CHGG_04024 [Chaetomium globosum CBS 148.51]
MYWRSLLSVAAVAAPFVDAAATLRFSCSQLVVERLDPIVNPGVNPSPHLHQVVGGNTFNASMDPTVQPSTTATCTSCTPTEDFSNYWTAVLFFRARNGTLHRVNTFGNELGFTQASGGQTVYYLSSGKVTAFAPGCKSCAGIMASIRFPTCWNGKDLDSPDHQSHVAYPSGSACPASHPVAVPQVFYETYWDTRPFNNQADWPTDGSQPFVWSFGDKTGYGFHADYVFGWKGDALQRAMDTNCNSDLFANKINCNTLKTQSLADANKCTVSRVVDENLDGWMTQLPGGMPIM

SEQ ID NO: 16704 - DNA, 964 bp, Muscodor strobelii
  misc_feature: SGI EST ID NO. CUFF.39414.0
  misc_feature: Variant of the nucleotide sequence at SEQ ID NO 16702
gtccgaatgacagttggcgatccaactttccgtaccgcggcacagctcaacgcaaaatataaatacatcgatttcacgtgtctccaaagctcgatgactcgtggaggagcgacgactaattttccgtcgaagccttgtccaggtatttgcccatagcgcaattccttgatgaccacatgtagagaactgatactaactactatttagtaagtcttgtgtaaatctgcgtggttttgagagacaaagtcacgtgccgcaagatgcaatagctcctgtgcaaaatctagacagtacagcatactaatgttctatcgacttaggctgggattatggcatcgatccgatttccaacatgctggaacggtaaagacctcgatagtcccgatcatcaaagccacgtagcgtacccaagtggtagcgcatgtcctgcgagtcatccagttgccgtcccccaggtgttttacgagacctactgggatacgcgtccattcaacaatcaagcagactggcctaccgatggctcgcagcctttcgtttggagcttcggcgacaagacgggttacggattccatgccgactatgttttcggctggaaaggggatgcgctgcaacgggcaatggacacaaattgtaacagcgatctatttgccaacaagatcaactgcaacacactgaagacgcaatcactagccgatgcgaataagtgtactgtgtcgagggtggtcgatgaaaatctggatgggtggatgacacagcttcccggcggcatgcctatcatgtaaatacatttttatcgtgaggaagacagaaacaaagatataccagccaatatgagagtgcagtgagagatgaaggaattcttggttttattcatgtctcactgtgtttctcagaagatttgcaacctgaatgtcttagatcatgtccattgaacatgtactagaaggtgaaggatacagcgggc

SEQ ID NO: 16705 - DNA, 1317 bp, Muscodor strobelii
  misc_feature: SGI cDNA ID NO. 565565
  misc_feature: Encodes the peptide sequence at SEQ ID NO 16706
atggctgaacaaccacgcggcgaagccgcagcctattatggcaatcaaggtgcgccatacggaaatagtcaacctcaacaacaatatggacaacctcaacagcagtatggcgcgccgcctccagattaccaagaaaaggccacattcgatcaagcattcaagattgagcaacccaagtacaatgatctttgggctgccatcttgttccttctcgtttgcgctggcttcatcgcggtgtctggcctcgccctccacggttatgcggcaaacaaatcaagcgctggcagtggcatctatggctcggattcacaggccggtctcaacacaaatacaatcattctttttgctttcgtcttgggtgttgcgttcgtcctcagctactgctatattcttcttgcacgaacgtttcctcgcgcgttcatttgggcgacaggcattctaaacatcctttttgggctggccacggcgatctatatgctttatcgccactactactcaggcggaatcgtgtttctcatcttcgtggctttcttgatatttgcgttcatcacatggattccacgcattcctttctctgctctgatgtggatctcagaagtaatcaagaatgtcttgcatgtcactatctctggtgtgttcggatcatggtacttctacaatccggccgagcatccccgggccgttaccagaggcgcactgaaacgggctctcacctactccttcggttcgatcgcacttggctcactgatagtcgccatcatccaattcttgcgccagatttgttccgtcgcacagcgaaatgaagcagcacaaggcgacgcagtagcagcgatcttgttttgtgttcttggatgcctgattggaatcttagactgggccgtcgagtttctcaatcgatacgcctactcgtacatcgccttgtacgggaaagcatacttcgccgcggcgaaagacacgtggagaatgatcaaacagcgcggaatcgatgctctcgttaacgaatgccttttgggccctgtcttctctttcggagcaactttcgtaggatacgcttgtgggtttttggcttacttgtacttggtattcacaaacccagaatacaatcgagacggaagttatacgccagtggtcgtcgcattctcgttcctcattggcttgcaaatttgcaacgttttcactacgcccttgagcagtggtattgataccatttttgtggcatccgcatgggatccccagagattgatggagaaccaccccgatatttaccaagctatggtgcatgtgtacccgcaagttcaaacggcgattcatgcttga

SEQ ID NO: 16706 - protein, 438 aa, Muscodor strobelii
  misc_feature: SGI Peptide ID NO. 565565
  misc_feature (129)..(438): Pfam Id: PF04515 Pfam Desc: Domain of function, DUF580
  misc_feature (193)..(413): Pfam Id: PF04515 Pfam Desc: Domain of function, DUF580
  misc_feature (29)..(438): NCBI GI: 261353991 Blast Desc: PNS1 [Verticillium albo-atrum VaMs.102]
  misc_feature (31)..(437): NCBI GI: 46124263 Blast Desc: FG06509.1 [Gibberella zeae PH-1] gi|83288386|sp|Q4I8E9.1|PNS1_GIBZE RecName: Full=Protein PNS1
  misc_feature (31)..(437): NCBI GI: 256726564 Blast Desc: [Nectria haematococca mpVI 77-13-4]
  misc_feature (36)..(438): NCBI GI: 85091297 Blast Desc: protein PNS1 [Neurospora crassa OR74A] gi|74619586|sp|Q870V7.1|PNS1_NEUCR RecName: Full=Protein PNS1 gi|28920220|gb|EAA29597.1| protein PNS1 [Neurospora crassa OR74A]
  misc_feature (21)..(438): NCBI GI: 67525341 Blast Desc: AN3128.2 [Aspergillus nidulans FGSC A4] gi|40744523|gb|EAA63699.1| AN3128.2 [Aspergillus nidulans FGSC A4]
  misc_feature (7)..(438): NCBI GI: 255937545 Blast Desc: Pc13g13910 [Penicillium chrysogenum Wisconsin 54-1255] gi|211584419|emb|CAP92460.1| Pc13g13910 [Penicillium chrysogenum Wisconsin 54-1255]
  misc_feature (193)..(438): NCBI GI: 169618946 Blast Desc: SNOG_12665 [Phaeosphaeria nodorum SN15] gi|160703712|gb|EAT79963.2| SNOG_12665 [Phaeosphaeria nodorum SN15]
  misc_feature (8)..(437): NCBI GI: 238840172 Blast Desc: conserved [Microsporum canis CBS 113480]
  misc_feature (193)..(432): NCBI GI: 189210309 Blast Desc: PTRG_11155 [Pyrenophora tritici-repentis Pt-1C-BFP] gi|187977579|gb|EDU44205.1| PTRG_11155 [Pyrenophora tritici-repentis Pt-1C-BFP]
  misc_feature (196)..(438): NCBI GI: 171693027 Blast Desc: protein product [Podospora anserina] gi|170946462|emb|CAP73263.1| protein product [Podospora anserina]
MAEQPRGEAAAYYGNQGAPYGNSQPQQQYGQPQQQYGAPPPDYQEKATFDQAFKIEQPKYNDLWAAILFLLVCAGFIAVSGLALHGYAANKSSAGSGIYGSDSQAGLNTNTIILFAFVLGVAFVLSYCYILLARTFPRAFIWATGILNILFGLATAIYMLYRHYYSGGIVFLIFVAFLIFAFITWIPRIPFSALMWISEVIKNVLHVTISGVFGSWYFYNPAEHPRAVTRGALKRALTYSFGSIALGSLIVAIIQFLRQICSVAQRNEAAQGDAVAAILFCVLGCLIGILDWAVEFLNRYAYSYIALYGKAYFAAAKDTWRMIKQRGIDALVNECLLGPVFSFGATFVGYACGFLAYLYLVFTNPEYNRDGSYTPVVVAFSFLIGLQICNVFTTPLSSGIDTIFVASAWDPQRLMENHPDIYQAMVHVYPQVQTAIHA

SEQ ID NO: 16707 - DNA, 4922 bp, Muscodor strobelii
  misc_feature: SGI EST ID NO. CUFF.39477.1
  misc_feature: Variant of the nucleotide sequence at SEQ ID NO 16705
cacgaccaagagctagaggctattggtgcgcggcgccgtgctagccgttcagtcacaggtagcttaattgcagtaggtgtatcttgacctcgaacattgcttggagaaccttagctccatagcaacaaacgttggcggcattccatttaccatatttccatacagctttttttcgcaccgggaaacagtctgaactgctccgaccagatattatcgtcgcgtcaactgcacgcgttgggttctccaatcaattcttcattacccgcacattctcggaatcacagaactcactattaaatcatcgatggctgaacaaccacgcggcgaagccgcagcctattatggcaatcaagcagtatggcgcgccgcctccagattaccaagaaaaggccacattcgatcaagcattcaagattgagcaacccaagtacaatgatctttgggctgccatcttgttccttctcgtttgcgctggcttcatcgcggtgtctggcctcgccctccacggttatgcggcaaacaaatcaagcgctggcagtggcatctatggctcggattcacaggccggtctcaacacaaatacaatcattctttttgctttcgtcttgggtgttgcgttcgtcctcagctactgctatattcttcttgcacgaacgtttcctcgcgcgttcatttgggcgacaggcattctaaacatcctttttgggctggccacggcgatctatatgctttatcgccactactactcaggcggaatcgtgtttctcatcttcgtggctttcttgatatttgcgttcatcacatggattccacgcattcctttctctgctctgatggtacgtgtagaaagatcctacgcgagctatatgttgattgtatcaatgagacatcgtactgattcttttgtagctcaagactgcagtcgatgtctccaaaaaatttggccacgtcttccttgttagtctcctagggggtgttattgcaatcgcctttgcagcttggtatgcagtgacttttgttgcagtctatgtcaaatatagcccgaatggcggcaatccagcatgctcgacaagtggaggaggttgtagctcaggcaaagtcattgggcttttggtttttatcacatttgcctcctactggatctcagaagtaatcaagaatgtcttgcatgtcactatctctggtgtgttcggatcatggtacttctacaatccggccgagcatccccgggccgttaccagaggcgcactgaaacgggctctcacctactccttcggttcgatcgcacttggctcactgatagtcgccatcatccaattcttgcgccagatttgttccgtcgcacagcgaaatgaagcagcacaaggcgacgcagtagcagcgatcttgttttgtgttcttggatgcctgattggaatcttagactgggccgtcgagtttctcaatcgatacgcctactcgtacatcgccttgtacgggaaagcatacttcgccgcggcgaaagacacgtggagaatgatcaaacagcgcggaatcgatgctctcgttaacgaatgccttttgggccctgtcttctctttcggagcaactttcgtaggatacgcttgtgggtttttggcttacttgtacttggtattcacaaacccagaatacaatcgagacggaagttatacgccagtggtcgtcgcattctcgttcctcattggcttgcaaatttgcaacgttttcactacgcccttgagcagtggtattgataccatttttgtggcatccgcatgggatccccagagattgatggagaaccaccccgatatttaccaagctatggtgcatgtgtacccgcaagttcaaacggcgattcatgcttgatgaaggagtaccaagaggaacagacaattgactacaatcatttagcgtctttggatgccgttgtactacttcctcagatgtagcatgggccagaagaatgacgggagcgccgaataagacattcgtgtgtataatattggcaaaaatggaggcggagaagtaatgacataggaataataacaacatcgtaatacatggcacatgcatgttaaacaagccggcgaccttagtagcactgaaatccaggagtatatgccgattaatctatctacatcaatatccataattggatgctaatccatgcacatagtctaagcatcatgttcaccaacgggtatccgagccatgtccaatgagccacaccaatctaagtgaacgccgtcgccgtgtaaaactaccatctaccggactcttgggccagtatgccaaacatgaacctcttctctatgaactgtcatcctcaaatatttgtactttatcggcgtattctcttatcctgctgaccacagtctcctggatttcatggcccttgcccgcagccactttcagcagcagctcgttgagattttgccggcctaagatatcgacgtgatctgccgatttgggaccgccgcgtggattgaagcgctcaggctcatgaggcatctccaccactgtgattttggcgcctgcaggattgtatcgtttcatgtgccaacctttggtgcacatgtagccgctactgagaagactcaccgtgccatcgccttctcccatgacgactccgtgatcgacttcatcaacggtcaatcccgtgtcgatggtaatgttgagattcgttaggggtggaaagtcaggcggtcggtagtagtatgccctctccgtgggtttacccacaccgtagaagcaaaagactttcaggtttggtgccaaaggtaaccttgtttctaaggggttgatccatctattttgtagtaattcgttggcgtccacctcttttttggtgcgagcaataccatgagaatagctgcggagaacctggtccctataccaatcgtctgtcgtttcgagcaaatattccatggcttgtttgacagtgaagttgcggttgggcgttgtccagtttccgccttctcgaaagttcaggaaggacccgaatgaccgggtttggccaggtcgatcgtccggcgcccatgtaaggttgccccaaactgcgtcgccgccgataggtaacatagatgatatgccgggcatcgcacggaagatctcggctcgctcctctttatttagaaatttctcaagcccatacacagcaaaagcattcatctgcgcagtgtcgcgcatttctccggatagcacagccggaacgtctttgacagctccgagcatacaaccactgatattgatccaggcctcgacatgtttgtcgacccaagcgtcaccaccatttcccccgaactccgaggcaacccagtggaagaagtaaaagacaacctgcgagcccatgctatgcgatgctaaaacaaccttcttgccggaaacgccatgcgaaaactcgatgtagttcttgagcctcgtgaagtactgatcgcggacttctaaattttggtaggacagtcgccagtcataagcagccgtaaatgagttggtagggtcgtaacccaaggatgctaggttctcgaaaatcttgttccaaatccagtaaccagtgatgaaaaagtcggtagcatcaaaaccctgagcggctcggagcttcacaccgggaggatccaaaccagtcttcttgtcgagcatgatgtgctccttccaaacctccttgttagtgaacaaagccctcatcatcgtccaactcccccagagtcgctttcgaaaataagggcgggagatgttagccgtgccccaggactcgagacccgtggagatgacgccaggtatcatgatgacggggtggtggacgtcgaggccctcggcgcgggcctgcacgccgacggcgaaggattcgtagctatcgagaaagtcgcgctctcctctctacaacggagcgtctgtcagtccgatgggcgcagatagattaagaacagccagcatactattatatcgcgcatctcgtccgtaacaaaagacgcaggcaggacgtcgaggatgctgtcgacggacagatcgctcagctcggggaactcgatcaggtcattctggcgggcgacgaagccggcgatgaagatgccgaaaaaactgccgagcaagaaaatcaaagtcgtccttctcttgcgcggaggtggcttctcgtgaacgattttgaccttatcgccaggtttcacggggctttggtcgcgcggggcgtggagggacgagtcggagagcggcgcggcgccaacagcacggcggcggagatcgttggccatggtggccggctctgcatgaccagagcagatcggctggggagaatggagattgtgggaatctgcgaagcttcggcgagagctgggatggagcacaagacggtcgggcacaaaacgtattagggatttggcgacgcaacgatacacagaccatccgcgagatactcacgcgcgtctccgaggccgatcgcgaacaagacaccagatagcacccggttgtttctacagtattctcaggtaccttaagaactctacagacgtgagctgtacaggcaacctcccagttgacaagctgtcccttgcatgttcccgtctcttcatccaaaccatgaagcgcaaaatctcggaaagcaagcttgactcgtgctggattgacgtcaatacaaccattctgctagacctttccgatcctggcttagcaccgaaacaccgacggccgactcgccgacatttcaagaatgcccctccatcgaggtgagctgcagatcaaggtaggaactggcacgaatagtgggggttcaggtcacatatcgcgagagtctagtcgcgaagagtctagataggaaaacttaatgtgagtaacagttcctagactcgcatacccaatctctttgtctgtctcgtgataatatgtcaggagatgccggtgccaagtgtcacctgcaagcatttcgc

SEQ ID NO: 16708 - DNA, 1878 bp, Muscodor strobelii
  misc_feature: SGI cDNA ID NO. 565566
  misc_feature: Reduced expression when VOC is produced
  misc_feature: Encodes the peptide sequence at SEQ ID NO 16709
atggccaacgatctccgccgccgtgctgttggcgccgcgccgctctccgactcgtccctccacgccccgcgcgaccaaagccccgtgaaacctggcgataaggtcaaaatcgttcacgagaagccacctccgcgcaagagaaggacgactttgattttcttgctcggcagttttttcggcatcttcatcgccggcttcgtcgcccgccagaatgacctgatcgagttccccgagctgagcgatctgtccgtcgacagcatcctcgacgtcctgcctgcgtcttttgttacggacgagatgcgcgatataataagaggagagcgcgactttctcgatagctacgaatccttcgccgtcggcgtgcaggcccgcgccgagggcctcgacgtccaccaccccgtcatcatgatacctggcgtcatctccacgggtctcgagtcctggggcacggctaacatctcccgcccttattttcgaaagcgactctgggggagttggacgatgatgagggctttgttcactaacaaggaggtttggaaggagcacatcatgctcgacaagaagactggtttggatcctcccggtgtgaagctccgagccgctcagggttttgatgctaccgactttttcatcactggttactggatttggaacaagattttcgagaacctagcatccttgggttacgaccctaccaactcatttacggctgcttatgactggcgactgtcctaccaaaatttagaagtccgcgatcagtacttcacgaggctcaagaactacatcgagttttcgcatggcgtttccggcaagaaggttgttttagcatcgcatagcatgggctcgcaggttgtcttttacttcttccactgggttgcctcggagttcgggggaaatggtggtgacgcttgggtcgacaaacatgtcgaggcctggatcaatatcagtggttgtatgctcggagctgtcaaagacgttccggctgtgctatccggagaaatgcgcgacactgcgcagatgaatgcttttgctgtgtatgggcttgagaaatttctaaataaagaggagcgagccgagatcttccgtgcgatgcccggcatatcatctatgttacctatcggcggcgacgcagtttggggcaaccttacatgggcgccggacgatcgacctggccaaacccggtcattcgggtccttcctgaactttcgagaaggcggaaactggacaacgcccaaccgcaacttcactgtcaaacaagccatggaatatttgctcgaaacgacagacgattggtatagggaccaggttctccgcagctattctcatggtattgctcgcaccaaaaaagaggtggacgccaacgaattactacaaaatagatggatcaaccccttagaaacaaggttacctttggcaccaaacctgaaagtcttttgcttctacggtgtgggtaaacccacggagagggcatactactaccgaccgcctgactttccacccctaacgaatctcaacattaccatcgacacgggattgaccgttgatgaagtcgatcacggagtcgtcatgggagaaggcgatggcacggtgagtcttctcagtagcggctacatgtgcaccaaaggttggcacatgaaacgatacaatcctgcaggcgccaaaatcacagtggtggagatgcctcatgagcctgagcgcttcaatccacgcggcggtcccaaatcggcagatcacgtcgatatcttaggccggcaaaatctcaacgagctgctgctgaaagtggctgcgggcaagggccatgaaatccaggagactgtggtcagcaggataagagaatacgccgataaagtacaaatatttgaggatgacagttcatag

SEQ ID NO: 16709 - protein, 625 aa, Muscodor strobelii
  misc_feature: SGI Peptide ID NO. 565566
  misc_feature (144)..(585): Pfam Id: PF02450 Pfam Desc: Lecithin:cholesterol acyltransferase
  misc_feature (1)..(623): NCBI GI: 189091802 Blast Desc: [Podospora anserina] gi|27803011|emb|CAD60714.1| protein product [Podospora anserina] gi|188219254|emb|CAP49234.1| protein product [Podospora anserina]
  misc_feature (1)..(620): NCBI GI: 256732438 Blast Desc: [Nectria haematococca mpVI 77-13-4]
  misc_feature (5)..(625): NCBI GI: 46123995 Blast Desc: FG06375.1 [Gibberella zeae PH-1]
  misc_feature (3)..(622): NCBI GI: 261361179 Blast Desc: Phospholipid:diacylglycerol acyltransferase [Verticillium albo-atrum VaMs.102]
  misc_feature (1)..(622): NCBI GI: 39942960 Blast Desc: MGG_03560 [Magnaporthe grisea 70-15] gi|145009877|gb|EDJ94533.1| MGG_03560 [Magnaporthe grisea 70-15]
  misc_feature (1)..(622): NCBI GI: 85092964 Blast Desc: NCU02416 [Neurospora crassa OR74A] gi|28921042|gb|EAA30362.1| NCU02416 [Neurospora crassa OR74A]
  misc_feature (37)..(623): NCBI GI: 156042676 Blast Desc: SS1G_11136 [Sclerotinia sclerotiorum 1980] gi|154695522|gb|EDN95260.1| SS1G_11136 [Sclerotinia sclerotiorum 1980]
  misc_feature (1)..(612): NCBI GI: 116179640 Blast Desc: CHGG_00448 [Chaetomium globosum CBS 148.51] gi|88184745|gb|EAQ92213.1| CHGG_00448 [Chaetomium globosum CBS 148.51]
  misc_feature (5)..(623): NCBI GI: 169770433 Blast Desc: [Aspergillus oryzae RIB40] gi|238487156|ref|XP_002374816.1| Phospholipid:diacylglycerol acyltransferase, [Aspergillus flavus NRRL3357] protein product
  misc_feature (5)..(622): NCBI GI: 115396112 Blast Desc: conserved [Aspergillus terreus NIH2624] gi|114193264|gb|EAU34964.1| conserved [Aspergillus terreus NIH2624]
  misc_feature (119)..(619): SWISSPROT Homolog: EC 2.3.1.158 Phospholipid:diacylglycerol acyltransferase
  misc_feature: Useful for introducing or modulating the production of volatile compounds
MANDLRRRAVGAAPLSDSSLHAPRDQSPVKPGDKVKIVHEKPPPRKRRTTLIFLLGSFFGIFIAGFVARQNDLIEFPELSDLSVDSILDVLPASFVTDEMRDIIRGERDFLDSYESFAVGVQARAEGLDVHHPVIMIPGVISTGLESWGTANISRPYFRKRLWGSWTMMRALFTNKEVWKEHIMLDKKTGLDPPGVKLRAAQGFDATDFFITGYWIWNKIFENLASLGYDPTNSFTAAYDWRLSYQNLEVRDQYFTRLKNYIEFSHGVSGKKVVLASHSMGSQVVFYFFHWVASEFGGNGGDAWVDKHVEAWINISGCMLGAVKDVPAVLSGEMRDTAQMNAFAVYGLEKFLNKEERAEIFRAMPGISSMLPIGGDAVWGNLTWAPDDRPGQTRSFGSFLNFREGGNWTTPNRNFTVKQAMEYLLETTDDWYRDQVLRSYSHGIARTKKEVDANELLQNRWINPLETRLPLAPNLKVFCFYGVGKPTERAYYYRPPDFPPLTNLNITIDTGLTVDEVDHGVVMGEGDGTVSLLSSGYMCTKGWHMKRYNPAGAKITVVEMPHEPERFNPRGGPKSADHVDILGRQNLNELLLKVAAGKGHEIQETVVSRIREYADKVQIFEDDSS

SEQ ID NO: 16710 - DNA, 3072 bp, Muscodor strobelii
  misc_feature: SGI EST ID NO. CUFF.39478.2
  misc_feature: Variant of the nucleotide sequence at SEQ ID NO 16708
gcgaaatgcttgcaggtgacacttggcaccggcatctcctgacatattatcacgagacagacaaagagattgggtatgcgagtctaggaactgttactcacattaagttttcctatctagactcttcgcgactagactctcgcgatatgtgacctgaacccccactattcgtgccagttcctaccttgatctgcagctcacctcgatggaggggcattcttgaaatgtcggcgagtcggccgtcggtgtttcggtgctaagccaggatcggaaaggtctagcagaatggttgtattgacgtcaatccagcacgagtcaagcttgctttccgagattttgcgcttcatggtttggatgaagagacgggaacatgcaagggacagcttgtcaactgggaggttgcctgtacagctcacgtctgtagagttcttaaggtacctgagaatactgtagaaacaaccgggtgctatctggtgtcttgttcgcgatcggcctcggagacgcgcgtgagtatctcgcggatggtctgtgtatcgttgcgtcgccaaatccctaatacgttttgtgcccgaccgtcttgtgctccatcccagctctcgccgaagcttcgcagattcccacaatctccattctccccagccgatctgctctggtcatgcagagccggccaccatggccaacgatctccgccgccgtgctgttggcgccgcgccgctctccgactcgtccctccacgccccgcgcgaccaaagccccgtgaaacctggcgataaggtcaaaatcgttcacgagaagccacctccgcgcaagagaaggacgactttgattttcttgctcggcagttttttcggcatcttcatcgccggcttcgtcgcccgccagaatgacctgatcgagttccccgagctgagcgatctgtccgtcgacagcatcctcgacgtcctgcctgcgtcttttgttacggacgagatgcgcgatataataagaggagagcgcgactttctcgatagctacgaatccttcgccgtcggcgtgcaggcccgcgccgagggcctcgacgtccaccaccccgtcatcatgatacctggcgtcatctccacgggtctcgagtcctggggcacggctaacatctcccgcccttattttcgaaagcgactctgggggagttggacgatgatgagggctttgttcactaacaaggaggtttggaaggagcacatcatgctcgacaagaagactggtttggatcctcccggtgtgaagctccgagccgctcagggttttgatgctaccgactttttcatcactggttactggatttggaacaagattttcgagaacctagcatccttgggttacgaccctaccaactcatttacggctgcttatgactggcgactgtcctaccaaaatttagaagtccgcgatcagtacttcacgaggctcaagaactacatcgagttttcgcatggcgtttccggcaagaaggttgttttagcatcgcatagcatgggctcgcaggttgtcttttacttcttccactgggttgcctcggagttcgggggaaatggtggtgacgcttgggtcgacaaacatgtcgaggcctggatcaatatcagtggttgtatgctcggagctgtcaaagacgttccggctgtgctatccggagaaatgcgcgacactgcgcagatgaatgcttttgctgtgtatgggcttgagaaatttctaaataaagaggagcgagccgagatcttccgtgcgatgcccggcatatcatctatgttacctatcggcggcgacgcagtttggggcaaccttacatgggcgccggacgatcgacctggccaaacccggtcattcgggtccttcctgaactttcgagaaggcggaaactggacaacgcccaaccgcaacttcactgtcaaacaagccatggaatatttgctcgaaacgacagacgattggtatagggaccaggttctccgcagctattctcatggtattgctcgcaccaaaaaagaggtggacgccaacgaattactacaaaatagatggatcaaccccttagaaacaaggttacctttggcaccaaacctgaaagtcttttgcttctacggtgtgggtaaacccacggagagggcatactactaccgaccgcctgactttccacccctaacgaatctcaacattaccatcgacacgggattgaccgttgatgaagtcgatcacggagtcgtcatgggagaaggcgatggcacggtgagtcttctcagtagcggctacatgtgcaccaaaggttggcacatgaaacgatacaatcctgcaggcgccaaaatcacagtggtggagatgcctcatgagcctgagcgcttcaatccacgcggcggtcccaaatcggcagatcacgtcgatatcttaggccggcaaaatctcaacgagctgctgctgaaagtggctgcgggcaagggccatgaaatccaggagactgtggtcagcaggataagagaatacgccgataaagtacaaatatttgaggatgacagttcatagagaagaggttcatgtttggcatactggcccaagagtccggtagatggtagttttacacggcgacggcgttcacttagattggtgtggctcattggacatggctcggatacccgttggtgaacatgatgcttagactatgtgcatggattagcatccaattatggatattgatgtagatagattaatcggcatatactcctggatttcagtgctactaaggtcgccggcttgtttaacatgcatgtgccatgtattacgatgttgttattattcctatgtcattacttctccgcctccatttttgccaatattatacacacgaatgtcttattcggcgctcccgtcattcttctggcccatgctacatctgaggaagtagtacaacggcatccaaagacgctaaatgattgtagtcaattgtctgttcctcttggtactccttcatcaagcatgaatcgccgtttgaacttgcgggtacacatgcaccatagcttggtaaatatcggggtggttctccatcaa

SEQ ID NO: 16711 - DNA, 897 bp, Muscodor strobelii
  misc_feature: SGI cDNA ID NO. 565568
  misc_feature: Elevated expression when VOC is produced
  misc_feature: Encodes the peptide sequence at SEQ ID NO 16712
atggcgtctgacgacgactctgacttctatggtgacgagacaacggtcaaagatctccagaagagagtagacggcatcgacgtgaaacgttggtgggagacatatggcgcagtcgacacacccatgaagatccgagcgcgagggacattaagtgataaatcccatcttcacaaccccttctccggtaccaaatatgcctggcaacttaccgagagtgttgacgcctttctcgatcgactgccaccagcgtctacgagtgaagagcctggcgacccctggatctggatctgtaatccatacatcaagcaaaaggcaaagcaacaggcacaaaaccaatcaattcccggaggtggcgatgaggctcccgagcaagaaggtgccgatctcgtcgggtttatgaatggaggacgcgagaagcttgactttgcgtcgtctttcatcaacttctgccgaagccagagcacgtcgaaagctcatatcacgcgtgaaacaaggaaggccggcatggatgcggcgaaggacatacttgatttagcaaaacaccttcgtgtcacttgtgggaagtggatgatattttgttctgtgctagaagtcaacgacgtctgggagataattgccaaagctacagctaacaacgagcttggcatcgcaagcaaagtagcgccaaagccgaatatcctgaaaggcaatgaacgactgatatgcgtctatacagcggacttctccgacagaaacgatgtgattcgggtcgcagagaggctcaaggctttgggccttactacgaggaagccattgtactacaaaccagatgcttatacttatctaggaatcgcatctcaaaatccttgggagatcagagcttccatatataacacgcaaactctcctacgtaaataa

SEQ ID NO: 16712 - protein, 298 aa, Muscodor strobelii
  misc_feature: SGI Peptide ID NO. 565568
  misc_feature (76)..(292): Pfam Id: PF08939 Pfam Desc: Domain of function (DUF1917)
  misc_feature (1)..(297): NCBI GI: 256732437 Blast Desc: NECHADRAFT_67998 [Nectria haematococca mpVI 77-13-4]
  misc_feature (4)..(295): NCBI GI: 261361181 Blast Desc: conserved [Verticillium albo-atrum VaMs.102]
  misc_feature (1)..(297): NCBI GI: 46123999 Blast Desc: FG06377.1 [Gibberella zeae PH-1]
  misc_feature (1)..(293): NCBI GI: 189091806 Blast Desc: [Podospora anserina] gi|188219256|emb|CAP49236.1| protein product [Podospora anserina]
  misc_feature (1)..(289): NCBI GI: 27803013 Blast Desc: protein product [Podospora anserina]
  misc_feature (4)..(268): NCBI GI: 116179636 Blast Desc: CHGG_00446 [Chaetomium globosum CBS 148.51] gi|88184743|gb|EAQ92211.1| CHGG_00446 [Chaetomium globosum CBS 148.51]
  misc_feature (5)..(268): NCBI GI: 156042668 Blast Desc: SS1G_11132 [Sclerotinia sclerotiorum 1980] gi|154695518|gb|EDN95256.1| SS1G_11132 [Sclerotinia sclerotiorum 1980]
  misc_feature (5)..(296): NCBI GI: 239611479 Blast Desc: conserved [Ajellomyces dermatitidis ER-3]
  misc_feature (5)..(296): NCBI GI: 159127741 Blast Desc: conserved [Aspergillus fumigatus A1163]
  misc_feature (5)..(296): NCBI GI: 71000032 Blast Desc: conserved [Aspergillus fumigatus Af293] gi|66852370|gb|EAL92695.1| conserved [Aspergillus fumigatus Af293]
  misc_feature: Useful for introducing or modulating the production of volatile compounds
MASDDDSDFYGDETTVKDLQKRVDGIDVKRWWETYGAVDTPMKIRARGTLSDKSHLHNPFSGTKYAWQLTESVDAFLDRLPPASTSEEPGDPWIWICNPYIKQKAKQQAQNQSIPGGGDEAPEQEGADLVGFMNGGREKLDFASSFINFCRSQSTSKAHITRETRKAGMDAAKDILDLAKHLRVTCGKWMIFCSVLEVNDVWEIIAKATANNELGIASKVAPKPNILKGNERLICVYTADFSDRNDVIRVAERLKALGLTTRKPLYYKPDAYTYLGIASQNPWEIRASIYNTQTLLRK

SEQ ID NO: 16713 - DNA, 2938 bp, Muscodor strobelii
  misc_feature: SGI EST ID NO. CUFF.39447.2
  misc_feature: Variant of the nucleotide sequence at SEQ ID NO 16711
attgcatgtaagcaaagcagtagtcgagtcaagcccggtcactcggatgactcttgttctcatgggcggccaagcccgtttggtccggcgatgaggtgtgacttccctgataatggtgatatctgaaggcctcctaccaggctccttcctggggtatgcaatccctcatgtctgcagtttttgtagtcaatttaaacttgccaatattatgattcatattttgttgttgcgacaaacatgtttcgcgcctcctgtggcccattatctgattgattcaatttctgctaagcaaatctgtgtttgattgttatatacagtacagattcctattttcgcggcgaatcggtctctcggtatagcttgtatggtttcctactgaagaagggtttctcgaatcgagaacattgtgtcatggcgtctgacgacgactctgacttctatggtgacgagacaacggtcaaagatctccagaagagagtagacggcatcgacgtgaaacgttggtgggagacatatggcgcagtcgacacacccatgaagatccgagcgcgagggacattaagtgataaatcccatcttcacaaccccttctccggtaccaaatatgcctggcaacttaccgagagtgttgacgcctttctcgatcgactgccaccagcgtctacgagtgaagagcctggcgacccctggatctggatctgtaatccatacatcaagcaaaaggcaaagcaacaggcacaaaaccaatcaattcccggaggtggcgatgaggctcccgagcaagaaggtgccgatctcgtcgggtttatgaatggaggacgcgagaagcttgactttgcgtcgtctttcatcaacttctgccgaagccagagcacgtcgaaagctcatatcacgcgtgaaacaaggaaggccggcatggatgcggcgaaggacatacttgatttagcaaaacaccttcgtgtcacttgtgggaagtggatgatattttgttctgtgctagaagtcaacgacgtctgggagataattgccaaagctacagctaacaacgagcttggcatcgcaagcaaagtagcgccaaagccgaatatcctgaaaggcaatgaacgactgatatgcgtctatacagcggacttctccgacagaaacgatgtgattcgggtcgcagagaggctcaaggctttgggccttactacgaggaagccattgtactacaaaccagatgcttatacttatctaggaatcgcatctcaaaatccttgggagatcagagcttccatatataacacgcaaactctcctacgtaaataagtcttgtgctcaagagcgacaagatttaaggcgttagactgtctcgaatggtttcgcattttgctgtaactgctgtagatacctcactctgttgcgccttaacctatcttacgcaacgatatgcaaaatcaaatatgtggcgctcagagcgccccgtaacgctcatgaccatgaccccccagaacctcgacaacgcccgtctatgcttgaaactcattgatgcgcaaaactgcccgccctaccatgtggatttccgaaagacaaaaatggcagtaatcccaactccgtcaacaattccttcttttctttacgcctcctttacccgccacaaacgatacagcaggcatggtgggggaaagccgcaacacggagcggcggaccttgtggattgccttccctgccatactgccaaatctgcaagatcctagctgtacaaatcatcatcgttgttctccgccgacttgagaagtaatacaagccggtatgcgctgctgccgttcaggtagtagcggtgaagtttcttggagcgaaagaatccgagtctctcgtagagcctcatggcgggaatgttggtctcctcagtttcaagaacgatctcatcggcgttgcggtcggccatggcatcgatggctttctctaccaaggcggtggcgatcccgtttcctcgaaaggccgaggaaaccgcgagcattgcaatgtagcctctgtgggtgggtggggaatgcgaagcatggtgctcaagcttgcagatgatgacgccgagtagagattcgtcttctggattcaaggcctgaccaaggcaagtctggtaagcaccaattcgtagaaagagcgtgggaagagaacgggaatcgcaccatgtagcacagatgagcccattggtagagaaagtaacggtagacgtagatgctgtaaggttcgctcaggtctttggatatcagggcgcgaattgcaggcagatatttctcctcgaggccatgctcatattggacgtatcgaagttggccaaggctgggcttattggcaagctctacggccataatcgagcaagcagaagactgaggatgggacaggcgcagatgtggcgtgtactcctggtcatgaaagcatcgaggttgaaaaatgtcgtcgaatgtgtgcggtttacggaacttcaatggtggcttgaattaaggcgtgggatgcaaattgggcggctgtacagtaagaaggctgactcgaggcgtagaggcggtgatagtaggacgcgaaagaggagtggtagttcaaagctctcgtactaaacatgcgtgccgcaggtgaatccatgtctccccagacgaatgcagactggcccataggcacttgtcagactggagcttagagtcttggaggttgcccactttcacatgcaagacccggcaacctcttggcagttacacaacgttaaaagcttttgctatgtacatgtaatttctattacctacatgcggttatgctacttctccagtttgcgattgctatttttaccaagctttggagaacctcaagtccccgataggcagttgaagccacgtaaacaaatgaccctacctaaactatctccagtataatttgaatgtacgttctcttcattatcgcaacattatcg

SEQ ID NO: 16714 - DNA, 879 bp, Muscodor strobelii
  misc_feature: SGI cDNA ID NO. 565569
  misc_feature: Encodes the peptide sequence at SEQ ID NO 16715
atggcgtctgacgacgactctgacttctatggtgacgagacaacggtcaaagatctccagaagagagtagacggcatcgacgtgaaacgttggtgggagacatatggcgcagtcgacacacccatgaagatccgagcgcgagggacattaagtgataaatcccatcttcacaaccccttctccggtaccaaatatgcctggcaacttaccgagagtgttgacgcctttctcgatcgactgccaccagcgtctacgagtgaagagcctggcgacccctggatctggatctgtaatccatacatcaagcaaaaggcaaagcaacaggcacaaaaccaatcaattcccggaggtggcgatgaggctcccgagcaagaaggtgccgatctcgtcgggtttatgaatggaggacgcgagaagcttgactttgcgtcgtctttcatcaacttctgccgaagccagagcacgtcgaaagctcatatcacgcgtgaaacaaggaaggccggcatggatgcggcgaaggacatacttgatttagcaaaacaccttcgtgtcacttgtgggaagtggatgatattttgttctgtgctagaagtcaacgacgtctgggagataattgccaaagctacagctaacaacgagcttggcatcgcaagcaaagtagcgccaaagccgaatatcctgaaaggcaatgaacgactgatatgcgtctatacagcggacttctccgacagaaacgatgtgattcgggtcgcagagaggctcaaggctttgggccttactacgaggaagccattgtactacaaaccaggaatcgcatctcaaaatccttgggagatcagagcttccatatataacacgcaaactctcctacgtaaataa

SEQ ID NO: 16715 - protein, 292 aa, Muscodor strobelii
  misc_feature: SGI Peptide ID NO. 565569
  misc_feature (76)..(286): Pfam Id: PF08939 Pfam Desc: Domain of function (DUF1917)
  misc_feature (4)..(289): NCBI GI: 261361181 Blast Desc: conserved [Verticillium albo-atrum VaMs.102]
  misc_feature (1)..(291): NCBI GI: 256732437 Blast Desc: NECHADRAFT_67998 [Nectria haematococca mpVI 77-13-4]
  misc_feature (1)..(291): NCBI GI: 46123999 Blast Desc: FG06377.1 [Gibberella zeae PH-1]
  misc_feature (1)..(287): NCBI GI: 189091806 Blast Desc: [Podospora anserina] gi|188219256|emb|CAP49236.1| protein product [Podospora anserina]
  misc_feature (5)..(271): NCBI GI: 156042668 Blast Desc: SS1G_11132 [Sclerotinia sclerotiorum 1980] gi|154695518|gb|EDN95256.1| SS1G_11132 [Sclerotinia sclerotiorum 1980]
  misc_feature (4)..(268): NCBI GI: 116179636 Blast Desc: CHGG_00446 [Chaetomium globosum CBS 148.51] gi|88184743|gb|EAQ92211.1| CHGG_00446 [Chaetomium globosum CBS 148.51]
  misc_feature (1)..(283): NCBI GI: 27803013 Blast Desc: protein product [Podospora anserina]
  misc_feature (5)..(290): NCBI GI: 258564168 Blast Desc: [Uncinocarpus reesii 1704] gi|237908336|gb|EEP82737.1| [Uncinocarpus reesii 1704]
  misc_feature (5)..(290): NCBI GI: 239611479 Blast Desc: conserved [Ajellomyces dermatitidis ER-3]
  misc_feature (5)..(290): NCBI GI: 159127741 Blast Desc: conserved [Aspergillus fumigatus A1163]
MASDDDSDFYGDETTVKDLQKRVDGIDVKRWWETYGAVDTPMKIRARGTLSDKSHLHNPFSGTKYAWQLTESVDAFLDRLPPASTSEEPGDPWIWICNPYIKQKAKQQAQNQSIPGGGDEAPEQEGADLVGFMNGGREKLDFASSFINFCRSQSTSKAHITRETRKAGMDAAKDILDLAKHLRVTCGKWMIFCSVLEVNDVWEIIAKATANNELGIASKVAPKPNILKGNERLICVYTADFSDRNDVIRVAERLKALGLTTRKPLYYKPGIASQNPWEIRASIYNTQTLLRK

SEQ ID NO: 16716 - DNA, 2938 bp, Muscodor strobelii; identical to SEQ ID NO: 16713
  misc_feature: SGI EST ID NO. CUFF.39447.2
  misc_feature: Variant of the nucleotide sequence at SEQ ID NO 16714

SEQ ID NO: 16717 - DNA, 1257 bp, Muscodor strobelii
  misc_feature: SGI cDNA ID NO. 565570
  misc_feature: Encodes the peptide sequence at SEQ ID NO 16718
atggaaatcgatggcaggctcatcaagcctttgcactctctgatactcgatcttcctccgagctgtattgaattttgcccagctcaccccgagtacttggtcgtcggcacctataatctgcaaaaggacgaaccagcagaaccacaaatcgatgtggtagatacagtgagaccccaaagccgaaatggcagcctagtggtcttccgtcttgagaacaatgtcaacgaaatacatcaagtgcacaccatttcctatccgtctgctctcttggacctacattttcatcctgccccggataaaagcgacgtcttggctgcggtctcaagtacaggaactctttcgttcttccggcttgcttgcaacaacacagacacagggtctctcgtccatgttgcaacgcatcggccgctaggtgatgatgagggtattctcttattatcctgcgcatggcatccaagtctcgataacttacttgccatcaccacttcggactatcaagttcatgtcctgaagatagatgactcgtggggtacccatcacacaacatcttcacccgtcatcactcatactcttgaggcgtggaccgtggcattttcgcctttcctggtagagccctcaattgatacgaacgatgatacaatctcaaccacctctcgagggtttgtagtgtactctggagctgacgattcacagcttctcagtgcaagttgttattaccaagcggatcacaacgacgaccaagatgaattacaggtacaggagtccatgttttcagccagggggcacggggcaggtgtcactgccatcctgcctgtgtcattaacattatccgatggctcttcgatagtcatcactggaagctatgatgattgtctccgagtttactcatttcctactctcgtagaaggcatgatgccttacccgccgaagcaactggctgagtcgaacttgggaggtggcgtttggagactcaagctattaaatctctatcagccgggaaaagatgccaatgatgcattgccagattcctggtcggtgtctgtattggcatcttgcatgcatgcgggaagccggatagtcgagatcgcggccgacgtcgatggagcatgccagatcaaggtgcttgcgcggttcgaagagcacaagagcatgaactatgggagtgattggcaatgcggtactgggttcggctctcagcccctgcgtattgtatccaccagcttctatgataaacttatgtgtctttgggagttctag

SEQ ID NO: 16718 - protein, 418 aa, Muscodor strobelii
  misc_feature: SGI Peptide ID NO. 565570
  misc_feature (1)..(418): NCBI GI: 261361182 Blast Desc: conserved [Verticillium albo-atrum VaMs.102]
  misc_feature (1)..(418): NCBI GI: 189091808 Blast Desc: [Podospora anserina] gi|27803014|emb|CAD60717.1| protein product [Podospora anserina] gi|188219257|emb|CAP49237.1| protein product [Podospora anserina]
  misc_feature (8)..(418): NCBI GI: 85093519 Blast Desc: NCU02388 [Neurospora crassa OR74A] gi|28921158|gb|EAA30472.1| conserved [Neurospora crassa OR74A]
  misc_feature (7)..(418): NCBI GI: 256732890 Blast Desc: NECHADRAFT_92424 [Nectria haematococca mpVI 77-13-4]
  misc_feature (58)..(418): NCBI GI: 46124001 Blast Desc: FG06378.1 [Gibberella zeae PH-1]
  misc_feature (77)..(418): NCBI GI: 116179634 Blast Desc: CHGG_00445 [Chaetomium globosum CBS 148.51] gi|88184742|gb|EAQ92210.1| CHGG_00445 [Chaetomium globosum CBS 148.51]
  misc_feature (8)..(418): NCBI GI: 169598638 Blast Desc: SNOG_02124 [Phaeosphaeria nodorum SN15] gi|160704440|gb|EAT90336.2| SNOG_02124 [Phaeosphaeria nodorum SN15]
  misc_feature (8)..(418): NCBI GI: 189198938 Blast Desc: PTRG_05473 [Pyrenophora tritici-repentis Pt-1C-BFP] gi|187982905|gb|EDU48393.1| PTRG_05473 [Pyrenophora tritici-repentis Pt-1C-BFP]
  misc_feature (2)..(418): NCBI GI: 39942964 Blast Desc: MGG_03562 [Magnaporthe grisea 70-15] gi|145009875|gb|EDJ94531.1| MGG_03562 [Magnaporthe grisea 70-15]
  misc_feature (13)..(417): NCBI GI: 238484587 Blast Desc: conserved [Aspergillus flavus NRRL3357] gi|220701582|gb|EED57920.1| conserved [Aspergillus flavus NRRL3357]
MEIDGRLIKPLHSLILDLPPSCIEFCPAHPEYLVVGTYNLQKDEPAEPQIDVVDTVRPQSRNGSLVVFRLENNVNEIHQVHTISYPSALLDLHFHPAPDKSDVLAAVSSTGTLSFFRLACNNTDTGSLVHVATHRPLGDDEGILLLSCAWHPSLDNLLAITTSDYQVHVLKIDDSWGTHHTTSSPVITHTLEAWTVAFSPFLVEPSIDTNDDTISTTSRGFVVYSGADDSQLLSASCYYQADHNDDQDELQVQESMFSARGHGAGVTAILPVSLTLSDGSSIVITGSYDDCLRVYSFPTLVEGMMPYPPKQLAESNLGGGVWRLKLLNLYQPGKDANDALPDSWSVSVLASCMHAGSRIVEIAADVDGACQIKVLARFEEHKSMNYGSDWQCGTGFGSQPLRIVSTSFYDKLMCLWEF

SEQ ID NO: 16719 - DNA, 1574 bp, Muscodor strobelii
  misc_feature: SGI EST ID NO. CUFF.39437.0
  misc_feature: Variant of the nucleotide sequence at SEQ ID NO 16717
tttgcataaacgggtccacgagattgagtcggggctttggctttggcgtgagagccggacacaggttcaagatggaaatcgatggcaggctcatcaagcctttgcactctctgatactcgatcttcctccgagctgtattgaattttgcccagctcaccccgagtacttggtcgtcggcacctataatctgcaaaaggacgaaccagcagaaccacaaatcgatgtggtagatacagtgagaccccaaagccgaaatggcagcctagtggtcttccgtcttgagaacaatgtcaacgaaatacatcaagtgcacaccatttcctatccgtctgctctcttggacctacattttcatcctgccccggataaaagcgacgtcttggctgcggtctcaagtacaggaactctttcgttcttccggcttgcttgcaacaacacagacacagggtctctcgtccatgttgcaacgcatcggccgctaggtgatgatgagggtattctcttattatcctgcgcatggcatccaagtctcgataacttacttgccatcaccacttcggactatcaagttcatgtcctgaagatagatgactcgtggggtacccatcacacaacatcttcacccgtcatcactcatactcttgaggcgtggaccgtggcattttcgcctttcctggtagagccctcaattgatacgaacgatgatacaatctcaaccacctctcgagggtttgtagtgtactctggagctgacgattcacagcttctcagtgcaagttgttattaccaagcggatcacaacgacgaccaagatgaattacaggtacaggagtccatgttttcagccagggggcacggggcaggtgtcactgccatcctgcctgtgtcattaacattatccgatggctcttcgatagtcatcactggaagctatgatgattgtctccgagtttactcatttcctactctcgtagaaggcatgatgccttacccgccgaagcaactggctgagtcgaacttgggaggtggcgtttggagactcaagctattaaatctctatcagccgggaaaagatgccaatgatgcattgccagattcctggtcggtgtctgtattggcatcttgcatgcatgcgggaagccggatagtcgagatcgcggccgacgtcgatggagcatgccagatcaaggtgcttgcgcggttcgaagagcacaagagcatgaactatgggagtgattggcaatgcggtactgggttcggctctcagcccctgcgtattgtatccaccagcttctatgataaacttatgtgtctttgggagttctagctctaatacagtacgaagccgagctcaacagatgacataaaattcaatatagatgggccaacaccatcgccaaatgaatagcaacggtgaaccctgaatacccactgatcacggcctcaaagtctatgaacgaggttggatatatttggtgttcgtctaagctaggaactggaatgactactactccgaggattatagtgactagcaatggatcaaaatttctctatagtgaatacataatgtccg

SEQ ID NO: 16720 - DNA, 2583 bp, Muscodor strobelii
  misc_feature: SGI cDNA ID NO. 565571
  misc_feature: Reduced expression when VOC is produced
  misc_feature: Encodes the peptide sequence at SEQ ID NO 16721
atgaccacccaagcgcaccaagctccgctcactgcgcaaagccatcaggaccccagcgtcaccagccagagacccctctccggcagctacttctcctacaaccacccccaccaacagcagccgccgcaacagcagctacaacagcagcagtcttaccagcttgtcgacgatcagacgctgtccaacactctagccaacacgcacgtctccgcccccgacaacaatctgcacgtcccgaatcgccagccaaagttcaacgaggagtgggacgccagtgtccggggaagctccatactcgacggccccgcctccaccagccaattcaaccagcagcgacagcgctcccagagtcccaacatgcagcgctccaactccgtctcctcgcgcaccgagatggtcacgggcgatggcgcgagcgctcacagcatatccctatccaggggcaacaccctcaagaagaagaactcgctgaagcggagtggcagcttgaagcgtagcagcagtcgtcggagcatgaaggccggaagcgtaaggagcttagctttgcagagctctcacgatgccgatgagttgcacagcgctttctattgcccgatccccacctctggcacacccacagaagtcctcgccaatagattccaagcttggagaaagattctaaaggatttgattgcttactttcgagaaattcaaaatcactacgagcatcgatcaaagtcgctgatcaagctcgccaatgtttgtaacaacatttcgacgccgccgggctttcttgcttctgggggcctcgacgatgccctgcaagtgctcagagactatcacaagaggtccattctcgaggcgactaaagccaaggaaatcgaagacgacgtcattttggcgctgacagggctcaggagcgatctgaatcaaaagatgaaagaaatcaagagtttatccggagacttcaagaactcggtggacaaggagatggacaacacgagacgggctgtcaaggctttgcaagaggttttgggccacaacgagcttgacccgtctactacaactggaaaacaggacccctatcttctgcgactggctgttgatcggcaggtcgagagacagctagatgaagaaaattatctacaccaagcttacctgaacttggaaacttctggccgtgaactcgagtcgatcatcgtaggtgagattcaaaagtcctacaatgcctacgcgggtattctgaagagggaagccgacgccggctatggtatcgtcgaggaacttcgccaggggcccattgcaatgccgaaagaccacgaatggattagcttcattcaaagagactctcagtttgtggacccagagatcccaatgagaactgccgaacagatacactacccggggcgcgaccattttgcatgtcaagaaattagagctggcttgctggagcgcaagagcaaatacttgaagagctacacagccgggtggtatgtcctatcaccgactcatctgcacgaattcaagtcagcagataaaacccaggcgcctgtcatgtctctctaccttccagagcaaaagcttgggtcacactcgaccgagggcggctcttccaataagtttattttgaaaggtcgacagaccggaactatgcatcgtgggcacacttgggtcttccgcgccgaaagccatgataccatgatggcctggtatgaggatatcaaggctctcacggagaaatcgccggaggagctcaacaactttgttcggggtcacgcccgcacttactcacggtcgtctcaaaggagcgtcagcagcgacggcatggtggacgaagaagacgaggtgccctttacagctgacccggcggtctctgctcctagctcgcgtcacgactcgttccagaaccggccctctccaggtgggcgattcccgtccgatctccaggtcaacgcagaacgcggcttacatgtaccattgtctcccactagttcaacatctggaaatctagaacaagagggcctcacccgaaccgtgacagggaatagcgcatatccggaccacgacgtgattgccgcagcaggagcactgcccggtagcggagtcggccagcattatctaggcgatcggtcttcgatggttggaccatcgtatggtaatgcatatggtaacacttcgagtgtgaggatggatcagggcccgagccacgccgcagccatcgatatcgcggccagacaagacggtgtcaatccatggtatttatccccttcactgtacaatggtgaacccgttcagccgcaaacattcaactctgcttatccaacaaacgatccaatcgtcattgccggtcccgtatctgcagctactaccgccccagacacgccagggacggaaatgacaacattgagcgatgacaccggactctccagctctgttgcggacggctactctaacggtgggttcaaatcgcctccttcgggcatgagtggcgcagcttatgcggctcaaacccaaatgcgcccaacgggtggccgtaacaacagcacaccacatgtgcccggagagtacccacgaagcacgcccggtgctacaccaggagtttaa

SEQ ID NO: 16721 - protein, 860 aa, Muscodor strobelii
  misc_feature: SGI Peptide ID NO. 565571
  misc_feature (470)..(572): Pfam Id: PF00169 Pfam Desc: PH domain
  misc_feature (20)..(853): NCBI GI: 189091782 Blast Desc: [Podospora anserina] gi|27803001|emb|CAD60704.1| protein product [Podospora anserina] gi|188219244|emb|CAP49224.1| protein product [Podospora anserina]
  misc_feature (74)..(763): NCBI GI: 46123991 Blast Desc: FG06373.1 [Gibberella zeae PH-1]
  misc_feature (68)..(761): NCBI GI: 256732440 Blast Desc: [Nectria haematococca mpVI 77-13-4]
  misc_feature (51)..(852): NCBI GI: 145616116 Blast Desc: MGG_03558 [Magnaporthe grisea 70-15] gi|145009879|gb|EDJ94535.1| MGG_03558 [Magnaporthe grisea 70-15]
  misc_feature (56)..(680): NCBI GI: 85093000 Blast Desc: NCU02425 [Neurospora crassa OR74A] gi|28921051|gb|EAA30371.1| conserved [Neurospora crassa OR74A]
  misc_feature (74)..(749): NCBI GI: 156042358 Blast Desc: SS1G_10976 [Sclerotinia sclerotiorum 1980] gi|154695363|gb|EDN95101.1| SS1G_10976 [Sclerotinia sclerotiorum 1980]
  misc_feature (84)..(749): NCBI GI: 154300298 Blast Desc: BC1G_11338 [Botryotinia fuckeliana B05.10] gi|150856661|gb|EDN31853.1| BC1G_11338 [Botryotinia fuckeliana B05.10]
  misc_feature (84)..(775): NCBI GI: 242790906 Blast Desc: PH domain protein [Talaromyces stipitatus ATCC 10500] gi|218718239|gb|EED17659.1| PH domain protein [Talaromyces stipitatus ATCC 10500]
  misc_feature (84)..(660): NCBI GI: 189200627 Blast Desc: PH domain containing protein [Pyrenophora tritici-repentis Pt-1C-BFP] gi|187983749|gb|EDU49237.1| PH domain containing protein [Pyrenophora tritici-repentis Pt-1C-BFP]
  misc_feature (84)..(695): NCBI GI: 212534698 Blast Desc: PH domain protein [Penicillium marneffei ATCC 18224] gi|210069904|gb|EEA23994.1| PH domain protein [Penicillium marneffei ATCC 18224]
  misc_feature: Useful for introducing or modulating the production of volatile compounds
MTTQAHQAPLTAQSHQDPSVTSQRPLSGSYFSYNHPHQQQPPQQQLQQQQSYQLVDDQTLSNTLANTHVSAPDNNLHVPNRQPKFNEEWDASVRGSSILDGPASTSQFNQQRQRSQSPNMQRSNSVSSRTEMVTGDGASAHSISLSRGNTLKKKNSLKRSGSLKRSSSRRSMKAGSVRSLALQSSHDADELHSAFYCPIPTSGTPTEVLANRFQAWRKILKDLIAYFREIQNHYEHRSKSLIKLANVCNNISTPPGFLASGGLDDALQVLRDYHKRSILEATKAKEIEDDVILALTGLRSDLNQKMKEIKSLSGDFKNSVDKEMDNTRRAVKALQEVLGHNELDPSTTTGKQDPYLLRLAVDRQVERQLDEENYLHQAYLNLETSGRELESIIVGEIQKSYNAYAGILKREADAGYGIVEELRQGPIAMPKDHEWISFIQRDSQFVDPEIPMRTAEQIHYPGRDHFACQEIRAGLLERKSKYLKSYTAGWYVLSPTHLHEFKSADKTQAPVMSLYLPEQKLGSHSTEGGSSNKFILKGRQTGTMHRGHTWVFRAESHDTMMAWYEDIKALTEKSPEELNNFVRGHARTYSRSSQRSVSSDGMVDEEDEVPFTADPAVSAPSSRHDSFQNRPSPGGRFPSDLQVNAERGLHVPLSPTSSTSGNLEQEGLTRTVTGNSAYPDHDVIAAAGALPGSGVGQHYLGDRSSMVGPSYGNAYGNTSSVRMDQGPSHAAAIDIAARQDGVNPWYLSPSLYNGEPVQPQTFNSAYPTNDPIVIAGPVSAATTAPDTPGTEMTTLSDDTGLSSSVADGYSNGGFKSPPSGMSGAAYAAQTQMRPTGGRNNSTPHVPGEYPRSTPGATPGV

SEQ ID NO: 16722 - DNA, 3721 bp, Muscodor strobelii
  misc_feature: SGI EST ID NO. CUFF.39490.1
  misc_feature: Variant of the nucleotide sequence at SEQ ID NO 16720
ggcttcctgtccctcggtcgtcgccccctttcacccctctcttctttcgcgaagcacaaccacgacgacgacaacgcattggtgcgcattcaccatttgctgacgctgtagacgtatattggaaagtgattcatctcatcttatccctcctctgccgacaactgtagtcctggacagattcatacaacactatcatttttatatatcagatcagatccattggaccctaagccacaatccccggtccccggctgcctgcctctggctctccttttctccagcgcgcccatccccatcctctatcgagacggttgcgcacagctgagactacactagaacaaagaacaaagggataacgacctgccttcatcatatcgaagcgtcgtcggcacatttgccagggcacttcttcttccagacagctgtagatcttgagtcaacgcacaacgggagaaggtcgcggctgagcgctgcgaaagcctgagccggccgtaaaccactcgcctcgcaggctgtcaccttgtcttgcccgccgccgctcaaactctaatcgtgcagcgtcccaacatcttcctgtcagacatctcacctggctccctgtctcatctgagttccaggcctctcccgcttcggtgctagcagcgaccagggctttcctggacaggccgaccagccgaccgcatcgtcgacttgctgcgtcccagcgcaacaatcatgaccacccaagcgcaccaagctccgctcactgcgcaaagccatcaggaccccagcgtcaccagccagagacccctctccggcagctacttctcctacaaccacccccaccaacagcagccgccgcaacagcagctacaacagcagcagtcttaccagcttgtcgacgatcagacgctgtccaacactctagccaacacgcacgtctccgcccccgacaacaatctgcacgtcccgaatcgccagccaaagttcaacgaggagtgggacgccagtgtccggggaagctccatactcgacggccccgcctccaccagccaattcaaccagcagcgacagcgctcccagagtcccaacatgcagcgctccaactccgtctcctcgcgcaccgagatggtcacgggcgatggcgcgagcgctcacagcatatccctatccaggggcaacaccctcaagaagaagaactcgctgaagcggagtggcagcttgaagcgtagcagcagtcgtcggagcatgaaggccggaagcgtaaggagcttagctttgcagagctctcacgatgccgatgagttgcacagcgctttctattgcccgatccccacctctggcacacccacagaagtcctcgccaatagattccaagcttggagaaagattctaaaggatttgattgcttactttcgagaaattcaaaatcactacgagcatcgatcaaagtcgctgatcaagctcgccaatgtttgtaacaacatttcgacgccgccgggctttcttgcttctgggggcctcgacgatgccctgcaagtgctcagagactatcacaagaggtccattctcgaggcgactaaagccaaggaaatcgaagacgacgtcattttggcgctgacagggctcaggagcgatctgaatcaaaagatgaaagaaatcaagagtttatccggagacttcaagaactcggtggacaaggagatggacaacacgagacgggctgtcaaggctttgcaagaggttttgggccacaacgagcttgacccgtctactacaactggaaaacaggacccctatcttctgcgactggctgttgatcggcaggtcgagagacagctagatgaagaaaattatctacaccaagcttacctgaacttggaaacttctggccgtgaactcgagtcgatcatcgtaggtgagattcaaaagtcctacaatgcctacgcgggtattctgaagagggaagccgacgccggctatggtatcgtcgaggaacttcgccaggggcccattgcaatgccgaaagaccacgaatggattagcttcattcaaagagactctcagtttgtggacccagagatcccaatgagaactgccgaacagatacactacccggggcgcgaccattttgcatgtcaagaaattagagctggcttgctggagcgcaagagcaaatacttgaagagctacacagccgggtggtatgtcctatcaccgactcatctgcacgaattcaagtcagcagataaaacccaggcgcctgtcatgtctctctaccttccagagcaaaagcttgggtcacactcgaccgagggcggctcttccaataagtttattttgaaaggtcgacagaccggaactatgcatcgtgggcacacttgggtcttccgcgccgaaagccatgataccatgatggcctggtatgaggatatcaaggctctcacggagaaatcgccggaggagctcaacaactttgttcggggtcacgcccgcacttactcacggtcgtctcaaaggagcgtcagcagcgacggcatggtggacgaagaagacgaggtgccctttacagctgacccggcggtctctgctcctagctcgcgtcacgactcgttccagaaccggccctctccaggtgggcgattcccgtccgatctccaggtcaacgcagaacgcggcttacatgtaccattgtctcccactagttcaacatctggaaatctagaacaagagggcctcacccgaaccgtgacagggaatagcgcatatccggaccacgacgtgattgccgcagcaggagcactgcccggtagcggagtcggccagcattatctaggcgatcggtcttcgatggttggaccatcgtatggtaatgcatatggtaacacttcgagtgtgaggatggatcagggcccgagccacgccgcagccatcgatatcgcggccagacaagacggtgtcaatccatgttagtaatcaagttgtgctcgacccagcggcaaatctttcaaatatcatagtgggctgaccttttgttattagacaatggtgaacccgttcagccgcaaacattcaactctgcttatccaacaaacgatccaatcgtcattgccggtcccgtatctgcagctactaccgccccagacacgccagggacggaaatgacaacattgagcgatgacaccggactctccagctctgttgcggacggctactctaacggtgggttcaaatcgcctccttcgggcatgagtggcgcagcttatgcggctcaaacccaaatgcgcccaacgggtggccgtaacaacagcacaccacatgtgcccggagagtacccacgaagcacgcccggtgctacaccaggagtttaagcctcacggcgaagcagcatggaacctctaacttggctttcgatacacttttctcacccttcggtccgcggcttcttttctctttgttcactgcccgtagttctgaagcatggcgtttcttctaaattccgctttagctacacggctgttataccttttcattattacgttcgatacctatgggggggataagctgcttgcttggcgaagagtgaatagcacagtgtctaggataggagcttgtgctttttgtcattagcctaggtgctgggtactagacgttgtatctgttagtaatgtatttcttctatttttattaggattattgtcatgctctctctattggactgatttgatgacgtggattttaa

SEQ ID NO: 16723 - DNA, 1818 bp, Muscodor strobelii
  misc_feature: SGI cDNA ID NO. 565572
  misc_feature: Encodes the peptide sequence at SEQ ID NO 16724
atggcgcaaaggagggatcaggaagatatcgaggcttccgctcagctgatttacaaagacgaagacaccaaatctaacgatgaactcagatctgagaatggggaccagaggtacgaggagtggtccaaacagtatgcgtccacctcgagccgcctgcggcaccgtttgcagtccatccccatacccaattggataccggtacgaaaactcggccagataagccctcgatacttggtctttgctgtcgttgtgtcgtttattgtaacggttctggtcttcaatccatacgattatgttggagtatcggcgcaaacgcagcaagagtccgagtctcatgtctcacccttgactgcttcgataacttctactcttcctgaaattccgcgccctactagacctagtgccacggagggaaaagaggaccttagaccgtatcattccccgaaaccgataccaaacaacgaacattgcaccacttggccggtggacgcagaaggggtttacgatgcgcatagtgtcaaccggaccgctcctgtcaagctcgatactttggcaccacatgggggctggaagaaacctgacggtgttaaggtcgttgccatagtattttatggccgaaagagatatgttgacatcctagattgctacctccaaaagaatctcaacttctacggcggttatttagatgaagtatggttcatggcccatactgaagacccagacgataacgcttggttggacggcctagtattgaagacaccagagtataagatcgtcggacgcggggactgtgagagtaagaaatatggctgcttgtggaaatatgctaccgaagacaagacgatctatattaagatcgacgacgatattgtctacattcatcccgacgccatccctcaacttgttcacacacgccttgccgtcccgcatgcattcgccgtctctgcgcagctgatcaacagtcccatcacaggacttgaacaataccatcatacagccatatacccctttgtccccgatccaaacacggagccaaatcacacagccgccgagacttggcgactatcgagacagaaacatttcccgaaagagtcgtggccatttttaacaagaaagaatgaccatgatataatgtaccctcccgtgccgtatcggggtcactcctttatgctcctatctgaggacaatttcgacaacttgcatacatccatgggacgctacgaccaagaacctggtggtgacaacatcgcttttagcccactctggaggtcttgggctatggcagcgcagcagcaatattctctattgtacaatctcgaaaagaaccagttgtcgcgttacttctacggaacgagggccaggtatccatcttatgccaagggcccaaacgctacagctatcataccagcgccaagtcgcggaggagagccagtcttaggcggcgagcaaatcctagatacacaattccggcgctacaacctgaacttcgtcgctgtttggggctcagatatcagagaccatctacccatcgagccagatgacgaacagcacatcaccaaaacaatacctcgagaaacaggtcgtccattcatcatcgatacgagggcactcgtgacccacttgagctttttcacgcaattagatggaatacgccagactgatctccttgatagatggcgagcctacgcaaatgaggctgtgtgtgaagttgataatctgaagaaaccttgggacttgaggtgtccagagttcgaggagaaggagcaggagcaggatcctgtagcaagtcaggttccagactcagggaccattgtatga

SEQ ID NO: 16724 - protein, 605 aa, Muscodor strobelii
  misc_feature: SGI Peptide ID NO. 565572
  misc_feature (61)..(568): NCBI GI: 226280107 Blast Desc: conserved [Paracoccidioides brasiliensis Pb01]
  misc_feature (192)..(568): NCBI GI: 225556125 Blast Desc: conserved [Ajellomyces capsulatus G186AR]
  misc_feature (186)..(568): NCBI GI: 226290833 Blast Desc: conserved [Paracoccidioides brasiliensis Pb18]
  misc_feature (186)..(568): NCBI GI: 225681332 Blast Desc: conserved [Paracoccidioides brasiliensis Pb03]
  misc_feature (192)..(576): NCBI GI: 212527402 Blast Desc: conserved [Penicillium marneffei ATCC 18224] gi|210073256|gb|EEA27343.1| conserved [Penicillium marneffei ATCC 18224]
  misc_feature (192)..(568): NCBI GI: 242811976 Blast Desc: conserved [Talaromyces stipitatus ATCC 10500] gi|218714203|gb|EED13626.1| conserved [Talaromyces stipitatus ATCC 10500]
  misc_feature (175)..(568): NCBI GI: 239614928 Blast Desc: conserved [Ajellomyces dermatitidis ER-3]
  misc_feature (192)..(568): NCBI GI: 212544292 Blast Desc: conserved [Penicillium marneffei ATCC 18224] gi|210065269|gb|EEA19363.1| conserved [Penicillium marneffei ATCC 18224]
  misc_feature (192)..(568): NCBI GI: 261188315 Blast Desc: conserved [Ajellomyces dermatitidis SLH14081] gi|239593252|gb|EEQ75833.1| conserved [Ajellomyces dermatitidis SLH14081]
  misc_feature (192)..(572): NCBI GI: 261195821 Blast Desc: conserved [Ajellomyces dermatitidis SLH14081] gi|239587447|gb|EEQ70090.1| conserved [Ajellomyces dermatitidis SLH14081] gi|239614399|gb|EEQ91386.1| conserved [Ajellomyces
MAQRRDQEDIEASAQLIYKDEDTKSNDELRSENGDQRYEEWSKQYASTSSRLRHRLQSIPIPNWIPVRKLGQISPRYLVFAVVVSFIVTVLVFNPYDYVGVSAQTQQESESHVSPLTASITSTLPEIPRPTRPSATEGKEDLRPYHSPKPIPNNEHCTTWPVDAEGVYDAHSVNRTAPVKLDTLAPHGGWKKPDGVKVVAIVFYGRKRYVDILDCYLQKNLNFYGGYLDEVWFMAHTEDPDDNAWLDGLVLKTPEYKIVGRGDCESKKYGCLWKYATEDKTIYIKIDDDIVYIHPDAIPQLVHTRLAVPHAFAVSAQLINSPITGLEQYHHTAIYPFVPDPNTEPNHTAAETWRLSRQKHFPKESWPFLTRKNDHDIMYPPVPYRGHSFMLLSEDNFDNLHTSMGRYDQEPGGDNIAFSPLWRSWAMAAQQQYSLLYNLEKNQLSRYFYGTRARYPSYAKGPNATAIIPAPSRGGEPVLGGEQILDTQFRRYNLNFVAVWGSDIRDHLPIEPDDEQHITKTIPRETGRPFIIDTRALVTHLSFFTQLDGIRQTDLLDRWRAYANEAVCEVDNLKKPWDLRCPEFEEKEQEQDPVASQVPDSGTIV

SEQ ID NO: 16725 - DNA, 1182 bp, Muscodor strobelii
  misc_feature: SGI cDNA ID NO. 565573
  misc_feature: Reduced expression when VOC is produced
  misc_feature: Encodes the peptide sequence at SEQ ID NO 16726
atgagtcgccacgagacaggcaacctcatcgacttttccgacgacgacctcccttcgcgctctgccgggtcgactcccttccccgccctgcattcacccacgatccaatcccgctctccttcacaatcccggacaagctctccctctcgattccagcggcgccagaaatcgccgccgccgtctctccagaaatcccccagcgggtcgggctacgggatcggctctgctgtctggggtttactccggaggatatcgaccgtcgagggtctccctagccaggcacccacaccgccgcccggcgcctcgcagctctacaaccaaaacgccgcctacagccagccccatgcggggatcccgggagccggtggtgatggcattaacggtgccttcacaccccctcgacgggtcgccacgccgcgtggtctgccatcgctcgagcccctggatctgcacggatatagagatgacacggaatcggaagagcgcatcctgtcgcgtggtattgccgaggagataaggacgtttctacccgagcgactgaagattatggaggattggcaacttatctacagtttataccagaacggaagctccttaggcacgctgtatcagaaatgtgacgaatttcggggaaggagagctggatttgtgcttgttgtgcgggatggtagagacggaatcttcggcgcatacctcaacgaagcaccacacccagcaccctcctactttggcacaggcgaatgctttctctggcgcgccagtctacacgctcccctaccacctccgccatccgccgacacgacaaacctcaattacagaaccacaacgatagcatcaccgacatcttccacattcccctccaacggcttctccgactcctctcatctggcaccaagcgcaaccgatccagtcacaaacaaactcgcatcgccctcagctcagacgcagagtatacgcttccagacgttctcatacacgggggcaaatgactactgcatactctgcgagaccaagttcctgagtgtgggcggtgggagcggagcttatgggctgtggttaaatgatagcttaagtcggggtcatagcggtacctgcgatacgtttttaaaccagcctttgagcgaggagggggataagttcgatgttattggtgttgagctttgggttgtcggggctacgtaa

SEQ ID NO: 16726 - protein, 393 aa, Muscodor strobelii
  misc_feature: SGI Peptide ID NO. 565573
  misc_feature (188)..(391): Pfam Id: PF07534 Pfam Desc: TLD
  misc_feature (320)..(391): Pfam Id: PF07534 Pfam Desc: TLD
  misc_feature (188)..(254): Pfam Id: PF07534 Pfam Desc: TLD
  misc_feature (77)..(392): NCBI GI: 46124017 Blast Desc: FG06386.1 [Gibberella zeae PH-1] gi|83288363|sp|Q4I8S2.1|OXR1_GIBZE RecName: Full=Oxidation resistance protein 1
  misc_feature (75)..(391): NCBI GI: 256732883 Blast Desc: NECHADRAFT_99886 [Nectria haematococca mpVI 77-13-4]
  misc_feature (60)..(391): NCBI GI: 154304774 Blast Desc: BC1G_08126 [Botryotinia fuckeliana B05.10] gi|150854026|gb|EDN29218.1| BC1G_08126 [Botryotinia fuckeliana B05.10]
  misc_feature (71)..(392): NCBI GI: 169624945 Blast Desc: SNOG_15739 [Phaeosphaeria nodorum SN15] gi|111055714|gb|EAT76834.1| SNOG_15739 [Phaeosphaeria nodorum SN15]
  misc_feature (34)..(392): NCBI GI: 189091820 Blast Desc: [Podospora anserina] gi|74620175|sp|Q874Z5.1|OXR1_PODAN RecName: Full=Oxidation resistance protein 1 gi|27803021|emb|CAD60724.1| protein product
  misc_feature (63)..(392): NCBI GI: 189194359 Blast Desc: oxidation resistance protein 1 [Pyrenophora tritici-repentis Pt-1C-BFP] gi|187979082|gb|EDU45708.1| oxidation resistance protein 1 [Pyrenophora tritici-repentis Pt-1C-BFP]
  misc_feature (57)..(360): NCBI GI: 85093542 Blast Desc: oxidation resistance protein 1 [Neurospora crassa OR74A] gi|74615671|sp|Q7S4P1.1|OXR1_NEUCR RecName: Full=Oxidation resistance protein 1 gi|28921164|gb|EAA30478.1| oxidation protein
  misc_feature (70)..(392): NCBI GI: 39961828 Blast Desc: MGG_09566 [Magnaporthe grisea 70-15] gi|145011070|gb|EDJ95726.1| MGG_09566 [Magnaporthe grisea 70-15]
  misc_feature (75)..(392): NCBI GI: 116179622 Blast Desc: CHGG_00439 [Chaetomium globosum CBS 148.51] gi|88184736|gb|EAQ92204.1| CHGG_00439 [Chaetomium globosum CBS 148.51]
  misc_feature (133)..(392): NCBI GI: 255944311 Blast Desc: Pc20g03720 [Penicillium chrysogenum Wisconsin 54-1255] gi|211587658|emb|CAP85701.1| Pc20g03720 [Penicillium chrysogenum Wisconsin 54-1255]
  misc_feature: Useful for introducing or modulating the production of volatile compounds
MSRHETGNLIDFSDDDLPSRSAGSTPFPALHSPTIQSRSPSQSRTSSPSRFQRRQKSPPPSLQKSPSGSGYGIGSAVWGLLRRISTVEGLPSQAPTPPPGASQLYNQNAAYSQPHAGIPGAGGDGINGAFTPPRRVATPRGLPSLEPLDLHGYRDDTESEERILSRGIAEEIRTFLPERLKIMEDWQLIYSLYQNGSSLGTLYQKCDEFRGRRAGFVLVVRDGRDGIFGAYLNEAPHPAPSYFGTGECFLWRASLHAPLPPPPSADTTNLNYRTTTIASPTSSTFPSNGFSDSSHLAPSATDPVTNKLASPSAQTQSIRFQTFSYTGANDYCILCETKFLSVGGGSGAYGLWLNDSLSRGHSGTCDTFLNQPLSEEGDKFDVIGVELWVVGAT

SEQ ID NO: 16727 - DNA, 1849 bp, Muscodor strobelii
  misc_feature: SGI EST ID NO. CUFF.39506.1
  misc_feature: Variant of the nucleotide sequence at SEQ ID NO 16725
gccacctctgatagcattaggcaatgagtcgggcaatttgacaaatcaccttggttgtaatctgtacgtcaggtccgaaactccaagttccagtgccaccagcacccactccaccaatccctctgcctcaaccacggcttgattttgcaagcccaaaatcgagatataccattgtcaatccggcgacatgcattattcccctctgcattgatattctgacattgatactgcgaagggcttcattgatataaaaatagaacaccggggataagccccaccaacacgcgaccaggcccgtggtaaagctacgtcacacttggcttgttctttaaacttcacctgtggcctgccgcgactttttcactttgtctggtccaccgcgacagcttcgcgcctgcagatttgaattcggcatagcacgaaccgagtaaagattgctatttgggtccaacttctctcgcttgccaccatgagtcgccacgagacaggcaacctcatcgacttttccgacgacgacctcccttcgcgctctgccgggtcgactcccttccccgccctgcattcacccacgatccaatcccgctctccttcacaatcccggacaagctctccctctcgattccagcggcgccagaaatcgccgccgccgtctctccagaaatcccccagcgggtcgggctacgggatcggctctgctgtctggggtttactccggaggatatcgaccgtcgagggtctccctagccaggcacccacaccgccgcccggcgcctcgcagctctacaaccaaaacgccgcctacagccagccccatgcggggatcccgggagccggtggtgatggcattaacggtgccttcacaccccctcgacgggtcgccacgccgcgtggtctgccatcgctcgagcccctggatctgcacggatatagagatgacacggaatcggaagagcgcatcctgtcgcgtggtattgccgaggagataaggacgtttctacccgagcgactgaagattatggaggattggcaacttatctacagtttataccagaacggaagctccttaggcacgctgtatcagaaatgtgacgaatttcggggaaggagagctggatttgtgcttgttgtgcgggatggtagagacggaatcttcggcgcatacctcaacgaagcaccacacccagcaccctcctactttggcacaggcgaatgctttctctggcgcgccagtctacacgctcccctaccacctccgccatccgccgacacgacaaacctcaattacagaaccacaacgatagcatcaccgacatcttccacattcccctccaacggcttctccgactcctctcatctggcaccaagcgcaaccgatccagtcacaaacaaactcgcatcgccctcagctcagacgcagagtatacgcttccagacgttctcatacacgggggcaaatgactactgcatactctgcgagaccaagttcctgagtgtgggcggtgggagcggagcttatgggctgtggttaaatgatagcttaagtcggggtcatagcggtacctgcgatacgtttttaaaccagcctttgagcgaggagggggataagttcgatgttattggtgttgagctttgggttgtcggggctacgtaaagaagtgtattgagggatgatgaagtgattataggtgtatagcgtagcgcagcaagcagaggaacgaaatgtaatgataaaggagacgattaggtacggcttttcagggacatactggaggtgaagtttagggaaagcgagatggagacagataattgcagataccccattccaatttacattcttcttaacaatgac

SEQ ID NO: 16728 - DNA, 930 bp, Muscodor strobelii
  misc_feature: SGI cDNA ID NO. 565574
  misc_feature: Reduced expression when VOC is produced
  misc_feature: Encodes the peptide sequence at SEQ ID NO 16729
atggcgtcggaggcaattataaatttgagctcagctacgcccatattacttctgaaaacaaaatcatcgccaactgatgcttatgaggacctcttctccactccacaaaatggcgcggagtttgaacccatctttgttcccgtcctccaacatcggtttgaagaagatggtatgacccaagtacgtcatttattggaaacgaagagaatcaataatacttccaatgcggactttgggggtctgatatttacttctcaaagagctgtcgaggcctttgcggaattagttacaactcatcgagacaatgatcagaagtggccacatcttcaagatatcccgatatacagtgttgggccagctacaacccgggcactgaaggcaattccgcagtccccacctctccagatatttggtgagcacactgggaatggtgatgccctcgcaaagtacatattagagcattacagccaatggtatcaagaccgacccacaaagccaccactattgtttcccgttggagagcaaagacgcgacatcatacccaagacgttaatggacgataatttgccgagcaatagacgcattgaggttgttgaaacggttttgtacggcactggcgagatggcatctttccccaaggactttgccaagatactggagagtacggcaaaccgatcgaggagatgggttgtggtcttttcgcctacaggctgcgacagcatgctcagaggcttgggaattcttgacgaaaagactggcaaagcgaagaaaggcaccaggtcacggcctacctacattgcaacgattggaccgaccacgagagactatctgaagcgaacgtttgatttcgagccagatgtcagtgcggagaaaccgagccctgaaggtgtattgcaggccatcacgaactttagtcaagcgacagcttaa

SEQ ID NO: 16729 - protein, 309 aa, Muscodor strobelii
  misc_feature: SGI Peptide ID NO. 565574
  misc_feature (27)..(300): Pfam Id: PF02602 Pfam Desc: Uroporphyrinogen-III synthase HemD
  misc_feature (62)..(300): Pfam Id: PF02602 Pfam Desc: Uroporphyrinogen-III synthase HemD
  misc_feature (9)..(304): NCBI GI: 85093546 Blast Desc: NCU02395 [Neurospora crassa OR74A] gi|28921165|gb|EAA30479.1| conserved [Neurospora crassa OR74A]
  misc_feature (9)..(307): NCBI GI: 116179620 Blast Desc: CHGG_00438 [Chaetomium globosum CBS 148.51] gi|88184735|gb|EAQ92203.1| CHGG_00438 [Chaetomium globosum CBS 148.51]
  misc_feature (10)..(304): NCBI GI: 256732434 Blast Desc: NECHADRAFT_37766 [Nectria haematococca mpVI 77-13-4]
  misc_feature (9)..(304): NCBI GI: 27803022 Blast Desc: protein product [Podospora anserina]
  misc_feature (9)..(304): NCBI GI: 189091822 Blast Desc: [Podospora anserina] gi|188219264|emb|CAP49244.1| protein product [Podospora anserina]
  misc_feature (14)..(304): NCBI GI: 154304772 Blast Desc: BC1G_08125 [Botryotinia fuckeliana B05.10] gi|150854025|gb|EDN29217.1| BC1G_08125 [Botryotinia fuckeliana B05.10]
  misc_feature (10)..(304): NCBI GI: 46124019 Blast Desc: FG06387.1 [Gibberella zeae PH-1]
  misc_feature (13)..(304): NCBI GI: 39961839 Blast Desc: MGG_09567 [Magnaporthe grisea 70-15] gi|145011071|gb|EDJ95727.1| MGG_09567 [Magnaporthe grisea 70-15]
  misc_feature (2)..(307): NCBI GI: 261361168 Blast Desc: uroporphyrinogen-III synthase [Verticillium albo-atrum VaMs.102]
  misc_feature (11)..(248): NCBI GI: 156042672 Blast Desc: SS1G_11134 [Sclerotinia sclerotiorum 1980] gi|154695520|gb|EDN95258.1| SS1G_11134 [Sclerotinia sclerotiorum 1980]
  misc_feature (15)..(301): SWISSPROT Homolog: EC 4.2.1.75 Uroporphyrinogen-III synthase
  misc_feature: Useful for introducing or modulating the production of volatile compounds
MASEAIINLSSATPILLLKTKSSPTDAYEDLFSTPQNGAEFEPIFVPVLQHRFEEDGMTQVRHLLETKRINNTSNADFGGLIFTSQRAVEAFAELVTTHRDNDQKWPHLQDIPIYSVGPATTRALKAIPQSPPLQIFGEHTGNGDALAKYILEHYSQWYQDRPTKPPLLFPVGEQRRDIIPKTLMDDNLPSNRRIEVVETVLYGTGEMASFPKDFAKILESTANRSRRWVVVFSPTGCDSMLRGLGILDEKTGKAKKGTRSRPTYIATIGPTTRDYLKRTFDFEPDVSAEKPSPEGVLQAITNFSQATA

SEQ ID NO: 16730 - DNA, 1465 bp, Muscodor strobelii
  misc_feature: SGI EST ID NO. CUFF.39482.0
  misc_feature: Variant of the nucleotide sequence at SEQ ID NO 16728
gacatcactgccttgttagtattagtcgggctcgtcaatctatctcgataccgaaactcgacctcataagcctaaagagtctacagatccattcggcattggcttacgttttgatttcactcctttagttttgccatgtcctgtagcttacgggcgaagcttcataattatcatggcgtcggaggcaattataaatttgagctcagctacgcccatattacttctgaaaacaaaatcatcgccaactgatgcttatgaggacctcttctccactccacaaaatggcgcggagtttgaacccatctttgttcccgtcctccaacatcggtttgaagaagatggtatgacccaagtacgtcatttattggaaacgaagagaatcaataatacttccaatgcggactttgggggtctgatatttacttctcaaagagctgtcgaggcctttgcggaattagttacaactcatcgagacaatgatcagaagtggccacatcttcaagatatcccgatatacagtgttgggccagctacaacccgggcactgaaggcaattccgcagtccccacctctccagatatttggtgagcacactgggaatggtgatgccctcgcaaagtacatattagagcattacagccaatggtatcaagaccgacccacaaagccaccactattgtttcccgttggagagcaaagacgcgacatcatacccaagacgttaatggacgataatttgccgagcaatagacgcattgaggttgttgaaacggttttgtacggcactggcgagatggcatctttccccaaggactttgccaagatactggagagtacggcaaaccgatcgaggagatgggttgtggtcttttcgcctacaggctgcgacagcatgctcagaggcttgggaattcttgacgaaaagactggcaaagcgaagaaaggcaccaggtcacggcctacctacattgcaacgattggaccgaccacgagagactatctgaagcgaacgtttgatttcgagccagatgtcagtgcggagaaaccgagccctgaaggtgtattgcaggccatcacgaactttagtcaagcgacagcttaaaaggatttgtgataaatgaaggttagacatagtgatatattgagcgttgtgtcagattagtgtagcgtgagaataatgtgtaatcaggggatcatttctggagactagtgtatagacggcgactctagagatatgatacatcaagcagactgaagaggtcatttggctccgagcagcccaaatcaccacaatatccgttcctattattgaacgttgagacacaatatgaatatgcaatcttaagccttcagagaactgcctaatacacgctaagggaacgatcactgttttgcatcttagtataagaagtgacaactccaaatgtgtcagttgtgatatagggctttttattatgattatttg

SEQ ID NO: 16731 - DNA, 576 bp, Muscodor strobelii
  misc_feature: SGI cDNA ID NO. 565575
  misc_feature: Reduced expression when VOC is produced
  misc_feature: Encodes the peptide sequence at SEQ ID NO 16732
atggctctcgatgcgccagatccgcagccggccgctgctcccaaaaagttgcctccaggcatcgttctagacaaagacggaaaaccatgtcgctcctgtagctccaaagcttctttcagctcgtgggcgcgacagacgaatgcctcgttgaaatccagccccggtgctgcaacgggcggcgcattcgctgtcactgcagccgcagccgcagccgcgacgtcttcccagcctgccaatgactgtcccgccgacgttgagaccctaggtcgaagcacatggactctccttcactccatcgccgccacatacccaacgaacccgagtgtgagagaacagtcagatctcaagacatttatggggctgttctcgcggctatatccttgctgggtatgcgccgatgacttccaacagtacatagccacacagcagataaaagtcggcagcaggaatgatttcggtacctggctatgtgaggctcacaatgcagtcaacaccaagcttggcaagcctacctttgactgctctaaatgggaagaaaggtggcgaaccggatggaaagatggacgctgcgactga

SEQ ID NO: 16732 - protein, 191 aa, Muscodor strobelii
  misc_feature: SGI Peptide ID NO. 565575
  misc_feature (92)..(182): Pfam Id: PF04777 Pfam Desc: Erv1 / Alr family
  misc_feature (14)..(191): NCBI GI: 85093549 Blast Desc: augmenter of liver regeneration [Neurospora crassa OR74A] gi|28921166|gb|EAA30480.1| augmenter of liver regeneration [Neurospora crassa OR74A]
  misc_feature (11)..(191): NCBI GI: 256732881 Blast Desc: NECHADRAFT_92415 [Nectria haematococca mpVI 77-13-4]
  misc_feature (8)..(191): NCBI GI: 145602676 Blast Desc: MGG_13005 [Magnaporthe grisea 70-15] gi|145011072|gb|EDJ95728.1| MGG_13005 [Magnaporthe grisea 70-15]
  misc_feature (12)..(191): NCBI GI: 169600889 Blast Desc: SNOG_03297 [Phaeosphaeria nodorum SN15] gi|160705538|gb|EAT90028.2| SNOG_03297 [Phaeosphaeria nodorum SN15]
  misc_feature (12)..(190): NCBI GI: 156042674 Blast Desc: SS1G_11135 [Sclerotinia sclerotiorum 1980] gi|154695521|gb|EDN95259.1| SS1G_11135 [Sclerotinia sclerotiorum 1980]
  misc_feature (17)..(191): NCBI GI: 255944361 Blast Desc: Pc20g03980 [Penicillium chrysogenum Wisconsin 54-1255] gi|211587683|emb|CAP85727.1| Pc20g03980 [Penicillium chrysogenum Wisconsin 54-1255]
  misc_feature (16)..(191): NCBI GI: 238484535 Blast Desc: FAD dependent sulfhydryl oxidase Erv1, [Aspergillus flavus NRRL3357] gi|220701556|gb|EED57894.1| FAD dependent sulfhydryl oxidase Erv1, [Aspergillus flavus NRRL3357]
  misc_feature (15)..(191): NCBI GI: 119177552 Blast Desc: CIMG_07698 [Coccidioides immitis RS]
  misc_feature (15)..(191): NCBI GI: 240107639 Blast Desc: Erv1 / Alr family protein [Coccidioides posadasii C735 delta SOWgp]
  misc_feature (14)..(191): NCBI GI: 238843612 Blast Desc: FAD-linked sulfhydryl oxidase ALR [Microsporum canis CBS 113480]
  misc_feature (21)..(187): SWISSPROT Homolog: EC 1.8.3.2 Thiol oxidase
  misc_feature: Useful for introducing or modulating the production of volatile compounds
MALDAPDPQPAAAPKKLPPGIVLDKDGKPCRSCSSKASFSSWARQTNASLKSSPGAATGGAFAVTAAAAAAATSSQPANDCPADVETLGRSTWTLLHSIAATYPTNPSVREQSDLKTFMGLFSRLYPCWVCADDFQQYIATQQIKVGSRNDFGTWLCEAHNAVNTKLGKPTFDCSKWEERWRTGWKDGRCD

SEQ ID NO: 16733 - DNA, 1181 bp, Muscodor strobelii
  misc_feature: SGI EST ID NO. CUFF.39487.1
  misc_feature: Variant of the nucleotide sequence at SEQ ID NO 16731
attcattaccaatcgccgatatttatcgacgtttgtactatcgtccactcttcaacagcgttcgaaaacgtatggtaccgatccattcatatccatttacacatgtcatgctttaaatgcaagctgtgaagcagtattcacctcctcacattctgtccttgtcctcctattcttcatctccgacactacgcctagccatggctctcgatgcgccagatccgcagccggccgctgctcccaaaaagttgcctccaggcatcgttctagacaaagacggaaaaccatgtcgctcctgtagctccaaagcttctttcagctcgtgggcgcgacagacgaatgcctcgttgaaatccagccccggtgctgcaacgggcggcgcattcgctgtcactgcagccgcagccgcagccgcgacgtcttcccagcctgccaatgactgtcccgccgacgttgagaccctaggtcgaagcacatggactctccttcactccatcgccgccacatacccaacgaacccgagtgtgagagaacagtcagatctcaagacatttatggggctgttctcgcggctatatccttgctgggtatgcgccgatgacttccaacagtacatagccacacagcagataaaagtcggcagcaggaatgatttcggtacctggctatgtgaggctcacaatgcagtcaacaccaagcttggcaagcctacctttgactgctctaaatgggaagaaaggtggcgaaccggatggaaagatggacgctgcgactgagaaattccttttctcaggcaacaaactgccgcggctacatctgcggtcccatcaaatgacatttgcgcacttggaactctgtgatactaatgtacaaagcacattatgtatagatagataagagcatacccaggcgtttggactatagatttgacagatacacccctctcacgaacgagattattgtatatagaatggcggaaagaagacacgcagaaggagaattctcatctcgacttacgccaactaatgaatggaatgacatcccgcagacaagattgaggtaatgtgtacgcaatggccgcaagaaactcttcaggcctcgtgtgtatatgtgttgaaccgaccacacgagcaaagctatccaccgaaaaaacatgcgattctcaaggtttccatgaatgtcgc

SEQ ID NO: 16734 - DNA, 459 bp, Muscodor strobelii
  misc_feature: SGI cDNA ID NO. 565576
  misc_feature: Reduced expression when VOC is produced
  misc_feature: Encodes the peptide sequence at SEQ ID NO 16735
atgtacacatctctactcaccgccaccgccggcctcttgagcctggcgtctgccgcttctatcgctcctcgccaagccgcagtaatcgacgtctacttcgatggcagcaatttccaagaaggatgctctccaggtggctgcgttgcgactttcaacctttctacaaccgccgacgaggcgtccggcatgcctgccttcaatgttttctgccaccctgtctacatacaacagggcttcatcgactgcgatcctgttacgccgtatgctgaaggccagcgcgttgctgcttggtggcctgatgctagtgtgcgggaggacatcaagctcgttttcgagcacatctacccggggcagggcgacttccagttcaacgccactggatctatcgaattcgttggtgatggggccgcctctgatttctctgcgcacatcactgatctgtttgttgtgcaatcctga

SEQ ID NO: 16735 - protein, 152 aa, Muscodor strobelii
  misc_feature: SGI Peptide ID NO. 565576
  misc_feature: Useful for introducing or modulating the production of volatile compounds
MYTSLLTATAGLLSLASAASIAPRQAAVIDVYFDGSNFQEGCSPGGCVATFNLSTTADEASGMPAFNVFCHPVYIQQGFIDCDPVTPYAEGQRVAAWWPDASVREDIKLVFEHIYPGQGDFQFNATGSIEFVGDGAASDFSAHITDLFVVQS

SEQ ID NO: 16736 - DNA, 1045 bp, Muscodor strobelii
  misc_feature: SGI EST ID NO. CUFF.39553.0
  misc_feature: Variant of the nucleotide sequence at SEQ ID NO 16734
cgtaccacaggcgtcatggtaaggtgacctgcttcccgtgtcattactcgtccgtgccgtcacagcctcaactaaggtactcgccttgtcgcatccaggactgcgaagtcctgcctgagtataaatgagcatgtcgtgccactccaaggcgacaatgaaccaccacatccgcattacatctatcggaatcacttcatatacccaatccaaagacctcacttcttaatcataatgtacacatctctactcaccgccaccgccggcctcttgagcctggcgtctgccgcttctatcgctcctcgccaagccgcagtaatcgacgtctacttcgatggcagcaatttccaagaaggatgctctccaggtggctgcgttgcgactttcaacctttctacaaccgccgacgaggcgtccggcatgcctgccttcaatgttttctgccaccctgtctacatacaacagggcttcatcgactgcgatcctgttacgccgtatgctgaaggccagcgcgttgctgcttggtggcctgatgctagtgtgcgggaggacatcaagctcgttttcgagcacatctacccggggcagggcgacttccagttcaacgccactggatctatcgaattcgttggtgatggggccgcctctgatttctctgcgcacatcactgatctgtttgttgtgcaatcctgatggaacttgaactggaatgtgtcatgaggtttcttgggtcatcgaatgtacaatattcgaagacgtcgcgagacaacaagtacaattcgtcctgagattatgcttgtcgacagcatataaaccgctaatgagttggtcggcagctggtcctaagttgcttgcttatttagcggtcggcggcagcacataagagaggcataaagagcaaaccctgttggatatcctagaagtatatataatgtatatctccattcagtgctaggagaagctaatcacttgaatttggatagctctagcacttgcaaacatttggactcaatataattcgacattaacatccctatgcgcagttctg

SEQ ID NO: 16737 - DNA, 1737 bp, Muscodor strobelii
  misc_feature: SGI cDNA ID NO. 565577
  misc_feature: Reduced expression when VOC is produced
  misc_feature: Encodes the peptide sequence at SEQ ID NO 16738
atgccccaagaagacatcagaacgaagaatctcaaaaagccagtagatgtagccgagtatctcttcacgcggcttcagcagcttggtatccactccatccatggcttgcccggggactacaaccttgtcgcgctcgactatatcccaaaagtcggactcgaatgggttggcaattgcaatgaactcaatgctgcttacgctgcggacggctatgcgcgagtaaagggaattggcgcgattgtgacaacttttggcgtcggcgagctttctgccatcaatggcctcgcaggggcttatagcgaaatggtgcccgtcgttcatatcgtcgggtgcccatcgacaatatcacaaaagagtggtatgctcctgcatcacactctcggcaatggcgactttaacgtcttcgcaaatatgtctgcgggcgtctcttgcgaggtagcaaaactcaatgatcccgctgagattgcaacacagattgaccacgctttacgggaatgcttccttcgaagtcggcccgtctatatcatgctgcccacagatatggtcacgcgaaaagttgaaggcgagcgtctggataagaaaatcgaccttcaagagccgaacaaccacgaagcaaaggaaaactacgtcgtcgatgttgtattgaagtatcttcacgctgctaagcgacctgtcgtcctcgtcgacgcctgtgcaattcgtcacagagtgttggacgaagttcattcattcatcgacaagactaaattacccgttttcgtgacgccaatgggtaaaggcgctattgacgagacacatccttgctatggaggcgtctattccggctcggctagtagcgaaggtgtcaaaaagatggtcgaagactctgatctcgtattgtcagtcggcgctctgaagagcgattttaatacggccggattctcgtacagaatgagccagctggagactatcgaactgcacagctattcatgtgttgtgaagtactctgaatatcctggtgtcaacatgagaggagtcctacgcaaagtcacagagcgcgtcgacgcgtctcaactcgaagttgcagccgcaccgaaactatcagaaacatacggagccgcgtcatcaaacggcagtggtcctatcgagcaacaatggttctggccccgtatctcaaacttcttccgggagggtgatgttgtgattaccgagacgggaacagcaaatttcggaatatgggaatcccgatttccatctcacgtcacgcatctgaatcagacgctttggggtagcattggttgggctgttggtgcgtgccaaggtgcagcgcttgctgtgaaagatagcgatgagaagacacgtcgtacaatcctgtttgaaggcgatggaagtctacagctcacggcgcaggagatctcgactatgatcaagcatgaacttgatgtaattatattcgtaatatgcaatgatggatacacaatcgagcgcttcattcacggcatggacgcatcatacaacgacgtgtccacatggaaataccgcgatctaggtatggtattcggcggtactgagaaaacagtcaagagttatgccgtcaagaccccagatgaactggagaaactcctcgcagacgaagacttcgctgtgaagagacgcggcttgagactggtcgagttgtatatgccaaaggaagatgcgcccacgaatctgaaggctactgctgaggccagtgcaaagaacaatgccaaggaggagtaa

SEQ ID NO: 16738 - protein, 578 aa, Muscodor strobelii
  misc_feature: SGI Peptide ID NO. 565577
  misc_feature (399)..(552): Pfam Id: PF02775 Pfam Desc: Thiamine pyrophosphate enzyme, C-terminal TPP binding domain
  misc_feature (211)..(347): Pfam Id: PF00205 Pfam Desc: Thiamine pyrophosphate enzyme, central domain
  misc_feature (15)..(190): Pfam Id: PF02776 Pfam Desc: Thiamine pyrophosphate enzyme, N-terminal TPP binding domain
  misc_feature (399)..(485): Pfam Id: PF02775 Pfam Desc: Thiamine pyrophosphate enzyme, C-terminal TPP binding domain
  misc_feature (211)..(309): Pfam Id: PF00205 Pfam Desc: Thiamine pyrophosphate enzyme, central domain
  misc_feature (5)..(576): NCBI GI: 116179618 Blast Desc: pyruvate decarboxylase [Chaetomium globosum CBS 148.51] gi|88184734|gb|EAQ92202.1| pyruvate decarboxylase [Chaetomium globosum CBS 148.51]
  misc_feature (5)..(578): NCBI GI: 189091826 Blast Desc: [Podospora anserina] gi|27803024|emb|CAD60727.1| protein product [Podospora anserina] gi|188219266|emb|CAP49246.1| protein product [Podospora anserina]
  misc_feature (23)..(577): NCBI GI: 261361166 Blast Desc: pyruvate decarboxylase [Verticillium albo-atrum VaMs.102]
  misc_feature (5)..(576): NCBI GI: 162424687 Blast Desc: indole-3-pyruvate decarboxylase [Chaetomium globosum] gi|162424689|gb|ABX90026.1| indole-3-pyruvate decarboxylase [Chaetomium globosum]
  misc_feature (5)..(576): NCBI GI: 156042376 Blast Desc: SS1G_10985 [Sclerotinia sclerotiorum 1980] gi|154695372|gb|EDN95110.1| SS1G_10985 [Sclerotinia sclerotiorum 1980]
  misc_feature (5)..(577): NCBI GI: 154300316 Blast Desc: BC1G_11347 [Botryotinia fuckeliana B05.10] gi|150856670|gb|EDN31862.1| BC1G_11347 [Botryotinia fuckeliana B05.10]
  misc_feature (9)..(577): NCBI GI: 256732880 Blast Desc: [Nectria haematococca mpVI 77-13-4]
  misc_feature (5)..(576): NCBI GI: 240108179 Blast Desc: pyruvate decarboxylase, [Coccidioides posadasii C735 delta SOWgp]
  misc_feature (5)..(576): NCBI GI: 119187483 Blast Desc: CIMG_03789 [Coccidioides immitis RS]
  misc_feature (6)..(577): NCBI GI: 46136637 Blast Desc: FG09834.1 [Gibberella zeae PH-1]
  misc_feature (5)..(563): SWISSPROT Homolog: EC 4.1.1.1 Pyruvate decarboxylase
  misc_feature: Useful for introducing or modulating the production of volatile compounds
  misc_feature: Useful for fungicidal and/or biocontrol applications
  misc_feature: Useful for production of fusel alcohols
MPQEDIRTKNLKKPVDVAEYLFTRLQQLGIHSIHGLPGDYNLVALDYIPKVGLEWVGNCNELNAAYAADGYARVKGIGAIVTTFGVGELSAINGLAGAYSEMVPVVHIVGCPSTISQKSGMLLHHTLGNGDFNVFANMSAGVSCEVAKLNDPAEIATQIDHALRECFLRSRPVYIMLPTDMVTRKVEGERLDKKIDLQEPNNHEAKENYVVDVVLKYLHAAKRPVVLVDACAIRHRVLDEVHSFIDKTKLPVFVTPMGKGAIDETHPCYGGVYSGSASSEGVKKMVEDSDLVLSVGALKSDFNTAGFSYRMSQLETIELHSYSCVVKYSEYPGVNMRGVLRKVTERVDASQLEVAAAPKLSETYGAASSNGSGPIEQQWFWPRISNFFREGDVVITETGTANFGIWESRFPSHVTHLNQTLWGSIGWAVGACQGAALAVKDSDEKTRRTILFEGDGSLQLTAQEISTMIKHELDVIIFVICNDGYTIERFIHGMDASYNDVSTWKYRDLGMVFGGTEKTVKSYAVKTPDELEKLLADEDFAVKRRGLRLVELYMPKEDAPTNLKATAEASAKNNAKEE

SEQ ID NO: 16739 - DNA, 2235 bp, Muscodor strobelii
  misc_feature: SGI EST ID NO. CUFF.39557.0
  misc_feature: Variant of the nucleotide sequence at SEQ ID NO 16737
gtcgagtggaatgttcgttgtgatgttccatcagtctcgtgaggaaaatatcgacaagaatcacatgacctaggcagagctgctctttctaaaggcttaattatcgttcctgttctctagcttccagtattagctgggttctcatcatcattagcatcattaatcctcacactacttgtgtacaacattatcttgagcaatcatccagctccaccattcgcagactcaataattgtaatttcaaaatgccccaagaagacatcagaacgaagaatctcaaaaagccagtagatgtagccgagtatctcttcacgcggcttcagcagcttggtatccactccatccatggcttgcccggggactacaaccttgtcgcgctcgactatatcccaaaagtcggactcgaatgggttggcaattgcaatgaactcaatgctgcttacgctgcggacggctatgcgcgagtaaagggaattggcgcgattgtgacaacttttggcgtcggcgagctttctgccatcaatggcctcgcaggggcttatagcgaaatggtgcccgtcgttcatatcgtcgggtgcccatcgacaatatcacaaaagagtggtatgctcctgcatcacactctcggcaatggcgactttaacgtcttcgcaaatatgtctgcgggcgtctcttgcgaggtagcaaaactcaatgatcccgctgagattgcaacacagattgaccacgctttacgggaatgcttccttcgaagtcggcccgtctatatcatgctgcccacagatatggtcacgcgaaaagttgaaggcgagcgtctggataagaaaatcgaccttcaagagccgaacaaccacgaagcaaaggaaaactacgtcgtcgatgttgtattgaagtatcttcacgctgctaagcgacctgtcgtcctcgtcgacgcctgtgcaattcgtcacagagtgttggacgaagttcattcattcatcgacaagactaaattacccgttttcgtgacgccaatgggtaaaggcgctattgacgagacacatccttgctatggaggcgtctattccggctcggctagtagcgaaggtgtcaaaaagatggtcgaagactctgatctcgtattgtcagtcggcgctctgaagagcgattttaatacggccggattctcgtacagaatgagccagctggagactatcgaactgcacagctattcatgtgttgtgaagtactctgaatatcctggtgtcaacatgagaggagtcctacgcaaagtcacagagcgcgtcgacgcgtctcaactcgaagttgcagccgcaccgaaactatcagaaacatacggagccgcgtcatcaaacggcagtggtcctatcgagcaacaatggttctggccccgtatctcaaacttcttccgggagggtgatgttgtgattaccgagacgggaacagcaaatttcggaatatgggaatcccgatttccatctcacgtcacgcatctgaatcagacgctttggggtagcattggttgggctgttggtgcgtgccaaggtgcagcgcttgctgtgaaagatagcgatgagaagacacgtcgtacaatcctgtttgaaggcgatggaagtctacagctcacggcgcaggagatctcgactatgatcaagcatgaacttgatgtaattatattcgtaatatgcaatgatggatacacaatcgagcgcttcattcacggcatggacgcatcatacaacgacgtgtccacatggaaataccgcgatctaggtatggtattcggcggtactgagaaaacagtcaagagttatgccgtcaagaccccagatgaactggagaaactcctcgcagacgaagacttcgctgtgaagagacgcggcttgagactggtcgagttgtatatgccaaaggaagatgcgcccacgaatctgaaggctactgctgaggccagtgcaaagaacaatgccaaggaggagtaatgataattatgttagaggcttgaggaaagttgaaaatttggactggttggtatgtttatttctcatggacttaaaatgtacataatgctagattgttcttaatgcccagctaaaagtgatcttgaatcttgatctaccaagatgttgggatcaccgttcactttaattcaacatgtcacaaagtggcacgcttattcgagctacactctgaggtaatgtaacacgctctaaggagtatactataaaagttcag

SEQ ID NO: 16740 - DNA, 1140 bp, Muscodor strobelii
  misc_feature: SGI cDNA ID NO. 565578
  misc_feature: Encodes the peptide sequence at SEQ ID NO 16741
atggcactcaacaccacgggcgtatttccgccgccacttattcagccacttgatccttccattattctgcttcgagactacctagatgcgacagccccaggcggtcttcaattggccgtagaatcagcacacaaccagctccctctgatgatgaacgattttggagtcactaccgcagaagaataccttcaatttgcgaataactaccttcattggatcccgaccgaatctgtatcgggcagacagatatacagtatgctatcgaccttctatttcatcctcgaccagcctcctctcagggacttacaggttccaatcgagccttactccgtcggtcaacctctaacctggctctcgtcatggattgtcgtttacgccccaattaatggagcctcccccaagtatcgtcttgaggaggcccttgaaccgcccggaggctggaagaatttcaacgaatttttcggtcgcaaattggtcgaaggagctcgacctatcgcctccggtaaactgactgttacatatccgtgtgactgctcctacgactccgccttcgacgttgataacagctccgcgattgatgtcaaaggcgtgaaatggaatatctacgacttacttcatccgtctgcctacgaagatgctttcaagggaggtgtcttcatgcacgctttcctcaacacccacaactaccaccgacagcatgctcccgtaagcggaacggtcctcgaggccacagtcattcagggagcggcataccttgaagtgcagcccgagggaactacacttcgtgccttgcggcagattcgcatccctgggccggacgctcttgacggaagtggataccagttcctgcagactcgaggcttgatagtcatcgagacggatgacattggcctcgtggctgtgttgccgattggtatggcacaggcctcgtcggtggtgttaagtgtgaagccaggagaccgtatcgaaaagggggacgagatttcatatttccagtttggaggctccgactgcgttgttctgtttcaagagagagcagggctgaaagattttgatttccacccttcgcctgatgatcctggatactctatgtatggttcgttgcttgctgtcgctaagccggctccagacagtgtgtga

SEQ ID NO: 16741 - protein, 379 aa, Muscodor strobelii
  misc_feature: SGI Peptide ID NO. 565578
  misc_feature (150)..(371): Pfam Id: PF02666 Pfam Desc: Phosphatidylserine decarboxylase
  misc_feature (150)..(248): Pfam Id: PF02666 Pfam Desc: Phosphatidylserine decarboxylase
  misc_feature (286)..(343): Pfam Id: PF02666 Pfam Desc: Phosphatidylserine decarboxylase
  misc_feature (27)..(372): NCBI GI: 256722580 Blast Desc: NECHADRAFT_49736 [Nectria haematococca mpVI 77-13-4]
  misc_feature (22)..(343): NCBI GI: 145248950 Blast Desc: An14g01880 [Aspergillus niger] gi|134081487|emb|CAK46500.1| protein product [Aspergillus niger]
  misc_feature (62)..(348): NCBI GI: 266626572 Blast Desc: phosphatidylserine decarboxylase-related protein [Caulobacter segnis ATCC 21756] gi|264675169|gb|EEZ38556.1| phosphatidylserine decarboxylase-related protein [Caulobacter
  misc_feature (12)..(372): NCBI GI: 156057663 Blast Desc: phosphatidylserine decarboxylase [Sclerotinia sclerotiorum 1980] gi|154702348|gb|EDO02087.1| phosphatidylserine decarboxylase [Sclerotinia sclerotiorum 1980]
  misc_feature (19)..(372): NCBI GI: 154314407 Blast Desc: BC1G_05297 [Botryotinia fuckeliana B05.10] gi|150848942|gb|EDN24135.1| BC1G_05297 [Botryotinia fuckeliana B05.10]
  misc_feature (43)..(349): NCBI GI: 238506407 Blast Desc: conserved [Aspergillus flavus NRRL3357] gi|220689118|gb|EED45469.1| conserved [Aspergillus flavus NRRL3357]
  misc_feature (29)..(349): NCBI GI: 119490733 Blast Desc: phosphatidylserine decarboxylase, [Neosartorya fischeri NRRL 181] gi|119411249|gb|EAW21192.1| phosphatidylserine decarboxylase, [Neosartorya fischeri NRRL 181]
  misc_feature (43)..(349): NCBI GI: 169785411 Blast Desc: [Aspergillus oryzae RIB40] gi|83775914|dbj|BAE66033.1| protein product [Aspergillus oryzae]
  misc_feature (15)..(350): NCBI GI: 121700505 Blast Desc: phosphatidylserine decarboxylase, [Aspergillus clavatus NRRL 1] gi|119396660|gb|EAW07091.1| phosphatidylserine decarboxylase, [Aspergillus clavatus NRRL 1]
  misc_feature (36)..(372): NCBI GI: 115436884 Blast Desc: [Aspergillus terreus NIH2624] gi|114188484|gb|EAU30184.1| [Aspergillus terreus NIH2624]
  misc_feature (138)..(349): SWISSPROT Homolog: EC 4.1.1.65 Phosphatidylserine decarboxylase
MALNTTGVFPPPLIQPLDPSIILLRDYLDATAPGGLQLAVESAHNQLPLMMNDFGVTTAEEYLQFANNYLHWIPTESVSGRQIYSMLSTFYFILDQPPLRDLQVPIEPYSVGQPLTWLSSWIVVYAPINGASPKYRLEEALEPPGGWKNFNEFFGRKLVEGARPIASGKLTVTYPCDCSYDSAFDVDNSSAIDVKGVKWNIYDLLHPSAYEDAFKGGVFMHAFLNTHNYHRQHAPVSGTVLEATVIQGAAYLEVQPEGTTLRALRQIRIPGPDALDGSGYQFLQTRGLIVIETDDIGLVAVLPIGMAQASSVVLSVKPGDRIEKGDEISYFQFGGSDCVVLFQERAGLKDFDFHPSPDDPGYSMYGSLLAVAKPAPDSV

SEQ ID NO: 16742 - DNA, 729 bp, Muscodor strobelii
  misc_feature: SGI cDNA ID NO. 565579
  misc_feature: Reduced expression when VOC is produced
  misc_feature: Encodes the peptide sequence at SEQ ID NO 16743
atgtctaaacgagccaacgccgccgccagcaacggtggccccgccaaggcgacaacaaccgaagtctatgacaagcagaagactctgctcagcggttctgccgagacggggcacttctccctcttgcgtgctttgcatatggccgactacatcaccgagatgaacgggttctgcggcgtcatgtccgtcttctcctccctacgatactgcctcggcgaccccgcggacaagagcaatctgtacctcgctctcgccttcctgcctttcggtctgttcttcgacttcatggacggtcgggtcgcacgctggcgcaagaagagcagtatgatggggcaggagctggactctcttgctgatctgatatcattcggcctggctcccgcctgcgtagcttttaccatcggtctccgcacccccctcgaccacgtcttcctgaccttcttcgtgctctgcggtctcacgcgacttgcccggttcaacgtgaccgcggctaatatcccccacgacgcctcgggcaaagcgagctacttcgagggaacgcccatccccacatctttgggagtcgatgctctcatggcatactgggtgtcgcaagactcgatcctcggaaacctgcctggtggtgtttggttcgagggcaccgctctggagctgcatcccatcgtcttcttgtttgttgctcatgggtgcttgatgtgcagcaagagtttgcatgttccgaagccttga

SEQ ID NO: 16743 - protein, 242 aa, Muscodor strobelii
  misc_feature: SGI Peptide ID NO. 565579
  misc_feature (84)..(221): Pfam Id: PF01066 Pfam Desc: CDP-alcohol phosphatidyltransferase
  misc_feature (1)..(242): NCBI GI: 164427070 Blast Desc: NCU02381 [Neurospora crassa OR74A] gi|157071593|gb|EAA30566.2| conserved [Neurospora crassa OR74A]
  misc_feature (1)..(242): NCBI GI: 116179546 Blast Desc: CHGG_00401 [Chaetomium globosum CBS 148.51] gi|88184698|gb|EAQ92166.1| CHGG_00401 [Chaetomium globosum CBS 148.51]
  misc_feature (1)..(242): NCBI GI: 39942940 Blast Desc: MGG_03550 [Magnaporthe grisea 70-15] gi|145009887|gb|EDJ94543.1| MGG_03550 [Magnaporthe grisea 70-15]
  misc_feature (1)..(242): NCBI GI: 256732893 Blast Desc: [Nectria haematococca mpVI 77-13-4]
  misc_feature (1)..(242): NCBI GI: 239608842 Blast Desc: phosphatidylserine synthase [Ajellomyces dermatitidis ER-3]
  misc_feature (1)..(242): NCBI GI: 261203857 Blast Desc: phosphatidylserine synthase [Ajellomyces dermatitidis SLH14081] gi|239586927|gb|EEQ69570.1| phosphatidylserine synthase [Ajellomyces dermatitidis SLH14081]
  misc_feature (33)..(242): NCBI GI: 240280650 Blast Desc: phosphatidylserine synthase [Ajellomyces capsulatus H143]
  misc_feature (24)..(242): NCBI GI: 259484867 Blast Desc: TPA: similar to phosphatidylserine synthase (Eurofung) [Aspergillus nidulans FGSC A4]
  misc_feature (24)..(242): NCBI GI: 156042352 Blast Desc: SS1G_10973 [Sclerotinia sclerotiorum 1980] gi|154695360|gb|EDN95098.1| SS1G_10973 [Sclerotinia sclerotiorum 1980]
  misc_feature (14)..(242): NCBI GI: 154300290 Blast Desc: BC1G_11334 [Botryotinia fuckeliana B05.10] gi|150856657|gb|EDN31849.1| BC1G_11334 [Botryotinia fuckeliana B05.10]
  misc_feature (1)..(242): SWISSPROT Homolog: EC 2.7.8.8 CDP-diacylglycerol--serine O-phosphatidyltransferase
  misc_feature: Useful for introducing or modulating the production of volatile compounds
MSKRANAAASNGGPAKATTTEVYDKQKTLLSGSAETGHFSLLRALHMADYITEMNGFCGVMSVFSSLRYCLGDPADKSNLYLALAFLPFGLFFDFMDGRVARWRKKSSMMGQELDSLADLISFGLAPACVAFTIGLRTPLDHVFLTFFVLCGLTRLARFNVTAANIPHDASGKASYFEGTPIPTSLGVDALMAYWVSQDSILGNLPGGVWFEGTALELHPIVFLFVAHGCLMCSKSLHVPKP

SEQ ID NO: 16744 - DNA, 1533 bp, Muscodor strobelii
  misc_feature: SGI EST ID NO. CUFF.39569.2
  misc_feature: Variant of the nucleotide sequence at SEQ ID NO 16742
cttggaagcacagccagccaaacagcagtgcgacacacagagactattacgtcgcgacccagtccgtttctcccaaaccacaacttactcaagtccaatcactagaagaacattatcgtcttcgtctctactgttttccttagatcttgacacagaccgacacaagtgtaaagaacagagcctatcacattatcatcatgtctaaacgagccaacgccgccgccagcaacggtggccccgccaaggcgacaacaaccgaagtctatgacaagcagaagactctgctcagcggttctgccgagacggggcacttctccctcttgcgtgctttgcatatggccgactacatcaccgagatgaacgggttctgcggcgtcatgtccgtcttctcctccctacgatactgcctcggcgaccccgcggacaagagcaatctgtacctcgctctcgccttcctgcctttcggtctgttcttcgacttcatggacggtcgggtcgcacgctggcgcaagaagagcagtatgatggggcaggagctggactctcttgctgatctgatatcattcggcctggctcccgcctgcgtagcttttaccatcggtctccgcacccccctcgaccacgtcttcctgaccttcttcgtgctctgcggtctcacgcgacttgcccggttcaacgtgaccgcggctaatatcccccacgacgcctcgggcaaagcgagctacttcgagggaacgcccatccccacatctttgggagtcgatgctctcatggcatactgggtgtcgcaagactcgatcctcggaaacctgcctggtggtgtttggttcgagggcaccgctctggagctgcatcccatcgtcttcttgtttgttgctcatgggtgcttgatgtgcagcaagagtttgcatgttccgaagccttgattaagattgagatataaattgtgatcgggaagcaaatcgatacatcagtgtttacagaaatgttttgtagacggaggctggaataggagagcaagagaatacgattgggcgttcatgagatcagagtcaggttcaggaccggtgttcgagcgtctggattaatgattgcacctatatacccagaggtcgtcgggggctgagcaggaggggaagggagaaagagacacgtataccgtcttcaaggacaggagcaacacagcatgagaaggatcggagtacaagacagaataaatacgtttcttgcgataggcgagtcagttctatacgtagattgcccgtggtgagcggagtaagttgtgttgatcgttttgatttgaccgacttcattgcacttggttgtggtgtttcggtccttatccgaaatacgtacgaaatgcgtgcgcattcgaccctcctctcgtatacaacaggtgactatacagtaggagcattttgtgctaagcaatcgaggatatacagtttcattgcacttgcttaagcgagagacaagtgacgctattcgaggagaggcatatatttgagagtatctagacaattgaccttgcgc

SEQ ID NO: 16745 - DNA, 600 bp, Muscodor strobelii
  misc_feature: SGI cDNA ID NO. 565580
  misc_feature: Encodes the peptide sequence at SEQ ID NO 16746
atgagccacgactcggcgaaagtgccgccgctcactgtgtctggggctaacaaccccttttcagacgccaacgccattccgcagtcgggtgtggctggtcccgtgacgtatgtacagaatatcaggcgttctcgtgggcacagcgtcgcgagcgctagccagagcgctaccttgagaccgcccagtatcgctcccgcatcgcggatgcccagcacataccgcgtgtccgcaatgacaatggattccgtcgacccacggcggaaccgggtcaaatcagacccattcgatctggaccggccggaatttgtccaatctccgggatccagcgtgcgcggtgttgcaggcagcagtgatggaaggaacagcggactaccaagtaggccacggcaatcacatacgcggaacgagagcttcacgtctaaatactcgagtggcgtcagcctaggcgaatggagcgacccggggcctgatgttggccccgccggctcaaggtggaacacaccttctccagatggcgcgctaggacggatgccttctaatggctcggataagaagggcaagcctggaggaggccaagggaatgtcggcactgctatgtga

SEQ ID NO: 16746 - protein, 199 aa, Muscodor strobelii
  misc_feature: SGI Peptide ID NO. 565580
  misc_feature (1)..(168): NCBI GI: 145616134 Blast Desc: MGG_03545 [Magnaporthe grisea 70-15] gi|145009894|gb|EDJ94550.1| MGG_03545 [Magnaporthe grisea 70-15]
  misc_feature (42)..(159): NCBI GI: 85093556 Blast Desc: NCU02398 [Neurospora crassa OR74A] gi|28921168|gb|EAA30482.1| NCU02398 [Neurospora crassa OR74A]
  misc_feature (1)..(165): NCBI GI: 116179582 Blast Desc: CHGG_00419 [Chaetomium globosum CBS 148.51] gi|88184716|gb|EAQ92184.1| CHGG_00419 [Chaetomium globosum CBS 148.51]
  misc_feature (5)..(161): NCBI GI: 189091866 Blast Desc: [Podospora anserina] gi|27803043|emb|CAD60746.1| protein product [Podospora anserina] gi|188219286|emb|CAP49266.1| protein product [Podospora anserina]
  misc_feature (8)..(159): NCBI GI: 156042398 Blast Desc: SS1G_10996 [Sclerotinia sclerotiorum 1980] gi|154695383|gb|EDN95121.1| SS1G_10996 [Sclerotinia sclerotiorum 1980]
  misc_feature (17)..(159): NCBI GI: 154300346 Blast Desc: BC1G_11362 [Botryotinia fuckeliana B05.10] gi|150856685|gb|EDN31877.1| BC1G_11362 [Botryotinia fuckeliana B05.10]
MSHDSAKVPPLTVSGANNPFSDANAIPQSGVAGPVTYVQNIRRSRGHSVASASQSATLRPPSIAPASRMPSTYRVSAMTMDSVDPRRNRVKSDPFDLDRPEFVQSPGSSVRGVAGSSDGRNSGLPSRPRQSHTRNESFTSKYSSGVSLGEWSDPGPDVGPAGSRWNTPSPDGALGRMPSNGSDKKGKPGGGQGNVGTAM

SEQ ID NO: 16747 - DNA, 2965 bp, Muscodor strobelii
  misc_feature: SGI EST ID NO. CUFF.39572.0
  misc_feature: Variant of the nucleotide sequence at SEQ ID NO 16745
ccaatcccgtcttctcttccacaacgatcaaacagatatctccaggatacccatcatgctccccagcactgtcatgcctcacttggaactctccgactcgtcggatggctcctctgagctcagtgtcgcagatgtcgatgattctcctcccttccccatgccgagtaacacgcgcgttggcttgctcacgttgtcttcccttcgactttgctccctttccggtttctactcttcaacaacatgtatctaaacatcgtgatccatgacttttgtattcttccagtaggcttgcatttagccgccacccgtttgtcagtttcctgaggaaacaagacactgctttctatcattcctccttcagattctgcttcatgatcttttcgtgattgtgagcccggccgggacggccttttctttcttgctgtgtatttcgcataattttaccatacaaacattttccgcctcatctagatcgacggcaatacttttctttggactaggcgactggaatcgcccagttgtgaggcatcgtgatcatgtcgttctctaccaccactatcaacaacaggaagtgcacggcagtgcccaagaacaatgcggctggacagaacaccgtggtagactcatcgacttcactttcgacaacatcaatctcctctgcgacttcgacttcgacatcaacgtcgttttcgacaacgttctcaacatccacttcagcaccgagtgcggtatctacagcacctgtcttcgtgaacccagtagacccagaccagaccagtgttgcgataagcactgaacagacttctacaagtagtacgagctctacatccccccagagtgtgtctgcaattaccacaagcaccaatggcgctacacagtcgcagtcaagcactgcgattgttgctatcacctccccagcagaagcgacgctgattccctctacctcaccctctacctcacctgctgactcttctatcactgctcctgcaatagcttcatctgctttacaaacaaattctcagggcgtattgccaacgcaaaccgatgcgatttcagcatcgataagcgcgtcggatagcgcatcattgagcacaattttgagcaccagtgacccagttatagatgcgaccgcgggtttaccgttgtcttcaacgtcgacaataccatcagacgcgatcgaatctggagacgggggagcagggctgacaaatggtgctcaagtcactgggaatgccatcagcacccaaacaacagtggcagtggcgggtggtgtaataggaggcttagccgcagtctccataattggatttctgttttggttttggcgaaagagaatgatgaagaagcgacgcagcacaatgctcactccgctttcaaacgacaatgcgtatgagcgtggtgagaaagccccctatgtcatcagtcgaaactcacttgggccgactaccataccagagaagctgagagcagtggttggttataactaccaaaagattcgcggccgtgtcaacagtttggtgacacggagtccgaagccgagcgtggatctgaaccgagggaattcgcaatatggcttgccggacacggcagcaagccggtcgagttcgcgggcgggaagcacaaaagatggccctactacgacaacaaagcagcgtttcgtggactggtggggtaggttgacagaagatggcaatatgaattggaaaatatcacgaggagagccagaggggggacaatctggcggaactttcacggctatgtctagtacacgggcgtcgaggcaaggctcgcaatctaacttcctcccgcggcgaagtcaatccttaggcaatgagcatttcctaggtggcttggggcttgactttgaaaacccattcgcggattcaaacgcaatgagccacgactcggcgaaagtgccgccgctcactgtgtctggggctaacaaccccttttcagacgccaacgccattccgcagtcgggtgtggctggtcccgtgacgtatgtacagaatatcaggcgttctcgtgggcacagcgtcgcgagcgctagccagagcgctaccttgagaccgcccagtatcgctcccgcatcgcggatgcccagcacataccgcgtgtccgcaatgacaatggattccgtcgacccacggcggaaccgggtcaaatcagacccattcgatctggaccggccggaatttgtccaatctccgggatccagcgtgcgcggtgttgcaggcagcagtgatggaaggaacagcggactaccaagtaggccacggcaatcacatacgcggaacgagagcttcacgtctaaatactcgagtggcgtcagcctaggcgaatggagcgacccggggcctgatgttggccccgccggctcaaggtggaacacaccttctccagatggcgcgctaggacggatgccttctaatggctcggataagaagggcaagcctggaggaggccaagggaatgtcggcactgctatgtgataacatgcccggtgttccaaccgggctacaccctaattcccgtctcttgctttttgtcccagcatcttggctgtttgattttccgcactgcatatgtcgaagggggtccgcttggagttccgggagcgaattttgttcttatattttccgagccagcatggctcgccagtctttacgaacgaggaaaagatatcggagaggatgaacgtgttatgaaggacagatacccgacttggctttacgctcgcttatgataccaaccaaggacagcatctggagatgggcatggaagtaaaaggtggtaggaggagagtgatcttaagaaggaacgaacggagacaatgtctatttagataacatgcaggcacaaagagagtgatcgatgttatactgttagttatttttttatggtaaagtgacacttgtgacaagtatggacttcaatgcgctacatgcatcaacacatagctttc

SEQ ID NO: 16748 - DNA, 483 bp, Muscodor strobelii
  misc_feature: SGI cDNA ID NO. 565581
  misc_feature: Encodes the peptide sequence at SEQ ID NO 16749
atgctccccagcactgtcatgcctcacttggaactctccgactcgtcggatggctcctctgagctcagtgtcgcagatgtcgatgattctcctcccttccccatgccgagtaacacgcgcgttggcttgctcacgttgtcttcccttcgactttgctccctttccggtttctactcttcaacaacatgcgactggaatcgcccagttgtgaggcatcgtgatcatgtcgttctctaccaccactatcaacaacaggaagtgcacggcagtgcccaagaacaatgcggctggacagaacaccgtggtagactcatcgacttcactttcgacaacatcaatctcctctgcgacttcgacttcgacatcaacgtcgttttcgacaacgttctcaacatccacttcagcaccgagtgcggtatctacagcacctgtcttcgtgaacccagtagacccagaccagaccagtgttgcgataagcactga

SEQ ID NO: 16749 - protein, 160 aa, Muscodor strobelii
  misc_feature: SGI Peptide ID NO. 565581
MLPSTVMPHLELSDSSDGSSELSVADVDDSPPFPMPSNTRVGLLTLSSLRLCSLSGFYSSTTCDWNRPVVRHRDHVVLYHHYQQQEVHGSAQEQCGWTEHRGRLIDFTFDNINLLCDFDFDINVVFDNVLNIHFSTECGIYSTCLREPSRPRPDQCCDKH

SEQ ID NO: 16750 - DNA, 1782 bp, Muscodor strobelii
  misc_feature: SGI cDNA ID NO. 565582
  misc_feature: Encodes the peptide sequence at SEQ ID NO 16751
atgttcggcgtgttgtcgaatttagctcaaccatcggccattggcccacccccaaagattgtgccaccaccaacaccagtcagacttccacaatgcaatccgcaactgcctattaccggcgaagctccggcggagaaaaagcatacctcgcttgtccgattcttacagactctccatcggccaactgagatagacgagtcacatttcgctgcacttggggttcatgtccatgttgatgccacagctgaagatgttgtacccgatcccgcctttctaccaccaacatccgagtgggatggcattgatgttgacgaggcaaagcgtaaagatgatacgttcaggacgttgttatctaatggtaaattgtcaccagaagcccgcgtctacatcgagcgacggagtgagctttctatcgtgaatcagactgcgtttcggacagttcgccgtatcaaacccgaacccggaaagcaggcagctcgactaggaaattgctacgaattcttcaagcaaatggaattaatggcgacatactgggacgatacatccttatcaaatctacctgaaggggctactccatctcaatcaacgccttccacccctcttcctcctgtacatcctatagattcaagcctcgaacaagtcgggcatgcgatgattgcatctgcttccgaatccaatacgcgttcagaaacagaaagcgaggcgaaaaaatcaatggcacccgaaagggtcacatacagaacactgcctggctcccagatgccggctgaattccgtcatgctatagtggccgctttcgtcaagctcgtggcttatgattttggttgcaccttaatgccgcctagggccgagccacgtctacacattttggagcccccattgacctcaagtagcgagacgggtacttcaaaagccaggcatcgagctgcacaaagagcgtcttacttcccttcaggttgcgtgtttgcttaccgttcccccacaacacgcgaagccgcacgtgccggcatcgtcgaagggccacttattgctatttctgctcgcaacacaactagcttcttcacgtctacggagtcgagaatcgattttggtcgcgaactggttgccgcgttggtcactgctcaacatcgtgcccgtggagggaagacagaaaagcgcttcggcgaaggcaagtggtgggctacagccaagcgttggggtggtggtgaaggaggggcaattggccgtgaagtggaaggagactctgtagtaggcgacaaagatgcaggaaacgccacttctggtgaatctatcgaagaggtatctacagataacccgcctaagccagtacctacgagaccgcctgggatcccatttcgcgggccgccgatgagcaaaaaagctcgaaagaccatgagtatgtatgatcgctatcgcatggtgcggcttccatcgtcaaattgggataagaaggcgaaatatgaagcaatcgggaaagttcagggctcagattatgatgacgtattcgtcatcagcagcctatttcaccacttgagtgtcattcggattcgcgttccggatcgcttgctggaagttctcgacggtgctccagagcacgagtccgagaatgagaaagatggttctgagacgcatagctgggataaggtcgaggtttggaggagcaaatggttcgatctgttccaagtggaggacagattggacgcaatgcgcctcatatggggcatgatggcctgggctatgcgaaagacagatggaggtgacgcggctatgaagaacacataa

SEQ ID NO: 16751 - protein, 593 aa, Muscodor strobelii
  misc_feature: SGI Peptide ID NO. 565582
  misc_feature (1)..(591): NCBI GI: 46123977 Blast Desc: FG06366.1 [Gibberella zeae PH-1]
  misc_feature (1)..(582): NCBI GI: 116179584 Blast Desc: CHGG_00420 [Chaetomium globosum CBS 148.51] gi|88184717|gb|EAQ92185.1| CHGG_00420 [Chaetomium globosum CBS 148.51]
  misc_feature (49)..(593): NCBI GI: 256732443 Blast Desc: [Nectria haematococca mpVI 77-13-4]
  misc_feature (27)..(581): NCBI GI: 164427082 Blast Desc: NCU02399 [Neurospora crassa OR74A] gi|157071599|gb|EAA30483.2| conserved [Neurospora crassa OR74A]
  misc_feature (51)..(593): NCBI GI: 145616132 Blast Desc: MGG_03546 [Magnaporthe grisea 70-15] gi|145009893|gb|EDJ94549.1| MGG_03546 [Magnaporthe grisea 70-15]
  misc_feature (1)..(581): NCBI GI: 154300340 Blast Desc: BC1G_11359 [Botryotinia fuckeliana B05.10] gi|150856682|gb|EDN31874.1| BC1G_11359 [Botryotinia fuckeliana B05.10]
  misc_feature (18)..(421): NCBI GI: 189091868 Blast Desc: [Podospora anserina] gi|27803044|emb|CAD60747.1| protein product [Podospora anserina] gi|188219287|emb|CAP49267.1| protein product [Podospora anserina]
  misc_feature (92)..(539): NCBI GI: 156042394 Blast Desc: SS1G_10994 [Sclerotinia sclerotiorum 1980] gi|154695381|gb|EDN95119.1| SS1G_10994 [Sclerotinia sclerotiorum 1980]
  misc_feature (1)..(582): NCBI GI: 145235968 Blast Desc: protein product [Aspergillus niger] gi|134075080|emb|CAK39092.1| protein product [Aspergillus niger]
  misc_feature (1)..(583): NCBI GI: 255935789 Blast Desc: Pc13g04860 [Penicillium chrysogenum Wisconsin 54-1255] gi|211583541|emb|CAP91555.1| Pc13g04860 [Penicillium chrysogenum Wisconsin 54-1255]
MFGVLSNLAQPSAIGPPPKIVPPPTPVRLPQCNPQLPITGEAPAEKKHTSLVRFLQTLHRPTEIDESHFAALGVHVHVDATAEDVVPDPAFLPPTSEWDGIDVDEAKRKDDTFRTLLSNGKLSPEARVYIERRSELSIVNQTAFRTVRRIKPEPGKQAARLGNCYEFFKQMELMATYWDDTSLSNLPEGATPSQSTPSTPLPPVHPIDSSLEQVGHAMIASASESNTRSETESEAKKSMAPERVTYRTLPGSQMPAEFRHAIVAAFVKLVAYDFGCTLMPPRAEPRLHILEPPLTSSSETGTSKARHRAAQRASYFPSGCVFAYRSPTTREAARAGIVEGPLIAISARNTTSFFTSTESRIDFGRELVAALVTAQHRARGGKTEKRFGEGKWWATAKRWGGGEGGAIGREVEGDSVVGDKDAGNATSGESIEEVSTDNPPKPVPTRPPGIPFRGPPMSKKARKTMSMYDRYRMVRLPSSNWDKKAKYEAIGKVQGSDYDDVFVISSLFHHLSVIRIRVPDRLLEVLDGAPEHESENEKDGSETHSWDKVEVWRSKWFDLFQVEDRLDAMRLIWGMMAWAMRKTDGGDAAMKNT

SEQ ID NO: 16752 - DNA, 2311 bp, Muscodor strobelii
  misc_feature: SGI EST ID NO. CUFF.39524.0
  misc_feature: Variant of the nucleotide sequence at SEQ ID NO 16750
tggacctagaacgtcgtgtccaatattgggcaaacaaatgcaatcgataagctgccaccaatatcaagtctcgttatcacatcaccttggatttgaaacaaggcacttccagctctgatgccttgtcattgcgattcatcgtagggcattttcaacatgttcggcgtgttgtcgaatttagctcaaccatcggccattggcccacccccaaagattgtgccaccaccaacaccagtcagacttccacaatgcaatccgcaactgcctattaccggcgaagctccggcggagaaaaagcatacctcgcttgtccgattcttacagactctccatcggccaactgagatagacgagtcacatttcgctgcacttggggttcatgtccatgttgatgccacagctgaagatgttgtacccgatcccgcctttctaccaccaacatccgagtgggatggcattgatgttgacgaggcaaagcgtaaagatgatacgttcaggacgttgttatctaatggtaaattgtcaccagaagcccgcgtctacatcgagcgacggagtgagctttctatcgtgaatcagactgcgtttcggacagttcgccgtatcaaacccgaacccggaaagcaggcagctcgactaggaaattgctacgaattcttcaagcaaatggaattaatggcgacatactgggacgatacatccttatcaaatctacctgaaggggctactccatctcaatcaacgccttccacccctcttcctcctgtacatcctatagattcaagcctcgaacaagtcgggcatgcgatgattgcatctgcttccgaatccaatacgcgttcagaaacagaaagcgaggcgaaaaaatcaatggcacccgaaagggtcacatacagaacactgcctggctcccagatgccggctgaattccgtcatgctatagtggccgctttcgtcaagctcgtggcttatgattttggttgcaccttaatgccgcctagggccgagccacgtctacacattttggagcccccattgacctcaagtagcgagacgggtacttcaaaagccaggcatcgagctgcacaaagagcgtcttacttcccttcaggttgcgtgtttgcttaccgttcccccacaacacgcgaagccgcacgtgccggcatcgtcgaagggccacttattgctatttctgctcgcaacacaactagcttcttcacgtctacggagtcgagaatcgattttggtcgcgaactggttgccgcgttggtcactgctcaacatcgtgcccgtggagggaagacagaaaagcgcttcggcgaaggcaagtggtgggctacagccaagcgttggggtggtggtgaaggaggggcaattggccgtgaagtggaaggagactctgtagtaggcgacaaagatgcaggaaacgccacttctggtgaatctatcgaagaggtatctacagataacccgcctaagccagtacctacgagaccgcctgggatcccatttcgcgggccgccgatgagcaaaaaagctcgaaagaccatgagtatgtatgatcgctatcgcatggtgcggcttccatcgtcaaattgggataagaaggcgaaatatgaagcaatcgggaaagttcagggctcagattatgatgacgtattcgtcatcagcagcctatttcaccacttgagtgtcattcggattcgcgttccggatcgcttgctggaagttctcgacggtgctccagagcacgagtccgagaatgagaaagatggttctgagacgcatagctgggataaggtcgaggtttggaggagcaaatggttcgatctgttccaagtggaggacagattggacgcaatgcgcctcatatggggcatgatggcctgggctatgcgaaagacagatggaggtgacgcggctatgaagaacacataaattcctcgacattagttgcctaaggctttggagatgatatagacctaggttcattttacaccgtgtgaagcacgagggctaggctcattgatctgtatttgccctgatatataattcaggttttacttccgcgtgatgactgaaacgtcaggcatattgtaccgtttcaacttgaaaatctaagatcgtattattgactcgaaagaaaggaaaggaaatgcttggtactgaaagtacgctgctggttatgcacaaatttcagcgtccatcagcagtggacagatgttgatagtgtctatctaagagaatacaaactcttctgagtatacaatgatagatttaatgtccttgacgttacgaaccaaccttctcc

SEQ ID NO: 16753 - DNA, 1014 bp, Muscodor strobelii
  misc_feature: SGI cDNA ID NO. 565583
  misc_feature: Encodes the peptide sequence at SEQ ID NO 16754
atggtttatgaatggaatgaagagttgattgaggatttcttccgagggaaagagtccataagccagtcgacctgcaatatacttgcgcgaaatattgttggcaaagactggacggttgaacccattggcactcagggatcgctcagctacacacttgtctgcactaagcggattatcatgtcatttcgtcgccctggatctctcattccaagtaattggttgtctatcgcgaaggatatccatggagatctagtaccagaggctgactactgcggaaagatcggccgagacgccgaggtgctatccatctataaaatgccttgccttccaggaaagccttgtttagagctatatcccagggctgcaaagcttacccaagaaactgaagaaaagtgtgctactttctataggcatcttgcaggatattttactcgcacttggttgcaaccgcaagtctctgaccgtgactggaatgaaaaggcgctggaattccgccaaagatgtctttccaatatgaggtctagcggcaggtttgattttcttgaaaagattatcggcgaaattgaggaagcccttcctgagatcattaccggagactggccacaagtcctgaatcacaacgatttctccaagctcaatatccttatagacgagaagacctttgcgatcacgggcatcgtggattggagttcggcatccgtcagtcccttcggcttggacctcagcctcttggctctattagcaagtttctcggatgacggagaccattctacgccgtacgaaagcggaccaaaacttgagaaggcattctgggatgagttttgggttcagacaggaattgaagaaggaagacaagcagaagttcaacgcaaggcagagctcgttgccaatctccagttcattctccgcttcggattcaataagaaactaacgggggagcttaccgatcaacccatcaccgtgaacgaaactatgcttcgagaacacttcaagtcaaaagtcgcagttgtgtag

SEQ ID NO: 16754 - protein, 337 aa, Muscodor strobelii
  misc_feature: SGI Peptide ID NO. 565583
  misc_feature (10)..(325): NCBI GI: 256734193 Blast Desc: NECHADRAFT_35375 [Nectria haematococca mpVI 77-13-4]
  misc_feature (5)..(328): NCBI GI: 46117388 Blast Desc: FG04536.1 [Gibberella zeae PH-1]
  misc_feature (5)..(327): NCBI GI: 261188586 Blast Desc: conserved [Ajellomyces dermatitidis SLH14081] gi|239593065|gb|EEQ75646.1| conserved [Ajellomyces dermatitidis SLH14081]
  misc_feature (106)..(327): NCBI GI: 225554416 Blast Desc: conserved [Ajellomyces capsulatus G186AR]
  misc_feature (106)..(327): NCBI GI: 240273453 Blast Desc: conserved [Ajellomyces capsulatus H143]
  misc_feature (1)..(324): NCBI GI: 121714519 Blast Desc: conserved [Aspergillus clavatus NRRL 1] gi|119403024|gb|EAW13444.1| conserved [Aspergillus clavatus NRRL 1]
  misc_feature (3)..(324): NCBI GI: 239610103 Blast Desc: conserved [Ajellomyces dermatitidis ER-3]
  misc_feature (1)..(323): NCBI GI: 238841929 Blast Desc: conserved [Microsporum canis CBS 113480]
  misc_feature (1)..(324): NCBI GI: 225555069 Blast Desc: conserved [Ajellomyces capsulatus G186AR]
  misc_feature (2)..(306): NCBI GI: 238845106 Blast Desc: conserved [Microsporum canis CBS 113480]
MVYEWNEELIEDFFRGKESISQSTCNILARNIVGKDWTVEPIGTQGSLSYTLVCTKRIIMSFRRPGSLIPSNWLSIAKDIHGDLVPEADYCGKIGRDAEVLSIYKMPCLPGKPCLELYPRAAKLTQETEEKCATFYRHLAGYFTRTWLQPQVSDRDWNEKALEFRQRCLSNMRSSGRFDFLEKIIGEIEEALPEIITGDWPQVLNHNDFSKLNILIDEKTFAITGIVDWSSASVSPFGLDLSLLALLASFSDDGDHSTPYESGPKLEKAFWDEFWVQTGIEEGRQAEVQRKAELVANLQFILRFGFNKKLTGELTDQPITVNETMLREHFKSKVAVV

SEQ ID NO: 16755 - DNA, 2241 bp, Muscodor strobelii
  misc_feature: SGI cDNA ID NO. 565584
  misc_feature: Reduced expression when VOC is produced
  misc_feature: Encodes the peptide sequence at SEQ ID NO 16756
atgccgcccagaatcccgagcttcaaggacatcaggcgacgctcgctcgccagctttcgcactgatcgttcaggagattcatcgactagtaacgaggatccttcaagtcaggtagcgacgccatccacaggttcgattactcctccttcgatggcgggtcacagtgatccagctctcgcaacccagccaaatcaacatccgggcctgcgaagcaaccggaacagctacatcagcgttggtcaagcgtcgccttcatctgaggtcacggagcgcccgccctcggcatactcgccccggattattaacgtccaacacaatgagagggtttaccagaaagtgatactgatcaatggtgtcattggcgaaggaccccagaatgtcgatggcaacgtgaccgtgttccgtaaagatagacagctgctacctctcgactggccagttcacggaggtcgattcaaggctatggtatctttattccatggccagaaccatttgcgcttcgagtatcggaaaaacggactgccccacactttggacatgacaattatcatgatcgagtacaccaatgttcagccattgcagttggtcattcttatggcaaaggattcgccatgtacatacgacgctattcccgcgcgggttgagagagagggtaatgacttagagacggctgtgcgcaagtttcgtatgagcgcctacatgtggcaagcctacaccgcagagcagatgtatcgcaacgggttcggtcgtcgtgcctggcgtttcgaagacgaatggaccagaggatcggtgaataactcagactggcacgagggtattatgcgatcggaaacgcgagttcacttcgttactaccgacaagacagtagctgagatccgggatatggaatgtgcccagcagaacaccaaagccacccggaaaaacgaactcttcgccatcgccaccgatgcaatcacgaagcatttcaacatcctcccaggtcaaaagatgcatgtggcagcactgatactggatgcacattgggaccctgtccagaaattgatcactggtcatgccgctcttggtggttctgccagtgacggtttgcagctggccattttcggatcgcactgcttgcagagttatccaatctcgcttgaacaagttgcgccagcaatggtcgactgcacccctaccgaaactacatttgtagctaatgactgcaacgaggctggaagtagttgggaggcggcaacacttggaatcggcgcgcacttacacgaagtgggtcaccttttcggtctccctcaccagacgtctggaattatggctagagactataccatgctcaatcgctcgttcgttgtcaaggaggccttctgtaccaggactaaaacgaagggcgcgattaaggacgagtccgacgaacccacttggcacagactggacctcctccgcttccgccagcactcgatgttcaagtttcctggagagtttcaaggcaacagcgatgggacggtccatggatggaccgttgagaataagaaggttatcgttactgccggatcaggcttgctatgcaccgagattttcgcggccggcgaagagcattgccaacagtggattgaatacatcaaggacgccgagattcagcgctctgttatgtacagcgaacctgaattgcgcgcgtaccttccggcagacaagcgcaaactaccattcaagatcatagtacgttcaagaggtggcggagagctcgtgatcaacgatttccctgcgctctgcaagtcttccctaaagatcagttcaagtcgggccgccttccgaagcactagactgggtaattcggagatgaagggaagccaggcccaagaattcgtctttaccagtgctattaccagaaatggtattcttacgagcgtcgttgtataccatggaagagccatagatgggctggagttcttctatcatgatggaagttcccagctttttggcaagcgcggtgggaagcagggaggagatagattcaatatggatctcaattcggccgaggtaattacgggcttcggcgtgcgcgcgggccagtggatcgattcgatccaaattcttacgagcacggcaaggacctctccttggtacggcaacaaaaccggtggatccccccatcgcctgagcgccccgaagggctacagaatctgcggtgtttctggaagttgtgcagactggttggacagcttctccctcctcatcacgcgcgtttag

SEQ ID NO: 16756 - protein, 746 aa, Muscodor strobelii
  misc_feature: SGI Peptide ID NO. 565584
  misc_feature (1)..(745): NCBI GI: 189091858 Blast Desc: [Podospora anserina] gi|188219282|emb|CAP49262.1| protein product [Podospora anserina]
  misc_feature (6)..(745): NCBI GI: 46123983 Blast Desc: FG06369.1 [Gibberella zeae PH-1]
  misc_feature (1)..(712): NCBI GI: 27803039 Blast Desc: protein product [Podospora anserina]
  misc_feature (1)..(715): NCBI GI: 116179576 Blast Desc: CHGG_00416 [Chaetomium globosum CBS 148.51] gi|88184713|gb|EAQ92181.1| CHGG_00416 [Chaetomium globosum CBS 148.51]
  misc_feature (5)..(743): NCBI GI: 255936675 Blast Desc: Pc13g09410 [Penicillium chrysogenum Wisconsin 54-1255] gi|211583984|emb|CAP92010.1| Pc13g09410 [Penicillium chrysogenum Wisconsin 54-1255]
  misc_feature (5)..(743): NCBI GI: 146323414 Blast Desc: zinc metalloproteinase [Aspergillus fumigatus Af293] gi|129558302|gb|EAL92465.2| zinc metalloproteinase, [Aspergillus fumigatus Af293] gi|159127517|gb|EDP52632.1| zinc [Aspergillus
  misc_feature (8)..(745): NCBI GI: 212527632 Blast Desc: zinc metalloproteinase, [Penicillium marneffei ATCC 18224] gi|210073371|gb|EEA27458.1| zinc metalloproteinase, [Penicillium marneffei ATCC 18224]
  misc_feature (6)..(745): NCBI GI: 156042352 Blast Desc: SS1G_10973 [Sclerotinia sclerotiorum 1980] gi|154695360|gb|EDN95098.1| SS1G_10973 [Sclerotinia sclerotiorum 1980]
  misc_feature (5)..(743): NCBI GI: 169770705 Blast Desc: [Aspergillus oryzae RIB40] gi|83767681|dbj|BAE57820.1| protein product [Aspergillus oryzae]
  misc_feature (8)..(745): NCBI GI: 242784272 Blast Desc: zinc metalloproteinase, [Talaromyces stipitatus ATCC 10500] gi|218720501|gb|EED19920.1| zinc metalloproteinase, [Talaromyces stipitatus ATCC 10500]
  misc_feature: Useful for introducing or modulating the production of volatile compounds
MPPRIPSFKDIRRRSLASFRTDRSGDSSTSNEDPSSQVATPSTGSITPPSMAGHSDPALATQPNQHPGLRSNRNSYISVGQASPSSEVTERPPSAYSPRIINVQHNERVYQKVILINGVIGEGPQNVDGNVTVFRKDRQLLPLDWPVHGGRFKAMVSLFHGQNHLRFEYRKNGLPHTLDMTIIMIEYTNVQPLQLVILMAKDSPCTYDAIPARVEREGNDLETAVRKFRMSAYMWQAYTAEQMYRNGFGRRAWRFEDEWTRGSVNNSDWHEGIMRSETRVHFVTTDKTVAEIRDMECAQQNTKATRKNELFAIATDAITKHFNILPGQKMHVAALILDAHWDPVQKLITGHAALGGSASDGLQLAIFGSHCLQSYPISLEQVAPAMVDCTPTETTFVANDCNEAGSSWEAATLGIGAHLHEVGHLFGLPHQTSGIMARDYTMLNRSFVVKEAFCTRTKTKGAIKDESDEPTWHRLDLLRFRQHSMFKFPGEFQGNSDGTVHGWTVENKKVIVTAGSGLLCTEIFAAGEEHCQQWIEYIKDAEIQRSVMYSEPELRAYLPADKRKLPFKIIVRSRGGGELVINDFPALCKSSLKISSSRAAFRSTRLGNSEMKGSQAQEFVFTSAITRNGILTSVVVYHGRAIDGLEFFYHDGSSQLFGKRGGKQGGDRFNMDLNSAEVITGFGVRAGQWIDSIQILTSTARTSPWYGNKTGGSPHRLSAPKGYRICGVSGSCADWLDSFSLLITRV

SEQ ID NO: 16757 - DNA, 3562 bp, Muscodor strobelii
  misc_feature: SGI EST ID NO. CUFF.39528.0
  misc_feature: Variant of the nucleotide sequence at SEQ ID NO 16755
cgccatctcatcccaccctaacacagtctgatagcgggtgagggatgcttgcaagattgtaaccatccgttatggggcaactgtgccaatctgcaagctgcgggcagacccatgttatgccgttcgagtgcatttggtcaatcccgtattccagagcttacgtgccccagcctgatcagcagctccaccacccatctcatcctagatccatcagtcccgtcgcttcgaacggcaggttgatgggaatgtgggagggtatggtgaactgtcagttgtgcattggttgactgaccgattggatcatcagtctttctctcctctttctctctcacgcagtagattgttcgcctctgccgtctcttccgctgtcgttgtaaacacaatcgagcctccaacatgaacatatcttcaccgaactaataataataataacgctctgtcgatagacgatccactcgtttaactagcgacttatcagactgtctagaaacctgtttgctccttgccctcgaacgcgcaaattccttctgctctactgattccatttgctatactttggtccaaccttctgctttgtgcaaagctcccagccgcgtctaagccgcgtcagtggcatctgttgtcgattgttgagcctcgccgccgcccctcatctcaagcctcgctgtcgagctaaacccgttcatgttggataaaaaagcggagagggtcatcgtcagggtgatcaggtagaggggactttctacagttccgggcccttctgtgcaatcttctccaggaggggaattggagttttccattgctctcgcctggttttctcaactactgccttagaacagttgtcctccaacttacaggtttcaagcttcaggacactcaagaagagagcattcgagagtgccaccgccttgaactctgttgagtccgccgagctgaaaatcgcgatcgtatctcaatcaacgtccagtcacgatgccgcccagaatcccgagcttcaaggacatcaggcgacgctcgctcgccagctttcgcactgatcgttcaggagattcatcgactagtaacgaggatccttcaagtcaggtagcgacgccatccacaggttcgattactcctccttcgatggcgggtcacagtgatccagctctcgcaacccagccaaatcaacatccgggcctgcgaagcaaccggaacagctacatcagcgttggtcaagcgtcgccttcatctgaggtcacggagcgcccgccctcggcatactcgccccggattattaacgtccaacacaatgagagggtttaccagaaagtgatactgatcaatggtgtcattggcgaaggaccccagaatgtcgatggcaacgtgaccgtgttccgtaaagatagacagctgctacctctcgactggccagttcacggaggtcgattcaaggctatggtatctttattccatggccagaaccatttgcgcttcgagtatcggaaaaacggactgccccacactttggacatgacaattatcatgatcgagtacaccaatgttcagccattgcagttggtcattcttatggcaaaggattcgccatgtacatacgacgctattcccgcgcgggttgagagagagggtaatgacttagagacggctgtgcgcaagtttcgtatgagcgcctacatgtggcaagcctacaccgcagagcagatgtatcgcaacgggttcggtcgtcgtgcctggcgtttcgaagacgaatggaccagaggatcggtgaataactcagactggcacgagggtattatgcgatcggaaacgcgagttcacttcgttactaccgacaagacagtagctgagatccgggatatggaatgtgcccagcagaacaccaaagccacccggaaaaacgaactcttcgccatcgccaccgatgcaatcacgaagcatttcaacatcctcccaggtcaaaagatgcatgtggcagcactgatactggatgcacattgggaccctgtccagaaattgatcactggtcatgccgctcttggtggttctgccagtgacggtttgcagctggccattttcggatcgcactgcttgcagagttatccaatctcgcttgaacaagttgcgccagcaatggtcgactgcacccctaccgaaactacatttgtagctaatgactgcaacgaggctggaagtagttgggaggcggcaacacttggaatcggcgcgcacttacacgaagtgggtcaccttttcggtctccctcaccagacgtctggaattatggctagagactataccatgctcaatcgctcgttcgttgtcaaggaggccttctgtaccaggactaaaacgaagggcgcgattaaggacgagtccgacgaacccacttggcacagactggacctcctccgcttccgccagcactcgatgttcaagtttcctggagagtttcaaggcaacagcgatgggacggtccatggatggaccgttgagaataagaaggttatcgttactgccggatcaggcttgctatgcaccgagattttcgcggccggcgaagagcattgccaacagtggattgaatacatcaaggacgccgagattcagcgctctgttatgtacagcgaacctgaattgcgcgcgtaccttccggcagacaagcgcaaactaccattcaagatcatagtacgttcaagaggtggcggagagctcgtgatcaacgatttccctgcgctctgcaagtcttccctaaagatcagttcaagtcgggccgccttccgaagcactagactgggtaattcggagatgaagggaagccaggcccaagaattcgtctttaccagtgctattaccagaaatggtattcttacgagcgtcgttgtataccatggaagagccatagatgggctggagttcttctatcatgatggaagttcccagctttttggcaagcgcggtgggaagcagggaggagatagattcaatatggatctcaattcggccgaggtaattacgggcttcggcgtgcgcgcgggccagtggatcgattcgatccaaattcttacgagcacggcaaggacctctccttggtacggcaacaaaaccggtggatccccccatcgcctgagcgccccgaagggctacagaatctgcggtgtttctggaagttgtgcagactggttggacagcttctccctcctcatcacgcgcgtttagggtgaggaaagaaaggttgcagcattgatattggcacgagaagcccttttttcccagcaagatacccaagagttttgccaaggcggcgaaactatgtaattagtatacgaggctgaagactaattttccctgacgcatactccccacgcacacgatgtagggtaaggaatgatgagatatctggtgtacgagatcagcaggtaggaccacatggtggcctgaatagaggaatgaataaacaagtaataagcaaaagcgtgcgtgttcgacagcaaaatccgcgggtgactaaatagatctacgcggcatgtgtcgaatagacacgagtgttatagaccagattgccaca

SEQ ID NO: 16758 - DNA, 2247 bp, Muscodor strobelii
  misc_feature: SGI cDNA ID NO. 565585
  misc_feature: Encodes the peptide sequence at SEQ ID NO 16759
atgccgcccagaatcccgagcttcaaggacatcaggcgacgctcgctcgccagctttcgcactgatcgttcaggagattcatcgactagtaacgaggatccttcaagtcaggtagcgacgccatccacaggttcgattactcctccttcgatggcgggtcacagtgatccagctctcgcaacccagccaaatcaacatccgggcctgcgaagcaaccggaacagctacatcagcgttggtcaagcgtcgccttcatctgaggtcacggagcgcccgccctcggcatactcgccccggattattaacgtccaacacaatgagagggtttaccagaaagtgatactgatcaatggtgtcattggcgaaggaccccagaatgtcgatggcaacgtgaccgtgttccgtaaagatagacagctgctacctctcgactggccagttcacggaggtcgattcaaggctatggtatctttattccatggccagaaccatttgcgcttcgagtatcggaaaaacggactgccccacactttggacatgacaattatcatgatcgagtacaccaatgttcagccattgcagttggtcattcttatggcaaaggattcgccatgtacatacgacgctattcccgcgcgggttgagagagagggtaatgacttagagacggctgtgcgcaagtttcgtatgagcgcctacatgtggcaagcctacaccgcagagcagatgtatcgcaacgggttcggtcgtcgtgcctggcgtttcgaagacgaatggaccagaggatcggtgaataactcagactggcacgagggtattatgcgatcggaaacgcgagttcacttcgttactaccgacaagacagtagctgagatccgggatatggaatgtgcccagcagaacaccaaagccacccggaaaaacgaactcttcgccatcgccaccgatgcaatcacgaagcatttcaacatcctcccaggtcaaaagatgcatgtggcagcactgatactggatgcacattgggaccctgtccagaaattgatcactggtcatgccgctcttggtggttctgccagtgacggtttgcagctggccattttcggatcgcactgcttgcagagttatccaatctcgcttgaacaagttgcgccagcaatggtcgactgcacccctaccgaaactacatttgtagctaatgactgcaacgaggctggaagtagttgggaggcggcaacacttggaatcggcgcgcacttacacgaagtgggtcaccttttcggtctccctcaccagacgtctggaattatggctagagactataccatgctcaatcgctcgttcgttgtcaaggaggccttctgtaccaggactaaaacgaagggcgcgattaaggacgagtccgacgaacccacttggcacagactggacctcctccgcttccgccagcactcgatgttcaagtttcctggagagtttcaaggcaacagcgatgggacggtccatggatggaccgttgagaataagaaggttatcgttactgccggatcaggcttgctatgcaccgagattttcgcggccggcgaagagcattgccaacagtggattgaatacatcaaggacgccgagattcagcgctctgttatgtacagcgaacctgaattgcgcgcgtaccttccggcagacaagcgcaaactaccattcaagatcatagtacgttcaagaggtggcggagagctcgtgatcaacgatttccctgcgctctgcaagtcttccctaaagatcagttcaagtcgggccgccttccgaagcactagactgggtaattcggagatgaagggaagccaggcccaagaattcgtctttaccagtgctattaccagaaatggtattcttacgagcgtcgttgtataccatggaagagccatagatgggctggagttcttctatcatgatggaagttcccagctttttggcaagcgcggtgggaagcagggaggagatagattcaatatggatgcagatctcaattcggccgaggtaattacgggcttcggcgtgcgcgcgggccagtggatcgattcgatccaaattcttacgagcacggcaaggacctctccttggtacggcaacaaaaccggtggatccccccatcgcctgagcgccccgaagggctacagaatctgcggtgtttctggaagttgtgcagactggttggacagcttctccctcctcatcacgcgcgtttag

SEQ ID NO: 16759 - protein, 748 aa, Muscodor strobelii
  misc_feature: SGI Peptide ID NO. 565585
  misc_feature (1)..(747): NCBI GI: 189091858 Blast Desc: [Podospora anserina] gi|188219282|emb|CAP49262.1| protein product [Podospora anserina]
  misc_feature (6)..(747): NCBI GI: 46123983 Blast Desc: FG06369.1 [Gibberella zeae PH-1]
  misc_feature (1)..(714): NCBI GI: 27803039 Blast Desc: protein product [Podospora anserina]
  misc_feature (1)..(717): NCBI GI: 116179576 Blast Desc: CHGG_00416 [Chaetomium globosum CBS 148.51] gi|88184713|gb|EAQ92181.1| CHGG_00416 [Chaetomium globosum CBS 148.51]
  misc_feature (5)..(745): NCBI GI: 255936675 Blast Desc: Pc13g09410 [Penicillium chrysogenum Wisconsin 54-1255] gi|211583984|emb|CAP92010.1| Pc13g09410 [Penicillium chrysogenum Wisconsin 54-1255]
  misc_feature (5)..(745): NCBI GI: 146323414 Blast Desc: zinc metalloproteinase [Aspergillus fumigatus Af293] gi|129558302|gb|EAL92465.2| zinc metalloproteinase, [Aspergillus fumigatus Af293] gi|159127517|gb|EDP52632.1| zinc [Aspergillus
  misc_feature (8)..(747): NCBI GI: 212527632 Blast Desc: zinc metalloproteinase, [Penicillium marneffei ATCC 18224] gi|210073371|gb|EEA27458.1| zinc metalloproteinase, [Penicillium marneffei ATCC 18224]
  misc_feature (6)..(747): NCBI GI: 156042352 Blast Desc: SS1G_10973 [Sclerotinia sclerotiorum 1980] gi|154695360|gb|EDN95098.1| SS1G_10973 [Sclerotinia sclerotiorum 1980]
  misc_feature (5)..(745): NCBI GI: 169770705 Blast Desc: [Aspergillus oryzae RIB40] gi|83767681|dbj|BAE57820.1| protein product [Aspergillus oryzae]
  misc_feature (8)..(747): NCBI GI: 242784272 Blast Desc: zinc metalloproteinase, [Talaromyces stipitatus ATCC 10500] gi|218720501|gb|EED19920.1| zinc metalloproteinase, [Talaromyces stipitatus ATCC 10500]
MPPRIPSFKDIRRRSLASFRTDRSGDSSTSNEDPSSQVATPSTGSITPPSMAGHSDPALATQPNQHPGLRSNRNSYISVGQASPSSEVTERPPSAYSPRIINVQHNERVYQKVILINGVIGEGPQNVDGNVTVFRKDRQLLPLDWPVHGGRFKAMVSLFHGQNHLRFEYRKNGLPHTLDMTIIMIEYTNVQPLQLVILMAKDSPCTYDAIPARVEREGNDLETAVRKFRMSAYMWQAYTAEQMYRNGFGRRAWRFEDEWTRGSVNNSDWHEGIMRSETRVHFVTTDKTVAEIRDMECAQQNTKATRKNELFAIATDAITKHFNILPGQKMHVAALILDAHWDPVQKLITGHAALGGSASDGLQLAIFGSHCLQSYPISLEQVAPAMVDCTPTETTFVANDCNEAGSSWEAATLGIGAHLHEVGHLFGLPHQTSGIMARDYTMLNRSFVVKEAFCTRTKTKGAIKDESDEPTWHRLDLLRFRQHSMFKFPGEFQGNSDGTVHGWTVENKKVIVTAGSGLLCTEIFAAGEEHCQQWIEYIKDAEIQRSVMYSEPELRAYLPADKRKLPFKIIVRSRGGGELVINDFPALCKSSLKISSSRAAFRSTRLGNSEMKGSQAQEFVFTSAITRNGILTSVVVYHGRAIDGLEFFYHDGSSQLFGKRGGKQGGDRFNMDADLNSAEVITGFGVRAGQWIDSIQILTSTARTSPWYGNKTGGSPHRLSAPKGYRICGVSGSCADWLDSFSLLITRV

SEQ ID NO: 16760 - DNA, 3562 bp, Muscodor strobelii; identical to SEQ ID NO: 16757
  misc_feature: SGI EST ID NO. CUFF.39528.0
  misc_feature: Variant of the nucleotide sequence at SEQ ID NO 16758

SEQ ID NO: 16761 - DNA, 1080 bp, Muscodor strobelii
  misc_feature: SGI cDNA ID NO. 565586
  misc_feature: Encodes the peptide sequence at SEQ ID NO 16762
atgtcatcgccgttgaagaaacagcccgaggtagtggccgacaaagtgcttaagagagtcgaggtcagcaagattgctcgcaagctgcaaggccgcctcgctctggcccagttcaagacgaagcatggatgggaggacttgaccttcgacaccatcgagccccgagtcgaggaggagcgacgacagcgacgcatctgcgacggcgatgtcctctccgactcctcctccagcgcatccgacctgccctaccccatccacggcctcatgagctccccgctcaaggcgcccctgttttcagatgccgttacctccagcagcggcagctcgggtcaccgcaagcgcacctacaacacggcctcgttcgacatgaccatgtccagtcccaccaagcgattccgctcgtcccccacccctcacaagtccttccacaactcccacggccagggctcctggagagcacatcgccagctcatccagtcgtcacccatcaagccgcgaaagcagcactttaccacctcagacggtcccgacgtctccttcttccagggcacccgccgaccctcggtcgacctcacttcacccaactttgctgctgccccgtcagacgacgaggatgacgccctaccgatgcactccttccaggtggatccgaatcgatcatctcctcctcgcacgccgcctatgcgcagccgcagtgccaacatccgccgaggtaaagatcacaaaggcggacctaacgagaagtccggagaggatggagctgagctgctcatgtacctgcataattcgccctccccggccatgtcacgatcccttatggaaccaccctccacgccgccgccacgcaaagacatggcccttccgtcttctatgatgaccacgcccggtggaggtagcatgtttcccagtacacctggtcagccattcgacttttcggattatgtaaatataacacctagtcctgcccagaagccctggaagacgcctctgccttttggctccatgaagacgcccacagctaaaaccccgatgagcgtcgccagacgcaggctgacttttgaggattctcccgctatctaa

SEQ ID NO: 16762 - protein, 359 aa, Muscodor strobelii
  misc_feature: SGI Peptide ID NO. 565586
  misc_feature (28)..(52): Pfam Id: PF08528 Pfam Desc: Whi5 like
  misc_feature (1)..(358): NCBI GI: 116179580 Blast Desc: CHGG_00418 [Chaetomium globosum CBS 148.51] gi|88184715|gb|EAQ92183.1| CHGG_00418 [Chaetomium globosum CBS 148.51]
  misc_feature (1)..(354): NCBI GI: 256732442 Blast Desc: [Nectria haematococca mpVI 77-13-4]
  misc_feature (1)..(358): NCBI GI: 189091860 Blast Desc: [Podospora anserina] gi|27803040|emb|CAD60743.1| protein product [Podospora anserina] gi|188219283|emb|CAP49263.1| protein product [Podospora anserina]
  misc_feature (1)..(354): NCBI GI: 46123981 Blast Desc: FG06368.1 [Gibberella zeae PH-1]
  misc_feature (25)..(355): NCBI GI: 164427096 Blast Desc: NCU02412 [Neurospora crassa OR74A] gi|157071606|gb|EAA30304.2| conserved [Neurospora crassa OR74A]
  misc_feature (1)..(355): NCBI GI: 154300282 Blast Desc: BC1G_11330 [Botryotinia fuckeliana B05.10] gi|150856653|gb|EDN31845.1| BC1G_11330 [Botryotinia fuckeliana B05.10]
  misc_feature (6)..(295): NCBI GI: 145616136 Blast Desc: MGG_03543 [Magnaporthe grisea 70-15] gi|145009896|gb|EDJ94552.1| MGG_03543 [Magnaporthe grisea 70-15]
  misc_feature (12)..(354): NCBI GI: 189200609 Blast Desc: conserved [Pyrenophora tritici-repentis Pt-1C-BFP] gi|187983740|gb|EDU49228.1| conserved [Pyrenophora tritici-repentis Pt-1C-BFP]
  misc_feature (190)..(355): NCBI GI: 156042348 Blast Desc: SS1G_10971 [Sclerotinia sclerotiorum 1980] gi|154695358|gb|EDN95096.1| SS1G_10971 [Sclerotinia sclerotiorum 1980]
  misc_feature (25)..(355): NCBI GI: 169617678 Blast Desc: SNOG_12021 [Phaeosphaeria nodorum SN15] gi|160703455|gb|EAT80433.2| SNOG_12021 [Phaeosphaeria nodorum SN15]
MSSPLKKQPEVVADKVLKRVEVSKIARKLQGRLALAQFKTKHGWEDLTFDTIEPRVEEERRQRRICDGDVLSDSSSSASDLPYPIHGLMSSPLKAPLFSDAVTSSSGSSGHRKRTYNTASFDMTMSSPTKRFRSSPTPHKSFHNSHGQGSWRAHRQLIQSSPIKPRKQHFTTSDGPDVSFFQGTRRPSVDLTSPNFAAAPSDDEDDALPMHSFQVDPNRSSPPRTPPMRSRSANIRRGKDHKGGPNEKSGEDGAELLMYLHNSPSPAMSRSLMEPPSTPPPRKDMALPSSMMTTPGGGSMFPSTPGQPFDFSDYVNITPSPAQKPWKTPLPFGSMKTPTAKTPMSVARRRLTFEDSPAI

SEQ ID NO: 16763 - DNA, 2127 bp, Muscodor strobelii
  misc_feature: SGI EST ID NO. CUFF.39545.0
  misc_feature: Variant of the nucleotide sequence at SEQ ID NO 16761
ccgaacattgcacaggcaccagaacagactttgtgatatcaatccgcctccggttgctggcgtgaactatcatcaagtgttttctgcttcaatcccctctttttgtagtcttgtagccgcagcggccaagagggagcggcgagactgatatcgttctttccgttcctttgtgcacacctcgacttctagggaagttgctgtccggataccaccccctcgcttagactctcttaccaatccacctcggacggtgaccgtcaaattggccgtttcagcaatcttcttctgtatcaatccctcgccgctcttcaccagggcattgtgctgcccccaagagaaagcaccatgtcatcgccgttgaagaaacagcccgaggtagtggccgacaaagtgcttaagagagtcgaggtcagcaagattgctcgcaagctgcaaggccgcctcgctctggcccagttcaagacgaagcatggatgggaggacttgaccttcgacaccatcgagccccgagtcgaggaggagcgacgacagcgacgcatctgcgacggcgatgtcctctccgactcctcctccagcgcatccgacctgccctaccccatccacggcctcatgagctccccgctcaaggcgcccctgttttcagatgccgttacctccagcagcggcagctcgggtcaccgcaagcgcacctacaacacggcctcgttcgacatgaccatgtccagtcccaccaagcgattccgctcgtcccccacccctcacaagtccttccacaactcccacggccagggctcctggagagcacatcgccagctcatccagtcgtcacccatcaagccgcgaaagcagcactttaccacctcagacggtcccgacgtctccttcttccagggcacccgccgaccctcggtcgacctcacttcacccaactttgctgctgccccgtcagacgacgaggatgacgccctaccgatgcactccttccaggtggatccgaatcgatcatctcctcctcgcacgccgcctatgcgcagccgcagtgccaacatccgccgaggtaaagatcacaaaggcggacctaacgagaagtccggagaggatggagctgagctgctcatgtacctgcataattcgccctccccggccatgtcacgatcccttatggaaccaccctccacgccgccgccacgcaaagacatggcccttccgtcttctatgatgaccacgcccggtggaggtagcatgtttcccagtacacctggtcagccattcgacttttcggattatgtaaatataacacctagtcctgcccagaagccctggaagacgcctctgccttttggctccatgaagacgcccacagctaaaaccccgatgagcgtcgccagacgcaggctgacttttgaggattctcccgctatctaatacccctttacgactcatgccccattgatgccacacagaaccacactcattatgagcatagacactgctcttcccgcctgtcattcctttcctactattaccgcttctcttaaaacttaattcactttacgtgttcactggatggataattgatggcatacaataagaccacgctcataggtcggcgccaacactggtactgagggatattgaaagatactacggcatggacttcactgatcaaggcataggcgtcggagtttctggttctttctagtccttttgccttgattgaatttttctttgtttgcgaatagggattcagatcttgatactgaatctcgccgcgttggctatcaaacacatgctgcgccaacttctacgccttgtggttcgagggagggaagggcttttgattgttcctcgtctaacgttcgtattgacgttcgtattgtcatgaagttagacgacggaaggaacgaacacacgacttgagacggactggactgattgtgggagagaaagtgtgacgataccaaaacagggaagaacgagagccgaatcgcgagacagccggatcacgagatagccggacggatagactcacatatgggatgcagataggctatcacactgactgtatctactgatagctgagctgagctgactagcccgaccgaataaaaagaaatgaaagcgact

SEQ ID NO: 16764 - DNA, 1470 bp, Muscodor strobelii
  misc_feature: SGI cDNA ID NO. 565587
  misc_feature: Encodes the peptide sequence at SEQ ID NO 16765
atggcttgctcgaaagacacggcggctgtgtcgcccaagtctgatgacatccccatccgtcgatcacagagagacaagaaagtccctcgcaagtacgacgaggaggtcatcatcacggccgagacatctcgtaagcccctgcctgccaccaaggtggaccgaccaaagcgtaaagccgccgaatctgcgcgagagcagatcgaacccgaagatgtcgaagttctacaggagcagctcttcgcccgtatggacatcgacgagcgcaaggaatatcgcggctgggtcgaattggagtccgagcctgcctttttcaacgccatgcttcgagatctcggcgccaaggacttcaaggtgaacgagctcttcggattggatgcggcagctctacgtgagcttccgaaacccgttcatggcctgctctttctgtatcagtggagcgcctatgaaggtgaagacagcgatcgtcaggactgtccagcacacctctggtttggcaatcagacgaccgcaaatgcctgcgcgactgtcgcattgatgaatatcatcatgaatgcccaaggtgtcaggcttggaccagaactacaaaaattcaagaacacaacccgaactctgccaccacctcaccgaggtcacgctctcaacacaaacgacttcatccgtgccatccacaactcggtcgctcgtcgagtcgaccttctgtctgaggatctactgctcgataataagttcgagacagcgagcaagaagagaaagacttctagcaccacgaagaagactacaaagaacagcaaaccccgcaggaagtctgacagtgacgataacgccttccactatatcgcattcgtgccggttgacggcgtggtctgggaactagacggccttgagacgaaaccatcgaggattggttcatatccattgtacgagaatggccacaaccacatctcatggctcgacgtagccaatcgcgcaattcaagagcgcatgtcacgcgaaaacgaattcgcccccttcaacttattagccatctgtcgctcaccacttctcaccatagccgagagcctcgccatcaacctcgcgacttccgatttcctgcagactcaactccagagctcaaccctaccatgggacggcgaagaagacgcctggacacacttccccgccgcgcgcctcgcaccgttcaatctcacgcgcgagaagatcaccgcagagtaccacccgcttgatcacatagtggacaagataagcacgaagaacttcgaccccgcagccgtacagaaaattaagagagagctacgtgctgaccgcgagacgctcgagacggagtacgtctcggaactggcgacgatcgacgaggctgtcgccatgatccgtggtcggcagcgtgactacacgcccgctatccacaagtgggtgagaatcttggctgagaagggtgttttgcgacagcttattcaacagatggatgagtag

SEQ ID NO: 16765 - protein, 489 aa, Muscodor strobelii
  misc_feature: SGI Peptide ID NO. 565587
  misc_feature (93)..(331): Pfam Id: PF01088 Pfam Desc: Ubiquitin carboxyl-terminal hydrolase, family 1
  misc_feature (18)..(485): NCBI GI: 256732898 Blast Desc: NECHADRAFT_37933 [Nectria haematococca mpVI 77-13-4]
  misc_feature (19)..(485): NCBI GI: 46123969 Blast Desc: FG06362.1 [Gibberella zeae PH-1]
  misc_feature (84)..(483): NCBI GI: 119493408 Blast Desc: ubiquitin carboxyl-terminal hydrolase, family 1 protein [Neosartorya fischeri NRRL 181] gi|119412054|gb|EAW21997.1| ubiquitin carboxyl-terminal family 1
  misc_feature (86)..(484): NCBI GI: 238845884 Blast Desc: ubiquitin carboxyl-terminal hydrolase [Microsporum canis CBS 113480]
  misc_feature (69)..(487): NCBI GI: 261195795 Blast Desc: ubiquitin carboxyl-terminal hydrolase [Ajellomyces dermatitidis SLH14081] gi|239587434|gb|EEQ70077.1| ubiquitin carboxyl-terminal hydrolase [Ajellomyces dermatitidis SLH14081]
  misc_feature (2)..(487): NCBI GI: 156042338 Blast Desc: SS1G_10966 [Sclerotinia sclerotiorum 1980] gi|154695353|gb|EDN95091.1| SS1G_10966 [Sclerotinia sclerotiorum 1980]
  misc_feature (69)..(487): NCBI GI: 240274232 Blast Desc: ubiquitin carboxyl-terminal hydrolase [Ajellomyces capsulatus H143]
  misc_feature (53)..(487): NCBI GI: 226294416 Blast Desc: ubiquitin carboxyl-terminal hydrolase [Paracoccidioides brasiliensis Pb18]
  misc_feature (69)..(487): NCBI GI: 225554855 Blast Desc: ubiquitin carboxyl-terminal hydrolase [Ajellomyces capsulatus G186AR]
  misc_feature (86)..(484): NCBI GI: 259485555 Blast Desc: TPA: ubiquitin C-terminal hydrolase 37 (AFU_orthologue; AFUA_3G05510) [Aspergillus nidulans FGSC A4]
  misc_feature (90)..(486): SWISSPROT Homolog: EC 3.4.19.12 Ubiquitinyl hydrolase 1
MACSKDTAAVSPKSDDIPIRRSQRDKKVPRKYDEEVIITAETSRKPLPATKVDRPKRKAAESAREQIEPEDVEVLQEQLFARMDIDERKEYRGWVELESEPAFFNAMLRDLGAKDFKVNELFGLDAAALRELPKPVHGLLFLYQWSAYEGEDSDRQDCPAHLWFGNQTTANACATVALMNIIMNAQGVRLGPELQKFKNTTRTLPPPHRGHALNTNDFIRAIHNSVARRVDLLSEDLLLDNKFETASKKRKTSSTTKKTTKNSKPRRKSDSDDNAFHYIAFVPVDGVVWELDGLETKPSRIGSYPLYENGHNHISWLDVANRAIQERMSRENEFAPFNLLAICRSPLLTIAESLAINLATSDFLQTQLQSSTLPWDGEEDAWTHFPAARLAPFNLTREKITAEYHPLDHIVDKISTKNFDPAAVQKIKRELRADRETLETEYVSELATIDEAVAMIRGRQRDYTPAIHKWVRILAEKGVLRQLIQQMDE

SEQ ID NO: 16766 - DNA, 2500 bp, Muscodor strobelii
  misc_feature: SGI EST ID NO. CUFF.39552.0
  misc_feature: Variant of the nucleotide sequence at SEQ ID NO 16764
catgaatcaagctcaaaatgcaagatcgactgctcttataatcgttttcctgcgagacagtgacgcaccttgaaacctcagtgttttcacatcttcattgttggacactgtcactctttcgggtgtatccagctaacaggatccatcacctcaatttgatctaatcctcttggtaattgctagctctactttcctcacgttcatctctttgttccccaaattcaacacgggccaatgcatctgaatgatcttgcttgacatgtcccacatccaaagcattcaatgttgatcaaagtcttatacaaacacagctgcttcaaagaggatcacaccctgccccggagcataagctgcaactcatcaacgcacaatcccttccatatatacataattacactatgctatagtcaaagatttcaaggtcttaacggacattgaggaagagttgtgaactcagtgttgtggcaacttctatgagcctccagctatacccgtcattccagatctgtccacgaccaaataggcactcgcctgattattatcaatttttccaggctacccagttatgcagtggcagctggaagcttcttgccttttaacgtttattcggctgcccctttcattgctgatctgaggcatctccaggaagcaatctgaccttgtgtcttaaatacaccagacctctctcagacgtcgattgggcatgcactacatataagtatttgcaaatccaataactcttgtactttcgccccatcctctatcaccatccatacctacgatccaatacgccttgcaagtcccatgacaatggcttgctcgaaagacacggcggctgtgtcgcccaagtctgatgacatccccatccgtcgatcacagagagacaagaaagtccctcgcaagtacgacgaggaggtcatcatcacggccgagacatctcgtaagcccctgcctgccaccaaggtggaccgaccaaagcgtaaagccgccgaatctgcgcgagagcagatcgaacccgaagatgtcgaagttctacaggagcagctcttcgcccgtatggacatcgacgagcgcaaggaatatcgcggctgggtcgaattggagtccgagcctgcctttttcaacgccatgcttcgagatctcggcgccaaggacttcaaggtgaacgagctcttcggattggatgcggcagctctacgtgagcttccgaaacccgttcatggcctgctctttctgtatcagtggagcgcctatgaaggtgaagacagcgatcgtcaggactgtccagcacacctctggtttggcaatcagacgaccgcaaatgcctgcgcgactgtcgcattgatgaatatcatcatgaatgcccaaggtgtcaggcttggaccagaactacaaaaattcaagaacacaacccgaactctgccaccacctcaccgaggtcacgctctcaacacaaacgacttcatccgtgccatccacaactcggtcgctcgtcgagtcgaccttctgtctgaggatctactgctcgataataagttcgagacagcgagcaagaagagaaagacttctagcaccacgaagaagactacaaagaacagcaaaccccgcaggaagtctgacagtgacgataacgccttccactatatcgcattcgtgccggttgacggcgtggtctgggaactagacggccttgagacgaaaccatcgaggattggttcatatccattgtacgagaatggccacaaccacatctcatggctcgacgtagccaatcgcgcaattcaagagcgcatgtcacgcgaaaacgaattcgcccccttcaacttattagccatctgtcgctcaccacttctcaccatagccgagagcctcgccatcaacctcgcgacttccgatttcctgcagactcaactccagagctcaaccctaccatgggacggcgaagaagacgcctggacacacttccccgccgcgcgcctcgcaccgttcaatctcacgcgcgagaagatcaccgcagagtaccacccgcttgatcacatagtggacaagataagcacgaagaacttcgaccccgcagccgtacagaaaattaagagagagctacgtgctgaccgcgagacgctcgagacggagtacgtctcggaactggcgacgatcgacgaggctgtcgccatgatccgtggtcggcagcgtgactacacgcccgctatccacaagtgggtgagaatcttggctgagaagggtgttttgcgacagcttattcaacagatggatgagtagaatcctggaattcagttacttggcgaggaagagagagagaggaggggatatgtttgtatgctcatccaacttttgcttgtagttgagagagaaatagcaggactcaaattcttagcttcagtaatactaccactactagcttgagaatataaaagccatagagaggaaagtaaaattcttcgtacgtgaagcaaggctacgtgaataggttcaaaattcg

SEQ ID NO: 16767 - DNA, 3801 bp, Muscodor strobelii
  misc_feature: SGI cDNA ID NO. 565588
  misc_feature: Reduced expression when VOC is produced
  misc_feature: Encodes the peptide sequence at SEQ ID NO 16768
atgagtttcgcaacaccgcgtgcccgtcgaccgctcaccacctcgtccacctcgtcctcgcttcgacagcccacgccgccgactcgcgatggcaagccacgaacctcgctgccccgatcctcgctcccacctgcgcccgaaaatgccaccgccgctcccaacggcggcagagggcccttaatcccccttaccctcgctgatgctccccagcaacgcttctacgcatgcgccatctacgtcgtcatgtggggtttccgcttctacgactatgtccagatacaagacagtggtgcccacgcctggcacttcttcaaatgggcctttctcgacgccgtcttcctcttctccatccctcacttccgtatcccctggctggagctatcctccgagttcgtcctcgtcgccttctgtctgcacgttgtcagcgattggtggctgatgtacaacatccccttgcccttcggagctcctctgctggctatgctcaaggtcttctacgacaaggaactagccatctccgagcacaatgtcaaggtctccagcatcttgcacaactcctccctcatcatgggcaagcagatcatcaacatcctgcccgagggctccgccgtcctgaaccccgaccgccacccctactgcctcggccccgaccagaccaccgctaccgtcccgctcttcttcaacgccaccgtgcccgtcgaagtcgagctgacccgcttcgatctcgagaccaatgccgaagagactgttaagctcactcgtcgggagatcaaggagatcgccaagctggccagcaaatgcgtcgtcgacgagggtggtgacatggcctacaaatacgactacaccatcaagaaacccggtgcctatagactaaataaggtcctcgatgaatacaagctcgaagtccagagactatcccaacccacttacatcgtaccctgtcccaaggccaaggttcgcaccgccgagtcgtccacgaaatgtcttggcgagctgtccgatctttcgctggaagtcgagggtacgccgccattgaagatttactatagtcggacgatcaatggcaaggatcacagtttccacttccagagcctgcaacccgagggcttctcgtcgccactgcttggatcccagccttcaagcctgattctcgcctcagactttacttgggctcggtcacagaaggtcccggtggggctcaacgagtctatgagcagcgcagggcaatggcagtattcggtcgatgaggtccatgatgtgttcggaaacaaggtgtcttatcagcagaccgaagagcacgacgtcaaccccaagtccaaggatctgttccagagctttgttgtccgcgagcgaccccgtgccacaatcgccggctgcgacctccgcaatcccctcaagattgccaaaggaaaaagcgtgaaactcccagtcaagatcggccgccccggcaagactcaagataatgcttcccacacgttgacgtggcagtactcacctatcgacagcctcagcaagaatggcgatcatggtgacgttgttgaggtcggctcattcaccactaagaatgtcaatgaccagcccagcatctcggcgcctggcttgtacactctcaagtctgtgtcttgtggctcatgtgagggagaaatcgaagagccgtcgtcttgcttgttgctcaatcctctggagcccacgctatcaatgcagtccgaaatgattcccgacaagtgtgctggcagctctattggacttcgtgtcaatctagacctagtcggtacgccgccattcaaagttcattacgatgtcatcagcaacaatggtcccacgcgtcaggagcgagtggatgtcaaaggtgtacgtcaacagattgagctcttgccgcggaatgcagggcattatcagtatcggttccgaagactggatgacgccatatacaaagtatcattgccagcttccaatgactactatctcgagcaaacagtcaagccacccgcgactgcctttttcaaccatgtcgcggaaagtcataatgcctgtctagatcaaccggtgaagctcagcgttaagctccttggggacgcaccgtttactctagaatgggagctggttcacgacggtaaacgcaagaccgaaaagcggaccgatatcacaactgatacctttactatcgaaactgcgccgttgtctgctggcggtgattacacagtggcccttaagagcatctccgatcgcacagagtgtaagatcaatctgaaagaggagaccaagatcttcgtcaggcgtcaaaaacctcgtgccgccttcggcttgatcgaaaacaagagaaccactactgtcgtcgaagcggctgaagtgaagattcctctgaagctctcaggcgatggcccgtggcgagtccagtatcgtaacttgaatagctctgctggcacacaaacacgcgttgccaggaccggcaatgatttcatccaagcaaaagagcgaggaatttacgaaattattgacgtagaagataaccaatgccctggtaccgttgatccgagacagagcaggttcgacgtgaactggtttcctctgcctgagatttcattggtaccaaccgatgcaatccgtgctacagacaaggcccacaactttgtaaagaaggatatatgcgaaggcgacgtggacggattcgaggttgctttcaagggatcgcctccttaccacgtcgagtatgaagtgcggcataaggctaaggttggctctggttcagtggcccgaaaggacctggatgctgtacttaacaaggcctcgatccaaatggatacggcaaaggccggagtctattcgtactcgttctctgctctttccgacaatctttacaatactaacaagaagtatgcaacacatctgacgcttgagcaaactgtcaatcccaagcccgctgcatcatttgtcaaacctggtcaaactttcaagtcctgcttggcagaagagatccaacagccgatagctgttaagctggaaggcaaagcgcctttctacctcgagcttgagatcaagcaccagcaagggacctttcccgaagtcttcagaatccccaacatccaaaccaacagctttgatgtccgcattcctcggcaatatctgaagcttggctctcagcaggtccgcatacgtaaggtgcgtgatgaccgaggatgccaaactgaaaccgacaacggaggacctgtagtccatttccaactttacgactcaccgtcgatctatcctctagagcagaggactgattactgtgtcggtgatcgtatcagctacacactgtctggcacacctccctttgaggtcaactacaatttcggaggcaagaaaatgaaggccaagtctcagacgaccaactttcgacgagtggccgagtctccaggagaattcactatcaccagcgttagtgacaaagctagtgaatgtcaggccgccgtcaacgtcaccagacacatccaccccctgcccgctgttcgtattagcaagggtcgcgtgatacaagtcgatattcacgagggtagcgaagtcgaacttgtcttcgacttcgaaggtacggctcccttcgagttcacgtatacgcgtagcacgaacgagaagaagggacagaagagccaggtcatcgagacaaggcatgaagtgagtgaggagcacacaaaggttatcatggctagtctcgagggtacctaccaagttgtttctatcaaggatcgcttctgtgcctattctctactaggtgatcagggaggctcgagggacaaggggcagaagaggttggagttttag

SEQ ID NO: 16768 - protein, 1266 aa, Muscodor strobelii
  misc_feature: SGI Peptide ID NO. 565588
  misc_feature (1)..(1248): NCBI GI: 46123967 Blast Desc: FG06361.1 [Gibberella zeae PH-1]
  misc_feature (72)..(1266): NCBI GI: 116179542 Blast Desc: CHGG_00399 [Chaetomium globosum CBS 148.51] gi|88184696|gb|EAQ92164.1| CHGG_00399 [Chaetomium globosum CBS 148.51]
  misc_feature (32)..(1251): NCBI GI: 164427072 Blast Desc: NCU10747 [Neurospora crassa OR74A] gi|157071594|gb|EDO65269.1| conserved [Neurospora crassa OR74A]
  misc_feature (42)..(1266): NCBI GI: 27803061 Blast Desc: protein product [Podospora anserina]
  misc_feature (42)..(1266): NCBI GI: 189091902 Blast Desc: [Podospora anserina] gi|188219304|emb|CAP49284.1| protein product [Podospora anserina]
  misc_feature (36)..(1265): NCBI GI: 145616176 Blast Desc: MGG_13535 [Magnaporthe grisea 70-15] gi|145009927|gb|EDJ94583.1| MGG_13535 [Magnaporthe grisea 70-15]
  misc_feature (169)..(1220): NCBI GI: 156042340 Blast Desc: SS1G_10967 [Sclerotinia sclerotiorum 1980] gi|154695354|gb|EDN95092.1| SS1G_10967 [Sclerotinia sclerotiorum 1980]
  misc_feature (190)..(1201): NCBI GI: 154300274 Blast Desc: BC1G_11326 [Botryotinia fuckeliana B05.10] gi|150856649|gb|EDN31841.1| BC1G_11326 [Botryotinia fuckeliana B05.10]
  misc_feature (4)..(1257): NCBI GI: 226294417 Blast Desc: nucleoporin Pom152 [Paracoccidioides brasiliensis Pb18]
  misc_feature (4)..(1257): NCBI GI: 225685102 Blast Desc: conserved [Paracoccidioides brasiliensis Pb03]
  misc_feature: Useful for introducing or modulating the production of volatile compounds
MSFATPRARRPLTTSSTSSSLRQPTPPTRDGKPRTSLPRSSLPPAPENATAAPNGGRGPLIPLTLADAPQQRFYACAIYVVMWGFRFYDYVQIQDSGAHAWHFFKWAFLDAVFLFSIPHFRIPWLELSSEFVLVAFCLHVVSDWWLMYNIPLPFGAPLLAMLKVFYDKELAISEHNVKVSSILHNSSLIMGKQIINILPEGSAVLNPDRHPYCLGPDQTTATVPLFFNATVPVEVELTRFDLETNAEETVKLTRREIKEIAKLASKCVVDEGGDMAYKYDYTIKKPGAYRLNKVLDEYKLEVQRLSQPTYIVPCPKAKVRTAESSTKCLGELSDLSLEVEGTPPLKIYYSRTINGKDHSFHFQSLQPEGFSSPLLGSQPSSLILASDFTWARSQKVPVGLNESMSSAGQWQYSVDEVHDVFGNKVSYQQTEEHDVNPKSKDLFQSFVVRERPRATIAGCDLRNPLKIAKGKSVKLPVKIGRPGKTQDNASHTLTWQYSPIDSLSKNGDHGDVVEVGSFTTKNVNDQPSISAPGLYTLKSVSCGSCEGEIEEPSSCLLLNPLEPTLSMQSEMIPDKCAGSSIGLRVNLDLVGTPPFKVHYDVISNNGPTRQERVDVKGVRQQIELLPRNAGHYQYRFRRLDDAIYKVSLPASNDYYLEQTVKPPATAFFNHVAESHNACLDQPVKLSVKLLGDAPFTLEWELVHDGKRKTEKRTDITTDTFTIETAPLSAGGDYTVALKSISDRTECKINLKEETKIFVRRQKPRAAFGLIENKRTTTVVEAAEVKIPLKLSGDGPWRVQYRNLNSSAGTQTRVARTGNDFIQAKERGIYEIIDVEDNQCPGTVDPRQSRFDVNWFPLPEISLVPTDAIRATDKAHNFVKKDICEGDVDGFEVAFKGSPPYHVEYEVRHKAKVGSGSVARKDLDAVLNKASIQMDTAKAGVYSYSFSALSDNLYNTNKKYATHLTLEQTVNPKPAASFVKPGQTFKSCLAEEIQQPIAVKLEGKAPFYLELEIKHQQGTFPEVFRIPNIQTNSFDVRIPRQYLKLGSQQVRIRKVRDDRGCQTETDNGGPVVHFQLYDSPSIYPLEQRTDYCVGDRISYTLSGTPPFEVNYNFGGKKMKAKSQTTNFRRVAESPGEFTITSVSDKASECQAAVNVTRHIHPLPAVRISKGRVIQVDIHEGSEVELVFDFEGTAPFEFTYTRSTNEKKGQKSQVIETRHEVSEEHTKVIMASLEGTYQVVSIKDRFCAYSLLGDQGGSRDKGQKRLEF

SEQ ID NO: 16769 - DNA, 4419 bp, Muscodor strobelii
  misc_feature: SGI EST ID NO. CUFF.39563.0
  misc_feature: Variant of the nucleotide sequence at SEQ ID NO 16767
atttccgggttgggaagagctgcaccaagcctccaacatcgccaacgaaagcattgaagaagggaagaggtgatccgccccgcttcaaagccccgacccgagtgtagcttgcttgtgccgtgagctttgcgacctcatcccaaagctctttgttattcaaatcgtcctttggcccgttgcatcgcattgcattgcattgcatcgtcttcgttttctaatggtctcccgtcgccaccatcatcaccaccaccaccgccacggaatgctatgagtttcgcaacaccgcgtgcccgtgtgggcagctacccagatacccccagctggcggtaccagtgcccgaccacagcgaccgctcaccacctcgtccacctcgtcctcgcttcgacagcccacgccgccgactcgcgatggcaagccacgaacctcgctgccccgatcctcgctcccacctgcgcccgaaaatgccaccgccgctcccaacggcggcagagggcccttaatcccccttaccctcgctgatgctccccagcaacgcttctacgcatgcgccatctacgtcgtcatgtggggtttccgcttctacgactatgtccagatacaagacagtggtgcccacgcctggcacttcttcaaatgggcctttctcgacgccgtcttcctcttctccatccctcacttccgtatcccctggctggagctatcctccgagttcgtcctcgtcgccttctgtctgcacgttgtcagcgattggtggctgatgtacaacatccccttgcccttcggagctcctctgctggctatgctcaaggtcttctacgacaaggaactagccatctccgagcacaatgtcaaggtctccagcatcttgcacaactcctccctcatcatgggcaagcagatcatcaacatcctgcccgagggctccgccgtcctgaaccccgaccgccacccctactgcctcggccccgaccagaccaccgctaccgtcccgctcttcttcaacgccaccgtgcccgtcgaagtcgagctgacccgcttcgatctcgagaccaatgccgaagagactgttaagctcactcgtcgggagatcaaggagatcgccaagctggccagcaaatgcgtcgtcgacgagggtggtgacatggcctacaaatacgactacaccatcaagaaacccggtgcctatagactaaataaggtcctcgatgaatacaagctcgaagtccagagactatcccaacccacttacatcgtaccctgtcccaaggccaaggttcgcaccgccgagtcgtccacgaaatgtcttggcgagctgtccgatctttcgctggaagtcgagggtacgccgccattgaagatttactatagtcggacgatcaatggcaaggatcacagtttccacttccagagcctgcaacccgagggcttctcgtcgccactgcttggatcccagccttcaagcctgattctcgcctcagactttacttgggctcggtcacagaaggtcccggtggggctcaacgagtctatgagcagcgcagggcaatggcagtattcggtcgatgaggtccatgatgtgttcggaaacaaggtgtcttatcagcagaccgaagagcacgacgtcaaccccaagtccaaggatctgttccagagctttgttgtccgcgagcgaccccgtgccacaatcgccggctgcgacctccgcaatcccctcaagattgccaaaggaaaaagcgtgaaactcccagtcaagatcggccgccccggcaagactcaagataatgcttcccacacgttgacgtggcagtactcacctatcgacagcctcagcaagaatggcgatcatggtgacgttgttgaggtcggctcattcaccactaagaatgtcaatgaccagcccagcatctcggcgcctggcttgtacactctcaagtctgtgtcttgtggctcatgtgagggagaaatcgaagagccgtcgtcttgcttgttgctcaatcctctggagcccacgctatcaatgcagtccgaaatgattcccgacaagtgtgctggcagctctattggacttcgtgtcaatctagacctagtcggtacgccgccattcaaagttcattacgatgtcatcagcaacaatggtcccacgcgtcaggagcgagtggatgtcaaaggtgtacgtcaacagattgagctcttgccgcggaatgcagggcattatcagtatcggttccgaagactggatgacgccatatacaaagtatcattgccagcttccaatgactactatctcgagcaaacagtcaagccacccgcgactgcctttttcaaccatgtcgcggaaagtcataatgcctgtctagatcaaccggtgaagctcagcgttaagctccttggggacgcaccgtttactctagaatgggagctggttcacgacggtaaacgcaagaccgaaaagcggaccgatatcacaactgatacctttactatcgaaactgcgccgttgtctgctggcggtgattacacagtggcccttaagagcatctccgatcgcacagagtgtaagatcaatctgaaagaggagaccaagatcttcgtcaggcgtcaaaaacctcgtgccgccttcggcttgatcgaaaacaagagaaccactactgtcgtcgaagcggctgaagtgaagattcctctgaagctctcaggcgatggcccgtggcgagtccagtatcgtaacttgaatagctctgctggcacacaaacacgcgttgccaggaccggcaatgatttcatccaagcaaaagagcgaggaatttacgaaattattgacgtagaagataaccaatgccctggtaccgttgatccgagacagagcaggttcgacgtgaactggtttcctctgcctgagatttcattggtaccaaccgatgcaatccgtgctacagacaaggcccacaactttgtaaagaaggatatatgcgaaggcgacgtggacggattcgaggttgctttcaagggatcgcctccttaccacgtcgagtatgaagtgcggcataaggctaaggttggctctggttcagtggcccgaaaggacctggatgctgtacttaacaaggcctcgatccaaatggatacggcaaaggccggagtctattcgtactcgttctctgctctttccgacaatctttacaatactaacaagaagtatgcaacacatctgacgcttgagcaaactgtcaatcccaagcccgctgcatcatttgtcaaacctggtcaaactttcaagtcctgcttggcagaagagatccaacagccgatagctgttaagctggaaggcaaagcgcctttctacctcgagcttgagatcaagcaccagcaagggacctttcccgaagtcttcagaatccccaacatccaaaccaacagctttgatgtccgcattcctcggcaatatctgaagcttggctctcagcaggtccgcatacgtaaggtgcgtgatgaccgaggatgccaaactgaaaccgacaacggaggacctgtagtccatttccaactttacgactcaccgtcgatctatcctctagagcagaggactgattactgtgtcggtgatcgtatcagctacacactgtctggcacacctccctttgaggtcaactacaatttcggaggcaagaaaatgaaggccaagtctcagacgaccaactttcgacgagtggccgagtctccaggagaattcactatcaccagcgttagtgacaaagctagtgaatgtcaggccgccgtcaacgtcaccagacacatccaccccctgcccgctgttcgtattagcaagggtcgcgtgatacaagtcgatattcacgagggtagcgaagtcgaacttgtcttcgacttcgaaggtacggctcccttcgagttcacgtatacgcgtagcacgaacgagaagaagggacagaagagccaggtcatcgagacaaggcatgaagtgagtgaggagcacacaaaggttatcatggctagtctcgagggtacctaccaagttgtttctatcaaggatcgcttctgtgcctattctctactaggtgatcagggaggctcgagggacaaggggcagaagaggttggagttttaggctgtgtggatcttgatattgaaaaatttgctgaacatggtgtggcatggagagtcggctgatttacgaaacagacgggctcgtaaaagataaagggatgggtatggtggatgttgtggccggattgttacccaccatttgcatgagcatcggcgttgggatctatttcgtgtttgggattttttatgtgttgtagagtcaaagacgagtgaaataaataactgtctgatgtcatataaagagtttggaatttgtcaagtaagttgattaattttgtgttattcctcaattcgaaacgg

SEQ ID NO: 16770 - DNA, 1803 bp, Muscodor strobelii
  misc_feature: SGI cDNA ID NO. 565589
  misc_feature: Reduced expression when VOC is produced
  misc_feature: Encodes the peptide sequence at SEQ ID NO 16771
atggtgtactgcggaaagccatcgaggggttgtcagatgtgtagaacgaggaggatcaagtgtgacgaaaccaaacctacttgtcagcaatgtgctaagtcacgaaggcaatgccctggatacaaagatgagtttgacttggtgttccgcaacgagacaacagcgacggagcgaagggcgaaaaaagccaacaagaaggccattgcgcagaaagaagagaagcaaaaaggatcatcggagggctcatccagtaaatctcgtgaggagagtgaatcatcacagcaacaaatggtcctgccatcactagaagtgtcgacggagactcaagcgagtaatcatttcatcgccaacttcattcttctaccacaacaaggccgaacagtcggacatctcgactttgtacttccgcttcttagacaagaaggacccgacagtcatattcagcatgctttcaatgcgtgtgcgatggtatttttccataatcgacgagcaaccaacgggaaactatcagaaatcgcctttcgcgaatattcagaggcacttacgaagaccaatgcggcacttcggaatcccgagtcacagcagtccgatacgactttagcggccgtgatactgttagggatgtttgagagtatatctgcgaagcagatcggcgcctttcactggggctcgcatgtcgatggagctgtgcaactggtaaaagcccgcggaaagaagcagaccaagacagacataggaaaatcgctcttcatcgcggttcggacactgatgagcgtatactgccttaccgcggcgaaagccccagtcatgggcgcagaatggtgggttggcgacacagtcttcagcaaaccggcggcggatattcagcagttgatgatcaagacaagcgaactccgagccgaggtcagccatcttatgaacaacatctcccgaacacccgactacatcgagttgatgcttgaagtgatccgaaagacacaatcacttgatcaggaagttgtcgcgtggcaagaaaccatacctgaggattggcgttacaagacgatagcatgggaggacaatgtcccgaatggagactactcaagagcagaagttttccctggtcgtgtggatatatacgaaaacatatggattgcatcgtgtgcaaattcggcacggactattcggctgattctcgcctcgctcgtcgttcgatgcgcggcatgggtttgctcgcctatcgactatcgaacgacgcctgaatatgctacggcaacgaatacatgtcgtgatgctatcaccgatcttattgcgtcggtgccttatcatttcggctggcacctgcgaaaacgagacggaggggagacacctgtattcggcgactttccctgtggtgaccagtacgcttccaaagcgttagccggctaccttctgacgtggcccttggcgtgcgctgtcacacaagactatgtcacagatgcacagagagcatggatgttggggaggctgaaaagtattgggagcgacatgggtgtcaagtatgctcttgttatattacaacttccgatacgcattccatccatgttgatccgtcgggacggactcatggcttcgcaacatggtatggcgatcaatttcgaaaagcttgtggcagctaaactagcagctcccactgcagggcattctttaaatcctcaacagcaatgggaagcattgcagaaaatgaagctagaaaaaggcaaggatgaactgatcaaacaagcttctggaaacgccagcggcggcccgcagactgtggcaaaaagatggctgagaatcgaataa

SEQ ID NO: 16771 - protein, 600 aa, Muscodor strobelii
  misc_feature: SGI Peptide ID NO. 565589
  misc_feature (9)..(48): Pfam Id: PF00172 Pfam Desc: Fungal Zn(2)-Cys(6) binuclear cluster domain
  misc_feature (9)..(43): Pfam Id: PF00172 Pfam Desc: Fungal Zn(2)-Cys(6) binuclear cluster domain
  misc_feature (1)..(584): NCBI GI: 46124009 Blast Desc: FG06382.1 [Gibberella zeae PH-1]
  misc_feature (78)..(599): NCBI GI: 39961784 Blast Desc: MGG_09562 [Magnaporthe grisea 70-15] gi|145011065|gb|EDJ95721.1| MGG_09562 [Magnaporthe grisea 70-15]
  misc_feature (102)..(561): NCBI GI: 116179630 Blast Desc: CHGG_00443 [Chaetomium globosum CBS 148.51] gi|88184740|gb|EAQ92208.1| CHGG_00443 [Chaetomium globosum CBS 148.51]
  misc_feature (21)..(576): NCBI GI: 156039451 Blast Desc: SS1G_11862 [Sclerotinia sclerotiorum 1980] gi|154697599|gb|EDN97337.1| SS1G_11862 [Sclerotinia sclerotiorum 1980]
  misc_feature (1)..(531): NCBI GI: 16944445 Blast Desc: related to negative acting factor [Neurospora crassa]
  misc_feature (1)..(527): NCBI GI: 189091812 Blast Desc: [Podospora anserina] gi|188219259|emb|CAP49239.1| protein product [Podospora anserina]
  misc_feature (1)..(531): NCBI GI: 171689852 Blast Desc: protein product [Podospora anserina] gi|170944888|emb|CAP70999.1| protein product [Podospora anserina]
  misc_feature (1)..(531): NCBI GI: 164422809 Blast Desc: NCU09615 [Neurospora crassa OR74A] gi|157069830|gb|EAA34143.2| [Neurospora crassa OR74A]
  misc_feature (1)..(490): NCBI GI: 27803016 Blast Desc: protein product [Podospora anserina]
  misc_feature (21)..(581): NCBI GI: 154294351 Blast Desc: BC1G_13948 [Botryotinia fuckeliana B05.10] gi|150844787|gb|EDN19980.1| BC1G_13948 [Botryotinia fuckeliana B05.10]
  misc_feature: Useful for introducing or modulating the production of volatile compounds
MVYCGKPSRGCQMCRTRRIKCDETKPTCQQCAKSRRQCPGYKDEFDLVFRNETTATERRAKKANKKAIAQKEEKQKGSSEGSSSKSREESESSQQQMVLPSLEVSTETQASNHFIANFILLPQQGRTVGHLDFVLPLLRQEGPDSHIQHAFNACAMVFFHNRRATNGKLSEIAFREYSEALTKTNAALRNPESQQSDTTLAAVILLGMFESISAKQIGAFHWGSHVDGAVQLVKARGKKQTKTDIGKSLFIAVRTLMSVYCLTAAKAPVMGAEWWVGDTVFSKPAADIQQLMIKTSELRAEVSHLMNNISRTPDYIELMLEVIRKTQSLDQEVVAWQETIPEDWRYKTIAWEDNVPNGDYSRAEVFPGRVDIYENIWIASCANSARTIRLILASLVVRCAAWVCSPIDYRTTPEYATATNTCRDAITDLIASVPYHFGWHLRKRDGGETPVFGDFPCGDQYASKALAGYLLTWPLACAVTQDYVTDAQRAWMLGRLKSIGSDMGVKYALVILQLPIRIPSMLIRRDGLMASQHGMAINFEKLVAAKLAAPTAGHSLNPQQQWEALQKMKLEKGKDELIKQASGNASGGPQTVAKRWLRIE

SEQ ID NO: 16772 - DNA, 3376 bp, Muscodor strobelii
  misc_feature: SGI EST ID NO. CUFF.39708.2
  misc_feature: Variant of the nucleotide sequence at SEQ ID NO 16770
gaactgatgcgcttacacgcatttcattcatttcatcgcctacagttgcattgcacaaactgtcaatatccgggtactggtcatacctcaacttcctcggtatccaatcaatattttacgtcacctgcttcacaaaggacccgggcagaatcgagtgttacgctttcaattggagtatcacgcacgacggtgccgggttgtaagtatcgcgcattctgaagtcaacgactgcaagcatatgggaggtctaggggatcgaacagaaatccgatctacgcaactgtcaaaaggcggggaaatacactgtctcaagtacacaacgacattgtgattgcatgggtggtataccatataaaacacataatatgactgtgatatcaccgtttattacattctccgtcttactttaaaggtcttagactggttccatggttgatggcttaggggtacgctactactagccttctgttcttgccgtcctatccaccttataccacgtatcattggacaccattacatttacaacctcacgcttcgaatctcttacgttagccacacggtatataccctttcatctttctggacataagacccaataggacgggctggttgagagtcagcttcacatctcgctagcaagaaatcaatagaaatcacgatcgcatcacagattctcagtatcgacttcgttagcttgatcatactggcccggtcccggcaattccgtcaagatggtgtactgcggaaagccatcgaggggttgtcagatgtgtagaacgaggaggatcaagtgtgacgaaaccaaacctacttgtcagcaatgtgctaagtcacgaaggcaatgccctggatacaaagatgagtttgacttggtgttccgcaacgagacaacagcgacggagcgaagggcgaaaaaagccaacaagaaggccattgcgcagaaagaagagaagcaaaaaggatcatcggagggctcatccagtaaatctcgtgaggagagtgaatcatcacagcaacaaatggtcctgccatcactagaagtgtcgacggagactcaagcgagtaatcatttcatcgccaacttcattcttctaccacaacaaggccgaacagtcggacatctcgactttgtacttccgcttcttagacaagaaggacccgacagtcatattcagcatgctttcaatgcgtgtgcgatggtatttttccataatcgacgagcaaccaacgggaaactatcagaaatcgcctttcgcgaatattcagaggcacttacgaagaccaatgcggcacttcggaatcccgagtcacagcagtccgatacgactttagcggccgtgatactgttagggatgtttgagagtatatctgcgaagcagatcggcgcctttcactggggctcgcatgtcgatggagctgtgcaactggtaaaagcccgcggaaagaagcagaccaagacagacataggaaaatcgctcttcatcgcggttcggacactgatgagcgtatactgccttaccgcggcgaaagccccagtcatgggcgcagaatggtgggttggcgacacagtcttcagcaaaccggcggcggatattcagcagttgatgatcaagacaagcgaactccgagccgaggtcagccatcttatgaacaacatctcccgaacacccgactacatcgagttgatgcttgaagtgatccgaaagacacaatcacttgatcaggaagttgtcgcgtggcaagaaaccatacctgaggattggcgttacaagacgatagcatgggaggacaatgtcccgaatggagactactcaagagcagaagttttccctggtcgtgtggatatatacgaaaacatatggattgcatcgtgtgcaaattcggcacggactattcggctgattctcgcctcgctcgtcgttcgatgcgcggcatgggtttgctcgcctatcgactatcgaacgacgcctgaatatgctacggcaacgaatacatgtcgtgatgctatcaccgatcttattgcgtcggtgccttatcatttcggctggcacctgcgaaaacgagacggaggggagacacctgtattcggcgactttccctgtggtgaccagtacgcttccaaagcgttagccggctaccttctgacgtggcccttggcgtgcgctgtcacacaagactatgtcacagatgcacagagagcatggatgttggggaggctgaaaagtattgggagcgacatgggtgtcaagtatgctcttgttatattacaacttccgatacgcattccatccatgttgatccgtcgggacggactcatggcttcgcaacatggtatggcgatcaatttcgaaaagcttgtggcagctaaactagcagctcccactgcagggcattctttaaatcctcaacagcaatgggaagcattgcagaaaatgaagctagaaaaaggcaaggatgaactgatcaaacaagcttctggaaacgccagcggcggcccgcagactgtggcaaaaagatggctgagaatcgaataattcgctgtgcgtgagatcatgagattgtacagtcctataagatgtggcagaacacacgatcccaccaacgctcttcaaagaaccgagccattcaaggtcacatatttaagggaatgaaacggccgaagacatcaattcgccaatgcccatcatattatacgcaatcacttgcatgacactgggctcgtattcctatgctctagatgttctgagatctctacaaaccatcggatcacggaacgcgcgaccaaatcaggcagccaaatcaataggcagtgctttgagtcaccataatactctacggagcgattgaaaatggctgggagaaagaagggcatcaccagcaatcgagcccggtacattaagtttgttaggaagtcggagccaagtagacctggtcacacagtcagccatcagtcaagacgttctaccaagtgggcattggtctcgtaggaggcatggggcttaatctacataatggtgcgtgggatggacaaaggcgagatgattgtgatgtcggaggtaatggaagaagggtggaacgggttccgccgtatctgtgcccagcagtctagtctacgcaatttgtgaccgagcattctgtacaagaggacaggccattcgtgttttaggcacttcagtgtgttctattggcagcaattacatgtcattgctagtgcgtatatggaccaagcgacttaccgcaatggcaaatcttttcaaggttgcagttgttaatgaagccgtgtacgtgtatcactattgaagctgctcgaactattagctaggatgccagttccagtcgtaggaagacaggtcttcttaaagaatcatatacccct

SEQ ID NO: 16773 - DNA, 1806 bp, Muscodor strobelii
  misc_feature: SGI cDNA ID NO. 565590
  misc_feature: Encodes the peptide sequence at SEQ ID NO 16774
atggtgtactgcggaaagccatcgaggggttgtcagatgtgtagaacgaggaggatcaagtgtgacgaaaccaaacctacttgtcagcaatgtgctaagtcacgaaggcaatgccctggatacaaagatgagtttgacttggtgttccgcaacgagacaacagcgacggagcgaagggcgaaaaaagccaacaagaaggccattgcgcagaaagaagagaagcaaaaaggatcatcggagggctcatccagtaaatctcgtgaggagagtgaatcatcacagcaacaaatggtcctgccatcactagaagtgtcgacggagactcaagcgagtaatcatttcatcgccaacttcattcttctaccacaacaaggccgaacagtcggacatctcgactttgtacttccgcttcttagacaagaaggacccgacagtcatattcagcatgctttcaatgcgtgtgcgatggtatttttccataatcgacgagcaaccaacgggaaactatcagaaatcgcctttcgcgaatattcagaggcacttacgaagaccaatgcggcacttcggaatcccgagtcacagcagtccgatacgactttagcggccgtgatactgttagggatgtttgaggtacgtatatctgcgaagcagatcggcgcctttcactggggctcgcatgtcgatggagctgtgcaactggtaaaagcccgcggaaagaagcagaccaagacagacataggaaaatcgctcttcatcgcggttcggacactgatgagcgtatactgccttaccgcggcgaaagccccagtcatgggcgcagaatggtgggttggcgacacagtcttcagcaaaccggcggcggatattcagcagttgatgatcaagacaagcgaactccgagccgaggtcagccatcttatgaacaacatctcccgaacacccgactacatcgagttgatgcttgaagtgatccgaaagacacaatcacttgatcaggaagttgtcgcgtggcaagaaaccatacctgaggattggcgttacaagacgatagcatgggaggacaatgtcccgaatggagactactcaagagcagaagttttccctggtcgtgtggatatatacgaaaacatatggattgcatcgtgtgcaaattcggcacggactattcggctgattctcgcctcgctcgtcgttcgatgcgcggcatgggtttgctcgcctatcgactatcgaacgacgcctgaatatgctacggcaacgaatacatgtcgtgatgctatcaccgatcttattgcgtcggtgccttatcatttcggctggcacctgcgaaaacgagacggaggggagacacctgtattcggcgactttccctgtggtgaccagtacgcttccaaagcgttagccggctaccttctgacgtggcccttggcgtgcgctgtcacacaagactatgtcacagatgcacagagagcatggatgttggggaggctgaaaagtattgggagcgacatgggtgtcaagtatgctcttgttatattacaacttccgatacgcattccatccatgttgatccgtcgggacggactcatggcttcgcaacatggtatggcgatcaatttcgaaaagcttgtggcagctaaactagcagctcccactgcagggcattctttaaatcctcaacagcaatgggaagcattgcagaaaatgaagctagaaaaaggcaaggatgaactgatcaaacaagcttctggaaacgccagcggcggcccgcagactgtggcaaaaagatggctgagaatcgaataa

SEQ ID NO: 16774 - protein, 601 aa, Muscodor strobelii
  misc_feature: SGI Peptide ID NO. 565590
  misc_feature (9)..(48): Pfam Id: PF00172 Pfam Desc: Fungal Zn(2)-Cys(6) binuclear cluster domain
  misc_feature (9)..(43): Pfam Id: PF00172 Pfam Desc: Fungal Zn(2)-Cys(6) binuclear cluster domain
  misc_feature (1)..(585): NCBI GI: 46124009 Blast Desc: FG06382.1 [Gibberella zeae PH-1]
  misc_feature (78)..(600): NCBI GI: 39961784 Blast Desc: MGG_09562 [Magnaporthe grisea 70-15] gi|145011065|gb|EDJ95721.1| MGG_09562 [Magnaporthe grisea 70-15]
  misc_feature (102)..(562): NCBI GI: 116179630 Blast Desc: CHGG_00443 [Chaetomium globosum CBS 148.51] gi|88184740|gb|EAQ92208.1| CHGG_00443 [Chaetomium globosum CBS 148.51]
  misc_feature (21)..(577): NCBI GI: 156039451 Blast Desc: SS1G_11862 [Sclerotinia sclerotiorum 1980] gi|154697599|gb|EDN97337.1| SS1G_11862 [Sclerotinia sclerotiorum 1980]
  misc_feature (1)..(532): NCBI GI: 16944445 Blast Desc: related to negative acting factor [Neurospora crassa]
  misc_feature (1)..(528): NCBI GI: 189091812 Blast Desc: [Podospora anserina] gi|188219259|emb|CAP49239.1| protein product [Podospora anserina]
  misc_feature (1)..(532): NCBI GI: 171689852 Blast Desc: protein product [Podospora anserina] gi|170944888|emb|CAP70999.1| protein product [Podospora anserina]
  misc_feature (1)..(532): NCBI GI: 164422809 Blast Desc: NCU09615 [Neurospora crassa OR74A] gi|157069830|gb|EAA34143.2| [Neurospora crassa OR74A]
  misc_feature (1)..(491): NCBI GI: 27803016 Blast Desc: protein product [Podospora anserina]
  misc_feature (21)..(582): NCBI GI: 154294351 Blast Desc: BC1G_13948 [Botryotinia fuckeliana B05.10] gi|150844787|gb|EDN19980.1| BC1G_13948 [Botryotinia fuckeliana B05.10]
MVYCGKPSRGCQMCRTRRIKCDETKPTCQQCAKSRRQCPGYKDEFDLVFRNETTATERRAKKANKKAIAQKEEKQKGSSEGSSSKSREESESSQQQMVLPSLEVSTETQASNHFIANFILLPQQGRTVGHLDFVLPLLRQEGPDSHIQHAFNACAMVFFHNRRATNGKLSEIAFREYSEALTKTNAALRNPESQQSDTTLAAVILLGMFEVRISAKQIGAFHWGSHVDGAVQLVKARGKKQTKTDIGKSLFIAVRTLMSVYCLTAAKAPVMGAEWWVGDTVFSKPAADIQQLMIKTSELRAEVSHLMNNISRTPDYIELMLEVIRKTQSLDQEVVAWQETIPEDWRYKTIAWEDNVPNGDYSRAEVFPGRVDIYENIWIASCANSARTIRLILASLVVRCAAWVCSPIDYRTTPEYATATNTCRDAITDLIASVPYHFGWHLRKRDGGETPVFGDFPCGDQYASKALAGYLLTWPLACAVTQDYVTDAQRAWMLGRLKSIGSDMGVKYALVILQLPIRIPSMLIRRDGLMASQHGMAINFEKLVAAKLAAPTAGHSLNPQQQWEALQKMKLEKGKDELIKQASGNASGGPQTVAKRWLRIE

SEQ ID NO: 16775 - DNA, 3376 bp, Muscodor strobelii; identical to SEQ ID NO: 16772
  misc_feature: SGI EST ID NO. CUFF.39708.2
  misc_feature: Variant of the nucleotide sequence at SEQ ID NO 16773

SEQ ID NO: 16776 - DNA, 1164 bp, Muscodor strobelii
  misc_feature: SGI cDNA ID NO. 565591
  misc_feature: Encodes the peptide sequence at SEQ ID NO 16777
atgcagacactcatgtctcgccttgctcagatattcaagtcctcaaatccaataattaactcttttgcatctgagcggacagaaaatagagcggcacttcgcggtgaagcctcggctctagctagtcagctcaggggccagaccttacatatcccggacttctcgatgattttgtcggattggccaacggcaacaaataagcatgcggagcaattaaatgttcttgttgcagagttgcttgcgcgtatcgttgtagatccgacgaaactggccgccctcaaggatgcagattttgccaggcttatgtcattatggtatcccaacgcggagtggccggagttgaatgtcgccacggcttattcggtctggatctttgtatgggacgacgaggtagacggcggggacatgaatgacgagaagctagcacaagaatactattcgaagtcacttgactacatacgctctacgctgagactcaacgagaatgaccttgacgttgtcgcaccgccacatccgaacatggccttatttgctgatgttggtcatgccttacgagagagcacggacatcctacaacgacaacgattcttcgatcatctcaaggattttgtagcaaaagttgggatggaacatagacatcgcattgcgggaacaatacccacgctcgatgtttatactagcatacggatgggatccgttggctgcgctccacagatcgctatcaccgattttatgttgaaaatgagacttcctgactctattatggattctgtggcaatgaaggacttgtggcaggagaccatccgcctatgtctagttctcaatgacgtttattctgttcaaaaagaaattactcagggctcgcttctgaatatcgtccctgtgatatttgaaaatatcgcagatcaagacgaaagaaaactaagtgttgtatcgcaacaagtacatatcatcctagaagatgctatggtgagattcgaagttgctgcacaaacgttgagtaatgttgcggccccaggctcacaattacacaagaatattgtcgactttattcaatggtgtcgctttttcatcacaggcgtgctgcattggagcttggaatcccctcggtatgcgatgacagaatgcatcaaggatgatggaactcttagtatcatgctataa

SEQ ID NO: 16777 - protein, 387 aa, Muscodor strobelii
  misc_feature: SGI Peptide ID NO. 565591
  misc_feature (32)..(387): NCBI GI: 261357544 Blast Desc: conserved [Verticillium albo-atrum VaMs.102]
  misc_feature (40)..(387): NCBI GI: 145613455 Blast Desc: MGG_01628 [Magnaporthe grisea 70-15] gi|145020524|gb|EDK04653.1| MGG_01628 [Magnaporthe grisea 70-15]
  misc_feature (43)..(387): NCBI GI: 145247728 Blast Desc: An12g10670 [Aspergillus niger] gi|134080856|emb|CAK41414.1| protein product [Aspergillus niger]
  misc_feature (38)..(369): NCBI GI: 46107136 Blast Desc: FG00451.1 [Gibberella zeae PH-1]
  misc_feature (34)..(387): NCBI GI: 256735271 Blast Desc: NECHADRAFT_74943 [Nectria haematococca mpVI 77-13-4]
  misc_feature (44)..(379): NCBI GI: 110629309 Blast Desc: cyclase [Hypocrea virens]
  misc_feature (40)..(365): NCBI GI: 145601642 Blast Desc: MGG_10516 [Magnaporthe grisea 70-15] gi|145010135|gb|EDJ94791.1| [Magnaporthe grisea 70-15]
  misc_feature (38)..(266): NCBI GI: 169775815 Blast Desc: [Aspergillus oryzae RIB40] gi|238502467|ref|XP_002382467.1| conserved [Aspergillus flavus NRRL3357] gi|83771109|dbj|BAE61241.1| protein product oryzae]
  misc_feature (37)..(387): NCBI GI: 116202291 Blast Desc: CHGG_09030 [Chaetomium globosum CBS 148.51] gi|88177548|gb|EAQ85016.1| CHGG_09030 [Chaetomium globosum CBS 148.51]
  misc_feature (34)..(371): NCBI GI: 212539422 Blast Desc: pentalenene synthase, [Penicillium marneffei ATCC 18224] gi|210067165|gb|EEA21257.1| pentalenene synthase, [Penicillium marneffei ATCC 18224]
  misc_feature (53)..(371): SWISSPROT Homolog: EC 4.2.3.7 Pentalenene synthase
MQTLMSRLAQIFKSSNPIINSFASERTENRAALRGEASALASQLRGQTLHIPDFSMILSDWPTATNKHAEQLNVLVAELLARIVVDPTKLAALKDADFARLMSLWYPNAEWPELNVATAYSVWIFVWDDEVDGGDMNDEKLAQEYYSKSLDYIRSTLRLNENDLDVVAPPHPNMALFADVGHALRESTDILQRQRFFDHLKDFVAKVGMEHRHRIAGTIPTLDVYTSIRMGSVGCAPQIAITDFMLKMRLPDSIMDSVAMKDLWQETIRLCLVLNDVYSVQKEITQGSLLNIVPVIFENIADQDERKLSVVSQQVHIILEDAMVRFEVAAQTLSNVAAPGSQLHKNIVDFIQWCRFFITGVLHWSLESPRYAMTECIKDDGTLSIML

SEQ ID NO: 16778 - DNA, 351 bp, Muscodor strobelii
  misc_feature: SGI cDNA ID NO. 565592
  misc_feature: Encodes the peptide sequence at SEQ ID NO 16779
atgccagacgcaaataccgactctaacgcgagcgccaaaagcaacgtggccgctaaggacctcaagactatcactaatgtcgctacctttttaggccgtctgagaagaaaagtcacccaagaagccgcaacattggattatcctccggatctcaaccctacaaagaaagttaagaaaacagactgggccatgggagaggacaagcatgcagttgtggagggtgttgttgaagaggatgggaacgaggcggcacatttcgcttttcaggacaaagatgaagggctaaaggctactccggtaaagcgagtgaggttcgcaattgaaggagagtccgaggatactgctggttaa

SEQ ID NO: 16779 - protein, 116 aa, Muscodor strobelii
  misc_feature: SGI Peptide ID NO. 565592
MPDANTDSNASAKSNVAAKDLKTITNVATFLGRLRRKVTQEAATLDYPPDLNPTKKVKKTDWAMGEDKHAVVEGVVEEDGNEAAHFAFQDKDEGLKATPVKRVRFAIEGESEDTAG

SEQ ID NO: 16780 - DNA, 333 bp, Muscodor strobelii
  misc_feature: SGI cDNA ID NO. 565593
  misc_feature: Elevated expression when VOC is produced
  misc_feature: Encodes the peptide sequence at SEQ ID NO 16781
atgaacacagcatctctcttctcttcacccaagcatttcggggcagacgccgacactttccgcccagaacgattcgcagatgccatccccgagaggcgaacggagatggagcggcttatagagcttggtttcggatatgggagatatcagtgccagggcaagtctgtcgcgttcatggaattgaacaaggtgttctttgagctacaccgtaatttcgatttccaattggctaacccgacaaacccttggaaatctcgaagctacagcttgttcatcgaagaggatatgtgggtgaagataacagaggcaacaaaagccgatggggaactataa

SEQ ID NO: 16781 - protein, 110 aa, Muscodor strobelii
  misc_feature: SGI Peptide ID NO. 565593
  misc_feature (1)..(102): NCBI GI: 169599495 Blast Desc: SNOG_02566 [Phaeosphaeria nodorum SN15] gi|111068177|gb|EAT89297.1| SNOG_02566 [Phaeosphaeria nodorum SN15]
  misc_feature (1)..(103): NCBI GI: 51490962 Blast Desc: cytochrome P450 monooxygenase [Botryotinia fuckeliana]
  misc_feature (13)..(104): NCBI GI: 148285639 Blast Desc: LolP [Epichloe festucae]
  misc_feature (13)..(104): NCBI GI: 148285657 Blast Desc: LolP [Neotyphodium sp. PauTG-1]
  misc_feature (13)..(104): NCBI GI: 55978170 Blast Desc: lolP-1 [Neotyphodium uncinatum]
  misc_feature (13)..(104): NCBI GI: 148285648 Blast Desc: LolP [Neotyphodium coenophialum]
  misc_feature (13)..(102): NCBI GI: 85111238 Blast Desc: NCU08112 [Neurospora crassa OR74A] gi|28925582|gb|EAA34606.1| [Neurospora crassa OR74A]
  misc_feature (2)..(103): NCBI GI: 171691196 Blast Desc: protein product [Podospora anserina] gi|170945546|emb|CAP71658.1| protein product [Podospora anserina]
  misc_feature (2)..(102): NCBI GI: 85094228 Blast Desc: NCU05848 [Neurospora crassa OR74A] gi|28921295|gb|EAA30603.1| [Neurospora crassa OR74A]
  misc_feature (1)..(103): NCBI GI: 46109770 Blast Desc: FG01767.1 [Gibberella zeae PH-1]
  misc_feature: Useful for introducing or modulating the production of volatile compounds
MNTASLFSSPKHFGADADTFRPERFADAIPERRTEMERLIELGFGYGRYQCQGKSVAFMELNKVFFELHRNFDFQLANPTNPWKSRSYSLFIEEDMWVKITEATKADGEL

SEQ ID NO: 16782 - DNA, 1855 bp, Muscodor strobelii
  misc_feature: SGI EST ID NO. CUFF.39604.1
  misc_feature: Variant of the nucleotide sequence at SEQ ID NO 16780
cacggcatgaggcgtgcggtgacacatgaacctggaatgcgataatcacgatggctgctgtttcactccgaagtctatcagcaggagatatcgctctgctttgtttcggtctccttgcaacttggtacattacttcatctgtggccgcatggtatagactgcggcacgtcccagggccgttcttgtccaagttctcctacctatggctggcaaaaacagcgcagggcgggcgaaactactacgtgcatcgagacttatgcagacgatacggcccgcttgttcgtgttggtcccaacgagctgtcgaccgatgatccggaggtgatgagacggatgggcgccgtgaggagcacatacggcaaggatccgtggtacctcggcgctagattcaacccataccacgataacgtgatcacgattctcgatatagctaaacacgacaaactgaaggctcaattagggggtgaattcggagggcgtgaaatacctcttttagaggcaggtgttgacgagcaaatcaacaccttgatcgatgtgattcggatgcgtcacgtcagtgacggaaggaatgacgagagtaatgtggtagattttgcaccattgatgagttacttgaccatggatgttatcaccaaagtggcattcggcaaggaatacggatatctcaaagctaacgcggatctttacgacttcctcaaaggagtccgtgacaactggccgaaacttgcaatggctgttgatgtcccttggattcgaaacgttatcctagctccgtggtttctgaagctattcggtccttcggtggacgacactgcgggcatggggaaactcatgagagtcgcaagggacactgttggcgaaagatatggtcccgatgctaaagttcaccaagacctattaggcacgtggatccgtaatggtctttcgcaaatccaagctgaagtcggagggctattcctagtcattgctggttcagatacgacggcctcgaccatacgtatcactatgttacacctcatgacctgcccaagggtgtacaacaagttgaagcaagagattgctaaagccatacggcagggtcaggtttcagttccgatcacatatgagcaggcaaaacgactctcatatcttcaggcgataatctacgaaggactacgaatgcgcccccctgctcccgggctatatccaaaatcagttccatcagaaggggacgtgattcacggaaagttcatccctgctggcaccgcaattggcatgaacacagcatctctcttctcttcacccaagcatttcggggcagacgccgacactttccgcccagaacgattcgcagatgccatccccgagaggcgaacggagatggagcggcttatagagcttggtttcggatatgggagatatcagtgccagggcaagtctgtcgcgttcatggaattgaacaaggtgttctttgagctacaccgtaatttcgatttccaattggctaacccgacaaacccttggaaatctcgaagctacagcttgttcatcgaagaggatatgtgggtgaagataacagaggcaacaaaagccgatggggaactataaaatctgattacttcaggtttgtggctgcaagtgatatgaacatcggctggatccgaaaatttgagtaatctttatcatttctgtactgctagtgtttcttatatgtcgttgtgtgattacattcagttaagcccaaaactcgctcgtttattacaatgcttttgaagctatttcttgatctttgacatttgggtctctgaaccaagcataggcgtacatactgagagatgggcctatgctgttccgagacggttcatcgtataggccgg

SEQ ID NO: 16783 - DNA, 1092 bp, Muscodor strobelii
  misc_feature: SGI cDNA ID NO. 565594
  misc_feature: Elevated expression when VOC is produced
  misc_feature: Encodes the peptide sequence at SEQ ID NO 16784
atggctgctgtttcactccgaagtctatcagcaggagatatcgctctgctttgtttcggtctccttgcaacttggtacattacttcatctgtggccgcatggtatagactgcggcacgtcccagggccgttcttgtccaagttctcctacctatggctggcaaaaacagcgcagggcgggcgaaactactacgtgcatcgagacttatgcagacgatacggcccgcttgttcgtgttggtcccaacgagctgtcgaccgatgatccggaggtgatgagacggatgggcgccgtgaggagcacatacggcaaggatccgtggtacctcggcgctagattcaacccataccacgataacgtgatcacgattctcgatatagctaaacacgacaaactgaaggctcaattagggggtgaattcggagggcgtgaaatacctcttttagaggcaggtgttgacgagcaaatcaacaccttgatcgatgtgattcggatgcgtcacgtcagtgacggaaggaatgacgagagtaatgtggtagattttgcaccattgatgagttacttgaccatggatgttatcaccaaagtggcattcggcaaggaatacggatatctcaaagctaacgcggatctttacgacttcctcaaaggagtccgtgacaactggccgaaacttgcaatggctgttgatgtcccttggattcgaaacgttatcctagctccgtggtttctgaagctattcggtccttcggtggacgacactgcgggcatggggaaactcatgagagtcgcaagggacactgttggcgaaagatatggtcccgatgctaaagttcaccaagacctattaggcacgtggatccgtaatggtctttcgcaaatccaagctgaagtcggagggctattcctagtcattgctggttcagatacgacggcctcgaccatacgtatcactatgttacacctcatgacctgcccaagggtgtacaacaagttgaagcaagagattgctaaagccatacggcagggtcaggtttcagttccgatcacatatgagcaggcaaaacgactctcatatcttcaggtgagttaa

SEQ ID NO: 16784 - protein, 363 aa, Muscodor strobelii
  misc_feature: SGI Peptide ID NO. 565594
  misc_feature (305)..(361): Pfam Id: PF00067 Pfam Desc: Cytochrome P450
  misc_feature (9)..(361): NCBI GI: 51490962 Blast Desc: cytochrome P450 monooxygenase [Botryotinia fuckeliana]
  misc_feature (13)..(361): NCBI GI: 154309274 Blast Desc: BC1G_07531 [Botryotinia fuckeliana B05.10] gi|150852355|gb|EDN27547.1| BC1G_07531 [Botryotinia fuckeliana B05.10]
  misc_feature (10)..(361): NCBI GI: 46109770 Blast Desc: FG01767.1 [Gibberella zeae PH-1]
  misc_feature (5)..(361): NCBI GI: 169599495 Blast Desc: SNOG_02566 [Phaeosphaeria nodorum SN15] gi|111068177|gb|EAT89297.1| SNOG_02566 [Phaeosphaeria nodorum SN15]
  misc_feature (22)..(361): NCBI GI: 39972649 Blast Desc: cytochrome P450 monooxygenase, [Magnaporthe grisea 70-15] gi|145016837|gb|EDK01267.1| cytochrome P450 monooxygenase, [Magnaporthe grisea 70-15]
  misc_feature (21)..(361): NCBI GI: 189212314 Blast Desc: pisatin demethylase [Pyrenophora tritici-repentis Pt-1C-BFP] gi|187980714|gb|EDU47340.1| pisatin demethylase [Pyrenophora tritici-repentis Pt-1C-BFP]
  misc_feature (8)..(361): NCBI GI: 171680444 Blast Desc: protein product [Podospora anserina] gi|170939849|emb|CAP65074.1| protein product [Podospora anserina]
  misc_feature (16)..(361): NCBI GI: 116194093 Blast Desc: CHGG_06764 [Chaetomium globosum CBS 148.51] gi|88182677|gb|EAQ90145.1| CHGG_06764 [Chaetomium globosum CBS 148.51]
  misc_feature (1)..(361): NCBI GI: 169615603 Blast Desc: SNOG_10960 [Phaeosphaeria nodorum SN15] gi|111060339|gb|EAT81459.1| SNOG_10960 [Phaeosphaeria nodorum SN15]
  misc_feature (16)..(363): NCBI GI: 46139967 Blast Desc: FG11498.1 [Gibberella zeae PH-1]
  misc_feature (37)..(361): SWISSPROT Homolog: EC 1.14.13.12 Benzoate 4-monooxygenase
  misc_feature: Useful for introducing or modulating the production of volatile compounds
MAAVSLRSLSAGDIALLCFGLLATWYITSSVAAWYRLRHVPGPFLSKFSYLWLAKTAQGGRNYYVHRDLCRRYGPLVRVGPNELSTDDPEVMRRMGAVRSTYGKDPWYLGARFNPYHDNVITILDIAKHDKLKAQLGGEFGGREIPLLEAGVDEQINTLIDVIRMRHVSDGRNDESNVVDFAPLMSYLTMDVITKVAFGKEYGYLKANADLYDFLKGVRDNWPKLAMAVDVPWIRNVILAPWFLKLFGPSVDDTAGMGKLMRVARDTVGERYGPDAKVHQDLLGTWIRNGLSQIQAEVGGLFLVIAGSDTTASTIRITMLHLMTCPRVYNKLKQEIAKAIRQGQVSVPITYEQAKRLSYLQVS

SEQ ID NO: 16785 - DNA, 1855 bp, Muscodor strobelii; identical to SEQ ID NO: 16782
  misc_feature: SGI EST ID NO. CUFF.39604.1
  misc_feature: Variant of the nucleotide sequence at SEQ ID NO 16783

SEQ ID NO: 16786 - DNA, 1149 bp, Muscodor strobelii
  misc_feature: SGI cDNA ID NO. 565595
  misc_feature: Encodes the peptide sequence at SEQ ID NO 16787
atggctgctgtttcactccgaagtctatcagcaggagatatcgctctgctttgtttcggtctccttgcaacttggtacattacttcatctgtggccgcatggtatagactgcggcacgtcccagggccgttcttgtccaagttctcctacctatggctggcaaaaacagcgcagggcgggcgaaactactacgtgcatcgagacttatgcagacgatacggcccgcttgttcgtgttggtcccaacgagctgtcgaccgatgatccggaggtgatgagacggatgggcgccgtgaggagcacatacggcaaggatccgtggtacctcggcgctagattcaacccataccacgataacgtgatcacgattctcgatatagctaaacacgacaaactgaaggctcaattagggggtgaattcggagggcgtgaaatacctcttttagaggcaggtgttgacgagcaaatcaacaccttgatcgatgtgattcggatgcgtcacgtcagtgacggaaggaatgacgagagtaatgtggtagattttgcaccattgatgagttacttgaccatggatgttatcaccaaagtggcattcggcaaggaatacggatatctcaaagctaacgcggatctttacgacttcctcaaaggagtccgtgacaactggccgaaacttgcaatggctgttgatgtcccttggattcgaaacgttatcctagctccgtggtttctgaagctattcggtccttcggtggacgacactgcgggcatggggaaactcatgagagtcgcaagggacactgttggcgaaagatatggtcccgatgctaaagttcaccaagacctattaggcacgtggatccgtaatggtctttcgcaaatccaagctgaagtcggagggctattcctagtcattgctggttcagatacgacggcctcgaccatacgtatcactatgttacacctcatgacctgcccaagggtgtacaacaagttgaagcaagagattgctaaagccatacggcagggtcaggtttcagttccgatcacatatgagcaggcaaaacgactctcatatcttcaggactacgaatgcgcccccctgctcccgggctatatccaaaatcagttccatcagaaggggacgtga

SEQ ID NO: 16787 - protein, 382 aa, Muscodor strobelii
  misc_feature: SGI Peptide ID NO. 565595
  misc_feature (305)..(361): Pfam Id: PF00067 Pfam Desc: Cytochrome P450
  misc_feature (9)..(361): NCBI GI: 51490962 Blast Desc: cytochrome P450 monooxygenase [Botryotinia fuckeliana]
  misc_feature (13)..(361): NCBI GI: 154309274 Blast Desc: BC1G_07531 [Botryotinia fuckeliana B05.10] gi|150852355|gb|EDN27547.1| BC1G_07531 [Botryotinia fuckeliana B05.10]
  misc_feature (10)..(361): NCBI GI: 46109770 Blast Desc: FG01767.1 [Gibberella zeae PH-1]
  misc_feature (5)..(361): NCBI GI: 169599495 Blast Desc: SNOG_02566 [Phaeosphaeria nodorum SN15] gi|111068177|gb|EAT89297.1| SNOG_02566 [Phaeosphaeria nodorum SN15]
  misc_feature (22)..(372): NCBI GI: 39972649 Blast Desc: cytochrome P450 monooxygenase, [Magnaporthe grisea 70-15] gi|145016837|gb|EDK01267.1| cytochrome P450 monooxygenase, [Magnaporthe grisea 70-15]
  misc_feature (8)..(361): NCBI GI: 171680444 Blast Desc: protein product [Podospora anserina] gi|170939849|emb|CAP65074.1| protein product [Podospora anserina]
  misc_feature (21)..(361): NCBI GI: 189212314 Blast Desc: pisatin demethylase [Pyrenophora tritici-repentis Pt-1C-BFP] gi|187980714|gb|EDU47340.1| pisatin demethylase [Pyrenophora tritici-repentis Pt-1C-BFP]
  misc_feature (16)..(361): NCBI GI: 116194093 Blast Desc: CHGG_06764 [Chaetomium globosum CBS 148.51] gi|88182677|gb|EAQ90145.1| CHGG_06764 [Chaetomium globosum CBS 148.51]
  misc_feature (1)..(370): NCBI GI: 169615603 Blast Desc: SNOG_10960 [Phaeosphaeria nodorum SN15] gi|111060339|gb|EAT81459.1| SNOG_10960 [Phaeosphaeria nodorum SN15]
  misc_feature (16)..(361): NCBI GI: 46139967 Blast Desc: FG11498.1 [Gibberella zeae PH-1]
  misc_feature (37)..(361): SWISSPROT Homolog: EC 1.14.13.12 Benzoate 4-monooxygenase
MAAVSLRSLSAGDIALLCFGLLATWYITSSVAAWYRLRHVPGPFLSKFSYLWLAKTAQGGRNYYVHRDLCRRYGPLVRVGPNELSTDDPEVMRRMGAVRSTYGKDPWYLGARFNPYHDNVITILDIAKHDKLKAQLGGEFGGREIPLLEAGVDEQINTLIDVIRMRHVSDGRNDESNVVDFAPLMSYLTMDVITKVAFGKEYGYLKANADLYDFLKGVRDNWPKLAMAVDVPWIRNVILAPWFLKLFGPSVDDTAGMGKLMRVARDTVGERYGPDAKVHQDLLGTWIRNGLSQIQAEVGGLFLVIAGSDTTASTIRITMLHLMTCPRVYNKLKQEIAKAIRQGQVSVPITYEQAKRLSYLQDYECAPLLPGYIQNQFHQKGT

SEQ ID NO: 16788 - DNA, 1855 bp, Muscodor strobelii; identical to SEQ ID NO: 16782
  misc_feature: SGI EST ID NO. CUFF.39604.1
  misc_feature: Variant of the nucleotide sequence at SEQ ID NO 16786

SEQ ID NO: 16789 - DNA, 1095 bp, Muscodor strobelii
  misc_feature: SGI cDNA ID NO. 565596
  misc_feature: Encodes the peptide sequence at SEQ ID NO 16790
atgagtttcgaaacatcgaagccaaactctcaagccagaaggaagttcagctggtggtggtggtgggagatcgcgtctcttatcttcgccatcgcttgtttaaccacgctcttgggcatactcgttgggtacaatggtatcgcgttggcaaaatggactttcttcttgcagcccaatactgtgatatcggttattaccactgctatcaaaacagctattatgctctccgtctcaatgtgcttcagccagctcaaatggcatcatttcatcacgccccgtcgcctcgatgagctgcaagtgctggacaatgcaagtcgcgggccgtggggcgcactaatcatattgttgcgcatgcgcaacatcaacctgttaactatcgggctctcgattgtaactttagctgcccttacgatcgagccgctcgcgcaacagcttttgacgtttccctcccgagaggcagagctcgagggtgtactcagcgaaattggcgtcgcccataatttcgacgcaaagacctatcagggacttaataacatacgggcggaaagtaacgctctggaatttttatggaacgagatatatggcgctctaggatctgatcttcatatcgctagcaattcgacggctgcccgatacggacttacaatgccttgggatgacaccagttggttcttatactacagcaccgatctggaaacggtattccaaaacattgctaccgttctttcaaacatggttcgaataccgcacacgggagagaacatgaatgcgacagtgatcaggggccaaagcctgggcatcgaaacgtacatccatgttcgttggcaatgggctttgttcccaatcatcgagacggcgctggcagtggtcctcctcggggcgaccatcattgctaccgtgagactacgccgcccgttgttgaagtcttcggtcaatggtctgctgttccatggcctggacggatggacagccgcggacacggaacgtaacatggatggagtggagacggcagagaagctagatgcactttccaagcggttcaaagtgtactttcgcgacgatgatgaatttggactgagatttgttcgtagttag

SEQ ID NO: 16790 - protein, 364 aa, Muscodor strobelii
  misc_feature: SGI Peptide ID NO. 565596
  misc_feature (5)..(170): NCBI GI: 238495102 Blast Desc: conserved [Aspergillus flavus NRRL3357] gi|220695437|gb|EED51780.1| conserved [Aspergillus flavus NRRL3357]
  misc_feature (19)..(201): NCBI GI: 256726548 Blast Desc: NECHADRAFT_79608 [Nectria haematococca mpVI 77-13-4]
  misc_feature (1)..(160): NCBI GI: 255941378 Blast Desc: Pc16g11550 [Penicillium chrysogenum Wisconsin 54-1255] gi|211586081|emb|CAP93825.1| Pc16g11550 [Penicillium chrysogenum Wisconsin 54-1255]
  misc_feature (20)..(168): NCBI GI: 169785503 Blast Desc: [Aspergillus oryzae RIB40] gi|83775960|dbj|BAE66079.1| protein product [Aspergillus oryzae]
  misc_feature (20)..(227): NCBI GI: 145612273 Blast Desc: MGG_08207 [Magnaporthe grisea 70-15] gi|145019468|gb|EDK03696.1| MGG_08207 [Magnaporthe grisea 70-15]
  misc_feature (20)..(151): NCBI GI: 145243784 Blast Desc: An11g04090 [Aspergillus niger] gi|134079085|emb|CAK48394.1| protein product [Aspergillus niger]
  misc_feature (13)..(329): NCBI GI: 154278539 Blast Desc: [Ajellomyces capsulatus NAm1] gi|150413668|gb|EDN09051.1| [Ajellomyces capsulatus NAm1]
  misc_feature (20)..(180): NCBI GI: 67525657 Blast Desc: AN3286.2 [Aspergillus nidulans FGSC A4] gi|40744074|gb|EAA63254.1| AN3286.2 [Aspergillus nidulans FGSC A4] gi|259485747|tpe|CBF83029.1| TPA: conserved [Aspergillus FGSC
  misc_feature (1)..(148): NCBI GI: 242787121 Blast Desc: conserved [Talaromyces stipitatus ATCC 10500] gi|218721087|gb|EED20506.1| conserved [Talaromyces stipitatus ATCC 10500]
  misc_feature (19)..(266): NCBI GI: 169599855 Blast Desc: SNOG_02753 [Phaeosphaeria nodorum SN15] gi|111068364|gb|EAT89484.1| SNOG_02753 [Phaeosphaeria nodorum SN15]
MSFETSKPNSQARRKFSWWWWWEIASLIFAIACLTTLLGILVGYNGIALAKWTFFLQPNTVISVITTAIKTAIMLSVSMCFSQLKWHHFITPRRLDELQVLDNASRGPWGALIILLRMRNINLLTIGLSIVTLAALTIEPLAQQLLTFPSREAELEGVLSEIGVAHNFDAKTYQGLNNIRAESNALEFLWNEIYGALGSDLHIASNSTAARYGLTMPWDDTSWFLYYSTDLETVFQNIATVLSNMVRIPHTGENMNATVIRGQSLGIETYIHVRWQWALFPIIETALAVVLLGATIIATVRLRRPLLKSSVNGLLFHGLDGWTAADTERNMDGVETAEKLDALSKRFKVYFRDDDEFGLRFVRS

SEQ ID NO: 16791 - DNA, 324 bp, Muscodor strobelii
  misc_feature: SGI cDNA ID NO. 565597
  misc_feature: Encodes the peptide sequence at SEQ ID NO 16792
atggcctggggtagcaaatcagccaaagtcccggcgaggacctcatctatcagtactgtcctgccactcctcatcctcctcatcgtcgtcgccgccgtcggcttcgtctgctaccagatctacctcggcgccaccaagatccgccagaatgccgagaaccagttcgcctcgcgcaatgtcgtcttcacgaaagatggtatgaaggtcggcgtcaagcacattgagcaggagaaatacgtcgacaagacgcagtcttggcttgtgaaggcttggaatgaaggttccaagagtgatcataattctgcggccgtgaagaggaagtga

SEQ ID NO: 16792 - protein, 107 aa, Muscodor strobelii
  misc_feature: SGI Peptide ID NO. 565597
  misc_feature (1)..(92): NCBI GI: 154294349 Blast Desc: BC1G_13947 [Botryotinia fuckeliana B05.10] gi|150844786|gb|EDN19979.1| BC1G_13947 [Botryotinia fuckeliana B05.10]
  misc_feature (13)..(107): NCBI GI: 256732435 Blast Desc: [Nectria haematococca mpVI 77-13-4]
  misc_feature (12)..(107): NCBI GI: 46124011 Blast Desc: FG06383.1 [Gibberella zeae PH-1]
  misc_feature (1)..(92): NCBI GI: 189091814 Blast Desc: [Podospora anserina] gi|188219260|emb|CAP49240.1| protein product [Podospora anserina]
  misc_feature (1)..(107): NCBI GI: 116179628 Blast Desc: CHGG_00442 [Chaetomium globosum CBS 148.51] gi|88184739|gb|EAQ92207.1| CHGG_00442 [Chaetomium globosum CBS 148.51]
  misc_feature (1)..(95): NCBI GI: 39961794 Blast Desc: [Magnaporthe grisea 70-15] gi|145011066|gb|EDJ95722.1| [Magnaporthe grisea 70-15]
  misc_feature (1)..(92): NCBI GI: 156039453 Blast Desc: SS1G_11863 [Sclerotinia sclerotiorum 1980] gi|154697600|gb|EDN97338.1| SS1G_11863 [Sclerotinia sclerotiorum 1980]
  misc_feature (12)..(107): NCBI GI: 85093527 Blast Desc: NCU02390 [Neurospora crassa OR74A] gi|28921160|gb|EAA30474.1| [Neurospora crassa OR74A]
  misc_feature (20)..(92): NCBI GI: 189191550 Blast Desc: conserved [Pyrenophora tritici-repentis Pt-1C-BFP] gi|187973720|gb|EDU41219.1| conserved [Pyrenophora tritici-repentis Pt-1C-BFP]
  misc_feature (33)..(92): NCBI GI: 27803017 Blast Desc: protein product [Podospora anserina]
MAWGSKSAKVPARTSSISTVLPLLILLIVVAAVGFVCYQIYLGATKIRQNAENQFASRNVVFTKDGMKVGVKHIEQEKYVDKTQSWLVKAWNEGSKSDHNSAAVKRK

SEQ ID NO: 16793 - DNA, 1112 bp, Muscodor strobelii
  misc_feature: SGI EST ID NO. CUFF.39601.0
  misc_feature: Variant of the nucleotide sequence at SEQ ID NO 16791
gaccggcaccgtggctggctgaaacaaccgattttgattcaaacaacccatccagcgatggacctgccgacgttgactgtttaaggcagtttgaacagcttatactcgtacgcacccgagtcattcgtgacgcaaacatcactacttcacatatcaatataatagcaataatcatcctcttcctacaggtccctatttcgcaaagattgtatttaagctacaactcattgtcctctctcttcgccgtttaacaaagaaaatccctaagcttcaatttgttaccaaatcgtaggactctctggaggaccatctcattaatctcgtcgcacccctgtccacccgtcgcaccaaagccgtacccgcccctccaccgtcttgcagacctccaagtacttcgaagggcctcccatttcccattgtcagctgtgcttcccatccccaaatcccttcttgccagaaacaaaaacggtggaatattgcgatcatggcctggggtagcaaatcagccaaagtcccggcgaggacctcatctatcagtactgtcctgccactcctcatcctcctcatcgtcgtcgccgccgtcggcttcgtctgctaccagatctacctcggcgccaccaagatccgccagaatgccgagaaccagttcgcctcgcgcaatgtcgtcttcacgaaagatggtatgaaggtcggcgtcaagcacattgagcaggagaaatacgtcgacaagacgcagtcttggcttgtgaaggcttggaatgaaggttccaagagtgatcataattctgcggccgtgaagaggaagtgaggtgatcgagggttcgacggttcgagatatagcatgtgcgaatctcatggtagacaatggggagagaagcatatgtctgcgtctcggtagttagtacagacttaaagtgcaagctacaacaaggaatttcaacttcaccaaacccgcagcatgggatggaattggaatctgcagattgctctcgttacgagataatcttaatgaaacgtgtcttgcaatctgcgactagttattgaaattggaagagcctttcgtcttctaaggtttgcgcttatctgagtttctaaatcatagcaagattcac

SEQ ID NO: 16794 - DNA, 172 bp, Muscodor strobelii
  misc_feature: SGI cDNA ID NO. 565598
  misc_feature: Encodes the peptide sequence at SEQ ID NO 16795
atggcctcaccatcagcgtcaacgtcggcgtcggcagctgcctcgagcctgacccgaccacgcatcgccatcgctgtcgtctcggccttcgtcgccgcctcgctgggctactcctgctaccactacctccggcccgactcctctctctctctcgaccgacccgacgggccga

SEQ ID NO: 16795 - protein, 57 aa, Muscodor strobelii
  misc_feature: SGI Peptide ID NO. 565598
MASPSASTSASAAASSLTRPRIAIAVVSAFVAASLGYSCYHYLRPDSSLSLDRPDGP

SEQ ID NO: 16796 - DNA, 479 bp, Muscodor strobelii
  misc_feature: SGI EST ID NO. CUFF.39606.1
  misc_feature: Variant of the nucleotide sequence at SEQ ID NO 16794
cttcatattgaggagtgacgctgcttgagccatctccagcgctccgcgaggtatgaagagtccaggcaatgcctagatgcacctgtatacacattcttgcctcgtttttctgtcctagacattgaaacataaatccccatcgcgacgcgccgctgcagaaatagctaacgacgcgatccagctcgggctgctgctcgcgtgttgaatttttcggctgcttgatatcccaccgaaccacgctttatctaccagcttgttcacttgccgactgcctttcgtctctgcctgtcgtcgtggccggcaatggcccgtgagctgccgccatggcctcaccatcagcgtcaacgtcggcgtcggcagctgcctcgagcctgacccgaccacgcatcgccatcgctgtcgtctcggccttcgtcgccgcctcgctgggctactcctgctaccactacctccggcccgactcctctctctctctcgac

SEQ ID NO: 16797 - DNA, 864 bp, Muscodor strobelii
  misc_feature: SGI cDNA ID NO. 565599
  misc_feature: Encodes the peptide sequence at SEQ ID NO 16798
atggcacccgtttccgccttaggaacccatgtcaccgaacacttagtccgcaacctcaaagccgccatcaccgcagccgggccagcggtcgccagtctcgcaagccggaatgtgctcgcacagcgcgatctcaccgtgaggagcgactcgcagaaggttacactgggaattatcgccgtctacgttgttgtcatcgctatcctttggaatgtgccttacgtaagatggtcgctatggcccttcaagatgctcgtcattgcctttcatgagtttgggcacgccataacggcagtcctcaccggtgggagggtgaagtccatctcgcttgaccctcgtgagggcggtgttacgcatatggtcggtggaagaagcgctctcaccctacccgccggatacctgggctcgtcgctcatcggcgccatcctgattttcaccggttttgatatcgtagcaagcaagatcgtcagcatcgggttgggagtctgctttctccttactctttggtggggaaagagagactggttaacgattatcacgattttgcttgctgttgggcttctcatcgccagttggttcatcgttcatgccgaagctttgcgatttgtcgtcttatttatcggcgttatgagctcactttacagcgtctgggatatttgtgatgatctcatcctccgcaaagtgaacagctctgatgctagtgtttttgcccagcgctatggaggttcttcgcagtgctggggtgtcatttggtcttttatctcggtcctctttcttgctgctggtattattgcaggcatcgcggcatttcctcaatcttttgaggaacaggaaaaagactccaagaatttcttacctacgaagtga

SEQ ID NO: 16798 - protein, 287 aa, Muscodor strobelii
  misc_feature: SGI Peptide ID NO. 565599
  misc_feature (29)..(286): NCBI GI: 46116638 Blast Desc: FG04161.1 [Gibberella zeae PH-1]
  misc_feature (20)..(287): NCBI GI: 115385072 Blast Desc: conserved [Aspergillus terreus NIH2624] gi|114196775|gb|EAU38475.1| conserved [Aspergillus terreus NIH2624]
  misc_feature (1)..(287): NCBI GI: 121705000 Blast Desc: conserved [Aspergillus clavatus NRRL 1] gi|119398909|gb|EAW09337.1| conserved [Aspergillus clavatus NRRL 1]
  misc_feature (41)..(287): NCBI GI: 11595731 Blast Desc: conserved [Neurospora crassa]
  misc_feature (25)..(287): NCBI GI: 242781025 Blast Desc: conserved [Talaromyces stipitatus ATCC 10500] gi|218719864|gb|EED19283.1| conserved [Talaromyces stipitatus ATCC 10500]
  misc_feature (22)..(287): NCBI GI: 189193887 Blast Desc: conserved [Pyrenophora tritici-repentis Pt-1C-BFP] gi|187978846|gb|EDU45472.1| conserved [Pyrenophora tritici-repentis Pt-1C-BFP]
  misc_feature (25)..(287): NCBI GI: 212526480 Blast Desc: conserved [Penicillium marneffei ATCC 18224] gi|210072795|gb|EEA26882.1| conserved [Penicillium marneffei ATCC 18224]
  misc_feature (1)..(287): NCBI GI: 119492738 Blast Desc: NFIA_069620 [Neosartorya fischeri NRRL 181] gi|119411848|gb|EAW21791.1| conserved [Neosartorya fischeri NRRL 181]
  misc_feature (1)..(287): NCBI GI: 71000319 Blast Desc: conserved [Aspergillus fumigatus Af293] gi|66852491|gb|EAL92816.1| conserved [Aspergillus fumigatus Af293]
  misc_feature (1)..(287): NCBI GI: 159127868 Blast Desc: conserved [Aspergillus fumigatus A1163]
MAPVSALGTHVTEHLVRNLKAAITAAGPAVASLASRNVLAQRDLTVRSDSQKVTLGIIAVYVVVIAILWNVPYVRWSLWPFKMLVIAFHEFGHAITAVLTGGRVKSISLDPREGGVTHMVGGRSALTLPAGYLGSSLIGAILIFTGFDIVASKIVSIGLGVCFLLTLWWGKRDWLTIITILLAVGLLIASWFIVHAEALRFVVLFIGVMSSLYSVWDICDDLILRKVNSSDASVFAQRYGGSSQCWGVIWSFISVLFLAAGIIAGIAAFPQSFEEQEKDSKNFLPTK

SEQ ID NO: 16799 - DNA, 3504 bp, Muscodor strobelii
  misc_feature: SGI EST ID NO. CUFF.39689.0
  misc_feature: Variant of the nucleotide sequence at SEQ ID NO 16797
gacgacttgtttaagtagtatgtgcttgcaacatttgtagctgcattcgcctattgatcatgtaatgaaacatgtggctttctcgctctttttctcttccagtttgattgtgcatcattacgctgttcaacgtttctaagcacagtttgacttcctacacttcaagcatccaaggtattttctagcgtaaggtataggtacgtacgattcgagaatggatgcaaccaggaatgatattcgcgaacgagggtttaatcgacctgagatttatgaatactaacagtgataatccacaatggctttcaccataactgaagacatatgtgtggcctcgtgtcgataatcagcgccttcagaatcgaaccttttgattcagggctccaccacgatcgatcactgccacagcaaaacaaggcgcagcaacgtacaccctccacagaacatcaaacatgacagccaagatctcggcaggcgtgagggtctcgagggcagtttcaggccactggcgccggcatttgactctgtgggtgggcaacccatgggcaaaagccaccaaacagagcacgagcgcaaaccagagcatcgcccaccctgtccacgtcatcctgcttccgcgtcgttacgagtctcagctcggcccctactgccgtagatctacatcttcgtcgagaaaaaaacaaaacatagcataatcaagaacttcagcttttctgtttccacaagatcctacgcttgactgtgacatatctcccttgccgctcgtttatctaaacctcatttacattccgattctctcaactatctatccgctaaaatcacagcacggaatctccccagcggcccctagaaaaaccaccgatggcacccgtttccgccttaggaacccatgtcaccgaacacttagtccgcaacctcaaagccgccatcaccgcagccgggccagcggtcgccagtctcgcaagccggaatgtgctcgcacagcgcgatctcaccgtgaggagcgactcgcagaaggttacactgggaattatcgccgtctacgttgttgtcatcgctatcctttggaatgtgccttacgtaagatggtcgctatggcccttcaagatgctcgtcattgcctttcatgagtttgggcacgccataacggcagtcctcaccggtgggagggtgaagtccatctcgcttgaccctcgtgagggcggtgttacgcatatggtcggtggaagaagcgctctcaccctacccgccggatacctgggctcgtcgctcatcggcgccatcctgattttcaccggttttgatatcgtagcaagcaagatcgtcagcatcgggttgggagtctgctttctccttactctttggtggggaaagagagactggttaacgattatcacgattttgcttgctgttgggcttctcatcgccagttggttcatcgttcatgccgaagctttgcgatttgtcgtcttatttatcggcgttatgagctcactttacagcgtctgggatatttgtgatgatctcatcctccgcaaagtgaacagctctgatgctagtgtttttgcccagcgctatggaggttcttcgcagtgctggggtgtcatttggtcttttatctcggtcctctttcttgctgctggtattattgcaggcatcgcggcatttcctcaatcttttgaggaacaggaaaaagactccaagaatttcttacctacgaagtgaagattgcatcgccacgatattatcataatcaaggacgagattaagtaggaggacatacgcatttctattatccagcagggcgtagatgtctggcaagattgccatgcgacatcatacgtataatcagacatgcctaagtaatgacaccattcatcaacatcataatctttcaagttgtgtaggttgtgtagaggctcgctgtcgaggctgtcaagaatcctaagtgtttgaagaatcgattacgatgaagaatcaactataggataggcacatttgatgactcgtatggtgaaatggaccagttcttagacttcaaccaaattatctttcagctcgttgcgatacttgtgtttgcaattgccagaagctgactgcgcaacaacttcatgcccttctttgacggatcatttccatcgtcaaacgaaacctcaaattgcacatctcccacaattctgatacgcgtcacagtggcgatcgtaacagccaaccgcatgacatcatccacaataacacaaacatgttgtcgtccgtcgggaggagtgctagtactccaatagatctgctgaaacccctgactatcttctaccgtgtcttgtgctgacgagctcgcgtcggccggtctttgcttgggtagcgtgaggtcaaatacgattgacgacgagggaggtatatttctcaacgcctgacgccacgccttactaagcgcagttagatctagatactcgtcgccgataccattagttgcgcggccgttcgaatcacgaaccattttcgaagatgggttgcggcaggccgcaagcatggaggggttggcaagtggttggagaaggactagtttcagttgcccagttggcgattgtgactgtggtcgtgcttcactctcaggcatttcgatggccatattttcaaggtcaattggtttggtggcatcttgaagctgacttggatcggtgattgttcgaacttgttggcttgccattatggtgtccggagtaatcgtgttttttcaatgatataaatttggcccagcgtgaagtatcccttaatcaaataatgaagctgctcctgatggccgagtataatgagcaggaaaatattagagccaagcggagtgagttgatgtataattaaacacgtgcgagtactcgttgacaatgtccgattggttcatttgaaactgctgcctgcggtccagtcatcgatgacctcgtgggcaacaaatgcttaatcaagcacccgcaatcccaagagcgataactactttacattcacgagcttcctaagcaatctcatctctatttctttgattgatgcattgaaaccccaattgaaacgcgctgagtcttgtctcaccgctgttcctcctcatagatgcactacgtttataattatgacaacacaaccatccttccatagattagaagtcttcagcacagcacaaatctacgatgcataagagatatcgccttgatgtgttcattgcttcatggcaaaataatggatttggcctaagggagctagaaatgaacgctgactgaaattataagccctgcgagttgtttcgactaggacgaaaatgacaagcagtttagagtcagattatcatgagatatcaagcttttataaccaagagcccattgtgtcattgaagttatatattgctctgcgaggatctagctctacaccgttccccttatgaccaccatcatatccaccatgctctagagactattccttaacaagagtcatgtccttcatcgtcatccttccgcgagccttaga

SEQ ID NO: 16800 - DNA, 249 bp, Muscodor strobelii
  misc_feature: SGI cDNA ID NO. 565600
  misc_feature: Encodes the peptide sequence at SEQ ID NO 16801
atggctactcccccagatggaaaagcccttccgcaaacgtcacctcgaaagctgttcaaaggaaccctacgcccaccctgcattccgccaacacgtaaatcatacactttgaacccggcgccgatcggagatcttgtcatcaaggacccagctgtcacacgtcctccgccaactgccatcaactcggctgccgcgcgccagccatttgtcgatccagcagcactgcatcggcgtccggcctgtcactga

SEQ ID NO: 16801 - protein, 82 aa, Muscodor strobelii
  misc_feature: SGI Peptide ID NO. 565600
MATPPDGKALPQTSPRKLFKGTLRPPCIPPTRKSYTLNPAPIGDLVIKDPAVTRPPPTAINSAAARQPFVDPAALHRRPACH

SEQ ID NO: 16802 - DNA, 1701 bp, Muscodor strobelii
  misc_feature: SGI EST ID NO. CUFF.39611.0
  misc_feature: Variant of the nucleotide sequence at SEQ ID NO 16800
gatcaattccagatgggacgtacttttgcaacaaatctaaccttgacaatccgttggtgctactgtacagattacattaacaagatcggtgcagactattgttatccgatacttagtgtaagcaaggctccaggcacaaagatgaagtcacttcggcatatgtcgtaaaaccctgacccagatcgttcgtcagcgtagtcgccagccgaagctgacagtgcaaatgactattcaggtcagcgtcactacattagataccttacctaggattttcgtccgactcttcgcagtcgggatgggctagaaacatgccagactgacaatggtccagctgaaccaacaacaaagagacttgatattatgattccaattctctcggctacgactatacatcaagatacatcacggcgaaagtctcgtgaagtatcaactgcctcactatacttcccctgaacttgtgccattatggctactcccccagatggaaaagcccttccgcaaacgtcacctcgaaagctgttcaaaggaaccctacgcccaccctgcattccgccaacacgtaaatcatacactttgaacccggcgccgatcggagatcttgtcatcaaggacccagctgtcacacgtcctccgccaactgccatcaactcggctgccgcgcgccagccatttgtcgatccagcagcactgcatcggcgtccggcctgtcactgaaatgtgttctcattctgttccatgacaaccctagccttctccatggctgacttagtgtgcgggagaccatgcaactatccgcgagcttatttatgcaatccatgcggggagggggccaattttgcacatgcacctagtcctcctatgaaagaatgaccattcataacgcctctcggaaactacatgacgcctcttgccgaactccaggcatctcggccggtcagtcggaaccgaagacaacgggttcgactccatccgtgctcccgaaagcatcccaccagtcgtctatactctacgagcctagatgctcagccttctttaccaccttggggccgatttcttcaaacatgtacagtcgcattccaaatcgtacgaaacctcccgagaactccaattttccaacaagcggaagatgcggcccatcgcagcattcgtaagctattactcgactacctatgattgcattccaacacaccgttcaccggccggccccagactcaagtcttcgtgggccatagtagacatacagtgacgatgcaaaaccaataccgccctctataacgtgacggcatttgtcaggtctattttaattgatatcatcgtgttggttcgccaggggcgtccaatatcgaatatcaacacttggtcgtgcttgtacagtagattcgggatatggagggcttctacacgttaagacgcaagaaacagggttctaggcttgaatcctcatgcatctaattggatatcacacaagtttacagttcactatctgtgtctcccaatcactgcaatatccctgctacaacagccgcgcaatgttaaatggctgtcgattgtctcattgcaagtctttgtatatactgtactgatcttgtgtatggacgtaatccgttgcattcccatagatggggataactatagtccgaagttcaaggtgtcgtccttggagctgtctccagtcgttcgtgaagttacactagacacaca

SEQ ID NO: 16803 - DNA, 2175 bp, Muscodor strobelii
  misc_feature: SGI cDNA ID NO. 565601
  misc_feature: Encodes the peptide sequence at SEQ ID NO 16804
atggatggccacatcgtcgccggcggcgccatctcggcaccgtccatgagcccaacgagccctatgagcctccatcgccatggatccgtcaagcgaaagcgcagcatcgtcgacagcagccccggcagtgtcggcgatgaggaccacttgatgatggagccggagaagaagcggcagcctggcgtcaagcgtgcctgcaatgagtgtcggcagcaaaaactacggtgtgatgtcgtacaggaaccgtttcagagctgctcgcgctgcaaccgtctgaagctcgagtgtaaaatcgagtctaatttcaagcgcatcggcaagcggtcgaaacatgccgagatggagaaggaaattgatcggttacgtcgcaacattgcccaagccaaggtccagggctacatcatggacgaagaagaagacctccactctcagctgcagtcccccattgcgaatagcaactactcacatactcggaacccctcactcatggggtccgatgaggccgtaacctctctcctaactctaaagaggggtggctcctacggcatgcccgccacccattatgcttacgagctagaaaatgtgcgtctgacggaacaggatgtccacgggctgttccaggagttcttttcacattaccatccattcctcccgttcctccaagaaacacagtcgccagatttgtattaccagcagcacgcgcttctcttttggactatcattgccattgcctctcgacgatatgtcgcgaagcccagtattttgcatgacctatctagtggacctctcaacagactactgtggggcactgttggtgatgtgccaaccagctattttgtcgtgaaagcactctgtctcttatgcacatggcctctgccgacgagtacaacgactgcagacccgacacatatcctgtgtggcgttatgatgaaggctgcaacaggtattggtctgcaccgacccaatcatacccaggacttctcaagggtgtctgtagaactcaataaagaccagctgcacgatcgggtaaccacctgggctgtgtgcaatattgtagctcagtctatcggtacagcttatggccaaccagcaaccacgttgtacgactggactcttgcaattcgtcctggtgaagatggaccgttcacgttgtcacgagagctggaggctagactgcgaatcgagaggtttgcggacaaagtgtcaaaagaaatgtacagtaacgccagcgatccacggggcgttgctggtgacgaacacagagccatgttgatgcgcgtgtatcggcgagatttccaggaattgcaagcctcaattctttctcagcacttgtctgttattgttgatgctcacttgaaagccgctgctgtccacctccgcttagcaggattctttgattccagcgctacaccaggctacatggatgatttaatggggttatggcgcgctgtatcgtctttccttgatcttctctttattgaagctaaccatcacatgctgttctactccacgaattatctacagcaaatgctggtcgcttgtggattcgcactgctcaaactgatgagatctttcttctccaaaacgatagacttcgggaggggcaggacattattccataggaccatcaccgccatccgcaagacaagcgttgtagacaatgacctacaatggcgtttagcagaactcatggtgcaaatgtggaatggtgctcgcatagatcagactaatcagggccactacggcgatgattccgccgtgcctgttgacgatagcttacaacttaaagtacgatgtcgacacagcatgagtcttgtatatgactcgatttggcgctggagggaagaattccaggctcatggaagaggactcgactccctgaggcaagcaactaacccggactcggctaacgagtcttcagcgtcatccacccatatggatagcaccctcctccctcagaacaatatatccaacattacacccttagctaacaatggcgacctaacgcctacgccgcaacatgctatcacgaccggcccaaacagcatgatcggcttgggtggttatgggagtgagaccacaaattacgacttttttgacccgcaacactgggtgcttgacgggcttttggacttcaattacaataatttcagccagccgttagaaggcatgtag

SEQ ID NO: 16804 - protein, 724 aa, Muscodor strobelii
  misc_feature: SGI Peptide ID NO. 565601
  misc_feature (64)..(105): Pfam Id: PF00172 Pfam Desc: Fungal Zn(2)-Cys(6) binuclear cluster domain
  misc_feature (9)..(723): NCBI GI: 46107672 Blast Desc: FG00719.1 [Gibberella zeae PH-1]
  misc_feature (28)..(723): NCBI GI: 85111542 Blast Desc: NCU02094 [Neurospora crassa OR74A] gi|28925742|gb|EAA34750.1| conserved [Neurospora crassa OR74A]
  misc_feature (73)..(722): NCBI GI: 116182218 Blast Desc: CHGG_01737 [Chaetomium globosum CBS 148.51] gi|88186034|gb|EAQ93502.1| CHGG_01737 [Chaetomium globosum CBS 148.51]
  misc_feature (12)..(715): NCBI GI: 39974363 Blast Desc: MGG_00672 [Magnaporthe grisea 70-15] gi|145018413|gb|EDK02692.1| MGG_00672 [Magnaporthe grisea 70-15]
  misc_feature (74)..(723): NCBI GI: 171695232 Blast Desc: protein product [Podospora anserina] gi|170947858|emb|CAP60022.1| protein product [Podospora anserina]
  misc_feature (13)..(723): NCBI GI: 156053824 Blast Desc: SS1G_05760 [Sclerotinia sclerotiorum 1980] gi|154703540|gb|EDO03279.1| SS1G_05760 [Sclerotinia sclerotiorum 1980]
  misc_feature (209)..(723): NCBI GI: 261358841 Blast Desc: Zn(II)2Cys6 transcriptional activator [Verticillium albo-atrum VaMs.102]
  misc_feature (28)..(715): NCBI GI: 119498305 Blast Desc: C6 zinc finger domain protein [Neosartorya fischeri NRRL 181] gi|119414074|gb|EAW24013.1| C6 zinc finger domain protein [Neosartorya fischeri NRRL 181]
  misc_feature (32)..(715): NCBI GI: 115442716 Blast Desc: ATEG_09543 [Aspergillus terreus NIH2624] gi|114188034|gb|EAU29734.1| ATEG_09543 [Aspergillus terreus NIH2624]
  misc_feature (9)..(715): NCBI GI: 145238442 Blast Desc: An07g07930 [Aspergillus niger] gi|134076353|emb|CAK39609.1| protein product [Aspergillus niger]
MDGHIVAGGAISAPSMSPTSPMSLHRHGSVKRKRSIVDSSPGSVGDEDHLMMEPEKKRQPGVKRACNECRQQKLRCDVVQEPFQSCSRCNRLKLECKIESNFKRIGKRSKHAEMEKEIDRLRRNIAQAKVQGYIMDEEEDLHSQLQSPIANSNYSHTRNPSLMGSDEAVTSLLTLKRGGSYGMPATHYAYELENVRLTEQDVHGLFQEFFSHYHPFLPFLQETQSPDLYYQQHALLFWTIIAIASRRYVAKPSILHDLSSGPLNRLLWGTVGDVPTSYFVVKALCLLCTWPLPTSTTTADPTHILCGVMMKAATGIGLHRPNHTQDFSRVSVELNKDQLHDRVTTWAVCNIVAQSIGTAYGQPATTLYDWTLAIRPGEDGPFTLSRELEARLRIERFADKVSKEMYSNASDPRGVAGDEHRAMLMRVYRRDFQELQASILSQHLSVIVDAHLKAAAVHLRLAGFFDSSATPGYMDDLMGLWRAVSSFLDLLFIEANHHMLFYSTNYLQQMLVACGFALLKLMRSFFSKTIDFGRGRTLFHRTITAIRKTSVVDNDLQWRLAELMVQMWNGARIDQTNQGHYGDDSAVPVDDSLQLKVRCRHSMSLVYDSIWRWREEFQAHGRGLDSLRQATNPDSANESSASSTHMDSTLLPQNNISNITPLANNGDLTPTPQHAITTGPNSMIGLGGYGSETTNYDFFDPQHWVLDGLLDFNYNNFSQPLEGM

SEQ ID NO: 16805 - DNA, 3729 bp, Muscodor strobelii
  misc_feature: SGI EST ID NO. CUFF.39714.0
  misc_feature: Variant of the nucleotide sequence at SEQ ID NO 16803
ctctcaccttgttgtgattctcattttatgattaacaggtaccatttgtaacttacattgtcattatcggagcgcgccatatactcgcctgttgtaaggatcgatcagcacctcaagtaatccagatctacatcctccaataggtacctaagggtgctacgatttgatacccgagcattcaccacatatcacctgacatcactggcagtcaagtgtcacggcaagctacgagcagcattcctctcaaacagcttcgaatagcagcgaattctactctgtctggccggccgcgacagcctatgcatgtgctcgcggcctcacaatcttgctgtcgtaaatcttcgagcactagagcgacggtcttgggtcagacgtagaacccctggtccactagctagtgggctgtcggcggatgggcgtggaggcggccacaacggtggagttgtgacggatggtttggccgggttgccttttcagtgccagaagcaaattttcaacacttttgattgactgtgccaatgtctgtcgctgctcgtgcgctcccatcttttattagtttcagacccctccttcacccaattccttccgtcatcggtctcttcgaaattcaattcattgcgcgacaagacaaaacaattcctgctggccaccgcgcaccaattagccccccaatcagcagctttggccatccgtcatccctcggccctgccgctcggatccggactcgcgtctggtgtctggcatctggcgttgtcgcctctctcacctcctggtgcggcgctgaccgttgtcccgtcgcccatcggagtgcatggatggccacatcgtcgccggcggcgccatctcggcaccgtccatgagcccaacgagccctatgagcctccatcgccatggatccgtcaagcgaaagcgcagcatcgtcgacagcagccccggcagtgtcggcgatgaggaccacttgatgatggagccggagaagaagcggcagcctggcgtcaagcgtgcctgcaatgagtgtcggcagcaaaaagtgagtcaaacttccacttctcaattcaccactcccaccatcgcctggtttaataattcccggccacatacccccggcggttctggttggtgtcgcatctcctgctcgcttcattctgtcgtacccgccaaaacagttcagacttctcgttgtccgttactgcaccgcgcatttttcgaacatgcattatcctagcttcccgaaacgtgttgaggctgaccgtgctactcgaccatcttctagctacggtgtgatgtcgtacaggaaccgtttcagagctgctcgcgctgcaaccgtctgaagctcgagtgtaaaatcgagtctaatttcaagcgcatcggcaagcggtcgaaacatgccgagatggagaaggaaattgatcggttacgtcgcaacattgcccaagccaaggtccagggctacatcatggacgaagaagaagacctccactctcagctgcagtcccccattgcgaatagcaactactcacatactcggaacccctcactcatggggtccgatgaggccgtaacctctctcctaactctaaagaggggtggctcctacggcatgcccgccacccattatgcttacgagctagaaaatgtgcgtctgacggaacaggatgtccacgggctgttccaggagttcttttcacattaccatccattcctcccgttcctccaagaaacacagtcgccagatttgtattaccagcagcacgcgcttctcttttggactatcattgccattgcctctcgacgatatgtcgcgaagcccagtattttgcatgacctatctagtggacctctcaacagactactgtggggcactgttggtgatgtgccaaccagctattttgtcgtgaaagcactctgtctcttatgcacatggcctctgccgacgagtacaacgactgcagacccgacacatatcctgtgtggcgttatgatgaaggctgcaacaggtattggtctgcaccgacccaatcatacccaggacttctcaagggtgtctgtagaactcaataaagaccagctgcacgatcgggtaaccacctgggctgtgtgcaatattgtagctcagtctatcggtacagcttatggccaaccagcaaccacgttgtacgactggactcttgcaattcgtcctggtgaagatggaccgttcacgttgtcacgagagctggaggctagactgcgaatcgagaggtttgcggacaaagtgtcaaaagaaatgtacagtaacgccagcgatccacggggcgttgctggtgacgaacacagagccatgttgatgcgcgtgtatcggcgagatttccaggaattgcaagcctcaattctttctcagcacttgtctgttattgttgatgctcacttgaaagccgctgctgtccacctccgcttagcaggattctttgattccagcgctacaccaggctacatggatgatttaatggggttatggcgcgctgtatcgtctttccttgatcttctctttattgaagctaaccatcacatgctgttctactccacgaattatctacagcaaatgctggtcgcttgtggattcgcactgctcaaactgatgagatctttcttctccaaaacgatagacttcgggaggggcaggacattattccataggaccatcaccgccatccgcaagacaagcgttgtagacaatgacctacaatggcgtttagcagaactcatggtgcaaatgtggaatggtgctcgcatagatcagactaatcagggccactacggcgatgattccgccgtgcctgttgacgatagcttacaacttaaagtacgatgtcgacacagcatgagtcttgtatatgactcgatttggcgctggagggaagaattccaggctcatggaagaggactcgactccctgaggcaagcaactaacccggactcggctaacgagtcttcagcgtcatccacccatatggatagcaccctcctccctcagaacaatatatccaacattacacccttagctaacaatggcgacctaacgcctacgccgcaacatgctatcacgaccggcccaaacagcatgatcggcttgggtggttatgggagtgagaccacaaattacgacttttttgacccgcaacactgggtgcttgacgggcttttggacttcaattacaataatttcagccagccgttagaaggcatgtaggaacaactagtcttcgaatgagatttactaacgagaaagacaatgatgagagcacatctatttgacgtcgattatacgactgcataagacaaaggctttcagagagcaagagaagatgaataatgacattacaaaagcgagaagatgcggaagattatgcaatttagaaggatagccttcatccacgaagcatagtcccatccgcatttacttaagattataaagcatgaaaccttgtctagtatgtgtactttagagtacaatattatgattgcttcatctcgctaaagttcgctcgggcagtacatttataggagtacggcaggcagtttattgaactatttacgttacgaattctccattttactattaagtgaggttaccgctcctgatgggttcatgttgatatttccaactatctagtcatatattcaaaataacttcgtgacgctcatgcttcctcttctctagggcgttgctatttttgttgcgaatcccga

SEQ ID NO: 16806 - DNA, 2130 bp, Muscodor strobelii
  misc_feature: SGI cDNA ID NO. 565602
  misc_feature: Reduced expression when VOC is produced
  misc_feature: Encodes the peptide sequence at SEQ ID NO 16807
atggatggccacatcgtcgccggcggcgccatctcggcaccgtccatgagcccaacgagccctatgagcctccatcgccatggatccgtcaagcgaaagcgcagcatcgtcgacagcagccccggcagtgtcggcgatgaggaccacttgatgatggagccggagaagaagcggcagcctggcgtcaagcgtgcctgcaatgagtgtcggcagcaaaaactacggtgtgatgtcgtacaggaaccgtttcagagctgctcgcgctgcaaccgtctgaagctcgagtgtaaaatcgagtctaatttcaagcgcatcggcaagcggtcgaaacatgccgagatggagaaggaaattgatcggttacgtcgcaacattgcccaagccaaggtccagggctacatcatggacgaagaagaagacctccactctcagctgcagtcccccattgcgaatagcaactactcacatactcggaacccctcactcatggggtccgatgaggccgtaacctctctcctaactctaaagaggggtggctcctacggcatgcccgccacccattatgcttacgagctagaaaatgtgcgtctgacggaacaggatgtccacgggctgttccaggagttcttttcacattaccatccattcctcccgttcctccaagaaacacagtcgccagatttgtattaccagcagcacgcgcttctcttttggactatcattgccattgcctctcgacgatatgtcgcgaagcccagtattttgcatgacctatctagtggacctctcaacagactactgtggggcactgttggtgatgtgccaaccagctattttgtcgtgaaagcactctgtctcttatgcacatggcctctgccgacgagtacaacgactgcagacccgacacatatcctgtgtggcgttatgatgaaggctgcaacaggtattggtctgcaccgacccaatcatacccaggacttctcaagggtgtctgtagaactcaataaagaccagctgcacgatcgggtaaccacctgggctgtgtgcaatattgtagctcagtctatcggtacagcttatggccaaccagcaaccacgttgtacgactggactcttgcaattcgtcctggtgaagatggaccgttcacgttgtcacgagagctggaggctagactgcgaatcgagaggtttgcggacaaagtgtcaaaagaaatgtacagtaacgccagcgatccacggggcgttgctggtgacgaacacagagccatgttgatgcgcgtgtatcggcgagatttccaggaattgcaagcctcaattctttctcagcacttgtctgttattgttgatgctcacttgaaagccgctgctgtccacctccgcttagcaggattctttgattccagcgctacaccaggctacatggatgatttaatggggttatggcgcgctgtatcgtctttccttgatcttctctttattgaagctaaccatcacatgctgttctactccacgaattatctacagcaaatgctggtcgcttgtggattcgcactgctcaaactgatgagatctttcttctccaaaacgatagacttcgggaggggcaggacattattccataggaccatcaccgccatccgcaagacaagcgttgtagacaatgacctacaatggcgtttagcagaactcatggtgcaaatgtggaatggtgctcgcatagatcagactaatcagggccactacggcgatgattccgccgtgcctgttgacgatagcttacaacttaaagtacgatgtcgacacagcatgagtcttgtatatgactcgatttggcgctggagggaagaattccaggctcatggaagaggactcgactcgtcatccacccatatggatagcaccctcctccctcagaacaatatatccaacattacacccttagctaacaatggcgacctaacgcctacgccgcaacatgctatcacgaccggcccaaacagcatgatcggcttgggtggttatgggagtgagaccacaaattacgacttttttgacccgcaacactgggtgcttgacgggcttttggacttcaattacaataatttcagccagccgttagaaggcatgtag

SEQ ID NO: 16807 - protein, 709 aa, Muscodor strobelii
  misc_feature: SGI Peptide ID NO. 565602
  misc_feature (64)..(105): Pfam Id: PF00172 Pfam Desc: Fungal Zn(2)-Cys(6) binuclear cluster domain
  misc_feature (9)..(708): NCBI GI: 46107672 Blast Desc: FG00719.1 [Gibberella zeae PH-1]
  misc_feature (28)..(708): NCBI GI: 85111542 Blast Desc: NCU02094 [Neurospora crassa OR74A] gi|28925742|gb|EAA34750.1| conserved [Neurospora crassa OR74A]
  misc_feature (73)..(707): NCBI GI: 116182218 Blast Desc: CHGG_01737 [Chaetomium globosum CBS 148.51] gi|88186034|gb|EAQ93502.1| CHGG_01737 [Chaetomium globosum CBS 148.51]
  misc_feature (12)..(700): NCBI GI: 39974363 Blast Desc: MGG_00672 [Magnaporthe grisea 70-15] gi|145018413|gb|EDK02692.1| MGG_00672 [Magnaporthe grisea 70-15]
  misc_feature (13)..(708): NCBI GI: 156053824 Blast Desc: SS1G_05760 [Sclerotinia sclerotiorum 1980] gi|154703540|gb|EDO03279.1| SS1G_05760 [Sclerotinia sclerotiorum 1980]
  misc_feature (74)..(708): NCBI GI: 171695232 Blast Desc: protein product [Podospora anserina] gi|170947858|emb|CAP60022.1| protein product [Podospora anserina]
  misc_feature (209)..(708): NCBI GI: 261358841 Blast Desc: Zn(II)2Cys6 transcriptional activator [Verticillium albo-atrum VaMs.102]
  misc_feature (28)..(700): NCBI GI: 119498305 Blast Desc: C6 zinc finger domain protein [Neosartorya fischeri NRRL 181] gi|119414074|gb|EAW24013.1| C6 zinc finger domain protein [Neosartorya fischeri NRRL 181]
  misc_feature (9)..(700): NCBI GI: 145238442 Blast Desc: An07g07930 [Aspergillus niger] gi|134076353|emb|CAK39609.1| protein product [Aspergillus niger]
  misc_feature (32)..(700): NCBI GI: 115442716 Blast Desc: ATEG_09543 [Aspergillus terreus NIH2624] gi|114188034|gb|EAU29734.1| ATEG_09543 [Aspergillus terreus NIH2624]
  misc_feature: Useful for introducing or modulating the production of volatile compounds
MDGHIVAGGAISAPSMSPTSPMSLHRHGSVKRKRSIVDSSPGSVGDEDHLMMEPEKKRQPGVKRACNECRQQKLRCDVVQEPFQSCSRCNRLKLECKIESNFKRIGKRSKHAEMEKEIDRLRRNIAQAKVQGYIMDEEEDLHSQLQSPIANSNYSHTRNPSLMGSDEAVTSLLTLKRGGSYGMPATHYAYELENVRLTEQDVHGLFQEFFSHYHPFLPFLQETQSPDLYYQQHALLFWTIIAIASRRYVAKPSILHDLSSGPLNRLLWGTVGDVPTSYFVVKALCLLCTWPLPTSTTTADPTHILCGVMMKAATGIGLHRPNHTQDFSRVSVELNKDQLHDRVTTWAVCNIVAQSIGTAYGQPATTLYDWTLAIRPGEDGPFTLSRELEARLRIERFADKVSKEMYSNASDPRGVAGDEHRAMLMRVYRRDFQELQASILSQHLSVIVDAHLKAAAVHLRLAGFFDSSATPGYMDDLMGLWRAVSSFLDLLFIEANHHMLFYSTNYLQQMLVACGFALLKLMRSFFSKTIDFGRGRTLFHRTITAIRKTSVVDNDLQWRLAELMVQMWNGARIDQTNQGHYGDDSAVPVDDSLQLKVRCRHSMSLVYDSIWRWREEFQAHGRGLDSSSTHMDSTLLPQNNISNITPLANNGDLTPTPQHAITTGPNSMIGLGGYGSETTNYDFFDPQHWVLDGLLDFNYNNFSQPLEGM

SEQ ID NO: 16808 - DNA, 3729 bp, Muscodor strobelii; identical to SEQ ID NO: 16805
  misc_feature: SGI EST ID NO. CUFF.39714.0
  misc_feature: Variant of the nucleotide sequence at SEQ ID NO 16806

SEQ ID NO: 16809 - DNA, 1590 bp, Muscodor strobelii
  misc_feature: SGI cDNA ID NO. 565603
  misc_feature: Elevated expression when VOC is produced
  misc_feature: Encodes the peptide sequence at SEQ ID NO 16810
atgctctacaagagtgatcacatgcgcggaagcttatcagtagagtcacctctatctgagcatagctttcactctgctgcctcgtcatctccctacgggacacatgacatggcaagatcttattctgtggcagctacgttcagtccgtatcctgcacagtctacctttgaacagagcattcctacacctgctgtctctgttactgggtctcccttattagaagaaagatccaacaagatggcatctacttatagccagcatggaagcaattatcagcagccttctccgcccgcatcatcccgttggagttatccatccgacatgaataacgcttccggacatataggagtaccgactaccacggccgagatgctggatgttcataccttagaatcatcacaatctcctgaacagcaatcgtccattccaccgtccttctactatggccattatactgtctccagctcgaccgaccctgaggacgtgacatctcagacaatgtacggcgccggcattcaaccacaggtgctcatgcgacctatgggtgctccgaactatccttctctcgcacctgctccggcacaccctcactccacagatcatcaaactatgatgatgcagcctggaaatatgaactacaaccctgtgccaatagaagtcatcgatggaggctctgctaggaaaaattctcgagctagaaccaaccgttctggtcgagtgacaaagcgaggacgtcaacaaagctcaacagccatacgagccggtgggaattcgcaatcagaaatcaatacaagtggcaaacgtccacatactaccaattccaatggcgatatttctccaaattacatcgttctcgacgacaatgctcccgaggagaccaagtttctcctcaagttgaaatgccaatatctcaataagaaaggcaagggaatgtggatagatatcgcggaagagtatgcgagatactacccaaaaaagcagaaggagaatcttcaaatgcaactcacccgtggtatcttacagtatgcagtgtggcccgaaagcgaggacgagatcttgaaagcagctacattagagtatgaagaacggaaatatgccgagatccaaaagatcatgcaagaaaaaggcggttgcagggcttgggaatggaaaccaagtaatattgccaagcgcctggtagagctcggtattgacgagcttgatgattcacagccacctaaaatccagcggaggagaaacaagagcactgtcaggaagaagtccgaacaagaagcttatagcgggaccaaccacagtatcaaatttctccaacacccacatcggttgacagaggaacaggcggacagatacctcgacgcaaactttgacaacggattcgcttgcaaacccgaactagattctgaggcggaagatatggaggcctccatggagcgagctgtcgaatgtcgaaacaacattgaaagatactcggatggagatcaccagagcctccgcgttgccaagcaagcatgtgcacagatggctcgcgagagtccaatgtacacatctgttgcctctgctagccacaacacccagttcatgtcttcttaa

SEQ ID NO: 16810 - protein, 529 aa, Muscodor strobelii
  misc_feature: SGI Peptide ID NO. 565603
  misc_feature (22)..(399): NCBI GI: 116182210 Blast Desc: CHGG_01733 [Chaetomium globosum CBS 148.51] gi|88186030|gb|EAQ93498.1| CHGG_01733 [Chaetomium globosum CBS 148.51]
  misc_feature (50)..(514): NCBI GI: 171695230 Blast Desc: protein product [Podospora anserina] gi|170947857|emb|CAP60021.1| protein product [Podospora anserina]
  misc_feature (241)..(399): NCBI GI: 85111538 Blast Desc: NCU02092 [Neurospora crassa OR74A] gi|28925740|gb|EAA34748.1| [Neurospora crassa OR74A]
  misc_feature (283)..(430): NCBI GI: 145611090 Blast Desc: MGG_00669 [Magnaporthe grisea 70-15] gi|145018417|gb|EDK02696.1| MGG_00669 [Magnaporthe grisea 70-15]
  misc_feature (25)..(421): NCBI GI: 256734765 Blast Desc: NECHADRAFT_98962 [Nectria haematococca mpVI 77-13-4]
  misc_feature (92)..(421): NCBI GI: 46107674 Blast Desc: FG00720.1 [Gibberella zeae PH-1]
  misc_feature: Useful for introducing or modulating the production of volatile compounds
MLYKSDHMRGSLSVESPLSEHSFHSAASSSPYGTHDMARSYSVAATFSPYPAQSTFEQSIPTPAVSVTGSPLLEERSNKMASTYSQHGSNYQQPSPPASSRWSYPSDMNNASGHIGVPTTTAEMLDVHTLESSQSPEQQSSIPPSFYYGHYTVSSSTDPEDVTSQTMYGAGIQPQVLMRPMGAPNYPSLAPAPAHPHSTDHQTMMMQPGNMNYNPVPIEVIDGGSARKNSRARTNRSGRVTKRGRQQSSTAIRAGGNSQSEINTSGKRPHTTNSNGDISPNYIVLDDNAPEETKFLLKLKCQYLNKKGKGMWIDIAEEYARYYPKKQKENLQMQLTRGILQYAVWPESEDEILKAATLEYEERKYAEIQKIMQEKGGCRAWEWKPSNIAKRLVELGIDELDDSQPPKIQRRRNKSTVRKKSEQEAYSGTNHSIKFLQHPHRLTEEQADRYLDANFDNGFACKPELDSEAEDMEASMERAVECRNNIERYSDGDHQSLRVAKQACAQMARESPMYTSVASASHNTQFMSS

SEQ ID NO: 16811 - DNA, 2377 bp, Muscodor strobelii
  misc_feature: SGI EST ID NO. CUFF.39656.0
  misc_feature: Variant of the nucleotide sequence at SEQ ID NO 16809
cgacacacttggtcaaaagttgaagacccaagtaggcagatttctttgtcaccctgccgcagcacattcacaaacccataagatctctccttcgaccctccagtctgtgggttgatgtgtgtctataatactgttacaccttcgtcaccctcatccaaagttgtttctgaagcacaatactcaactattgacaccggcttactatcaacgcaacaacctcaaatatttttttattgatatccacatggacaactccgcatacatgctctacaagagtgatcacatgcgcggaagcttatcagtagagtcacctctatctgagcatagctttcactctgctgcctcgtcatctccctacgggacacatgacatggcaagatcttattctgtggcagctacgttcagtccgtatcctgcacagtctacctttgaacagagcattcctacacctgctgtctctgttactgggtctcccttattagaagaaagatccaacaagatggcatctacttatagccagcatggaagcaattatcagcagccttctccgcccgcatcatcccgttggagttatccatccgacatgaataacgcttccggacatataggagtaccgactaccacggccgagatgctggatgttcataccttagaatcatcacaatctcctgaacagcaatcgtccattccaccgtccttctactatggccattatactgtctccagctcgaccgaccctgaggacgtgacatctcagacaatgtacggcgccggcattcaaccacaggtgctcatgcgacctatgggtgctccgaactatccttctctcgcacctgctccggcacaccctcactccacagatcatcaaactatgatgatgcagcctggaaatatgaactacaaccctgtgccaatagaagtcatcgatggaggctctgctaggaaaaattctcgagctagaaccaaccgttctggtcgagtgacaaagcgaggacgtcaacaaagctcaacagccatacgagccggtgggaattcgcaatcagaaatcaatacaagtggcaaacgtccacatactaccaattccaatggcgatatttctccaaattacatcgttctcgacgacaatgctcccgaggagaccaagtttctcctcaagttgaaatgccaatatctcaataagaaaggcaagggaatgtggatagatatcgcggaagagtatgcgagatactacccaaaaaagcagaaggagaatcttcaaatgcaactcacccgtggtatcttacagtatgcagtgtggcccgaaagcgaggacgagatcttgaaagcagctacattagagtatgaagaacggaaatatgccgagatccaaaagatcatgcaagaaaaaggcggttgcagggcttgggaatggaaaccaagtaatattgccaagcgcctggtagagctcggtattgacgagcttgatgattcacagccacctaaaatccagcggaggagaaacaagagcactgtcaggaagaagtccgaacaagaagcttatagcgggaccaaccacagtatcaaatttctccaacacccacatcggttgacagaggaacaggcggacagatacctcgacgcaaactttgacaacggattcgcttgcaaacccgaactagattctgaggcggaagatatggaggcctccatggagcgagctgtcgaatgtcgaaacaacattgaaagatactcggatggagatcaccagagcctccgcgttgccaagcaagcatgtgcacagatggctcgcgagagtccaatgtacacatctgttgcctctgctagccacaacacccagttcatgtcttcttaagttgcatttgcgagggtctttttatcatgcacatgctttctacgtaagataccccattgtaccatcaggttgtcttcatcgacgagcggttggggcgaaagtacagcatatcattcaacacgtttatacccatcatcatagaggtatcttggctcgcgagacccttttcttcgactatttatctacttgtcaaccattcacttatacaaatcaatagtcacattaggtgacttctatattctagctctcaaagctcttgctggtcattttgatctttgggagcatggcgggtagtctataggcatctgtactacgatccacttacgatctagctactggtacgtatcgacgactcagagacggggcttggattactttccttcatgcatgcagcaagttttcacttgcgaatagatcaggcctagttgtgggatttacataggtttgtaggcactagaggagcaaagcataaagtagtagctaggggcaactagtaactagaacttctttctacgatgatattga

SEQ ID NO: 16812 - DNA, 3135 bp, Muscodor strobelii
  misc_feature: SGI cDNA ID NO. 565604
  misc_feature: Encodes the peptide sequence at SEQ ID NO 16813
atgcccttgccttcatgtcgccgccttagtctgttggcgacatggctcctgctggtgctgccatgggtcgctcccgccgccgccatttcgtctgcccgcgtcgccgagttgcgccgcgcgaccgtggacatgttctaccatggcttcgataactacatgaatgtagcatttcccgaggacgagttgcgcccagtttcctgcacgcctctgacccgtgaccctcacaatccccggaacgtcgagttgaacgatgtcttggggaactactctcttactttgattgacagtctctcgacactggctattctggcttcgtcgccgcccgatgctgccaacactggacccaaagctcttgccgatttccaggatggagttgctgcactcgttgtgcagtatggtgatgggcgccacggtccgactggccaaggcgcccgaggacgtggattcgatgttgatagcaaagtgcaggtgtttgagaccgtcatccgaggcgtcggaggtttgcttagcgcacatctattcgctgtaggagagctgccaatctctggatatagccctggaagcgctgctgggtcagacatcgagagccgccccatcgcatggccaaacggcctcaagtacgacggccagttattgagactggctttggaccttgctcaaagacttctcccagccttctatacgcaaacgggcatgccatacccccgggtgaacctgcgtcacggtattccgttttatttaaactcgccgctgcacgaaaatattagcttgaaccccgacaagacccgagactcggctgaaataacggagacttgtagtgcaggtgctggaagtcttgtactcgaatttacagttctgagtcggctgacgggcgatccaaggtttgagcaagcagccaagagagctttctgggccgtgtggtctcgcaggagcacgattggtcttataggcgctggcgttgatgccgaagagggtcactggatcggaggctcctctggcattggtgctggtattgacagcttctttgaatacgcgctcaagactcatatcctcctgtctggacatgagctaccaaatcgtacgatgcccgatcgtattccgtacgggagtcagcttgatccgaatttgatatacaagccactaacagacagggataactccgctgattcgtttctcgaggcttggcatcatgctcatgcagctatcaagcggcatctctactccgatctacaccacccacattatgtcaacgcacatatctcgacaggatctcctcagacgttttggatcgatagtctgggggcctactactctggtcttctcgctctggctggagagctagatgaggcaatcgaaacgcatcttgtctatacagctctttggacgcgatactctgctttgccagagcgatggtcagtgcgtgacggcactgttgaaggaggcctgggttggtggcccggccgacctgaatttattgagtccacatatcatatctatcgggctacgcgagatccatggtatttgtacgctggtgagatggtattgaaggacattacgaggcgttgcagaacggattgtgggtggtctgggctacaagatgtacgcactggcgagatgagcgatcgcatggaaagctttttcctcggagagacggccaagtatctatatcttctctttgattcggatcatccgctgaataagctggatgcgccatatgttttcaccacagaaggtcatccattgatcattcctcgcaagtctacgtctcgcaagccccaaaagtcgccaacggggacagacgtccggccttattttgacgagagtttcacaaatatgtgcccagttcctccggctctgcctcctttgtcaggttcagctactgcagctcggtcagacttgttcaatgcagcatctttaatccgacttcatcaggtcccaaatttcaacagcgtcgcacgtaccgacctagactcggcacatagccaaatatcggatgtacaaccagttgccaatcatacaattttcccttggacgctgcctgtttcaatgttacccgtcgacggaatgtgcattgcatccaagcaaagacttactagtgtgattgagttcccttccactgcacagcagtctgtcggcagcgcttttagccttatgcttggtggcaacaacttggtgagaatgggtagcgaaggcattgcgattaatagcctttctgggctcaaacttgccatggtcatggaggactcgctactcgaacgaggttggagagtgcaaagcatagggaattttgctttgggacgagatgagaaggtgtttgtcccccgcgagatactgacggatatttcagatccattgttcaagggtattcgtgacactgttctcctggacatcttgttgcagcttgaactccctgagcaggttaatatgcacaatcaaagctctgtgaacgcacatccttcgcctgacccggaacctactcatgccatcgatgattcaaatatcggcgggaatctgttgagctccatcctgcagcacatcacatcagccttgcgggaaccagtagccacttttggaccagaacctgcgcccaaggtcaactaccagtacacagagatgccagcggtcacacctgtcggcgtcggcgtcgccgcgttgccggatgtagccgaggcgcccaacccgaatatcaaacctcacatcgaatctctctcgtggagccggatctatttcgctggccagtcctgcgacggcaagctccccgacatagtgccaaagagccatcaagtcattgtaatgcgtcgaggtggctgttctttctctgagaagctcgcgacgataccctcgtttgcaccaaatcgaaacgcgcttcagcttgtcattgtggtatcggatgacaaggaatccgtcgaggagactgaagacaacgcacggggatttaattacatacggcctttgctagacgaggagcagaggaccccagctggtgtcgcaagacatcgtcctatatcaatgctgatggttggaggaggtgatgaggcatatgaattgttgaagacggctaagagcctgggcatgaggagaagataccaggttgagagccagggactgagtattttgaatttagttgtgctttaa

SEQ ID NO: 16813 - protein, 1044 aa, Muscodor strobelii
  misc_feature: SGI Peptide ID NO. 565604
  misc_feature (44)..(583): Pfam Id: PF01532 Pfam Desc: Glycosyl hydrolase family 47
  misc_feature (429)..(583): Pfam Id: PF01532 Pfam Desc: Glycosyl hydrolase family 47
  misc_feature (269)..(352): Pfam Id: PF01532 Pfam Desc: Glycosyl hydrolase family 47
  misc_feature (44)..(103): Pfam Id: PF01532 Pfam Desc: Glycosyl hydrolase family 47
  misc_feature (207)..(244): Pfam Id: PF01532 Pfam Desc: Glycosyl hydrolase family 47
  misc_feature (149)..(175): Pfam Id: PF01532 Pfam Desc: Glycosyl hydrolase family 47
  misc_feature (53)..(1044): NCBI GI: 154299925 Blast Desc: BC1G_10853 [Botryotinia fuckeliana B05.10] gi|150857133|gb|EDN32325.1| BC1G_10853 [Botryotinia fuckeliana B05.10]
  misc_feature (53)..(1044): NCBI GI: 156053588 Blast Desc: SS1G_05641 [Sclerotinia sclerotiorum 1980] gi|154703422|gb|EDO03161.1| SS1G_05641 [Sclerotinia sclerotiorum 1980]
  misc_feature (26)..(1043): NCBI GI: 116182208 Blast Desc: CHGG_01732 [Chaetomium globosum CBS 148.51] gi|88186029|gb|EAQ93497.1| CHGG_01732 [Chaetomium globosum CBS 148.51]
  misc_feature (17)..(1043): NCBI GI: 171695228 Blast Desc: protein product [Podospora anserina] gi|170947856|emb|CAP60020.1| protein product [Podospora anserina]
  misc_feature (32)..(1043): NCBI GI: 39974373 Blast Desc: MGG_00667 [Magnaporthe grisea 70-15] gi|145018418|gb|EDK02697.1| MGG_00667 [Magnaporthe grisea 70-15]
  misc_feature (11)..(1044): NCBI GI: 256734766 Blast Desc: NECHADRAFT_65867 [Nectria haematococca mpVI 77-13-4]
  misc_feature (12)..(1044): NCBI GI: 46107676 Blast Desc: FG00721.1 [Gibberella zeae PH-1]
  misc_feature (9)..(1044): NCBI GI: 119177661 Blast Desc: CIMG_07746 [Coccidioides immitis RS]
  misc_feature (6)..(1044): NCBI GI: 240107604 Blast Desc: Glycosyl hydrolase family 47 protein [Coccidioides posadasii C735 delta SOWgp]
  misc_feature (8)..(1044): NCBI GI: 115385360 Blast Desc: conserved [Aspergillus terreus NIH2624] gi|114196919|gb|EAU38619.1| conserved [Aspergillus terreus NIH2624]
  misc_feature (36)..(581): SWISSPROT Homolog: EC 3.2.1.113 Mannosyl-oligosaccharide 1,2-alpha-mannosidase
MPLPSCRRLSLLATWLLLVLPWVAPAAAISSARVAELRRATVDMFYHGFDNYMNVAFPEDELRPVSCTPLTRDPHNPRNVELNDVLGNYSLTLIDSLSTLAILASSPPDAANTGPKALADFQDGVAALVVQYGDGRHGPTGQGARGRGFDVDSKVQVFETVIRGVGGLLSAHLFAVGELPISGYSPGSAAGSDIESRPIAWPNGLKYDGQLLRLALDLAQRLLPAFYTQTGMPYPRVNLRHGIPFYLNSPLHENISLNPDKTRDSAEITETCSAGAGSLVLEFTVLSRLTGDPRFEQAAKRAFWAVWSRRSTIGLIGAGVDAEEGHWIGGSSGIGAGIDSFFEYALKTHILLSGHELPNRTMPDRIPYGSQLDPNLIYKPLTDRDNSADSFLEAWHHAHAAIKRHLYSDLHHPHYVNAHISTGSPQTFWIDSLGAYYSGLLALAGELDEAIETHLVYTALWTRYSALPERWSVRDGTVEGGLGWWPGRPEFIESTYHIYRATRDPWYLYAGEMVLKDITRRCRTDCGWSGLQDVRTGEMSDRMESFFLGETAKYLYLLFDSDHPLNKLDAPYVFTTEGHPLIIPRKSTSRKPQKSPTGTDVRPYFDESFTNMCPVPPALPPLSGSATAARSDLFNAASLIRLHQVPNFNSVARTDLDSAHSQISDVQPVANHTIFPWTLPVSMLPVDGMCIASKQRLTSVIEFPSTAQQSVGSAFSLMLGGNNLVRMGSEGIAINSLSGLKLAMVMEDSLLERGWRVQSIGNFALGRDEKVFVPREILTDISDPLFKGIRDTVLLDILLQLELPEQVNMHNQSSVNAHPSPDPEPTHAIDDSNIGGNLLSSILQHITSALREPVATFGPEPAPKVNYQYTEMPAVTPVGVGVAALPDVAEAPNPNIKPHIESLSWSRIYFAGQSCDGKLPDIVPKSHQVIVMRRGGCSFSEKLATIPSFAPNRNALQLVIVVSDDKESVEETEDNARGFNYIRPLLDEEQRTPAGVARHRPISMLMVGGGDEAYELLKTAKSLGMRRRYQVESQGLSILNLVVL

SEQ ID NO: 16814 - DNA, 3812 bp, Muscodor strobelii
  misc_feature: SGI EST ID NO. CUFF.39677.0
  misc_feature: Variant of the nucleotide sequence at SEQ ID NO 16812
atcaaatagttggaaatctcacgagggtcgagagtgccgatttggtgactgggttgtactcaaggatagaggaatataaaagtactgaatgcagctacccgggaagacccttagtaaaagtgacggcacgtgtcctcaaagacgttgctcaccaagttaggtactcatttaacaacggggctgtattttaacgagacgtgctgttagtatatagacagaaaatacctgactgacgcctcggcgccacaataacgcctagctgcaacggctgcacatcatcacgacatcgaccggcgcgctgcaacgtccatctaccctcaaggctgctgtagccaaccggtctcttttgcatacaagctgctgcaccgcactttatctggtcggacagctggacagttgcagagttgctttcgcctgcctcctgccctagggatccggtcaagccaccagcttcaccgtgtctcttgcgtctgtgttggcgcctgtgccgctctcgccctcagatgcctccatcgccgcttagttgccggtgatgcccttgccttcatgtcgccgccttagtctgttggcgacatggctcctgctggtgctgccatgggtcgctcccgccgccgccatttcgtctgcccgcgtcgccgagttgcgccgcgcgaccgtggacatgttctaccatggcttcgataactacatgaatgtagcatttcccgaggacgagttgcgcccagtttcctgcacgcctctgacccgtgaccctcacaatccccggaacgtcgagttgaacgatgtcttggggaactactctcttactttgattgacagtctctcgacactggctattctggcttcgtcgccgcccgatgctgccaacactggacccaaagctcttgccgatttccaggatggagttgctgcactcgttgtgcagtatggtgatgggcgccacggtccgactggccaaggcgcccgaggacgtggattcgatgttgatagcaaagtgcaggtgtttgagaccgtcatccgaggcgtcggaggtttgcttagcgcacatctattcgctgtaggagagctgccaatctctggatatagccctggaagcgctgctgggtcagacatcgagagccgccccatcgcatggccaaacggcctcaagtacgacggccagttattgagactggctttggaccttgctcaaagacttctcccagccttctatacgcaaacgggcatgccatacccccgggtgaacctgcgtcacggtattccgttttatttaaactcgccgctgcacgaaaatattagcttgaaccccgacaagacccgagactcggctgaaataacggagacttgtagtgcaggtgctggaagtcttgtactcgaatttacagttctgagtcggctgacgggcgatccaaggtttgagcaagcagccaagagagctttctgggccgtgtggtctcgcaggagcacgattggtcttataggcgctggcgttgatgccgaagagggtcactggatcggaggctcctctggcattggtgctggtattgacagcttctttgaatacgcgctcaagactcatatcctcctgtctggacatgagctaccaaatcgtacgatgcccgatcgtattccgtacgggagtcagcttgatccgaatttgatatacaagccactaacagacagggataactccgctgattcgtttctcgaggcttggcatcatgctcatgcagctatcaagcggcatctctactccgatctacaccacccacattatgtcaacgcacatatctcgacaggatctcctcagacgttttggatcgatagtctgggggcctactactctggtcttctcgctctggctggagagctagatgaggcaatcgaaacgcatcttgtctatacagctctttggacgcgatactctgctttgccagagcgatggtcagtgcgtgacggcactgttgaaggaggcctgggttggtggcccggccgacctgaatttattgagtccacatatcatatctatcgggctacgcgagatccatggtatttgtacgctggtgagatggtattgaaggacattacgaggcgttgcagaacggattgtgggtggtctgggctacaagatgtacgcactggcgagatgagcgatcgcatggaaagctttttcctcggagagacggccaagtatctatatcttctctttgattcggatcatccgctgaataagctggatgcgccatatgttttcaccacagaaggtcatccattgatcattcctcgcaagtctacgtctcgcaagccccaaaagtcgccaacggggacagacgtccggccttattttgacgagagtttcacaaatatgtgcccagttcctccggctctgcctcctttgtcaggttcagctactgcagctcggtcagacttgttcaatgcagcatctttaatccgacttcatcaggtcccaaatttcaacagcgtcgcacgtaccgacctagactcggcacatagccaaatatcggatgtacaaccagttgccaatcatacaattttcccttggacgctgcctgtttcaatgttacccgtcgacggaatgtgcattgcatccaagcaaagacttactagtgtgattgagttcccttccactgcacagcagtctgtcggcagcgcttttagccttatgcttggtggcaacaacttggtgagaatgggtagcgaaggcattgcgattaatagcctttctgggctcaaacttgccatggtcatggaggactcgctactcgaacgaggttggagagtgcaaagcatagggaattttgctttgggacgagatgagaaggtgtttgtcccccgcgagatactgacggatatttcagatccattgttcaagggtattcgtgacactgttctcctggacatcttgttgcagcttgaactccctgagcaggttaatatgcacaatcaaagctctgtgaacgcacatccttcgcctgacccggaacctactcatgccatcgatgattcaaatatcggcgggaatctgttgagctccatcctgcagcacatcacatcagccttgcgggaaccagtagccacttttggaccagaacctgcgcccaaggtcaactaccagtacacagagatgccagcggtcacacctgtcggcgtcggcgtcgccgcgttgccggatgtagccgaggcgcccaacccgaatatcaaacctcacatcgaatctctctcgtggagccggatctatttcgctggccagtcctgcgacggcaagctccccgacatagtgccaaagagccatcaagtcattgtaatgcgtcgaggtggctgttctttctctgagaagctcgcgacgataccctcgtttgcaccaaatcgaaacgcgcttcagcttgtcattgtggtatcggatgacaaggaatccgtcgaggagactgaagacaacgcacggggatttaattacatacggcctttgctagacgaggagcagaggaccccagctggtgtcgcaagacatcgtcctatatcaatgctgatggttggaggaggtgatgaggcatatgaattgttgaagacggctaagagcctgggcatgaggagaagataccaggttgagagccagggactgagtattttgaatttagttgtgctttaatgcattgggcagcgagctgaggcataagcggcgtcactggtgttggttggatagtaagacatgttaaatgtagacacacgtacataaatagagcgaacatgtatatgacccatttcttgacttggcataccatatcatgagaata

SEQ ID NO: 16815 - DNA, 5055 bp, Muscodor strobelii
  misc_feature: SGI cDNA ID NO. 565605
  misc_feature: Encodes the peptide sequence at SEQ ID NO 16816
atgtctgcgtccactccatactggggccaattgccctcgcccaaagctcgtcgattctccgatggtagtgatcgcaggtattcattagatcaaccaacggctcctcagtctcagctcgattctcaacgtacttcaacccagaccgaatcgaccttctcgccgcttgcttctcctacagcatccaataccccaggaggcggtctagctccccgacctccctccttcccttatgcgcagcatcagtattccgacagcatagacagacgacgccggcgctcgaataagtcgcaagccgacgatgtctatgatttagcaggaagcgcatctcctcccccagctgctccagacgtacccagaggaccaccggtcagctacaaagctccttttggcagccccgaaccatacacctataactctggcggtcaaccggccccgcctcagtcgacttacagatccgatcgccaacccagagttctcgccatggagccggaaaccttctacaaggatgccacaccgcccgcggagcagcagtcaaggcaacctgtactggaccgcaattaccagacttttgatgatggcgttgtatcgactgaacacctggagagagagttgcttaggaccggctcgctgcgacggccaacaaacgggcaccgccaatccgaaagacttgcgccagaccctgcgtcatcgtcgcaaaggcgaaactcatcggctccagatccacagcgcaacatgtgggccgccgaccgctcaccactgcagaagctagagctgacgctcgatggcattacgaaagaggaaaagcgagctcgggtggaagctgctgagcgacgcgccagggagagagccgcaagaaacagcgcctctgcaggtactgctgagttggagagatcatctgctgcagccccatctgcacaaaaatctaaattttatcaagaattgggtgaaccacggcttgacgcagttcacgtcaataagagccctcaagtaattgtggctgacccaatcccagctaagccgtcaacggctgcgacacgaggcacatcatcgcaatctccgtacgaagacgataaccccactagactacataagcagtcaccgagatctcagatcccgatacccaagaagcgcaacgcatccagcgcagaaaacgacgggttgccacaacgtggtttgagcttcagggacagagccggctcgcaagacctcggattgccacaagattatgccgatgagccggtgaagggggtttccgggagaggtcccgccaccgccattgagagaagtggaagtaacaagttgaagaagaacccgcctggcgatccatggtatgctgcacgcagagaggccgaagaaagatccgccgcgtacgacagattgaattctttcgatgacaaccgttatgcagaacccgtccgcacgagtcatagagatgcgcacaatacaagcgagcaagtcagaaacgggcccatctcgaccgaagaactccctcgaccgccagctcgaggcaaagctttcgcagatgaaacttacgaggaggaacggccgagtcggataagaggtcttgctgcagcgattggtctcggacgatcaaactcgatgagcaaccgtcaacaacctccctcgtcacattatcagtatgaatcaccaacgcagaaccaagaatattcacaaggagatgaatttgatgaaccaccggcccagaagaaaggacttaccaacatcactggctttggtaaggccaattccatagacgcgacgcgtcaaccccgggtacccggatcagccttgcacgacaccgaattgagtgaacggggcacaaagtcagtcaagtttcaagatggcgaacatgatagtgagatgtttggcagcaatgttgctgattctggtcgccacggacatcatttgggccacttgttccacagagaacatctcaagcctgggctgggaatgtacaagccgcctgtctattcagaggaatggaagaaaggcgcaatagggctgctgtctgagtctcaaatggacctccaagaggagcctcaacatgaccaagcgcttgataagaatacgccttggtgggagaatgatggcaagcgtcgagccagcttctcagcaccctctcgcaaagtccaagcatacgacggcgcgcatgatgacaaccggagacgtaccaggttcacaccacccctctatctcaaatgtggacctttgttacgatattgtggtatgcgccatgaaacgccgatagcaaggacaacacgtggcgacgcatcctcagataaagagatatggagaggatccgtcatgattgtcacacaagactcagaatcttcatacgatctcacgcccatactaagactttttgtgcagcccattgagctaatgccccctccacctgcagagcttcgagcagaagaaccgctctcgccagaatacgtcgacccgatcgcgggaataccgaaactcggccgccaaggagaaacactctatgtgcggcctgtcgagcatctggaggagggcagagatctctcgatatacgagccagatgatggcttgtttgagctgacaaggagcgctccagatttcaatgccaatactcccgaaccaccgggctctttcaccagtcgtaagaagcgcactgaggtggatggagagaagctggggaagttcaaagatgtgcgtggtatccggcttcacgaagaacgaggccacacattttggaggttcaacattgaagtcgaacttcgtgacaagcaacagcgcatcgcataccgcatcaaccgcggacctgccaccggtttctgggttccagcccgtggtgaatcgatgaacgtcatgttccacagttgtaatggatttagccacagcgtggaccctgatgagttcagtggccccgatcccatgtggcgggacgtcctgaatacccatcaaacacggcctttccatgtcatgataggcggtggagaccaggtttacaacgatgctgtgatggacggtactaaactttttcacgaatggctgcaaatcaagaatccactgcacaagagcaatgccccatttacagcagagatgcaagatgagctggagaacttctacctgcaaaggtacatgatgtggttctcgcaaggactattcggacttgccaattctcagatccctatggtcaacatgtacgatgaccatgacatcattgacggatttgggtcttaccctgatcatttcatgaaggcgcctgtcttttcaggcctgggcaacgttgcattcaaatactacatgcttttccagcatcaaagcctaccttgcgagacagaggactttgagcctagctggatcctcggagacaagcctggaccttatatcaatgaagcgagccatagcttgtttgtgtctctgggtgagagaatggcactcctcgccgtcgatgcccgaacagagaggacaagagaacaggtagtttcggaagaaacgtggaagaagctgatcgatcggtgttataatgagattgtcaagggaaagacacagcacttgcttgtcttacttggcgttcctatcgcgtatccccggcttgtctggttagaaaatatcttaacatcgagactcctggatccgatcaaagcccttggcaaagccgggctattaggcaatttcctcaataacttcgacggaggtgtagaagtccttgatgatctcgatgatcattggacagccaagaatcacaaagaggagcgcaaatttgtcattgaagatctgcaggatcttgcggcagacaaatccgtgcgggtgaccattctcagcggcgatgtgcatcttgccgccgtaggccaattctattccaatccgaagctgaagattctgaaacacaaggatttccgctacatgcccaacatcatctcttctgcgattgcaaacacgccaccgccagatctattagccgacgtgctgaacaagcgtaacaaagttcatcatttcgataaggagacggacgagagcatgatacccctattcacacatggagtcgacggaaaagcgcgaaataataaacacctcctgccccatcgtaattggtgctccatcagagagtacgtgccaggacacacaccgcctccaaccccgcctccggaagagtttgattatactcctgagggcacaccaccagccagtcgtggtggtattttccgccgcttgtcgctgtccaaaaacaagggccctgcactacgccctgacgtcccgaaagatgccgaccgctctcgaccacctatatcgggaggaggattcatgcgttccttctctcgccgaggttcagtctcaggcagctcagagcggtcaagctcatcgggcttgttccgcagtctatctctcggatctcgccgtaagaagaaccgaccggacgatggcggcataaatgggtcatggggtccggacgatgaagacgactttgtccagactccacctcgccgtattccacacgggggaggagatatcgggctccgaggtggtgcgggaggcagcgaatacgaagttggtgacgaggcgcacttcactgcgagaccaccacaacatgctttcacccaaccagtgcaaaaccctacgcactacgcaccggactctgaagaaggagaggaatggccacgggctgcgccacgaccttttcatcgcacgcctactggattgagtgtcaagaaactgaggaagaatggtgcagagcgatatgaagtgaatgtagagaatgggctggaggtctgtctcaatgtcgaggtcaaccccaaagaccctgctggcatcactgtcccgtacaaattacttgtaccaaaactgtggtacgaatacacgggcgaagatggtaccggtagcgatgttggcatcgaacaacacgctgcacatggccaagcgtatgaggaagaagacgcgggtatcgagaggccgaaacaggtctcgggcctcagacgctggtttagtggacgaggcaaaggggctgctgccaaggggcagatggacgggaatgaagactgggagaggtgggaggagagcgaggttagcagggtgagtagggtgtaa

SEQ ID NO: 16816 - protein, 1684 aa, Muscodor strobelii
  misc_feature: SGI Peptide ID NO. 565605
  misc_feature (652)..(1361): NCBI GI: 169602835 Blast Desc: SNOG_04421 [Phaeosphaeria nodorum SN15] gi|160706268|gb|EAT88181.2| SNOG_04421 [Phaeosphaeria nodorum SN15]
  misc_feature (724)..(1346): NCBI GI: 154321245 Blast Desc: BC1G_01497 [Botryotinia fuckeliana B05.10] gi|150852035|gb|EDN27227.1| BC1G_01497 [Botryotinia fuckeliana B05.10]
  misc_feature (660)..(1613): NCBI GI: 115389706 Blast Desc: conserved [Aspergillus terreus NIH2624] gi|114194754|gb|EAU36454.1| conserved [Aspergillus terreus NIH2624]
  misc_feature (660)..(1613): NCBI GI: 70993372 Blast Desc: conserved [Aspergillus fumigatus Af293] gi|66849167|gb|EAL89495.1| conserved [Aspergillus fumigatus Af293]
  misc_feature (660)..(1608): NCBI GI: 261205650 Blast Desc: conserved [Ajellomyces dermatitidis SLH14081] gi|239592621|gb|EEQ75202.1| conserved [Ajellomyces dermatitidis SLH14081]
  misc_feature (660)..(1613): NCBI GI: 159125534 Blast Desc: conserved [Aspergillus fumigatus A1163]
  misc_feature (660)..(1608): NCBI GI: 239611229 Blast Desc: conserved [Ajellomyces dermatitidis ER-3]
  misc_feature (660)..(1613): NCBI GI: 119499978 Blast Desc: NFIA_103370 [Neosartorya fischeri NRRL 181] gi|119414911|gb|EAW24849.1| conserved [Neosartorya fischeri NRRL 181]
  misc_feature (660)..(1613): NCBI GI: 255947140 Blast Desc: Pc22g02930 [Penicillium chrysogenum Wisconsin 54-1255] gi|211591354|emb|CAP97581.1| Pc22g02930 [Penicillium chrysogenum Wisconsin 54-1255]
  misc_feature (659)..(1608): NCBI GI: 258573867 Blast Desc: conserved [Uncinocarpus reesii 1704] gi|237901381|gb|EEP75782.1| conserved [Uncinocarpus reesii 1704]
MSASTPYWGQLPSPKARRFSDGSDRRYSLDQPTAPQSQLDSQRTSTQTESTFSPLASPTASNTPGGGLAPRPPSFPYAQHQYSDSIDRRRRRSNKSQADDVYDLAGSASPPPAAPDVPRGPPVSYKAPFGSPEPYTYNSGGQPAPPQSTYRSDRQPRVLAMEPETFYKDATPPAEQQSRQPVLDRNYQTFDDGVVSTEHLERELLRTGSLRRPTNGHRQSERLAPDPASSSQRRNSSAPDPQRNMWAADRSPLQKLELTLDGITKEEKRARVEAAERRARERAARNSASAGTAELERSSAAAPSAQKSKFYQELGEPRLDAVHVNKSPQVIVADPIPAKPSTAATRGTSSQSPYEDDNPTRLHKQSPRSQIPIPKKRNASSAENDGLPQRGLSFRDRAGSQDLGLPQDYADEPVKGVSGRGPATAIERSGSNKLKKNPPGDPWYAARREAEERSAAYDRLNSFDDNRYAEPVRTSHRDAHNTSEQVRNGPISTEELPRPPARGKAFADETYEEERPSRIRGLAAAIGLGRSNSMSNRQQPPSSHYQYESPTQNQEYSQGDEFDEPPAQKKGLTNITGFGKANSIDATRQPRVPGSALHDTELSERGTKSVKFQDGEHDSEMFGSNVADSGRHGHHLGHLFHREHLKPGLGMYKPPVYSEEWKKGAIGLLSESQMDLQEEPQHDQALDKNTPWWENDGKRRASFSAPSRKVQAYDGAHDDNRRRTRFTPPLYLKCGPLLRYCGMRHETPIARTTRGDASSDKEIWRGSVMIVTQDSESSYDLTPILRLFVQPIELMPPPPAELRAEEPLSPEYVDPIAGIPKLGRQGETLYVRPVEHLEEGRDLSIYEPDDGLFELTRSAPDFNANTPEPPGSFTSRKKRTEVDGEKLGKFKDVRGIRLHEERGHTFWRFNIEVELRDKQQRIAYRINRGPATGFWVPARGESMNVMFHSCNGFSHSVDPDEFSGPDPMWRDVLNTHQTRPFHVMIGGGDQVYNDAVMDGTKLFHEWLQIKNPLHKSNAPFTAEMQDELENFYLQRYMMWFSQGLFGLANSQIPMVNMYDDHDIIDGFGSYPDHFMKAPVFSGLGNVAFKYYMLFQHQSLPCETEDFEPSWILGDKPGPYINEASHSLFVSLGERMALLAVDARTERTREQVVSEETWKKLIDRCYNEIVKGKTQHLLVLLGVPIAYPRLVWLENILTSRLLDPIKALGKAGLLGNFLNNFDGGVEVLDDLDDHWTAKNHKEERKFVIEDLQDLAADKSVRVTILSGDVHLAAVGQFYSNPKLKILKHKDFRYMPNIISSAIANTPPPDLLADVLNKRNKVHHFDKETDESMIPLFTHGVDGKARNNKHLLPHRNWCSIREYVPGHTPPPTPPPEEFDYTPEGTPPASRGGIFRRLSLSKNKGPALRPDVPKDADRSRPPISGGGFMRSFSRRGSVSGSSERSSSSGLFRSLSLGSRRKKNRPDDGGINGSWGPDDEDDFVQTPPRRIPHGGGDIGLRGGAGGSEYEVGDEAHFTARPPQHAFTQPVQNPTHYAPDSEEGEEWPRAAPRPFHRTPTGLSVKKLRKNGAERYEVNVENGLEVCLNVEVNPKDPAGITVPYKLLVPKLWYEYTGEDGTGSDVGIEQHAAHGQAYEEEDAGIERPKQVSGLRRWFSGRGKGAAAKGQMDGNEDWERWEESEVSRVSRV

SEQ ID NO: 16817 - DNA, 5907 bp, Muscodor strobelii
  misc_feature: SGI EST ID NO. CUFF.39681.0
  misc_feature: Variant of the nucleotide sequence at SEQ ID NO 16815
cttcggtatcctgcaatcttctctgcagctcccgagtcctgtttcacactcggcactccctcgtagtttagaccattctccgtcaaacggggtgggagtattatgacggcacctttcagtagatatcatccttgcgccaatcttctatctagtgataaaagtccttcatgacccctgcagctgccaagattccccagccgcctcgaaaaaccaagaggcaccgccagtccgggagctaaataaggcacggtaacggcgagcgcaagctctcaagctctcatcggagctccctcgccttatcgctctgtcgatcttgcatgggtgaccagtttcctcacgatagcttcgtcttgaaacatccacattacatctgtatcctgcgacggcggctcagctacattttcttttgcctcaacccttttccgcccgtacagcgcataacacctagagtattccgtatagtcgcattgcatatacctgcgtggcattagtctattcatggacgtgtcctgcatgaacccacgaagctccgcgagcgcttataggcacaagctacaaaaagtcccatcttttgccaggttcgtcagccttgcttgcagcccaaccgcccggtcgagtctcgcgcgtctagtctttgcctgaaagatatgtctgcgtccactccatactggggccaattgccctcgcccaaagctcgtcgattctccgatggtagtgatcgcaggtattcattagatcaaccaacggctcctcagtctcagctcgattctcaacgtacttcaacccagaccgaatcgaccttctcgccgcttgcttctcctacagcatccaataccccaggaggcggtctagctccccgacctccctccttcccttatgcgcagcatcagtattccgacagcatagacagacgacgccggcgctcgaataagtcgcaagccgacgatgtctatgatttagcaggaagcgcatctcctcccccagctgctccagacgtacccagaggaccaccggtcagctacaaagctccttttggcagccccgaaccatacacctataactctggcggtcaaccggccccgcctcagtcgacttacagatccgatcgccaacccagagttctcgccatggagccggaaaccttctacaaggatgccacaccgcccgcggagcagcagtcaaggcaacctgtactggaccgcaattaccagacttttgatgatggcgttgtatcgactgaacacctggagagagagttgcttaggaccggctcgctgcgacggccaacaaacgggcaccgccaatccgaaagacttgcgccagaccctgcgtcatcgtcgcaaaggcgaaactcatcggctccagatccacagcgcaacatgtgggccgccgaccgctcaccactgcagaagctagagctgacgctcgatggcattacgaaagaggaaaagcgagctcgggtggaagctgctgagcgacgcgccagggagagagccgcaagaaacagcgcctctgcaggtactgctgagttggagagatcatctgctgcagccccatctgcacaaaaatctaaattttatcaagaattgggtgaaccacggcttgacgcagttcacgtcaataagagccctcaagtaattgtggctgacccaatcccagctaagccgtcaacggctgcgacacgaggcacatcatcgcaatctccgtacgaagacgataaccccactagactacataagcagtcaccgagatctcagatcccgatacccaagaagcgcaacgcatccagcgcagaaaacgacgggttgccacaacgtggtttgagcttcagggacagagccggctcgcaagacctcggattgccacaagattatgccgatgagccggtgaagggggtttccgggagaggtcccgccaccgccattgagagaagtggaagtaacaagttgaagaagaacccgcctggcgatccatggtatgctgcacgcagagaggccgaagaaagatccgccgcgtacgacagattgaattctttcgatgacaaccgttatgcagaacccgtccgcacgagtcatagagatgcgcacaatacaagcgagcaagtcagaaacgggcccatctcgaccgaagaactccctcgaccgccagctcgaggcaaagctttcgcagatgaaacttacgaggaggaacggccgagtcggataagaggtcttgctgcagcgattggtctcggacgatcaaactcgatgagcaaccgtcaacaacctccctcgtcacattatcagtatgaatcaccaacgcagaaccaagaatattcacaaggagatgaatttgatgaaccaccggcccagaagaaaggacttaccaacatcactggctttggtaaggccaattccatagacgcgacgcgtcaaccccgggtacccggatcagccttgcacgacaccgaattgagtgaacggggcacaaagtcagtcaagtttcaagatggcgaacatgatagtgagatgtttggcagcaatgttgctgattctggtcgccacggacatcatttgggccacttgttccacagagaacatctcaagcctgggctgggaatgtacaagccgcctgtctattcagaggaatggaagaaaggcgcaatagggctgctgtctgagtctcaaatggacctccaagaggagcctcaacatgaccaagcgcttgataagaatacgccttggtgggagaatgatggcaagcgtcgagccagcttctcagcaccctctcgcaaagtccaagcatacgacggcgcgcatgatgacaaccggagacgtaccaggttcacaccacccctctatctcaaatgtggacctttgttacgatattgtggtatgcgccatgaaacgccgatagcaaggacaacacgtggcgacgcatcctcagataaagagatatggagaggatccgtcatgattgtcacacaagactcagaatcttcatacgatctcacgcccatactaagactttttgtgcagcccattgagctaatgccccctccacctgcagagcttcgagcagaagaaccgctctcgccagaatacgtcgacccgatcgcgggaataccgaaactcggccgccaaggagaaacactctatgtgcggcctgtcgagcatctggaggagggcagagatctctcgatatacgagccagatgatggcttgtttgagctgacaaggagcgctccagatttcaatgccaatactcccgaaccaccgggctctttcaccagtcgtaagaagcgcactgaggtggatggagagaagctggggaagttcaaagatgtgcgtggtatccggcttcacgaagaacgaggccacacattttggaggttcaacattgaagtcgaacttcgtgacaagcaacagcgcatcgcataccgcatcaaccgcggacctgccaccggtttctgggttccagcccgtggtgaatcgatgaacgtcatgttccacagttgtaatggatttagccacagcgtggaccctgatgagttcagtggccccgatcccatgtggcgggacgtcctgaatacccatcaaacacggcctttccatgtcatgataggcggtggagaccaggtttacaacgatgctgtgatggacggtactaaactttttcacgaatggctgcaaatcaagaatccactgcacaagagcaatgccccatttacagcagagatgcaagatgagctggagaacttctacctgcaaaggtacatgatgtggttctcgcaaggactattcggacttgccaattctcagatccctatggtcaacatgtacgatgaccatgacatcattgacggatttgggtcttaccctgatcatttcatgaaggcgcctgtcttttcaggcctgggcaacgttgcattcaaatactacatgcttttccagcatcaaagcctaccttgcgagacagaggactttgagcctagctggatcctcggagacaagcctggaccttatatcaatgaagcgagccatagcttgtttgtgtctctgggtgagagaatggcactcctcgccgtcgatgcccgaacagagaggacaagagaacaggtagtttcggaagaaacgtggaagaagctgatcgatcggtgttataatgagattgtcaagggaaagacacagcacttgcttgtcttacttggcgttcctatcgcgtatccccggcttgtctggttagaaaatatcttaacatcgagactcctggatccgatcaaagcccttggcaaagccgggctattaggcaatttcctcaataacttcgacggaggtgtagaagtccttgatgatctcgatgatcattggacagccaagaatcacaaagaggagcgcaaatttgtcattgaagatctgcaggatcttgcggcagacaaatccgtgcgggtgaccattctcagcggcgatgtgcatcttgccgccgtaggccaattctattccaatccgaagctgaagattctgaaacacaaggatttccgctacatgcccaacatcatctcttctgcgattgcaaacacgccaccgccagatctattagccgacgtgctgaacaagcgtaacaaagttcatcatttcgataaggagacggacgagagcatgatacccctattcacacatggagtcgacggaaaagcgcgaaataataaacacctcctgccccatcgtaattggtgctccatcagagagtacgtgccaggacacacaccgcctccaaccccgcctccggaagagtttgattatactcctgagggcacaccaccagccagtcgtggtggtattttccgccgcttgtcgctgtccaaaaacaagggccctgcactacgccctgacgtcccgaaagatgccgaccgctctcgaccacctatatcgggaggaggattcatgcgttccttctctcgccgaggttcagtctcaggcagctcagagcggtcaagctcatcgggcttgttccgcagtctatctctcggatctcgccgtaagaagaaccgaccggacgatggcggcataaatgggtcatggggtccggacgatgaagacgactttgtccagactccacctcgccgtattccacacgggggaggagatatcgggctccgaggtggtgcgggaggcagcgaatacgaagttggtgacgaggcgcacttcactgcgagaccaccacaacatgctttcacccaaccagtgcaaaaccctacgcactacgcaccggactctgaagaaggagaggaatggccacgggctgcgccacgaccttttcatcgcacgcctactggattgagtgtcaagaaactgaggaagaatggtgcagagcgatatgaagtgaatgtagagaatgggctggaggtctgtctcaatgtcgaggtcaaccccaaagaccctgctggcatcactgtcccgtacaaattacttgtaccaaaactgtggtacgaatacacgggcgaagatggtaccggtagcgatgttggcatcgaacaacacgctgcacatggccaagcgtatgaggaagaagacgcgggtatcgagaggccgaaacaggtctcgggcctcagacgctggtttagtggacgaggcaaaggggctgctgccaaggggcagatggacgggaatgaagactgggagaggtgggaggagagcgaggttagcagggtgagtagggtgtaagactgagttacctacctaatgccgagatggatacatagggcttttgagtacatatctatatttgtttcctgtaggctattctttgcttttcgtttgagctggagcatggcggtacactgctttgatgggttttaggttggcattgcgtggatagggtaggataggataggcgtggaaagacatggtaatgagtatgcaatatatg

SEQ ID NO: 16818 - DNA, 2445 bp, Muscodor strobelii
  misc_feature: SGI cDNA ID NO. 565606
  misc_feature: Encodes the peptide sequence at SEQ ID NO 16819
atgaagctcgcgtctctggcgggcctcgtcctcggcggcctggctggcctaggcagcgccgccctctactcccgagacttcgacgccaacgactactacgtcctccatctcgaccgctctgccaatccagaacacgtagcgtcgcgcctggggctgcggaacgagggccagctcggcgaactggcagaccattacatcttccgcgcgcccagggcagagcacgatgtcgtccgcagggaagttaaggaccggcggaggaagcgatccctcggcaccaccgacgtcctcgaccaagtattggcctcccacaagcagaaactacgggcgcccatgcagaagcgagtcgttccgccccctccggccggcttcttcccccgcaaaccgcaagacggcgccgatgccgacgccctcaagcggcagaagtcggtcatgaagaccctcgacatcagcgaccccatcttcaccgagcagtggcatctgttcaaccccatgcaggtcggccacgacgtcaatgtcaccgatgtctggttggcgggcgtcactggcaagaacgccaccgtcgccattgtcgacgacgggctagacctgtacagcagagatctgcagcccaactactacagctttggcagctgggacttcaacgaccaacgacccgagcccaagcccaccctgagcgatgaccgccacggaacacgatgtgcaggagaggtgtctgccgccaagaacgacgtctgtggcatcggtgttgcctacgactccaaaattgccggcatccgcatcctcagcgcccccatcagcgacgccgacgaagccgccgctctcaactacgacttccaacacaaccagatatactcctgctcctggggcccacccgacgacggcaagtccatggatgcgcctggcattctcatcaaaaaagccatgctcaatgctgtccagaagggccgcaacggcttgggctccatctatgtatttgctagcggcaacggggcagcgagcgaagacaactgcaacttcgacggatacaccaacagcatctacagcatcaccgtgggcgctatagaccgacagggtatacatccttactactcggagaaatgctccgcccaactggttgtcacttatagcagtggcagcggtgatagcattcatacgactgatgttggcgagaacaaatgcgccgacggacatggtggtacgtcagctgcagcacccttggctgcgggtatctttgctttggctctagaggttcgcccagatctgtcctggagagatatgcagtacattgctctgatgagtgctgtccctgtcgatcttgacactacagagtggcaggatacgtccattggtaagaagttcagtcacaccttcggctatggaaaggtcgacagttgggcactcgtggagacggcgaagacatggaagaacgtcaagccacaggcatggtattactctccctggttgcacgtcaagaaggagatcccccaaggcgacaagggactgtctgtcaccttcgaagttaccaaggatatgctcaaggaggccaaccttgcacgtctggagcacgtgacagtcacgatgaacgtggagcatactcgacgaggtgacttgagtgtcgatctgatcagccctgacaatgtcgtaagccatatctcggccacgagaaagatggacacggctgatacgggctacgatgactggacgttcatgagtgtagctcactggggtgaattgggcgtcggaaaatggaccctcatcgtccgagacacagaagtcaacgacttcaaaggcaactttatcgactggcatcttaaattgtggggagagagcattgatgcatccaaggctaaactccttcccatgcctacagaggaagacgacgatgaccacgatgctattgccaccacaacggccgttgcctccaccacgagcctagagcctgttcctaccaagtcagcggtgcctacttcgctccctgacgaccatcccgaacgacccagcaagcccaccgagactggaagcagcacaagctcctctccaactactggacctacaaattcatcagctgcccacagctcatggttaccctccttcctgcccacatttggcgtctcatcaagaacccaaatatggatctattcggcgcttgcgctcattgtggcattctgctctgggctcggcatctggctctggatggtgcgacgcaagagactcaggaacaatccccgagatcagtacgaattcgagcccctgaacccagatgaaaatgagggtcttgctggtggacgagaaaaaggctccaggagacgaggtggagaattgtacgatgcttttgccgatggcagcggtgatgaagatgagcatggaagtcttgtttcagaaagtgatgatgaagatggccacaatagggagaaagggaccgggaggttgatgggtgaccattag

SEQ ID NO: 16819 - protein, 814 aa, Muscodor strobelii
  misc_feature: SGI Peptide ID NO. 565606
  misc_feature (520)..(606): Pfam Id: PF01483 Pfam Desc: Proprotein convertase P-domain
  misc_feature (165)..(460): Pfam Id: PF00082 Pfam Desc: Subtilase family
  misc_feature (22)..(787): NCBI GI: 156054358 Blast Desc: SS1G_06027 [Sclerotinia sclerotiorum 1980] gi|154703807|gb|EDO03546.1| SS1G_06027 [Sclerotinia sclerotiorum 1980]
  misc_feature (1)..(787): NCBI GI: 154321249 Blast Desc: BC1G_01499 [Botryotinia fuckeliana B05.10] gi|150852037|gb|EDN27229.1| BC1G_01499 [Botryotinia fuckeliana B05.10]
  misc_feature (1)..(787): NCBI GI: 171694924 Blast Desc: protein product [Podospora anserina] gi|170947704|emb|CAP59866.1| protein product [Podospora anserina]
  misc_feature (1)..(798): NCBI GI: 85117755 Blast Desc: NCU03219 [Neurospora crassa OR74A] gi|28927126|gb|EAA36083.1| NCU03219 [Neurospora crassa OR74A]
  misc_feature (1)..(813): NCBI GI: 46134033 Blast Desc: FG09156.1 [Gibberella zeae PH-1]
  misc_feature (7)..(779): NCBI GI: 116182630 Blast Desc: CHGG_01943 [Chaetomium globosum CBS 148.51] gi|88186240|gb|EAQ93708.1| CHGG_01943 [Chaetomium globosum CBS 148.51]
  misc_feature (1)..(803): NCBI GI: 170674482 Blast Desc: kexin-like protease [Epichloe festucae]
  misc_feature (1)..(785): NCBI GI: 256720842 Blast Desc: [Nectria haematococca mpVI 77-13-4]
  misc_feature (25)..(787): NCBI GI: 261355280 Blast Desc: kexin [Verticillium albo-atrum VaMs.102]
  misc_feature (1)..(752): NCBI GI: 78192421 Blast Desc: Kex2 [Cryphonectria parasitica]
  misc_feature (25)..(618): SWISSPROT Homolog: EC 3.4.21.61 Kexin
MKLASLAGLVLGGLAGLGSAALYSRDFDANDYYVLHLDRSANPEHVASRLGLRNEGQLGELADHYIFRAPRAEHDVVRREVKDRRRKRSLGTTDVLDQVLASHKQKLRAPMQKRVVPPPPAGFFPRKPQDGADADALKRQKSVMKTLDISDPIFTEQWHLFNPMQVGHDVNVTDVWLAGVTGKNATVAIVDDGLDLYSRDLQPNYYSFGSWDFNDQRPEPKPTLSDDRHGTRCAGEVSAAKNDVCGIGVAYDSKIAGIRILSAPISDADEAAALNYDFQHNQIYSCSWGPPDDGKSMDAPGILIKKAMLNAVQKGRNGLGSIYVFASGNGAASEDNCNFDGYTNSIYSITVGAIDRQGIHPYYSEKCSAQLVVTYSSGSGDSIHTTDVGENKCADGHGGTSAAAPLAAGIFALALEVRPDLSWRDMQYIALMSAVPVDLDTTEWQDTSIGKKFSHTFGYGKVDSWALVETAKTWKNVKPQAWYYSPWLHVKKEIPQGDKGLSVTFEVTKDMLKEANLARLEHVTVTMNVEHTRRGDLSVDLISPDNVVSHISATRKMDTADTGYDDWTFMSVAHWGELGVGKWTLIVRDTEVNDFKGNFIDWHLKLWGESIDASKAKLLPMPTEEDDDDHDAIATTTAVASTTSLEPVPTKSAVPTSLPDDHPERPSKPTETGSSTSSSPTTGPTNSSAAHSSWLPSFLPTFGVSSRTQIWIYSALALIVAFCSGLGIWLWMVRRKRLRNNPRDQYEFEPLNPDENEGLAGGREKGSRRRGGELYDAFADGSGDEDEHGSLVSESDDEDGHNREKGTGRLMGDH

SEQ ID NO: 16820 - DNA, 3136 bp, Muscodor strobelii
  misc_feature: SGI EST ID NO. CUFF.39979.1
  misc_feature: Variant of the nucleotide sequence at SEQ ID NO 16818
tgacatgcaacgctgaccatcgtgctgcgtctcgctatcatccccaaactcattatttcctgggccgggtagtctgcaattgcaacaacttctcgaccctacgtataatctcgacatttctctcgttctcgtcatccggtattcttaatacgcacatcacccatagccgttggcgtagatggcgctggccgtttaaaagtgtattgttctttcacagccacccaccgaaaaggggtcggttcgtactcattgtttcaggtcgacgccaacctgccatcagtccttctcgcggccatctcgaatagcgagtcttaatctcacttcaagccagcctcgacattcgaaaccatacattcgccgccatgaagctcgcgtctctggcgggcctcgtcctcggcggcctggctggcctaggcagcgccgccctctactcccgagacttcgacgccaacgactactacgtcctccatctcgaccgctctgccaatccagaacacgtagcgtcgcgcctggggctgcggaacgagggccagctcggcgaactggcagaccattacatcttccgcgcgcccagggcagagcacgatgtcgtccgcagggaagttaaggaccggcggaggaagcgatccctcggcaccaccgacgtcctcgaccaagtattggcctcccacaagcagaaactacgggcgcccatgcagaagcgagtcgttccgccccctccggccggcttcttcccccgcaaaccgcaagacggcgccgatgccgacgccctcaagcggcagaagtcggtcatgaagaccctcgacatcagcgaccccatcttcaccgagcagtggcatctgttcaaccccatgcaggtcggccacgacgtcaatgtcaccgatgtctggttggcgggcgtcactggcaagaacgccaccgtcgccattgtcgacgacgggctagacctgtacagcagagatctgcagcccaactactacagctttggcagctgggacttcaacgaccaacgacccgagcccaagcccaccctgagcgatgaccgccacggaacacgatgtgcaggagaggtgtctgccgccaagaacgacgtctgtggcatcggtgttgcctacgactccaaaattgccggcatccgcatcctcagcgcccccatcagcgacgccgacgaagccgccgctctcaactacgacttccaacacaaccagatatactcctgctcctggggcccacccgacgacggcaagtccatggatgcgcctggcattctcatcaaaaaagccatgctcaatgctgtccagaagggccgcaacggcttgggctccatctatgtatttgctagcggcaacggggcagcgagcgaagacaactgcaacttcgacggatacaccaacagcatctacagcatcaccgtgggcgctatagaccgacagggtatacatccttactactcggagaaatgctccgcccaactggttgtcacttatagcagtggcagcggtgatagcattcatacgactgatgttggcgagaacaaatgcgccgacggacatggtggtacgtcagctgcagcacccttggctgcgggtatctttgctttggctctagaggttcgcccagatctgtcctggagagatatgcagtacattgctctgatgagtgctgtccctgtcgatcttgacactacagagtggcaggatacgtccattggtaagaagttcagtcacaccttcggctatggaaaggtcgacagttgggcactcgtggagacggcgaagacatggaagaacgtcaagccacaggcatggtattactctccctggttgcacgtcaagaaggagatcccccaaggcgacaagggactgtctgtcaccttcgaagttaccaaggatatgctcaaggaggccaaccttgcacgtctggagcacgtgacagtcacgatgaacgtggagcatactcgacgaggtgacttgagtgtcgatctgatcagccctgacaatgtcgtaagccatatctcggccacgagaaagatggacacggctgatacgggctacgatgactggacgttcatgagtgtagctcactggggtgaattgggcgtcggaaaatggaccctcatcgtccgagacacagaagtcaacgacttcaaaggcaactttatcgactggcatcttaaattgtggggagagagcattgatgcatccaaggctaaactccttcccatgcctacagaggaagacgacgatgaccacgatgctattgccaccacaacggccgttgcctccaccacgagcctagagcctgttcctaccaagtcagcggtgcctacttcgctccctgacgaccatcccgaacgacccagcaagcccaccgagactggaagcagcacaagctcctctccaactactggacctacaaattcatcagctgcccacagctcatggttaccctccttcctgcccacatttggcgtctcatcaagaacccaaatatggatctattcggcgcttgcgctcattgtggcattctgctctgggctcggcatctggctctggatggtgcgacgcaagagactcaggaacaatccccgagatcagtacgaattcgagcccctgaacccagatgaaaatgagggtcttgctggtggacgagaaaaaggctccaggagacgaggtggagaattgtacgatgcttttgccgatggcagcggtgatgaagatgagcatggaagtcttgtttcagaaagtgatgatgaagatggccacaatagggagaaagggaccgggaggttgatgggtgaccattaggactgattcacttgcatggttggtgttgggttgatacattcttttgcctaggtgttgacgcggtcttgaacgaagtctggcctaaatgctagagatagaatgagggataggcgtctgcctctgtacataccttgcatacttagcgaacataacttacacgggttgtcatttctatcttatacgagccttcggcaacgaccttgagcgagtcttgattatgtctcgttgattaacgatgattgcaaaatcgcgacttactgtcacgacggaatctcaactacagtagaatagcttgtaaagagcttgttatcgtaccaatcattgggcgc

SEQ ID NO: 16821 - DNA, 1176 bp, Muscodor strobelii
  misc_feature: SGI cDNA ID NO. 565608
  misc_feature: Encodes the peptide sequence at SEQ ID NO 16822
atgtctcctcgcccttctcaatgggcaatccccctattcgtaactctaggtgtacccgtcggtctctacgtaagcttcatacttcttggctctgtgcctttcttccagagacacttcttttatgcccacaaaataaacacgttgttttggcacgatctgaataagccagagtattggggctttgctcataagcaggttactcctttttctataccttcatctgatggcaattcgatctacgcttggcatatcttgccaatgaatatatacctcaagcatgaagagcagcttcagactggtccggctggatttgccaatgacatcactgctacggagccctttaaaatcttgaaagatgaccctgatgcactactagtcgtttccttccatggtaatgctgggcatattgctcagggcgtgagaaccgatcactttcactctttaactgatacttcgaactaccacgttttgactatagattatcgggggtatggaaaatcacagggcaccccatccgaagctggtctgatcgaagacggcgttgccgctgtaaactgggccatggatgtagcgggcgtgccctcaagccgaattctcgtaatgggtcaaagtctcgggactgccgtgacgagtggcgtcgtcgagcactttgcacagaaaggcattgaattcgctggcgttatgctcattgccggtttctcaaacgtacccactctccttggttcctacagaggtggtggtgtggtcccagtcctttctcctttccgccgtgtaccgcctttgatgcgtttctttcaaaagtttattgtagacaagtggcagtccgacaatcgcctcgccacgatagtgggcttgacgcggacaagattacgtttgacattactacatgccaaagatgacgctgagattccttgtctccaaagtgacctccttttcagatcggccgtcacagcggccagtgcagaggaattggatgacgcagccttcaagacatggaaaaaggagatcagtatacatagagacgacggttcgttcatttccgtcgtcaaagccaacccaaacatcatcattcggcaggagctcattccgcacggagggcataacggcgttatgctgtcttcagctgtcaccctagcagccatgagatcgttctctcctgatgaagagttgatttga

SEQ ID NO: 16822 - protein, 391 aa, Muscodor strobelii
  misc_feature: SGI Peptide ID NO. 565608
  misc_feature (154)..(242): Pfam Id: PF00561 Pfam Desc: alpha/beta hydrolase fold
  misc_feature (12)..(384): NCBI GI: 46135761 Blast Desc: FG09396.1 [Gibberella zeae PH-1]
  misc_feature (4)..(326): NCBI GI: 256734839 Blast Desc: NECHADRAFT_75511 [Nectria haematococca mpVI 77-13-4]
  misc_feature (9)..(384): NCBI GI: 261355393 Blast Desc: conserved [Verticillium albo-atrum VaMs.102]
  misc_feature (14)..(366): NCBI GI: 116203857 Blast Desc: CHGG_09812 [Chaetomium globosum CBS 148.51] gi|88175940|gb|EAQ83408.1| CHGG_09812 [Chaetomium globosum CBS 148.51]
  misc_feature (14)..(384): NCBI GI: 255937581 Blast Desc: Pc13g14090 [Penicillium chrysogenum Wisconsin 54-1255] gi|211584437|emb|CAP92478.1| Pc13g14090 [Penicillium chrysogenum Wisconsin 54-1255]
  misc_feature (18)..(390): NCBI GI: 145610921 Blast Desc: MGG_00804 [Magnaporthe grisea 70-15] gi|145018258|gb|EDK02537.1| MGG_00804 [Magnaporthe grisea 70-15]
  misc_feature (14)..(382): NCBI GI: 238840621 Blast Desc: abhydrolase domain-containing protein 12B [Microsporum canis CBS 113480]
  misc_feature (14)..(384): NCBI GI: 145241450 Blast Desc: An09g00470 [Aspergillus niger] gi|134077909|emb|CAL00307.1| protein product [Aspergillus niger]
  misc_feature (4)..(385): NCBI GI: 46140153 Blast Desc: FG11591.1 [Gibberella zeae PH-1]
  misc_feature (11)..(384): NCBI GI: 39946410 Blast Desc: MGG_08306 [Magnaporthe grisea 70-15] gi|145020049|gb|EDK04277.1| MGG_08306 [Magnaporthe grisea 70-15]
  misc_feature (20)..(320): SWISSPROT Homolog: EC 3.1.1.23 Acylglycerol lipase
MSPRPSQWAIPLFVTLGVPVGLYVSFILLGSVPFFQRHFFYAHKINTLFWHDLNKPEYWGFAHKQVTPFSIPSSDGNSIYAWHILPMNIYLKHEEQLQTGPAGFANDITATEPFKILKDDPDALLVVSFHGNAGHIAQGVRTDHFHSLTDTSNYHVLTIDYRGYGKSQGTPSEAGLIEDGVAAVNWAMDVAGVPSSRILVMGQSLGTAVTSGVVEHFAQKGIEFAGVMLIAGFSNVPTLLGSYRGGGVVPVLSPFRRVPPLMRFFQKFIVDKWQSDNRLATIVGLTRTRLRLTLLHAKDDAEIPCLQSDLLFRSAVTAASAEELDDAAFKTWKKEISIHRDDGSFISVVKANPNIIIRQELIPHGGHNGVMLSSAVTLAAMRSFSPDEELI

SEQ ID NO: 16823 - DNA, 7327 bp, Muscodor strobelii
  misc_feature: SGI EST ID NO. CUFF.39925.0
  misc_feature: Variant of the nucleotide sequence at SEQ ID NO 16821
tgatcagtgggctactcatcactacctaaggtattgggatgacgtcgcactatcatcagcggccgaggcatctcgcaagggctgttgataaatcttcagatgaacaaagatagacttagatagacggcttttgcatcagattgagtgttgcacttataccagatagattaaagtgtaatatactcacacgacatttatattcgcgcacttcttacgacctcgttacttagcaagagaccggctcattacaatcatggcgaaagccgaagcgaaattcccctccgtcaccgaaatagccaaggcggaggcctttcccacagtgacatgggacttggaaccacacagcgaagggtatctccccgtggcagcaggacgaggagggccactcaatgtccattgggagatccacggtgaagggccagtgaaagtcgtcttcgtatgcggcatggctgtcttcaagacctcatatcaaagacagactatgcatttcgggcacgtaaatggagacaagtactccgtactgcttattgataatcgaggaatgggtcgctcagataaacccttgatgagatacagttcgagcgctatggcggctgatgtcatcgaggtgttggatcacgttgagtggactggagagaggcaactacatatttgtggacttagtctgggagggatgatatctcaagaaattgcctacgcgatacccgagaggatcgcaagtttgaatctctgctgcacagcagcaaagattgagaacacgacgactttcaccgaaaacatgatgaaccgcatcacgatgcttctacctaaaagcccagacagaagtctctcctacagcgcagcagccctcttcccagcgcaatggctcttagaacccgacaccgacaccgtccccacgccctccacaccacgcgtccgcggcggtccatacctgcatttccgcacaaactacgagcgattcggcgcgcaagaaatcaccaaatcgcggtctccagacttcacaaagaccggattcttcctccagctgatcgcaggaggctggcatcacaaatccccagaccaactaaaaaccatcggcgataccgtaggcagagacaggatactggtcatacatgggacagaggatagagtgatcacttgtccccatggagagaagttgatcaagtatttgcagcccggtaggagtatgattattgatggcatgggacatgcgcctgttatggagcgcgcggcttggtttaatgggttgatcgaggagatgattgagaaaggggagaagctgagtggtcggtagcggaagtaatagagagaattagggagatttctagatacgggtgagatccatgggtaacgtgatatgaaaaccataccatctggaccctagccatgtgaacgcatgacagcaggctcacgaatcgccatgttcgtaaatctgctagccgtggcgtggtagtaggcgagacagaacgtgctgagatcacgggttacatgagaaagcgttccattgagtgatgtccatcaattcactgtcggagtatctttttctacttctacagttgtcgcagcgctcttgcaaagcacagagatagctgtctcaacaaagccctcgcaataatctagacaagtcttcttttgaaccgccagacgcgaaatccgtacaccaatgctgaatattcccacacgtttctaaacctcaaatcatggtccatacctatccccacactgtgtcccgaaaatcatagccgtcgttctgataccaacaccaggcccctcacactcaacgaggcttaagagacgttactgataaaactctgataagcttcgtcttcggtcggttgcatcaaagcaacaggtttcgccagcacgggcttagcggcggcaataggtctgacatcccacatcacacctggcagttgtggttgttgctgtaccattgaatgatcggctcgaggtgcgtccgaattgtcgtccgcgacatcttctctatccgacttgggaagtcgcatggccagcaaaagatattcggatctcgtcatgttctccatgacatcatccatatacttctgtacctcatcttgtggtgcaacaactcgctgcaggttttcgaggattttggcagaatgagcccatatgcgcagcgtcatgggctggtagaaatccatcgaaggatctccaccatgttccagtctgctgcccttcctgacaatcaggaacgaaacaacgactgatgacttgtcgtcggagaattcaaggatgctgtatttcggaaacaggtatctgtcacctgtacctccggcaaactcgaagacgaccgccgcaatgtcggacttcgctgcaggtggaggtccctttgaacgtagcgcttgctgggcgttttgtgggccagggcctgctggtttcttggatgctgaaccattccctgtcgacgtcgctgttgcttccgtctctccgtcccccttgatcctagtaagggatgcttgagaagtagcctgggcattcatatgtggttttggaggaatgttggcttctctgtcaagcaccgtcttcattcgctccagaatggccttgagctcggtagtatcggtgtactttgtcttgccagtgtgtatgcgccgaaccatctcattcaaattcttgtcctcgaggcatcttctcacgaggtagacaatcaaggggtcgctgccaggcggtggccgcagatcggcccctcgttgcttctcgttgccgctcaggacgatgtagaggatagccatagcctcgtccacaatatacttgacactcttgccgtcgacaagcagccggtcagcagccggcccaacagtgccaccgccattcctatattcgagggtgatttgatcgataatgttctggaagtgagccagctcgttgggagcagcctctccaacggccactctcttcataagatctcggagcgctggattctctgatgccttttcggctagggtcacgatgatcgggtcctgaccatggggcacaacgggcgggggcttcgtggagggcggagtcaatctggccggaccgacgcctgcgggggacgttgaaatgccagggactggaggcggtaccggtggagctgctggagttgctgtgtgcagtcctgcgctttgcggctgtgacagagggagctgggctggtcgcggaggtgccgacacagctggtgcatgtgcgggctgcggcggagcgaggacggactcaaggccacggggagaagcgagttctttcgtgggtagtatgggctgtgtcggctgctgcgtcggcattggaggtcgctgaagatccattggggctggcggcgctgttggcccgggaggcatctgctgtgctggcagcctgccattgtccgtgctcggcaaggatacgggctgcggcggcgggactccttgtggaggctggaccggtgattgtgtgtgcgagggactcgccatgggtgcaacgggtgctgaggtggacggggtggcaggtatagatgtcggtgcagtgctcggcttaggaggaggtggcatgccatcgttgggagggccatactggaggatagggcggacggtcgagggagtggcaggaggaggcttcgggtccttgacggcgtagatggtggcatcgagcacgtggggttcgacggtgatggtgacctggccgatcttggtcatggtgtccttggcggggttgttggcgtcttccttgacgacgcctttcttcttggaaggcttggtccagtacttctcgaagatgccctcgttcagccacttctgacgggatcgcgtcagggactcggccatgacgccgctgaggagaaaggtgtcagtggttttctatgggagaaccgcacgtgcatcaacaggatcgtacctttcctgtatggactggtagtccttggaagacaggtcatcttgctgaggcttctcgaccgtcggcaacggctggcctggctgtatggcggtgggcaagggagcaggcggcgagggctcccgggctggggggtcggagggcggaggagaggccgacttgggcgcagaagcaggcgtcgcaacagacgagtccggagtgatgttgcgtctcttggaggcactctcgttgcgtgctgcggccctagctggcagcttgcgttttctctccatgggaggcgagagtgcggcgagagtgcggcgagaatgcgtcgctgtcgtcgttgtcgagctacgaaggcatgtgaggctgcgaggccgtgctccaatatgtgagggccgagacgacgcggttgcgcgcccacgttggcgctcgatcaggactctaaaaccaaggtatcccagcaagggagagcttcctatgacgtgtcaatcggacaatagatcatatgcacatctgcatggagtcaccgagctgtgtcaacgacgaaacagagtcttcaacgaggctgtgatgtgagtgttgacatatgcagcagccaagttcggcgaaagagctatgacacaccctctaagctggaaaagcacggcattctgcagggaagagacactccaagtttggtgggggcaggcacgccgaccactgattgaagtttgtgcctgccactagctgccctttctggtcatccaactgtctctaattgctccaaagccccaaactcgtgcaggcaggtacgcccaccaatcctgcagtccttatgtgcatttatctgatatttgaatatcttcgactcaacctccattcatctgaggtcatccctctgccatcatcacttcactacctaggtagcaacaatccttctctcgctcaacgacattattccaggctactatatcaactgctttggcttattgcgttcaatttcctttctattcactgtctagataatagagatagattgtatcagacgttgaagccagtctaatcaatcccttgaagtgcccacgttacttatcttagctatctgtttgttaattcattgcgagttagcttctgctctctaagcacgtctcacaacaaactgtcaaatacttttgttctcattccttgtcgcaaaagctcgctttagcagcaaccggctgagcctcgtttgagcatgtctcctcgcccttctcaatgggcaatccccctattcgtaactctaggtgtacccgtcggtctctacgtaagcttcatacttcttggctctgtgcctttcttccagagacacttcttttatgcccacaaaataaacacgttgttttggcacgatctgaataagccagagtattggggctttgctcataagcaggttactcctttttctataccttcatctgatggcaattcgatctacgcttggcatatcttgccaatgaatatatacctcaagcatgaagagcagcttcagactggtccggctggatttgccaatgacatcactgctacggagccctttaaaatcttgaaagatgaccctgatgcactactagtcgtttccttccatggtaatgctgggcatattgctcagggcgtgagaaccgatcactttcactctttaactgatacttcgaactaccacgttttgactatagattatcgggggtatggaaaatcacagggcaccccatccgaagctggtctgatcgaagacggcgttgccgctgtaaactgggccatggatgtagcgggcgtgccctcaagccgaattctcgtaatgggtcaaagtctcgggactgccgtgacgagtggcgtcgtcgagcactttgcacagaaaggcattgaattcgctggcgttatgctcattgccggtttctcaaacgtacccactctccttggttcctacagaggtggtggtgtggtcccagtcctttctcctttccgccgtgtaccgcctttgatgcgtttctttcaaaagtttattgtagacaagtggcagtccgacaatcgcctcgccacgatagtgggcttgacgcggacaagattacgtttgacattactacatgccaaagatgacgctgagattccttgtctccaaagtgacctccttttcagatcggccgtcacagcggccagtgcagaggaattggatgacgcagccttcaagacatggaaaaaggagatcagtatacatagagacgacggttcgttcatttccgtcgtcaaagccaacccaaacatcatcattcggcaggagctcattccgcacggagggcataacggcgttatgctgtcttcagctgtcaccctagcagccatgagatcgttctctcctgatgaagagttgatttgattccgcaagccatctggattcttctaccttcaataccttataacaactgcctcggaagaaacctctcgatcagggaaacgattgaaaataaggctgcgatagaatgacacgatctcctcagcaaccagacgcttcggcagcctatagacctgtgcttacaccaaataacttgaatccatggcacgcggaacgtacaccggtggcaatgcatccgacatgtctttttcgtcagattcaaagagccaccgtgaacaatcgtcgatagccatagtatttgtccgcacaatacttttcttcctgtccaccttcgagtaactcagccccgaactagttcgtgccttgacggttgtcacgtttgtccgtctcaatgagccaaacttaaaatgtcactcacaaatgctaggacggatagatggctacgacggagcaggggcggtttggagatcttgacgacaagaacgcggagtaccggaaactgaagcggccatgatcgtcgttgtgacctccgcgatagttcaagtagtcagaggaggaacatggtatgtggtatatgaatccatgtaaagtggagtcatgagtgtccgtaccatgctcgcagcgcctgcgctgcgtgcactttggcatcggctgtaagatgcatagttcgaacagaatgggcggcacgtacattgagccaagactcaaagaatggcgacgccgaacttcctctagtgtacattaggaacttgggatgacaatccagggaattacggccaagactagatccatcgtggccgagtaagctgagaaagtgaccgttcagaacgggagcaaggtgataacggacggcggaactcaaaggattcgaccatgatcaatccatgattgcttcaggcttcaatcacaagccatccacgtcgaagtcccatgcttttgtgactggtacacattagaaaaatccgatgccggcgttgtcaacaaggacgacattaactgttatgactccagtcgggttaggagatttcgttatcgcgagaaagttcatcaaaattcaagataggatgttagagttaaagcagttctgtcatgcattctactttttcgatgtggaaa

SEQ ID NO: 16824 - DNA, 2286 bp, Muscodor strobelii
  misc_feature: SGI cDNA ID NO. 565609
  misc_feature: Encodes the peptide sequence at SEQ ID NO 16825
atggagagaaaacgcaagctgccagctagggccgcagcacgcaacgagagtgcctccaagagacgcaacatcactccggactcgtctgttgcgacgcctgcttctgcgcccaagtcggcctctcctccgccctccgaccccccagcccgggagccctcgccgcctgctcccttgcccaccgccatacagccaggccagccgttgccgacggtcgagaagcctcagcaagatgacctgtcttccaaggactaccagtccatacaggaaagcggcgtcatggccgagtccctgacgcgatcccgtcagaagtggctgaacgagggcatcttcgagaagtactggaccaagccttccaagaagaaaggcgtcgtcaaggaagacgccaacaaccccgccaaggacaccatgaccaagatcggccaggtcaccatcaccgtcgaaccccacgtgctcgatgccaccatctacgccgtcaaggacccgaagcctcctcctgccactccctcgaccgtccgccctatcctccagtatggccctcccaacgatggcatgccacctcctcctaagccgagcactgcaccgacatctatacctgccaccccgtccacctcagcacccgttgcacccatggcgagtccctcgcacacacaatcaccggtccagcctccacaaggagtcccgccgccgcagcccgtatccttgccgagcacggacaatggcaggctgccagcacagcagatgcctcccgggccaacagcgccgccagccccaatggatcttcagcgacctccaatgccgacgcagcagccgacacagcccatactacccacgaaagaactcgcttctccccgtggccttgagtccgtcctcgctccgccgcagcccgcacatgcaccagctgtgtcggcacctccgcgaccagcccagctccctctgtcacagccgcaaagcgcaggactgcacacagcaactccagcagctccaccggtaccgcctccagtccctggcatttcaacgtcccccgcaggcgtcggtccggccagattgactccgccctccacgaagcccccgcccgttgtgccccatggtcaggacccgatcatcgtgaccctagccgaaaaggcatcagagaatccagcgctccgagatcttatgaagagagtggccgttggagaggctgctcccaacgagctggctcacttccagaacattatcgatcaaatcaccctcgaatataggaatggcggtggcactgttgggccggctgctgaccggctgcttgtcgacggcaagagtgtcaagtatattgtggacgaggctatggctatcctctacatcgtcctgagcggcaacgagaagcaacgaggggccgatctgcggccaccgcctggcagcgaccccttgattgtctacctcgtgagaagatgcctcgaggacaagaatttgaatgagatggttcggcgcatacacactggcaagacaaagtacaccgatactaccgagctcaaggccattctggagcgaatgaagacggtgcttgacagagaagccaacattcctccaaaaccacatatgaatgcccaggctacttctcaagcatcccttactaggatcaagggggacggagagacggaagcaacagcgacgtcgacagggaatggttcagcatccaagaaaccagcaggccctggcccacaaaacgcccagcaagcgctacgttcaaagggacctccacctgcagcgaagtccgacattgcggcggtcgtcttcgagtttgccggaggtacaggtgacagatacctgtttccgaaatacagcatccttgaattctccgacgacaagtcatcagtcgttgtttcgttcctgattgtcaggaagggcagcagactggaacatggtggagatccttcgatggatttctaccagcccatgacgctgcgcatatgggctcattctgccaaaatcctcgaaaacctgcagcgagttgttgcaccacaagatgaggtacagaagtatatggatgatgtcatggagaacatgacgagatccgaatatcttttgctggccatgcgacttcccaagtcggatagagaagatgtcgcggacgacaattcggacgcacctcgagccgatcattcaatggtacagcaacaaccacaactgccaggtgtgatgtgggatgtcagacctattgccgccgctaagcccgtgctggcgaaacctgttgctttgatgcaaccgaccgaagacgaagcttatcagagttttatcagtaacgtctcttaa

SEQ ID NO: 16825 - protein, 761 aa, Muscodor strobelii
  misc_feature: SGI Peptide ID NO. 565609
  misc_feature (1)..(761): NCBI GI: 256735553 Blast Desc: NECHADRAFT_31226 [Nectria haematococca mpVI 77-13-4]
  misc_feature (1)..(761): NCBI GI: 46135759 Blast Desc: FG09395.1 [Gibberella zeae PH-1]
  misc_feature (1)..(696): NCBI GI: 261355392 Blast Desc: conserved [Verticillium albo-atrum VaMs.102]
  misc_feature (1)..(730): NCBI GI: 171681525 Blast Desc: protein product [Podospora anserina] gi|170940721|emb|CAP65949.1| protein product [Podospora anserina]
  misc_feature (1)..(761): NCBI GI: 116203855 Blast Desc: CHGG_09811 [Chaetomium globosum CBS 148.51] gi|88175939|gb|EAQ83407.1| CHGG_09811 [Chaetomium globosum CBS 148.51]
  misc_feature (2)..(694): NCBI GI: 85092197 Blast Desc: NCU06928 [Neurospora crassa OR74A] gi|28920678|gb|EAA30039.1| conserved [Neurospora crassa OR74A]
  misc_feature (1)..(218): NCBI GI: 39971921 Blast Desc: MGG_07276 [Magnaporthe grisea 70-15] gi|145019780|gb|EDK04008.1| MGG_07276 [Magnaporthe grisea 70-15]
  misc_feature (1)..(212): NCBI GI: 156056615 Blast Desc: SS1G_04038 [Sclerotinia sclerotiorum 1980] gi|154701824|gb|EDO01563.1| SS1G_04038 [Sclerotinia sclerotiorum 1980]
  misc_feature (1)..(222): NCBI GI: 154296194 Blast Desc: BC1G_12924 [Botryotinia fuckeliana B05.10] gi|150843488|gb|EDN18681.1| BC1G_12924 [Botryotinia fuckeliana B05.10]
  misc_feature (460)..(761): NCBI GI: 156056615 Blast Desc: SS1G_04038 [Sclerotinia sclerotiorum 1980] gi|154701824|gb|EDO01563.1| SS1G_04038 [Sclerotinia sclerotiorum 1980]
MERKRKLPARAAARNESASKRRNITPDSSVATPASAPKSASPPPSDPPAREPSPPAPLPTAIQPGQPLPTVEKPQQDDLSSKDYQSIQESGVMAESLTRSRQKWLNEGIFEKYWTKPSKKKGVVKEDANNPAKDTMTKIGQVTITVEPHVLDATIYAVKDPKPPPATPSTVRPILQYGPPNDGMPPPPKPSTAPTSIPATPSTSAPVAPMASPSHTQSPVQPPQGVPPPQPVSLPSTDNGRLPAQQMPPGPTAPPAPMDLQRPPMPTQQPTQPILPTKELASPRGLESVLAPPQPAHAPAVSAPPRPAQLPLSQPQSAGLHTATPAAPPVPPPVPGISTSPAGVGPARLTPPSTKPPPVVPHGQDPIIVTLAEKASENPALRDLMKRVAVGEAAPNELAHFQNIIDQITLEYRNGGGTVGPAADRLLVDGKSVKYIVDEAMAILYIVLSGNEKQRGADLRPPPGSDPLIVYLVRRCLEDKNLNEMVRRIHTGKTKYTDTTELKAILERMKTVLDREANIPPKPHMNAQATSQASLTRIKGDGETEATATSTGNGSASKKPAGPGPQNAQQALRSKGPPPAAKSDIAAVVFEFAGGTGDRYLFPKYSILEFSDDKSSVVVSFLIVRKGSRLEHGGDPSMDFYQPMTLRIWAHSAKILENLQRVVAPQDEVQKYMDDVMENMTRSEYLLLAMRLPKSDREDVADDNSDAPRADHSMVQQQPQLPGVMWDVRPIAAAKPVLAKPVALMQPTEDEAYQSFISNVS

SEQ ID NO: 16826 - DNA, 4533 bp, Muscodor strobelii
  misc_feature: SGI EST ID NO. CUFF.39924.1
  misc_feature: Variant of the nucleotide sequence at SEQ ID NO 16824
gaaaggcacagagccaagaagtatgaagcttacgtagagaccgacgggtacacctagagttacgaatagggggattgcccattgagaagggcgaggagacatgctcaaacgaggctcagccggttgctgctaaagcgagcttttgcgacaaggaatgagaacaaaagtatttgacagtttgttgtgagacgtgcttagagagcagaagctaactcgcaatgaattaacaaacagatagctaagataagtaacgtgggcacttcaagggattgattagactggcttcaacgtctgatacaatctatctctattatctagacagtgaatagaaaggaaattgaacgcaataagccaaagcagttgatatagtagcctggaataatgtcgttgagcgagagaaggattgttgctacctaggtagtgaagtgatgatggcagagggatgacctcagatgaatggaggttgagtcgaagatattcaaatatcagataaatgcacataaggactgcaggattggtgggcgtacctgcctgcacgagtttggggctttggagcaattagagacagttggatgaccagaaagggcagctagtggcaggcacaaacttcaatcagtggtcggcgtgcctgcccccaccaaacttggagtgtctcttccctgcagaatgccgtgcttttccagcttagagggtgtgtcatagctctttcgccgaacttggctgctgcatatgtcaacactcacatcacagcctcgttgaagactctgtttcgtcgttgacacagctcggtgactccatgcagatgtgcatatgatctattgtccgattgacacgtcataggaagctctcccttgctgggataccttggttttagagtcctgatcgagcgccaacgtgggcgcgcaaccgcgtcgtctcggccctcacatattggagcacggcctcgcagcctcacatgccttcgtagctcgacaacgacgacagcgacgcattctcgccgcactctcgccgcactctcgcctcccatggagagaaaacgcaagctgccagctagggccgcagcacgcaacgagagtgcctccaagagacgcaacatcactccggactcgtctgttgcgacgcctgcttctgcgcccaagtcggcctctcctccgccctccgaccccccagcccgggagccctcgccgcctgctcccttgcccaccgccatacagccaggccagccgttgccgacggtcgagaagcctcagcaagatgacctgtcttccaaggactaccagtccatacaggaaagcggcgtcatggccgagtccctgacgcgatcccgtcagaagtggctgaacgagggcatcttcgagaagtactggaccaagccttccaagaagaaaggcgtcgtcaaggaagacgccaacaaccccgccaaggacaccatgaccaagatcggccaggtcaccatcaccgtcgaaccccacgtgctcgatgccaccatctacgccgtcaaggacccgaagcctcctcctgccactccctcgaccgtccgccctatcctccagtatggccctcccaacgatggcatgccacctcctcctaagccgagcactgcaccgacatctatacctgccaccccgtccacctcagcacccgttgcacccatggcgagtccctcgcacacacaatcaccggtccagcctccacaaggagtcccgccgccgcagcccgtatccttgccgagcacggacaatggcaggctgccagcacagcagatgcctcccgggccaacagcgccgccagccccaatggatcttcagcgacctccaatgccgacgcagcagccgacacagcccatactacccacgaaagaactcgcttctccccgtggccttgagtccgtcctcgctccgccgcagcccgcacatgcaccagctgtgtcggcacctccgcgaccagcccagctccctctgtcacagccgcaaagcgcaggactgcacacagcaactccagcagctccaccggtaccgcctccagtccctggcatttcaacgtcccccgcaggcgtcggtccggccagattgactccgccctccacgaagcccccgcccgttgtgccccatggtcaggacccgatcatcgtgaccctagccgaaaaggcatcagagaatccagcgctccgagatcttatgaagagagtggccgttggagaggctgctcccaacgagctggctcacttccagaacattatcgatcaaatcaccctcgaatataggaatggcggtggcactgttgggccggctgctgaccggctgcttgtcgacggcaagagtgtcaagtatattgtggacgaggctatggctatcctctacatcgtcctgagcggcaacgagaagcaacgaggggccgatctgcggccaccgcctggcagcgaccccttgattgtctacctcgtgagaagatgcctcgaggacaagaatttgaatgagatggttcggcgcatacacactggcaagacaaagtacaccgatactaccgagctcaaggccattctggagcgaatgaagacggtgcttgacagagaagccaacattcctccaaaaccacatatgaatgcccaggctacttctcaagcatcccttactaggatcaagggggacggagagacggaagcaacagcgacgtcgacagggaatggttcagcatccaagaaaccagcaggccctggcccacaaaacgcccagcaagcgctacgttcaaagggacctccacctgcagcgaagtccgacattgcggcggtcgtcttcgagtttgccggaggtacaggtgacagatacctgtttccgaaatacagcatccttgaattctccgacgacaagtcatcagtcgttgtttcgttcctgattgtcaggaagggcagcagactggaacatggtggagatccttcgatggatttctaccagcccatgacgctgcgcatatgggctcattctgccaaaatcctcgaaaacctgcagcgagttgttgcaccacaagatgaggtacagaagtatatggatgatgtcatggagaacatgacgagatccgaatatcttttgctggccatgcgacttcccaagtcggatagagaagatgtcgcggacgacaattcggacgcacctcgagccgatcattcaatggtacagcaacaaccacaactgccaggtgtgatgtgggatgtcagacctattgccgccgctaagcccgtgctggcgaaacctgttgctttgatgcaaccgaccgaagacgaagcttatcagagttttatcagtaacgtctcttaagcctcgttgagtgtgaggggcctggtgttggtatcagaacgacggctatgattttcgggacacagtgtggggataggtatggaccatgatttgaggtttagaaacgtgtgggaatattcagcattggtgtacggatttcgcgtctggcggttcaaaagaagacttgtctagattattgcgagggctttgttgagacagctatctctgtgctttgcaagagcgctgcgacaactgtagaagtagaaaaagatactccgacagtgaattgatggacatcactcaatggaacgctttctcatgtaacccgtgatctcagcacgttctgtctcgcctactaccacgccacggctagcagatttacgaacatggcgattcgtgagcctgctgtcatgcgttcacatggctagggtccagatggtatggttttcatatcacgttacccatggatctcacccgtatctagaaatctccctaattctctctattacttccgctaccgaccactcagcttctcccctttctcaatcatctcctcgatcaacccattaaaccaagccgcgcgctccataacaggcgcatgtcccatgccatcaataatcatactcctaccgggctgcaaatacttgatcaacttctctccatggggacaagtgatcactctatcctctgtcccatgtatgaccagtatcctgtctctgcctacggtatcgccgatggtttttagttggtctggggatttgtgatgccagcctcctgcgatcagctggaggaagaatccggtctttgtgaagtctggagaccgcgatttggtgatttcttgcgcgccgaatcgctcgtagtttgtgcggaaatgcaggtatggaccgccgcggacgcgtggtgtggagggcgtggggacggtgtcggtgtcgggttctaagagccattgcgctgggaagagggctgctgcgctgtaggagagacttctgtctgggctgggggtttgttagctggtgatagatggggaagagacgggcagaaaagaagggacgcaatggaaagggaggaatgtagagttgaatagagagaattgtgttcgctaccttttaggtagaagcatcgtgatgcggttcatcatgttttcggtgaaagtcgtcgtgttctcaatctttgctgctgtgcagcagagattcaaacttgcgatcctctcgggtatcgcgtaggcaatttcttgagatatcat

SEQ ID NO: 16827 - DNA, 1050 bp, Muscodor strobelii
  misc_feature: SGI cDNA ID NO. 565610
  misc_feature: Encodes the peptide sequence at SEQ ID NO 16828
atgaagtttagggcgaaagccgaagcgaaattcccctccgtcaccgaaatagccaaggcggaggcctttcccacagtgacatgggacttggaaccacacagcgaagggtatctccccgtggcagcaggacgaggagggccactcaatgtccattgggagatccacggtgaagggccagtgaaagtcgtcttcgtatgcggcatggctgtcttcaagacctcatatcaaagacagactatgcatttcgggcacgtaaatggagacaagtactccgtactgcttattgataatcgaggaatgggtcgctcagataaacccttgatgagatacagttcgagcgctatggcggctgatgtcatcgaggtgttggatcacgttgagtggactggagagaggcaactacatatttgtggacttagtctgggagggatgatatctcaagaaattgcctacgcgatacccgagaggatcgcaagtttgaatctctgctgcacagcagcaaagattgagaacacgacgactttcaccgaaaacatgatgaaccgcatcacgatgcttctacctaaaagcccagacagaagtctctcctacagcgcagcagccctcttcccagcgcaatggctcttagaacccgacaccgacaccgtccccacgccctccacaccacgcgtccgcggcggtccatacctgcatttccgcacaaactacgagcgattcggcgcgcaagaaatcaccaaatcgcggtctccagacttcacaaagaccggattcttcctccagctgatcgcaggaggctggcatcacaaatccccagaccaactaaaaaccatcggcgataccgtaggcagagacaggatactggtcatacatgggacagaggatagagtgatcacttgtccccatggagagaagttgatcaagtatttgcagcccggtaggagtatgattattgatggcatgggacatgcgcctgttatggagcgcgcggcttggtttaatgggttgatcgaggagatgattgagaaaggggagaagctgagtggtcggtag

SEQ ID NO: 16828 - protein, 349 aa, Muscodor strobelii
  misc_feature: SGI Peptide ID NO. 565610
  misc_feature (90)..(338): Pfam Id: PF00561 Pfam Desc: alpha/beta hydrolase fold
  misc_feature (12)..(349): NCBI GI: 85092191 Blast Desc: glycylpeptide N-tetradecanoyltransferase [Neurospora crassa OR74A] gi|28920675|gb|EAA30036.1| glycylpeptide N-tetradecanoyltransferase [Neurospora crassa OR74A]
  misc_feature (12)..(342): NCBI GI: 156035795 Blast Desc: SS1G_13102 [Sclerotinia sclerotiorum 1980] gi|154698506|gb|EDN98244.1| SS1G_13102 [Sclerotinia sclerotiorum 1980]
  misc_feature (11)..(338): NCBI GI: 46135765 Blast Desc: FG09398.1 [Gibberella zeae PH-1]
  misc_feature (10)..(342): NCBI GI: 154290008 Blast Desc: BC1G_15816 [Botryotinia fuckeliana B05.10] gi|150848511|gb|EDN23704.1| BC1G_15816 [Botryotinia fuckeliana B05.10]
  misc_feature (11)..(340): NCBI GI: 256734841 Blast Desc: NECHADRAFT_75513 [Nectria haematococca mpVI 77-13-4]
  misc_feature (5)..(341): NCBI GI: 39971833 Blast Desc: MGG_07232 [Magnaporthe grisea 70-15] gi|145019728|gb|EDK03956.1| MGG_07232 [Magnaporthe grisea 70-15]
  misc_feature (13)..(342): NCBI GI: 238502839 Blast Desc: alpha/beta hydrolase, [Aspergillus flavus NRRL3357] gi|220691463|gb|EED47811.1| alpha/beta hydrolase, [Aspergillus flavus NRRL3357]
  misc_feature (13)..(342): NCBI GI: 169776145 Blast Desc: [Aspergillus oryzae RIB40] gi|83771274|dbj|BAE61406.1| protein product [Aspergillus oryzae]
  misc_feature (13)..(342): NCBI GI: 121719168 Blast Desc: alpha/beta hydrolase, [Aspergillus clavatus NRRL 1] gi|119404507|gb|EAW14883.1| alpha/beta hydrolase, [Aspergillus clavatus NRRL 1]
  misc_feature (11)..(342): NCBI GI: 67902082 Blast Desc: AN8028.2 [Aspergillus nidulans FGSC A4] gi|40740460|gb|EAA59650.1| AN8028.2 [Aspergillus nidulans FGSC A4] gi|259480779|tpe|CBF73733.1| TPA: alpha/beta hydrolase, FGSC
MKFRAKAEAKFPSVTEIAKAEAFPTVTWDLEPHSEGYLPVAAGRGGPLNVHWEIHGEGPVKVVFVCGMAVFKTSYQRQTMHFGHVNGDKYSVLLIDNRGMGRSDKPLMRYSSSAMAADVIEVLDHVEWTGERQLHICGLSLGGMISQEIAYAIPERIASLNLCCTAAKIENTTTFTENMMNRITMLLPKSPDRSLSYSAAALFPAQWLLEPDTDTVPTPSTPRVRGGPYLHFRTNYERFGAQEITKSRSPDFTKTGFFLQLIAGGWHHKSPDQLKTIGDTVGRDRILVIHGTEDRVITCPHGEKLIKYLQPGRSMIIDGMGHAPVMERAAWFNGLIEEMIEKGEKLSGR

SEQ ID NO: 16829 - DNA, 7327 bp, Muscodor strobelii; identical to SEQ ID NO: 16823
  misc_feature: SGI EST ID NO. CUFF.39925.0
  misc_feature: Variant of the nucleotide sequence at SEQ ID NO 16827

SEQ ID NO: 16830 - DNA, 210 bp, Muscodor strobelii
  misc_feature: SGI cDNA ID NO. 565611
  misc_feature: Encodes the peptide sequence at SEQ ID NO 16831
atgatcgatagaatacaccaagagacaagagatggtcagaaaaagccgaaaggcgaagggtccagcgcaacgccagacagtcttcagatgaaacagttgaagcgatcttttgcgttcaaccacgcaatgagcattcatctcaatctgatttcgattggcgccatgttatggtggggttggaagttgagttcccgtttgagtctggattaa

SEQ ID NO: 16831 - protein, 69 aa, Muscodor strobelii
  misc_feature: SGI Peptide ID NO. 565611
  misc_feature (1)..(69): NCBI GI: 189192368 Blast Desc: conserved [Pyrenophora tritici-repentis Pt-1C-BFP] gi|187974129|gb|EDU41628.1| conserved [Pyrenophora tritici-repentis Pt-1C-BFP]
  misc_feature (1)..(69): NCBI GI: 169600301 Blast Desc: SNOG_02981 [Phaeosphaeria nodorum SN15] gi|111068592|gb|EAT89712.1| SNOG_02981 [Phaeosphaeria nodorum SN15]
  misc_feature (1)..(66): NCBI GI: 171677608 Blast Desc: protein product [Podospora anserina] gi|170936872|emb|CAP61530.1| protein product [Podospora anserina]
  misc_feature (1)..(66): NCBI GI: 256726697 Blast Desc: NECHADRAFT_34052 [Nectria haematococca mpVI 77-13-4]
  misc_feature (1)..(67): NCBI GI: 115386126 Blast Desc: conserved [Aspergillus terreus NIH2624] gi|114190602|gb|EAU32302.1| conserved [Aspergillus terreus NIH2624]
  misc_feature (4)..(68): NCBI GI: 189188104 Blast Desc: conserved [Pyrenophora tritici-repentis Pt-1C-BFP] gi|187971997|gb|EDU39496.1| conserved [Pyrenophora tritici-repentis Pt-1C-BFP]
  misc_feature (18)..(66): NCBI GI: 159126000 Blast Desc: AFUB_051180 [Aspergillus fumigatus A1163]
  misc_feature (18)..(66): NCBI GI: 146323990 Blast Desc: AFUA_5G02650 [Aspergillus fumigatus Af293] gi|129556378|gb|EBA27256.1| AFUA_5G02650 [Aspergillus fumigatus Af293]
  misc_feature (30)..(66): NCBI GI: 46121361 Blast Desc: FG05059.1 [Gibberella zeae PH-1]
  misc_feature (1)..(66): NCBI GI: 156051444 Blast Desc: SS1G_07129 [Sclerotinia sclerotiorum 1980] gi|154704907|gb|EDO04646.1| SS1G_07129 [Sclerotinia sclerotiorum 1980]
MIDRIHQETRDGQKKPKGEGSSATPDSLQMKQLKRSFAFNHAMSIHLNLISIGAMLWWGWKLSSRLSLD

SEQ ID NO: 16832 - DNA, 1849 bp, Muscodor strobelii
  misc_feature: SGI EST ID NO. CUFF.39723.1
  misc_feature: Variant of the nucleotide sequence at SEQ ID NO 16830
gggtcatttctccgaagcctttcactcagcctcagctcagcaattgtacctctagtccatattttacccatagcaagagacatgcattgagatttatcggcatgtatacgcgatcttccaggatctagtagctattttacatggatagagatcgcgagtgacgctgcagaggttgttaagtgtttgaatagcggatcttgaatcaaccatatagcaatctgccaagacaagttgttttgtcaagttcgcactcgctacaagcccagccaaagcattgctaatgctcaaccgattattcgtaggaattacgagaaagacggggtaacaccagctgtgaggtattttggaatgggtccacggccgcatcgtgatttcaggcagcagtatattcacctacttgctaaacaaactatgaccgcaagtcatcggactttaaggaaggtgccgaccaagttgttgtgtttcaagatccgtgatgaatcggtgtgaagaaaggttcgagttgtggaattttatttataccaaggtagcggactctgatgaagtgacgtttggagctgtcgacaaatctcgcgaggaactcgagtaacacacctgccattaacgacgactgtaattccttgaagtgccatcctaactcctttcaacggccatggagctcagcactatcctcgcacctcttcatctcctgtcttactcagccttcttggggacgtcactatatcaaacctttattgtgacccatatatgcttcataacgcttccgcggtcagccttcactactcttcagaagcgcttatttcccatatatttcagaagcacatcattgctcttgctcgtgaccgttgctacgattccgtcgagggaccgtctaacgttattcgataacaaaggtacctgaatacccttcgctgtcgctggtacaacctcggtggccaacttattggtatacgggccacggactcgtcagatcatgatcgatagaatacaccaagagacaagagatggtcagaaaaagccgaaaggcgaagggtccagcgcaacgccagacagtcttcagatgaaacagttgaagcgatcttttgcgttcaaccacgcaatgagcattcatctcaatctgatttcgattggcgccatgttatggtggggttggaagttgagttcccgtttgagtctggattaattaaagtaatgtcgtcgatcactttctgccgatcatcggcccaagcaatagaatcatttcgaagtcagatctgtgcagagggtctgagcccaaccgagtgcatcttgacgtgcatgcggtgatgggactactgcatctcagctccatccatctcagtcaaagtctcggtggtattgtatagtagagtaggctaaaagataacagtagcatcttcgcttcgccctacagcagacactcgtcagttctgatttgagtcgtgatccgatctagagatctagctactcatctgacatgactcgagccaatatctggggagacccaagtaccgacgagccgagccctgaccaaaatctaactattctcgagcttaaattcacggtccctgtgcaagatagttatctagacccgtagaaaaacgacattaacatcgtgcagctaagttaatatcccctagatacctcgtagcttcggcggcattcagcaggggagccgggagctcagtcccgggcccccaataggaagcatccatccggaggctatttacgctcgatctgttgttgtgatcgttgcatactggggaacagtaattgaccactgatgaataaaagacaagatgaaagcgacatgggcaatgagcgctagttattgctcgcttatcactgcatt

SEQ ID NO: 16833 - DNA, 615 bp, Muscodor strobelii
  misc_feature: SGI cDNA ID NO. 565612
  misc_feature: Encodes the peptide sequence at SEQ ID NO 16834
atggatccaattaccaaagtctggttcattaagctgaagaaaaaccacagcataattgaagaggccttccaacaatgctggaaggaactactctctgtcgcagcttcgtactcgtctttgcgcggggagccccacgctttataccaaagcgacgatgatcccgatctccttgctgtgatttctggctttcattctgcggaatcgagtgccgatatgcaaaaggaattagagcactggggcagaccaaaggtggaacaatttgtcgagcacgagagcctctacgtttcggacttcgacgtcttgcagatgccactcgaatccggcaagatttctgtcctgatacaagatactgagacacaaggagatctcgatacctctgctcttccaggactaggaacctgggcagttaagatgccagacatattagttgacgaggcggttagagcgaagccgaaaaaagtctgggtgcagatcgcaacatcagaagatgcagaagcgcttcaaaaggctggcaccgtcacgaacctcagtcagataatagagattcaacggattattcgccctcccaatggtcaccatcagaagcgtcaagtggactcgtacctgagccggtga

SEQ ID NO: 16834 - protein, 204 aa, Muscodor strobelii
  misc_feature: SGI Peptide ID NO. 565612
MDPITKVWFIKLKKNHSIIEEAFQQCWKELLSVAASYSSLRGEPHALYQSDDDPDLLAVISGFHSAESSADMQKELEHWGRPKVEQFVEHESLYVSDFDVLQMPLESGKISVLIQDTETQGDLDTSALPGLGTWAVKMPDILVDEAVRAKPKKVWVQIATSEDAEALQKAGTVTNLSQIIEIQRIIRPPNGHHQKRQVDSYLSR

SEQ ID NO: 16835 - DNA, 1073 bp, Muscodor strobelii
  misc_feature: SGI EST ID NO. CUFF.39717.0
  misc_feature: Variant of the nucleotide sequence at SEQ ID NO 16833
cttcttctaaatttacgcatcacctaatcatcgatacttatacacatatgcacctagaacgccctctattatggatccaattaccaaagtctggttcattaagctgaagaaaaaccacagcataattgaagaggccttccaacaatgctggaaggaactactctctgtcgcagcttcgtactcgtctttgcgcggggagccccacgctttataccaaagcgacgatgatcccgatctccttgctgtgatttctggctttcattctgcggaatcgagtgccgatatgcaaaaggaattagagcactggggcagaccaaaggtggaacaatttgtcgagcacgagagcctctacgtttcggacttcgacgtcttgcagatgccactcgaatccggcaagatttctgtcctgatacaagatactgagacacaaggagatctcgatacctctgctcttccaggactaggaacctgggcagttaagatgccagacatattagttgacgaggcggttagagcgaagccgaaaaaagtctgggtgcagatcgcaacatcagaagatgcagaagcgcttcaaaaggctggcaccgtcacgaacctcagtcagataatagaggtacatatggtggatgctcaaaaagttggagaatgaggttcgcactcgtggagtgcgatggtatttttgccaatctgagcttgtcggcttgtccttatcggtacctacggtaccttagttgatattcaacggattattcgccctcccaatggtcaccatcagaagcgtcaagtggactcgtacctgagccggtgatgacaacgacgactagcacgagagatgatggccggcatgttccgttgcgccgagccccctccacaaaaagcttcaatggcgtaatttgaggtgcatcctagactgatgcctggcgagctggctcccggggtttgccatctgtgacatccttacctgtccgccactagggatttgggaaataaaagattccgcgtatcggctcgaaagaaccgttgactcccgagagtctgaccgctggaagatatgcgagagggacaatgctccg

SEQ ID NO: 16836 - DNA, 402 bp, Muscodor strobelii
  misc_feature: SGI cDNA ID NO. 565613
  misc_feature: Encodes the peptide sequence at SEQ ID NO 16837
atgcaaaaggaattagagcactggggcagaccaaaggtggaacaatttgtcgagcacgagagcctctacgtttcggacttcgacgtcttgcagatgccactcgaatccggcaagatttctgtcctgatacaagatactgagacacaaggagatctcgatacctctgctcttccaggactaggaacctgggcagttaagatgccagacatattagttgacgaggcggttagagcgaagccgaaaaaagtctgggtgcagatcgcaacatcagaagatgcagaagcgcttcaaaaggctggcaccgtcacgaacctcagtcagataatagagattcaacggattattcgccctcccaatggtcaccatcagaagcgtcaagtggactcgtacctgagccggtga

SEQ ID NO: 16837 - protein, 133 aa, Muscodor strobelii
  misc_feature: SGI Peptide ID NO. 565613
MQKELEHWGRPKVEQFVEHESLYVSDFDVLQMPLESGKISVLIQDTETQGDLDTSALPGLGTWAVKMPDILVDEAVRAKPKKVWVQIATSEDAEALQKAGTVTNLSQIIEIQRIIRPPNGHHQKRQVDSYLSR

SEQ ID NO: 16838 - DNA, 1073 bp, Muscodor strobelii; identical to SEQ ID NO: 16835
  misc_feature: SGI EST ID NO. CUFF.39717.0
  misc_feature: Variant of the nucleotide sequence at SEQ ID NO 16836

SEQ ID NO: 16839 - DNA, 1092 bp, Muscodor strobelii
  misc_feature: SGI cDNA ID NO. 565614
  misc_feature: Encodes the peptide sequence at SEQ ID NO 16840
atgggacaagagaccagcggttccccgcgtagatctagtagtccgggtcactccgcgacttcgatcacaacgtcgactgcattgccctccgataccgactccgtatggacagcatcatcgatcgaagccggcggcacggacgaagaggacgagtttgccccgagcgattatgactctgcctcgatcgccgagtcaaccacgaccgtcggatcctccgtctacgaacatagttatcaaaatggacgacgctatcacaaatttagacatggaaaatacccgataccgaatgacgagacggaacaaaacagagaagacttactacacgccatgatgctcgaggccaccgacgggaaattcttctttgcccccatatccagccatccgcaaaagctgcttgatctcggaactggtacaggtatctggtccatcgaagtggccgagagataccccggcgccgaggttcttggcattgatctttctcccatacagccgccctgggttccaaccaattgcaagttcatcattgacgacatagaggatagttgggaaaacggttcagactgggattttgttcacttacgtaacatgatccctatattgagaaatcctgttaatgtactgaaagacgttttcgacaatcttaagcccggtgcatgggttgagctccaagacgttgacgggatggtacactgcgatgatgggacactacctcctgactggccaattctcgtgttcacaaacttgatggttgaggcgttcgcgaaattaggcacaaagtcgcatgctgctgtttttggtgggcaatatctcgctgagtgtggtttcgtcaacattcagcatcacactgtcaaacttccgtatggaacatggccgaaagacaagacgatgaggctcattggcatgtactatcggaccgccgcagagcagtttctgccagcaatgggtgcgctgcaattaccgcttctgggttggcaaccggaagagactgaggttttctttgccaaatgtcgcaacgcgatgagagacccggatgtccacgcttatggaatgatgcatttttggtctggccaaaaaccttatgacacgacatga

SEQ ID NO: 16840 - protein, 363 aa, Muscodor strobelii
  misc_feature: SGI Peptide ID NO. 565614
  misc_feature (132)..(222): Pfam Id: PF08241 Pfam Desc: Methyltransferase domain
  misc_feature (132)..(220): Pfam Id: PF08242 Pfam Desc: Methyltransferase domain
  misc_feature (132)..(161): Pfam Id: PF08241 Pfam Desc: Methyltransferase domain
  misc_feature (1)..(361): NCBI GI: 46122615 Blast Desc: FG05685.1 [Gibberella zeae PH-1]
  misc_feature (63)..(362): NCBI GI: 171691374 Blast Desc: protein product [Podospora anserina] gi|170945635|emb|CAP71748.1| protein product [Podospora anserina]
  misc_feature (46)..(359): NCBI GI: 256722890 Blast Desc: NECHADRAFT_64568 [Nectria haematococca mpVI 77-13-4]
  misc_feature (46)..(359): NCBI GI: 46115988 Blast Desc: FG03836.1 [Gibberella zeae PH-1]
  misc_feature (29)..(359): NCBI GI: 212534102 Blast Desc: conserved [Penicillium marneffei ATCC 18224] gi|210069606|gb|EEA23696.1| conserved [Penicillium marneffei ATCC 18224]
  misc_feature (41)..(294): NCBI GI: 256729792 Blast Desc: NECHADRAFT_83604 [Nectria haematococca mpVI 77-13-4]
  misc_feature (40)..(359): NCBI GI: 85084986 Blast Desc: NCU07193 [Neurospora crassa OR74A] gi|28918509|gb|EAA28182.1| [Neurospora crassa OR74A] gi|28950222|emb|CAD71089.1| [Neurospora crassa]
  misc_feature (35)..(362): NCBI GI: 119186115 Blast Desc: CIMG_03105 [Coccidioides immitis RS]
  misc_feature (53)..(359): NCBI GI: 40882246 Blast Desc: conserved [Neurospora crassa]
  misc_feature (55)..(359): NCBI GI: 116196574 Blast Desc: CHGG_04885 [Chaetomium globosum CBS 148.51] gi|88180798|gb|EAQ88266.1| CHGG_04885 [Chaetomium globosum CBS 148.51]
MGQETSGSPRRSSSPGHSATSITTSTALPSDTDSVWTASSIEAGGTDEEDEFAPSDYDSASIAESTTTVGSSVYEHSYQNGRRYHKFRHGKYPIPNDETEQNREDLLHAMMLEATDGKFFFAPISSHPQKLLDLGTGTGIWSIEVAERYPGAEVLGIDLSPIQPPWVPTNCKFIIDDIEDSWENGSDWDFVHLRNMIPILRNPVNVLKDVFDNLKPGAWVELQDVDGMVHCDDGTLPPDWPILVFTNLMVEAFAKLGTKSHAAVFGGQYLAECGFVNIQHHTVKLPYGTWPKDKTMRLIGMYYRTAAEQFLPAMGALQLPLLGWQPEETEVFFAKCRNAMRDPDVHAYGMMHFWSGQKPYDTT

SEQ ID NO: 16841 - DNA, 3381 bp, Muscodor strobelii
  misc_feature: SGI EST ID NO. CUFF.39742.0
  misc_feature: Variant of the nucleotide sequence at SEQ ID NO 16839
ccagcgtggaaggtatgcacagacttgatcccactagtgtcaatagcttgcattcaaggcgtatcatttcgccaatcgcagcgagattggcgagaacatttgttttcgcggtatcatcgcccacgactctatcgtacagtagcctctgactgcgtcggccactttaccccaggatacgatgcacttgacttcctattagcgccaacgtttgacttctcaacataccgatattacctgtcttctcggccctttctacggtcgcgaagataactgatgactgtaaatgaaggtcgatcggcaagtgccaggtgccacacatccacgcggatgtgtgacggatgtgggcgggcattaaggacgccacacctcattcctattgaccacagccagaaatgagggaggcgctgaagctggccatacaggttgtgtgaccttagaacgacatactactggaatgactgttcagtcttttagtcgtaagggctcggctggatttagcaccggccggcgaaccccgcaggtgagacggcatatcgacgccaaaaggtcagcgggccaatcagaagagaagcgcaattacgaagaagaaacagagggagagggtgactttacagctcttctcccaattcgcctagatatacctctttccgtatgttcgcacgctgcggaggctgcggagacgtcagaacgaaatctggacgatagcgcgtgcgactagtcgcatccgcttggcatttgcgcatcctttttgtccaatgtccgcatctcacctgtgcctctccagtcaagctggttaagccaaaaccctccgtccaatccgtcagctagtccggggagggggttccttgttcagagacatttccatcagcctcgagagccagcgcgcacatctgagttcaacgtttacccacccacatactagaggctgcgtgcgcccagcaatggcctagagtctagagcacgatacctcactgaggcttgcgctgtctccgcccctcctgccgtgactattacacattcctgtgcgctaaaccaaccatcatggtcgctataccttcttgctccttcctcagctgatcaacaaatcgtttgtacctccattttgagcctccggagcgcgtgactgtatgattgcgaataattcccaagtaatagctgccacatccaaggcctgcgtcactcccgccacgacgtagcaaccacatatctcgagcatagaactgcgatatcttacagagacggactggacgtggtgggctgtcagcatgggacaagagaccagcggtaagtatcggttatctagatgatatgctactgtctacggagaagggctgtcttctcatccatcccgaaaataggttccccgcgtagatctagtagtccgggtcactccgcgacttcgatcacaacgtcgactgcattgccctccgataccgactccgtatggacagcatcatcgatcgaagccggcggcacggacgaagaggacgagtttgccccgagcgattatgactctgcctcgatcgccgagtcaaccacgaccgtcggatcctccgtctacgaacatagttatcaaaatggacgacgctatcacaaatttagacatggaaaatacccgataccgaatgacgagacggaacaaaacagagaagacttactacacgccatgatgctcgaggccaccgacgggaaattcttctttgcccccatatccagccatccgcaaaagctgcttgatctcggaactggtacaggtatctggtccatcgaagtggccgagagataccccggcgccgaggttcttggcattgatctttctcccatacagccgccctgggttccaaccaattgcaagttcatcattgacgacatagaggatagttgggaaaacggttcagactgggattttgttcacttacgtaacatgatccctatattgagaaatcctgttaatgtactgaaagacgttttcgacaatcttaagcccggtgcatgggttgagctccaagacgttgacgggatggtacactgcgatgatgggacactacctcctgactggccaattctcgtgttcacaaacttgatggttgaggcgttcgcgaaattaggcacaaagtcgcatgctgctgtttttggtgggcaatatctcgctgagtgtggtttcgtcaacattcagcatcacactgtcaaacttccgtatggaacatggccgaaagacaagacgatgaggctcattggcatgtactatcggaccgccgcagagcagtttctgccagcaatgggtgcgctgcaattaccgcttctgggttggcaaccggaagagactgaggttttctttgccaaatgtcgcaacgcgatgagagacccggatgtccacgcttatggaatgatgcatttttggtctggccaaaaaccttatgacacgacatgagatttctgacccgatttctcaccgcgctcattggcttgcatacgacatatactgccaattactgaacaactcccggtcatgtcgtgctgatggcaataaacgctcgctaagctaaagcgaaccgccggattgtcgtaatattggacagttagcttgattatgacactaatgaggctcgtcaatgtggattttaccaatggaatcttaaagttaattacgatcagggagcaaaggaacaagacaggcaggatttcaaatgttgctgggcgacggttttaagtcgtatgatacccccgtataggagcaggccacgttatctggtggagattttggagaagcattggattattgcgaaatatatggcccgctactccatcgacagcacggaaagatcggcggcggcatcgtcacggccaactggtcaattttcgagatctgtcactctggaacacaaagctgcaaattcacaatttgtacatacttctgatgaagaccaacacatacggacatatatatatagtgacaatttgcttataaattcctcgcgtcttctaaatagttaatgattggaacgaattaaatccgaacagctgttgtgatggcaatgatattgagagttcgattcgatgcatatggttattcgcagagatttcgatgtctgcatcagacatgcggtgaatcgatctgtgccgaaaggatagtatccttggtgacgaaaatttcttttcaacggcatcaacgaacccatgcaatggcgagggcaagagaagccaaagcgatgtcacctagagtacacttattaagtagtacttgggttgatgctggctcggctgagatctaactaaggacaaggaggtggcccccgtacttgtagcatccggagtgggccactgcattcacgatgcagaacatacctgcatttgcttgatgtacggcatccagccgggcag

SEQ ID NO: 16842 - DNA, 1377 bp, Muscodor strobelii
  misc_feature: SGI cDNA ID NO. 565615
  misc_feature: Encodes the peptide sequence at SEQ ID NO 16843
atgttgcagaagaatacggtgcgcaaaggctatcgccaacaccctgtgaacattgcaaggaagctgactgttgtaggcccattggtccgaatcggtcctaatgagctactatccacagatcctgaagtgctgcggatgatgtctgcagtccgatcgccttacacaaagggcgacttttatgacactggccgtattgttcccgaagagaacactgtagtctcacttcgtgatgaagacgagcatcgaatgttgcgagctaagctgagacccgcgtttggaggtaaagagaatgagggctttagcttcagcgctggcattgatcgccaacttttagaactcatgaaactcatcgacactaaatatctatctactgctagaaactatcaccctatgcaattcttcgagaagatatcttacttcgcattagacgtcataggcgatatctccttcggcggcgctttcggctatctcagtcaagatgaggatctttaccgttaccacgagatcaacgacgaatctctcccgctcatgaacatcatggcaactatgccatggctagcaaaaatcctgcataaatggccgctcaacttgatgcttccgaatgaagacgatagggtaggcttcggccgcttgatgaacttcgcgaagtcatttgtcgacagaaggttagagcctggctctaaaccgcaaaaagatatgatgcaagctttcatcaatagcggcatgacacaagctgaattgacacagcaagtttttgttcagattgtcgcaggctctgtgaccacaacaacagcgatatgtatgactatgctctgcctgcttactagcccgccgacttacgccgccctacggcgcgagatcgacgaaagaacatctcaagggaaactaagcaacccaattacggactcagaagcaaagacaatgccgtatttgcaagccgtgattaaggaaggccttcgattctaccctcctgttattggactgggtagtaaacaagtgccgaaagggggaggttttattaatggacactttattccggaaggtacccagatcggtatgaacttcttcggacttatgcggtctaaggatatatggggaccagatgccgacgtataccgaccagagagatggcttgaagctgacgaagaaatgtttaagaggatgaatgctgtggtggaccttgactttggctttggaaaatatcaatgcctcggaaagcccattgccacgatggaattgaacaagatttttgtcgagcttctacgacgttacgattttacgattgtgaatccgcagacgcctattgtggcatttaccgcgatcttctggtctgcgaaagacttttggctgcgcattacacgacgagataccccttag

SEQ ID NO: 16843 - protein, 458 aa, Muscodor strobelii
  misc_feature: SGI Peptide ID NO. 565615
  misc_feature (1)..(451): Pfam Id: PF00067 Pfam Desc: Cytochrome P450
  misc_feature (137)..(434): Pfam Id: PF00067 Pfam Desc: Cytochrome P450
  misc_feature (27)..(458): NCBI GI: 256735491 Blast Desc: NECHADRAFT_75387 [Nectria haematococca mpVI 77-13-4]
  misc_feature (26)..(457): NCBI GI: 169615603 Blast Desc: SNOG_10960 [Phaeosphaeria nodorum SN15] gi|111060339|gb|EAT81459.1| SNOG_10960 [Phaeosphaeria nodorum SN15]
  misc_feature (26)..(455): NCBI GI: 171678209 Blast Desc: protein product [Podospora anserina] gi|170937174|emb|CAP61831.1| protein product [Podospora anserina]
  misc_feature (26)..(457): NCBI GI: 256723424 Blast Desc: NECHADRAFT_80996 [Nectria haematococca mpVI 77-13-4]
  misc_feature (26)..(457): NCBI GI: 256723386 Blast Desc: NECHADRAFT_88946 [Nectria haematococca mpVI 77-13-4] gi|256725163|gb|EEU38529.1| NECHADRAFT_88660 [Nectria haematococca mpVI 77-13-4]
  misc_feature (26)..(456): NCBI GI: 116205708 Blast Desc: CHGG_02147 [Chaetomium globosum CBS 148.51] gi|88182744|gb|EAQ90212.1| CHGG_02147 [Chaetomium globosum CBS 148.51]
  misc_feature (16)..(455): NCBI GI: 261352262 Blast Desc: benzoate 4-monooxygenase cytochrome P450 [Verticillium albo-atrum VaMs.102]
  misc_feature (26)..(456): NCBI GI: 261357872 Blast Desc: pisatin demethylase [Verticillium albo-atrum VaMs.102]
  misc_feature (26)..(455): NCBI GI: 121711972 Blast Desc: benzoate 4-monooxygenase cytochrome P450 [Aspergillus clavatus NRRL 1] gi|119401753|gb|EAW12175.1| benzoate 4-monooxygenase cytochrome P450 [Aspergillus clavatus NRRL 1]
  misc_feature (7)..(421): NCBI GI: 46139967 Blast Desc: FG11498.1 [Gibberella zeae PH-1]
  misc_feature (7)..(428): SWISSPROT Homolog: EC 1.14.13.12 Benzoate 4-monooxygenase
MLQKNTVRKGYRQHPVNIARKLTVVGPLVRIGPNELLSTDPEVLRMMSAVRSPYTKGDFYDTGRIVPEENTVVSLRDEDEHRMLRAKLRPAFGGKENEGFSFSAGIDRQLLELMKLIDTKYLSTARNYHPMQFFEKISYFALDVIGDISFGGAFGYLSQDEDLYRYHEINDESLPLMNIMATMPWLAKILHKWPLNLMLPNEDDRVGFGRLMNFAKSFVDRRLEPGSKPQKDMMQAFINSGMTQAELTQQVFVQIVAGSVTTTTAICMTMLCLLTSPPTYAALRREIDERTSQGKLSNPITDSEAKTMPYLQAVIKEGLRFYPPVIGLGSKQVPKGGGFINGHFIPEGTQIGMNFFGLMRSKDIWGPDADVYRPERWLEADEEMFKRMNAVVDLDFGFGKYQCLGKPIATMELNKIFVELLRRYDFTIVNPQTPIVAFTAIFWSAKDFWLRITRRDTP

SEQ ID NO: 16844 - DNA, 1212 bp, Muscodor strobelii
  misc_feature: SGI EST ID NO. CUFF.39732.0
  misc_feature: Variant of the nucleotide sequence at SEQ ID NO 16842
gggctttagcttcagcgctggcattgatcgccaacttttagaactcatgaaactcatcgacactaaatatctatctactgctagaaactatcaccctatgcaattcttcgagaagatatcttacttcgcattagacgtcataggcgatatctccttcggcggcgctttcggctatctcagtcaagatgaggatctttaccgttaccacgagatcaacgacgaatctctcccgctcatgaacatcatggcaactatgccatggctagcaaaaatcctgcataaatggccgctcaacttgatgcttccgaatgaagacgatagggtaggcttcggccgcttgatgaacttcgcgaagtcatttgtcgacagaaggttagagcctggctctaaaccgcaaaaagatatgatgcaagctttcatcaatagcggcatgacacaagctgaattgacacagcaagtttttgttcagattgtcgcaggctctgtgaccacaacaacagcgatatgtatgactatgctctgcctgcttactagcccgccgacttacgccgccctacggcgcgagatcgacgaaagaacatctcaagggaaactaagcaacccaattacggactcagaagcaaagacaatgccgtatttgcaagccgtgattaaggaaggccttcgattctaccctcctgttattggactgggtagtaaacaagtgccgaaagggggaggttttattaatggacactttattccggaaggtacccagatcggtatgaacttcttcggacttatgcggtctaaggatatatggggaccagatgccgacgtataccgaccagagagatggcttgaagctgacgaagaaatgtttaagaggatgaatgctgtggtggaccttgactttggctttggaaaatatcaatgcctcggaaagcccattgccacgatggaattgaacaagatttttgtcgagcttctacgacgttacgattttacgattgtgaatccgcagacgcctattgtggcatttaccgcgatcttctggtctgcgaaagacttttggctgcgcattacacgacgagataccccttagattagcgagcgagcacgagaatccactatttgaagaacataatcatagaataaagagtgaaatctttacacgatcttcgtcattcgagatctcactcctttatcaccttgtgctacagtaccctgaca

SEQ ID NO: 16845 - DNA, 990 bp, Muscodor strobelii
  misc_feature: SGI cDNA ID NO. 565616
  misc_feature: Encodes the peptide sequence at SEQ ID NO 16846
atgtctccagagtacctgaagaatgtcgccattatcggcgcagccggccgatctgggactttcatggtggatgccctagtcaaagcaggcaaacatgtaatcacagcgatcaccagattggatagcacaaatgtggtcccagccggggtacacgatgtcaaaaaggttgatctcaacgatccgtcgtctttggttgacgctttgaggggccaggatgtcctgatcattacactagccgtcagagctccaaaggggactgaggcgagactcatcgacgcagctgttgctgctggtgttcaatggattatgcccaatgaatggggtatagatttttcgaaaacagagctagtcgaagactgcgccattcaggatcgcggaaggctagaaattagggagcatatcgagagcgttggtgccggaaaaacacggtgggttggcctttgttgcggtttttggtacgaattctctctagctgggacagaagcaagatttgggttcgacttcaataagaagactgtgacgttgttcgacgacgggaacaccaagaccaatatatcaacatggccacaagtcggtagagctgtcgcaagtcttctgtcactgaaaatatctcctgactcggtggacgatacgagtccttgcctgagcaaatacgctaacaagtctgcgcatgtgtcatcgtttttcgtgacccagaaagacatgttagactccgttctcagagtcacaggtgactccataactgactggtcggtttcatacgagagatctgttgatcgtttcaaccgtgggaaaaagatggtccaaaatgggcagagagtaggcctagtcgttgtcatgtattccagagttttttacccggatggatcgggcgatttcaacgacaaagtcgagaacgatgtattgggactgcctatagagagcatagacgaagcaactagagttgccgtacaaatggtgcaagaaggccggaccaatgaagtcaaatag

SEQ ID NO: 16846 - protein, 329 aa, Muscodor strobelii
  misc_feature: SGI Peptide ID NO. 565616
  misc_feature (9)..(256): Pfam Id: PF05368 Pfam Desc: NmrA-like family
  misc_feature (9)..(106): Pfam Id: PF05368 Pfam Desc: NmrA-like family
  misc_feature (6)..(321): NCBI GI: 67523161 Blast Desc: AN2037.2 [Aspergillus nidulans FGSC A4] gi|20429038|emb|CAC87270.1| CipA protein [Emericella nidulans] gi|40745713|gb|EAA64869.1| AN2037.2 [Aspergillus nidulans FGSC ;
  misc_feature (5)..(322): NCBI GI: 242808671 Blast Desc: conserved [Talaromyces stipitatus ATCC 10500] gi|218715840|gb|EED15262.1| conserved [Talaromyces stipitatus ATCC 10500]
  misc_feature (3)..(322): NCBI GI: 119485879 Blast Desc: isoflavone reductase family protein (CipA), [Neosartorya fischeri NRRL 181] gi|119410438|gb|EAW20385.1| isoflavone reductase family protein (CipA), [Neosartorya fischeri
  misc_feature (6)..(321): NCBI GI: 255942179 Blast Desc: Pc18g00110 [Penicillium chrysogenum Wisconsin 54-1255] gi|211586591|emb|CAP94235.1| Pc18g00110 [Penicillium chrysogenum Wisconsin 54-1255]
  misc_feature (6)..(323): NCBI GI: 119497459 Blast Desc: oxidoreductase CipA, [Neosartorya fischeri NRRL 181] gi|119413650|gb|EAW23591.1| oxidoreductase CipA, [Neosartorya fischeri NRRL 181]
  misc_feature (6)..(322): NCBI GI: 238506625 Blast Desc: isoflavone reductase family protein (CipA), [Aspergillus flavus NRRL3357] gi|220689227|gb|EED45578.1| isoflavone reductase family protein (CipA), [Aspergillus flavus
  misc_feature (6)..(322): NCBI GI: 46127937 Blast Desc: FG08346.1 [Gibberella zeae PH-1]
  misc_feature (6)..(322): NCBI GI: 169785601 Blast Desc: [Aspergillus oryzae RIB40] gi|83776009|dbj|BAE66128.1| protein product [Aspergillus oryzae]
  misc_feature (3)..(324): NCBI GI: 46112769 Blast Desc: FG02886.1 [Gibberella zeae PH-1]
  misc_feature (6)..(323): NCBI GI: 70990128 Blast Desc: oxidoreductase CipA-like [Aspergillus fumigatus Af293] gi|66847545|gb|EAL87875.1| oxidoreductase CipA-like, [Aspergillus fumigatus Af293]
MSPEYLKNVAIIGAAGRSGTFMVDALVKAGKHVITAITRLDSTNVVPAGVHDVKKVDLNDPSSLVDALRGQDVLIITLAVRAPKGTEARLIDAAVAAGVQWIMPNEWGIDFSKTELVEDCAIQDRGRLEIREHIESVGAGKTRWVGLCCGFWYEFSLAGTEARFGFDFNKKTVTLFDDGNTKTNISTWPQVGRAVASLLSLKISPDSVDDTSPCLSKYANKSAHVSSFFVTQKDMLDSVLRVTGDSITDWSVSYERSVDRFNRGKKMVQNGQRVGLVVVMYSRVFYPDGSGDFNDKVENDVLGLPIESIDEATRVAVQMVQEGRTNEVK

SEQ ID NO: 16847 - DNA, 579 bp, Muscodor strobelii
  misc_feature: SGI cDNA ID NO. 565617
  misc_feature: Encodes the peptide sequence at SEQ ID NO 16848
atgacgcccatcgctttcaaagttagtccttccgatggcattccatcgacccacgggaacgattccgtcggcctggtagcacacgctgagtcaaacgctgaacctcgggataattatgctttactatccgcgagtgtattcgctgaggagagtcagaccaaggatggtttggatggtctcgttctacccctgccaccatctcagcgattgacgccgactttcacgagcatgcctccagagatccgccatatgatcatcaaacaggcagtcattcctgaagatcacgatgctttctctttctacctagtcggaaaatcagacgagactgagaacagggcggcattgttgccgcctccgctagcacgtgtgaacaaacttctccgctcagaagtcacatatttctactacagtaatctccatttcgagattaaattgagctctatttaccacgctgctaaagagctcgtcgtgagcttgctgcgtgattttctggtgggaattgaaattgcctggcgccgaggcggcgccgaaggacctccacgagacaagaaagctaattcgatgttatcgatcaaatga

SEQ ID NO: 16848 - protein, 192 aa, Muscodor strobelii
  misc_feature: SGI Peptide ID NO. 565617
MTPIAFKVSPSDGIPSTHGNDSVGLVAHAESNAEPRDNYALLSASVFAEESQTKDGLDGLVLPLPPSQRLTPTFTSMPPEIRHMIIKQAVIPEDHDAFSFYLVGKSDETENRAALLPPPLARVNKLLRSEVTYFYYSNLHFEIKLSSIYHAAKELVVSLLRDFLVGIEIAWRRGGAEGPPRDKKANSMLSIK

SEQ ID NO: 16849 - DNA, 2025 bp, Muscodor strobelii
  misc_feature: SGI cDNA ID NO. 565618
  misc_feature: Reduced expression when VOC is produced
  misc_feature: Encodes the peptide sequence at SEQ ID NO 16850
atggcagatactccgactattctctcagaacgccgtattgctaaccggccggcgtcgttgagtacctcgccaagcacaaattcatccatgaaggtggcgccgttggcgtctgcgcgtgaaaccccactagagcccgctgtcgtcgagtctgggcagcttgcttcaatgccattaacacccccacactcagccgactcgacgtcatcgcaccgcaaacaccagcagtatttggactcgctggagccaccatcgccagaccattttgcgcgattgtgcagactgcaggaggagcgcgaggaagaacacagaaaacgtaataacgaactcaggcgtcagaacgacgctctccggcgccaaagcatggaagccaggcgtgattttatgcatgccaagacgctggacgatgaagcacaagagaggcactctataaatcgccggaagtccacgctgggtcgccaatccctgttttcagggtcctggtcaagctggtctcgtcctgggaccagtgatagtgatgcgcaaagatctatacaaaagccggtctctaaacccgaagaagaagatggtgataacgagtccctcagaggcaaagctgctacagtaatccaacgcacataccgcggtcaccgcgtgcgccgggagatgcaagggctgggtatagatgctagcacacggtggacgcatgcaatccgcgatgcacaatggaacgagctgaataaacccagagcgcgctcagattcagagccagagaagaaacttgatggtgtaaataggccgagcacgagcaagtcggatgcgaggcggaagtggatgaaagttgctaccattgcacgccgggcaggtgccgatgaggactcagatcactccgacgatgagtattcttctgggccggacagtgatgagtgggcaaacatgagccccgaagaacgcgaagcgggccagaaaagaagagaaaaggcacaggcgaaaaggcgaaaacacgcgcgcacgatgggtctgcagtatttcctcgaaatggttgatttgaaacacagatatggctcgaacctacggacttaccacgaagaatggaagcgggctaatactaacgagaacttcttctactggttagactacggtgagggcaagaatgttgaggctgcaacgtgcccacgagagaggttagatcgcgagcaagtccgctacctgagtcgggaggaaaggcaacaatacctggtcaaagtcgatcaagaagggagactcatgtgggcgaaaaacggcatccgtatcgacacaactgaacaatggaaggacagtattcacggtattgtcccagttgatgacccgactcctgcgttttcacccgaggtggaaagacatgcccagcgtcgtgactcgtcttcgacttcttcaggtcacgagtcagaactcgaagctgcccgcgccgcaaaatacgcgaacgccgacctcgacaacgcaaaaggggtgaaaaagattcgccatgtatcagctgcgacaatattcaataaattgctacgaaaatcagtaaagaagaacacctggatcttcgttgcagacacctcatttcgcctatacgtcggtataaaagcaagcggcgcgttccaacacagttcattcttacgtggctcgcgcatttccgctgcaggacttataaaggtgaaaaacgggcgactatctagcctctcgcccttatctggtcactatcgacctccagcatcaaacttccgcgcgttcgtgcacagtcttagggatgagggtgtcgatatgtcgcatgtcagtatcagtcgcagctacgctgttctcgtggggcttgagccggatgaggctaagaaaattgaagaggaagcctgggaccatagccagagcgcggcaaaagaacgggaagttcttgagatggaggacaaacggcgtgatgagaataaagcaggtgtgaaactactacagaaaatgcatattagaccgaggacaccaaggacacatccagacggcgatgcagagaaggatgaaggcgtggagggtgtatag

SEQ ID NO: 16850 - protein, 674 aa, Muscodor strobelii
  misc_feature: SGI Peptide ID NO. 565618
  misc_feature (196)..(216): Pfam Id: PF00612 Pfam Desc: IQ calmodulin-binding motif
  misc_feature (59)..(654): NCBI GI: 39943326 Blast Desc: MGG_03743 [Magnaporthe grisea 70-15] gi|145009654|gb|EDJ94310.1| MGG_03743 [Magnaporthe grisea 70-15]
  misc_feature (189)..(641): NCBI GI: 156040313 Blast Desc: SS1G_12173 [Sclerotinia sclerotiorum 1980] gi|154696229|gb|EDN95967.1| SS1G_12173 [Sclerotinia sclerotiorum 1980]
  misc_feature (36)..(654): NCBI GI: 46135779 Blast Desc: FG09405.1 [Gibberella zeae PH-1]
  misc_feature (63)..(605): NCBI GI: 116182532 Blast Desc: CHGG_01894 [Chaetomium globosum CBS 148.51] gi|88186191|gb|EAQ93659.1| CHGG_01894 [Chaetomium globosum CBS 148.51]
  misc_feature (191)..(605): NCBI GI: 154300425 Blast Desc: BC1G_11036 [Botryotinia fuckeliana B05.10] gi|150856561|gb|EDN31753.1| BC1G_11036 [Botryotinia fuckeliana B05.10]
  misc_feature (197)..(639): NCBI GI: 169603189 Blast Desc: SNOG_04603 [Phaeosphaeria nodorum SN15] gi|160706343|gb|EAT88363.2| SNOG_04603 [Phaeosphaeria nodorum SN15]
  misc_feature (181)..(630): NCBI GI: 189203611 Blast Desc: IQ calmodulin-binding motif protein [Pyrenophora tritici-repentis Pt-1C-BFP] gi|187985240|gb|EDU50728.1| IQ calmodulin-binding motif protein [Pyrenophora tritici-repentis
  misc_feature (73)..(605): NCBI GI: 171695166 Blast Desc: protein product [Podospora anserina] gi|170947825|emb|CAP59988.1| protein product [Podospora anserina]
  misc_feature (182)..(605): NCBI GI: 242799644 Blast Desc: IQ calmodulin-binding motif protein [Talaromyces stipitatus ATCC 10500] gi|218716768|gb|EED16189.1| IQ calmodulin-binding motif protein [Talaromyces stipitatus ATCC
  misc_feature (177)..(605): NCBI GI: 212541108 Blast Desc: IQ calmodulin-binding motif protein [Penicillium marneffei ATCC 18224] gi|210068008|gb|EEA22100.1| IQ calmodulin-binding motif protein [Penicillium marneffei ATCC
  misc_feature: Useful for introducing or modulating the production of volatile compounds
MADTPTILSERRIANRPASLSTSPSTNSSMKVAPLASARETPLEPAVVESGQLASMPLTPPHSADSTSSHRKHQQYLDSLEPPSPDHFARLCRLQEEREEEHRKRNNELRRQNDALRRQSMEARRDFMHAKTLDDEAQERHSINRRKSTLGRQSLFSGSWSSWSRPGTSDSDAQRSIQKPVSKPEEEDGDNESLRGKAATVIQRTYRGHRVRREMQGLGIDASTRWTHAIRDAQWNELNKPRARSDSEPEKKLDGVNRPSTSKSDARRKWMKVATIARRAGADEDSDHSDDEYSSGPDSDEWANMSPEEREAGQKRREKAQAKRRKHARTMGLQYFLEMVDLKHRYGSNLRTYHEEWKRANTNENFFYWLDYGEGKNVEAATCPRERLDREQVRYLSREERQQYLVKVDQEGRLMWAKNGIRIDTTEQWKDSIHGIVPVDDPTPAFSPEVERHAQRRDSSSTSSGHESELEAARAAKYANADLDNAKGVKKIRHVSAATIFNKLLRKSVKKNTWIFVADTSFRLYVGIKASGAFQHSSFLRGSRISAAGLIKVKNGRLSSLSPLSGHYRPPASNFRAFVHSLRDEGVDMSHVSISRSYAVLVGLEPDEAKKIEEEAWDHSQSAAKEREVLEMEDKRRDENKAGVKLLQKMHIRPRTPRTHPDGDAEKDEGVEGV

SEQ ID NO: 16851 - DNA, 1974 bp, Muscodor strobelii
  misc_feature: SGI cDNA ID NO. 565619
  misc_feature: Elevated expression when VOC is produced
  misc_feature: Encodes the peptide sequence at SEQ ID NO 16852
atgctcaagcaccagcttatcaagaccctagaaaccgaactgaagccttactcttcaccgtctctcaatggaccaccttccaccacagcccaggaaataccctctcagcggtatcgataccagactctgtacgaggatcaatcaccacaacagcatccagctacgacccctgagataccttcgaatagagagccatcgccaccaccacagacgcggacatcagtctgggagagcacgcaacaaccgccttctggtcctgtcttgacagagtgcatctcgaatctcacggtatttgcggccacttggtactttcatccccaagcgccaagtttcaatatctgcgctttctgctacaacacaaatctccggaacacgcgattcgcaactgagttccgaggagtatatcggactgacggtcagcttcgtggatgtcgcttcaaaagcacgcgaatcaaagatgacctcttaaagacagcgctagccacagggtctcttggccctctcatccgatatctgaatgctcgtgcaaatataaaagattgtactgggcggcgcggtgccaagggcacggatggagtaacatggtataaagcgaagaacaatgctatcccgcccatggtcatatgtcaggcctgctatgaggacgacgtcctcacataccgccaattcggcgaatctcattttgagctgagctcgatgatccagagagcagatgatgtgtggtcttgtgatcttgcaagtccctacatccttcgggaatacaatcttcgagcacccgctgatgactggccaacttttgtaaaagaggtgaatagtaggctgaacataacagcgcaatgccccggcacaaagactgtttatcccagcggcaaagcatggtttacgcctaagaacggtagctttcacggctttctgatctgcattgcttgtttctgcgactacttctgctcgacacccgatgaaggaaactggatgcagtttcaaggagatccggtcaagagtttcggcgcctcagtgcgctgctgtctaggcccatggaacatgaggtgtttagcaggccgtaccgtggacacaggagactttgataaattctggagagtcttgaacatctgccttcgacagccaatgtgcgaagagaaggggatgacgggagcaacgtggttcaccttgcgttcggaacccgccaacttcgacatttgtaaatcttgctacctgacaatcatagaaccaatgggcattgggcatcacttcaagcaaaagcctacatatccagcagggactcgggtgctatgcaatttcaacccgagcattgctcggttcggcacatacatgtccaaggcgctcgagatggtatataaacaggatccccagcccttggaagaattcgttacgatatacgcgtcgatgccgatgtgcaaacgcgacacgcgtgtgccaaaccgtcgctggtacggctggaacgagtgtatgatatgtccagagtgctactatgaattcgcgcgcagcaccgcattagcatcgtcaatgccacatcagggagtattggaaagcgcgcctatcatgtgcgagctctacagtccccggatgcgcaagatctacacagcctcgtgcaacacaaatcctcccgatgcgacgttgttcctgcaggagagtctacgtcggcggtccatctgggttcaaacgatgccgcgcgtgcgtgagatcatgcaggatgaagagatgaagatgttgaaataccaacaaacggccagtaacggccagttctacacgtccattggtaacacttacgccaatacagtcggcccagggctttatacgtatggccatgccggcgtgggttatggcttcgagaaccatttgcaggtccaaggagccgagtatagcaaacaagcggcggcacagatgtccaacatgggtggtgttgggcttctcgaggctgagaggctagagaaccagtggaggagggttgaatga

SEQ ID NO: 16852 - protein, 657 aa, Muscodor strobelii
  misc_feature: SGI Peptide ID NO. 565619
  misc_feature (40)..(657): NCBI GI: 261356532 Blast Desc: conserved [Verticillium albo-atrum VaMs.102]
  misc_feature (26)..(657): NCBI GI: 46110713 Blast Desc: FG02238.1 [Gibberella zeae PH-1]
  misc_feature (48)..(657): NCBI GI: 256725022 Blast Desc: NECHADRAFT_34719 [Nectria haematococca mpVI 77-13-4]
  misc_feature (17)..(657): NCBI GI: 238495652 Blast Desc: conserved [Aspergillus flavus NRRL3357] gi|220695712|gb|EED52055.1| conserved [Aspergillus flavus NRRL3357]
  misc_feature (91)..(657): NCBI GI: 256728328 Blast Desc: NECHADRAFT_73005 [Nectria haematococca mpVI 77-13-4]
  misc_feature (17)..(569): NCBI GI: 169778345 Blast Desc: [Aspergillus oryzae RIB40] gi|83772375|dbj|BAE62505.1| protein product [Aspergillus oryzae]
  misc_feature (87)..(657): NCBI GI: 121703878 Blast Desc: conserved [Aspergillus clavatus NRRL 1] gi|119398347|gb|EAW08777.1| conserved [Aspergillus clavatus NRRL 1]
  misc_feature (87)..(614): NCBI GI: 242811746 Blast Desc: conserved [Talaromyces stipitatus ATCC 10500] gi|218714152|gb|EED13575.1| conserved [Talaromyces stipitatus ATCC 10500]
  misc_feature (87)..(657): NCBI GI: 212544190 Blast Desc: conserved [Penicillium marneffei ATCC 18224] gi|210065218|gb|EEA19312.1| conserved [Penicillium marneffei ATCC 18224]
  misc_feature (93)..(656): NCBI GI: 46114820 Blast Desc: FG03252.1 [Gibberella zeae PH-1]
  misc_feature: Useful for introducing or modulating the production of volatile compounds
MLKHQLIKTLETELKPYSSPSLNGPPSTTAQEIPSQRYRYQTLYEDQSPQQHPATTPEIPSNREPSPPPQTRTSVWESTQQPPSGPVLTECISNLTVFAATWYFHPQAPSFNICAFCYNTNLRNTRFATEFRGVYRTDGQLRGCRFKSTRIKDDLLKTALATGSLGPLIRYLNARANIKDCTGRRGAKGTDGVTWYKAKNNAIPPMVICQACYEDDVLTYRQFGESHFELSSMIQRADDVWSCDLASPYILREYNLRAPADDWPTFVKEVNSRLNITAQCPGTKTVYPSGKAWFTPKNGSFHGFLICIACFCDYFCSTPDEGNWMQFQGDPVKSFGASVRCCLGPWNMRCLAGRTVDTGDFDKFWRVLNICLRQPMCEEKGMTGATWFTLRSEPANFDICKSCYLTIIEPMGIGHHFKQKPTYPAGTRVLCNFNPSIARFGTYMSKALEMVYKQDPQPLEEFVTIYASMPMCKRDTRVPNRRWYGWNECMICPECYYEFARSTALASSMPHQGVLESAPIMCELYSPRMRKIYTASCNTNPPDATLFLQESLRRRSIWVQTMPRVREIMQDEEMKMLKYQQTASNGQFYTSIGNTYANTVGPGLYTYGHAGVGYGFENHLQVQGAEYSKQAAAQMSNMGGVGLLEAERLENQWRRVE

SEQ ID NO: 16853 - DNA, 1797 bp, Muscodor strobelii
  misc_feature: SGI cDNA ID NO. 565620
  misc_feature: Encodes the peptide sequence at SEQ ID NO 16854
atggccacctccagcgtttcgcgacgacctgaagcgttgcagcgccccgagccgaagtacactcgccggtcgcaggcctcgctcaaggaccagccgcagcaacagcagcaacagcagcagcagtcgccggtgctgctcctgtcgcaggccgcccgtatgaagcgcccactcgatcccatccccgacaatctgaacgactcgctgccgagcaagagagcacgcatcaccgtcgagattgtcgccaggccgctcgtccacggcttcagcgccaagtccgtgcagcacaagccctctcagcccgtctccaagtcgtcgattgcaccaccgtcgtcccaatcgctccccgtcgcgcccgtaccaaaacaacccccgacagccaccaccaacaccaccaacaccaccaccaatctcccttcctcgcccacgcctgtgcctcttccttccgctactacggccactgctgccgtcccaccacaaccccctgcctcttcttcatcctcatcctccacgacggcgacggccaaggaacatgtcctcacgaagcaccaggagaaggtcatcagcggcatccgccacgaactagaccggctgcagcccagtgccgccgacgccagctcggccagcaccacacaggggcgcaagctccggtctcaggaggccacccgctttaagagcgagctgtcggcctatttccccgactacgatgaggtcattggcaatgatccggtagagaaacacttcctcaacattgagacgccaattgtcgtatcggacgcggacctcgcaccaagcgacgctgccgccggtactagcaccctcaccaatcccactccaccagtccgccctgactcagtcccccactttcatacagtgcggacgtacggtgatcgtctcttctccagcctgcacaatgcccagcctatggatttccagaacctcgagtccaagtacagggataagcgtcatctggaagatccactatcagatgcatactacgagccatcccacagaaaggccgcccgcctagaaaagtcgatccgcaacacggaacgcggacgtgcccagcatgagaaggaccagatcatccgcctcttgggtgaactccaaggccatgattggctgaggactatgggtgtcaacggcgtcaccgagagccgcaagaagagctttgagcccgcccgcgactacttcatcaagggctgccaagtcatcctcgacaagttccgcttctggagcgccgaggagaagaggcgaaagctcgagaaggaacgcgcccaagtcgaggaatcctctcaagaggaggatgaccaagacgacgacgagcaggattctgaagggccagaagaggaagatgaggaggtggtcgaggacagtgacaaccacgaggacgtcgaaatggctgacagcatcgaagacagcctagacgacatggagagcaacgacgaccctcccgactacagcgacgtcgatgcggccgcgcgtcagcttcatgacgaggccatggcacgcgccaggctggctgcatccagggcgtccagtagaagtcgaggtgagccactaccattgctgccagaacctgcccatcgagagttcacgtcgttctttgagacgaagcatcagagagatgcagcagtacacgggagccgccggagaggaaggacttcgcttctagcttggggacatcccatccctgacatgacggaagctgatttcgagttacctgacgattgtatagatgaagataccctgaaagcacacgagagacagaagaggcgagaacgacgccagcacaagtag

SEQ ID NO: 16854 - protein, 598 aa, Muscodor strobelii
  misc_feature: SGI Peptide ID NO. 565620
  misc_feature (138)..(586): NCBI GI: 164429664 Blast Desc: NCU10806 [Neurospora crassa OR74A] gi|38566903|emb|CAE76207.1| [Neurospora crassa] gi|157073569|gb|EDO65466.1| NCU10806 [Neurospora crassa OR74A]
  misc_feature (52)..(583): NCBI GI: 256734845 Blast Desc: NECHADRAFT_75525 [Nectria haematococca mpVI 77-13-4]
  misc_feature (212)..(586): NCBI GI: 261355294 Blast Desc: conserved [Verticillium albo-atrum VaMs.102]
  misc_feature (168)..(583): NCBI GI: 46135779 Blast Desc: FG09405.1 [Gibberella zeae PH-1]
  misc_feature (106)..(595): NCBI GI: 156053608 Blast Desc: SS1G_05651 [Sclerotinia sclerotiorum 1980] gi|154703432|gb|EDO03171.1| SS1G_05651 [Sclerotinia sclerotiorum 1980]
  misc_feature (32)..(496): NCBI GI: 171687463 Blast Desc: protein product [Podospora anserina] gi|170943693|emb|CAP69345.1| protein product [Podospora anserina]
  misc_feature (219)..(583): NCBI GI: 145615864 Blast Desc: MGG_13467 [Magnaporthe grisea 70-15] gi|145009656|gb|EDJ94312.1| MGG_13467 [Magnaporthe grisea 70-15]
  misc_feature (65)..(580): NCBI GI: 116180772 Blast Desc: CHGG_01014 [Chaetomium globosum CBS 148.51] gi|88185311|gb|EAQ92779.1| CHGG_01014 [Chaetomium globosum CBS 148.51]
  misc_feature (324)..(595): NCBI GI: 154299897 Blast Desc: BC1G_10839 [Botryotinia fuckeliana B05.10] gi|150857119|gb|EDN32311.1| BC1G_10839 [Botryotinia fuckeliana B05.10]
  misc_feature (198)..(578): NCBI GI: 169766416 Blast Desc: [Aspergillus oryzae RIB40] gi|83765534|dbj|BAE55677.1| protein product [Aspergillus oryzae]
MATSSVSRRPEALQRPEPKYTRRSQASLKDQPQQQQQQQQQSPVLLLSQAARMKRPLDPIPDNLNDSLPSKRARITVEIVARPLVHGFSAKSVQHKPSQPVSKSSIAPPSSQSLPVAPVPKQPPTATTNTTNTTTNLPSSPTPVPLPSATTATAAVPPQPPASSSSSSSTTATAKEHVLTKHQEKVISGIRHELDRLQPSAADASSASTTQGRKLRSQEATRFKSELSAYFPDYDEVIGNDPVEKHFLNIETPIVVSDADLAPSDAAAGTSTLTNPTPPVRPDSVPHFHTVRTYGDRLFSSLHNAQPMDFQNLESKYRDKRHLEDPLSDAYYEPSHRKAARLEKSIRNTERGRAQHEKDQIIRLLGELQGHDWLRTMGVNGVTESRKKSFEPARDYFIKGCQVILDKFRFWSAEEKRRKLEKERAQVEESSQEEDDQDDDEQDSEGPEEEDEEVVEDSDNHEDVEMADSIEDSLDDMESNDDPPDYSDVDAAARQLHDEAMARARLAASRASSRSRGEPLPLLPEPAHREFTSFFETKHQRDAAVHGSRRRGRTSLLAWGHPIPDMTEADFELPDDCIDEDTLKAHERQKRRERRQHK

SEQ ID NO: 16855 - DNA, 4036 bp, Muscodor strobelii
  misc_feature: SGI EST ID NO. CUFF.39934.0
  misc_feature: Variant of the nucleotide sequence at SEQ ID NO 16853
caggagtccaaccctttgggcaagcgcagacgcctgtgtcttgaaaacaccgtgcacaaacacggtatctctgtgacacacgctacaagcaacctatcactactgtacctcactgctgccatctgcgctgcacccagcaagcgcagggacgcggccactgtattgggcttggggcttggggagagaacctgaagcattgaatgcagagcagctgcaatagtcaattccaaacaagtcgcaaagctctgacgccctcaattatttcaattctgcgccttcaactgtctgtcatgatcaacaacaacaccgacgctcctcatggccacctccagcgtttcgcgacgacctgaagcgttgcagcgccccgagccgaagtacactcgccggtcgcaggcctcgctcaaggaccagccgcagcaacagcagcaacagcagcagcagtcgccggtgctgctcctgtcgcaggccgcccgtatgaagcgcccactcgatcccatccccgacaatctgaacgactcgctgccgagcaagagagcacgcatcaccgtcgagattgtcgccaggccgctcgtccacggcttcagcgccaagtccgtgcagcacaagccctctcagcccgtctccaagtcgtcgattgcaccaccgtcgtcccaatcgctccccgtcgcgcccgtaccaaaacaacccccgacagccaccaccaacaccaccaacaccaccaccaatctcccttcctcgcccacgcctgtgcctcttccttccgctactacggccactgctgccgtcccaccacaaccccctgcctcttcttcatcctcatcctccacgacggcgacggccaaggaacatgtcctcacgaagcaccaggagaaggtcatcagcggcatccgccacgaactagaccggctgcagcccagtgccgccgacgccagctcggccagcaccacacaggggcgcaagctccggtctcaggaggccacccgctttaagagcgagctgtcggcctatttccccgactacgatgaggtcattggcaatgatccggtagagaaacacttcctcaacattgagacgccaattgtcgtatcggacgcggacctcgcaccaagcgacgctgccgccggtactagcaccctcaccaatcccactccaccagtccgccctgactcagtcccccactttcatacagtgcggacgtacggtgatcgtctcttctccagcctgcacaatgcccagcctatggatttccagaacctcgagtccaagtacagggataagcgtcatctggaagatccactatcagatgcatactacgagccatcccacagaaaggccgcccgcctagaaaagtcgatccgcaacacggaacgcggacgtgcccagcatgagaaggaccagatcatccgcctcttgggtgaactccaaggccatgattggctgaggactatgggtgtcaacggcgtcaccgagagccgcaagaagagctttgagcccgcccgcgactacttcatcaagggctgccaagtcatcctcgacaagttccgcttctggagcgccgaggagaagaggcgaaagctcgagaaggaacgcgcccaagtcgaggaatcctctcaagaggaggatgaccaagacgacgacgagcaggattctgaagggccagaagaggaagatgaggaggtggtcgaggacagtgacaaccacgaggacgtcgaaatggctgacagcatcgaagacagcctagacgacatggagagcaacgacgaccctcccgactacagcgacgtcgatgcggccgcgcgtcagcttcatgacgaggccatggcacgcgccaggctggctgcatccagggcgtccagtagaagtcgaggtgagccactaccattgctgccagaacctgcccatcgagagttcacgtcgttctttgagacgaagcatcagagagatgcagcagtacacgggagccgccggagaggaaggacttcgcttctagcttggggacatcccatccctgacatgacggaagctgatttcgagttacctgacgattgtatagatgaagataccctgaaagcacacgagagacagaagaggcgagaacgacgccagcacaagtagtgagatgaccacgtaatattgtcaaacgtggtacgcaggtatgagccacagtcgtcctgtaggacaggacgcgaggatatttcatgatacctgaccagaggtgtattgttcagagtgttactaccagaaaaagctgatagctgcctgccacacttatgtagcatcacattaataccttgaacattgaaccttcgcgttccaagtccaaggcgaataaattaaaatacatctcacatcttatgttctcttccttgaaaatggcatccgtcattgcccacgactacataaaccctgtcttcgacggcaatgacaataacttataaagccacacaaattttctaagtgagtaactttctatgacgctgatttgtatgtcttccgaacaccattttacgaaggcacactatcttcccaccaaaaagggccggatagaactgaatctagtaggatatagcaaacagatacattacacagggcttcatggcttcatggtattatttcaccgcccgggatatggtagggactagtcacagcggcgttgtggattacaagcaaatcaagtttcccgtcccggatatccaacactataggccaaaacactgaaggccttctcaaaagcctcctcggtcaaacccctaacacctatcgccaagcgccgatatggtccgttgtgtctctcgtcgtcatggacattttgttctacttcaactcaagttcaattcttcactcacgacccttctcctttccccccctttcagttcccgctttcctcatcattaggcaacatccaaggcttcttaacacagctgcgtccccaaagcgccatacatctcgcactctcggcaatgctctccgtgccacccattcttttctcaaactccctctcatccgccaaatcccccaattcatcgcctgccctaacctgactagcgaatccgggtggctcatagtgattgaaaacctgcgggttcacaacaagacatctcagtcttccctcttgacaccgattcgagagtttgatatcaaacgcctcatcttgcccatcagacgtctggtcaagaaccgcctgtgcggaccctgagtggacggcgtacgcgaatgaacagacggtttggaatccggctcgttggataatacgatgatcgtcggggatctgacgcacgaatcgacgcgcccagcctgagtaggaggggaacgggatccgtgtcgggtcggtgaatggtagagggtgcgagactcctgcgtcgattgatgagccgcagtggcctagccagaggatatcccaatctacgccgtacgggaaaggggaggaggggggtgtgaaggtgtagtttcggatggaggtggataggaggctcatttgggattttattgagaggtcccagtctgcgtcgtcttccaggatgagggctgttgtgtagtttgtggatattacgtgtttgagtaggtcgaggtgcgagagccaggcgcgtgctgagcctgggggtgggtgtgttgttgaggatgagcccatggagcggaatgctgagattaggggggcgctgttttggggttggcgggggatggatatcgtgaggtttgtgagggttgctgctgcggttaggccgcgagtgcgccaggagggcttggttgagagggcgaggatggtttggaactggggtttgttaatgcttggtttgtagggaagtttgcgtgaaggtagatggtcatggaatgtaaatcaaaaggaatctgagaaagagagaggaaaaacttacacccaacgtctcattcgcagcatgttcactaggatttacaacaattcgaggcggagctggatacgatggaatctgcgattcgaaactctgcttcgccaattctcttttcccaaacatccatgcagcccatacttggatccctgtgaggatgactactgcacata

SEQ ID NO: 16856 - DNA, 759 bp, Muscodor strobelii
  misc_feature: SGI cDNA ID NO. 565621
  misc_feature: Encodes the peptide sequence at SEQ ID NO 16857
atgggctcatcctcaacaacacacccacccccaggctcagcacgcgcctggctctcgcacctcgacctactcaaacacgtaatatccacaaactacacaacagccctcatcctggaagacgacgcagactgggacctctcaataaaatcccaaatgagcctcctatccacctccatccgaaactacaccttcacacccccctcctcccctttcccgtacggcgtagattgggatatcctctggctaggccactgcggctcatcaatcgacgcaggagtctcgcaccctctaccattcaccgacccgacacggatcccgttcccctcctactcaggctgggcgcgtcgattcgtgcgtcagatccccgacgatcatcgtattatccaacgagccggattccaaaccgtctgttcattcgcgtacgccgtccactcagggtccgcacaggcggttcttgaccagacgtctgatgggcaagatgaggcgtttgatatcaaactctcgaatcggtgtcaagagggaagactgagatgtcttgttgtgaacccgcaggttttcaatcactatgagccacccggattcgctagtcaggttagggcaggcgatgaattgggggatttggcggatgagagggagtttgagaaaagaatgggtggcacggagagcattgccgagagtgcgagatgtatggcgctttggggacgcagctgtgttaagaagccttggatgttgcctaatgatgaggaaagcgggaactga

SEQ ID NO: 16857 - protein, 252 aa, Muscodor strobelii
  misc_feature: SGI Peptide ID NO. 565621
  misc_feature (1)..(239): NCBI GI: 115384416 Blast Desc: conserved [Aspergillus terreus NIH2624] gi|114196447|gb|EAU38147.1| conserved [Aspergillus terreus NIH2624]
  misc_feature (1)..(239): NCBI GI: 238490274 Blast Desc: conserved [Aspergillus flavus NRRL3357] gi|220696787|gb|EED53128.1| conserved [Aspergillus flavus NRRL3357]
  misc_feature (6)..(234): NCBI GI: 67537776 Blast Desc: AN5058.2 [Aspergillus nidulans FGSC A4] gi|40740862|gb|EAA60052.1| AN5058.2 [Aspergillus nidulans FGSC A4] gi|259482062|tpe|CBF76181.1| TPA: conserved [Aspergillus FGSC
  misc_feature (1)..(240): NCBI GI: 238507355 Blast Desc: conserved [Aspergillus flavus NRRL3357] gi|220689592|gb|EED45943.1| conserved [Aspergillus flavus NRRL3357]
  misc_feature (1)..(240): NCBI GI: 169786351 Blast Desc: [Aspergillus oryzae RIB40] gi|83776384|dbj|BAE66503.1| protein product [Aspergillus oryzae]
  misc_feature (1)..(237): NCBI GI: 259479311 Blast Desc: TPA: conserved [Aspergillus nidulans FGSC A4]
  misc_feature (1)..(237): NCBI GI: 67540580 Blast Desc: AN6460.2 [Aspergillus nidulans FGSC A4] gi|40739292|gb|EAA58482.1| AN6460.2 [Aspergillus nidulans FGSC A4]
  misc_feature (8)..(235): NCBI GI: 238488291 Blast Desc: conserved [Aspergillus flavus NRRL3357] gi|220697771|gb|EED54111.1| conserved [Aspergillus flavus NRRL3357]
  misc_feature (5)..(235): NCBI GI: 212536927 Blast Desc: conserved [Penicillium marneffei ATCC 18224] gi|210068361|gb|EEA22452.1| conserved [Penicillium marneffei ATCC 18224]
  misc_feature (12)..(197): NCBI GI: 145247574 Blast Desc: An12g09860 [Aspergillus niger] gi|134080775|emb|CAL00889.1| protein product [Aspergillus niger]
MGSSSTTHPPPGSARAWLSHLDLLKHVISTNYTTALILEDDADWDLSIKSQMSLLSTSIRNYTFTPPSSPFPYGVDWDILWLGHCGSSIDAGVSHPLPFTDPTRIPFPSYSGWARRFVRQIPDDHRIIQRAGFQTVCSFAYAVHSGSAQAVLDQTSDGQDEAFDIKLSNRCQEGRLRCLVVNPQVFNHYEPPGFASQVRAGDELGDLADEREFEKRMGGTESIAESARCMALWGRSCVKKPWMLPNDEESGN

SEQ ID NO: 16858 - DNA, 345 bp, Muscodor strobelii
  misc_feature: SGI cDNA ID NO. 565622
  misc_feature: Encodes the peptide sequence at SEQ ID NO 16859
atgtaccgccctcgtgtcgagaagttcatctccggctacctcacctacctcatgagtcatgtagcgctgcaacctgagccagagccagaggtatctgctcctaccaggcctgagccagacctcgaggctcaggttgcagcgacgccggagatgaatccacagggcgaggcggatggtggggacgttccgaagtcatgtcgtcaatggttgaagaagaagatggggaagaggacgattgttgtcttggtcgtgggcttcttgctggccgttgctatcgggttgattgtcgggctctcgcggatggggaaagataccggcaacgttagaggtgatcttgagggttag

SEQ ID NO: 16859 - protein, 114 aa, Muscodor strobelii
  misc_feature: SGI Peptide ID NO. 565622
MYRPRVEKFISGYLTYLMSHVALQPEPEPEVSAPTRPEPDLEAQVAATPEMNPQGEADGGDVPKSCRQWLKKKMGKRTIVVLVVGFLLAVAIGLIVGLSRMGKDTGNVRGDLEG

SEQ ID NO: 16860 - DNA, 1707 bp, Muscodor strobelii
  misc_feature: SGI cDNA ID NO. 565623
  misc_feature: Encodes the peptide sequence at SEQ ID NO 16861
atgtttacctccaccgtcatatttttggccccggttgaggtccagtcgaatgcagacgatgaagtctgggcgaccgtggtatactcacctaacaacctctatccgcatctgattccgcgatttgctactctgcaagcaaggatggcagatgacaagcatgagatcgaaatggtcgatgacagggctctcgcagaccccgaggatgttgaaaagcagcccgttgtgcgaacaattgacaacattcgagttgtcgggctgtcagaagatgaagccgtattttacgacaactttggcgacgacaaccgtaagaagatgctgagaaagatcgacttccgccttgttcctatgctttcggccctgtatctaatctctcagattgatcgtgcgaatctggggaatgccaagactgaaggtctggaggaggacctccatctgactggtcttcaatacaatatcgctgtgtcgctgttcttcgtcccatatgttctcttcgaagttcccagtaacattctattgaagagattctcaagaccctcaatctatttgggcatacttgttgcttcgtggggcgttataatgacgtcgcatgggtttgtgcagaatttctccggcttgttgggtgttcgattgattctgggaattctcgaagcaggattttaccccggtgccgtgtatctctgttctttctggtttatgccgaacgagatggcaacgagagtctctgtcttctactgctttagtgccctctctggtgcattctcaggactactcgcagcagcaatcgccaagttggatggtgttggtggatatggtggctggtcttggatcttcatacttgagggtcttgtgaccatcgtcctaggcgggctttgcttttggctgctgattgattcgcctcgtctttctcacaggtggttgagccccgaagaaatcaggtacctggaattgcgcatcctcataaagcaaggtggccgcgactctggagaaaaagaaaaatgggttcactggaatgacctcaaagctgtagtgtcgaactatcggctatggggtcaggcttacctgctcttagcttctacagcttgctcctatgccaataagtacactctgccgactctgacaaaggccatgggtttcagcaacaccaacgctcagctacttaccgctcctccgtacatagctggtgctattgccgctatcatttcgggtcgtctttcggatcattattactggcgatttcctttcgctgctgtcgctatgattttggtcgcagtcggatacagcatcattatttctttcaaaggtgacttggcgcacaacattggcccaagcttatttgctgtcattctcacctgcataggaatctatccgatgcagcccgctgtcagcacttggatcgccaacaatcttgctccaactagccggaaagccgtcggtgtagcatttgctatcgccgttggtaacacgggaggcatcatcggctcgtacatgttcattgatcgagaggctcctgcctattacactggatatgggctaggaatcgcattcggcgtgacgggcgccctaatggctttggccgtggagatttcttttgcatgggcaaataataagaatgcgaagatgtcagaggcggaggttcgtgccgggtattctgagcatgaattattgcagatgggtgacaagtccccgttattcaaatacacgttataa

SEQ ID NO: 16861 - protein, 568 aa, Muscodor strobelii
  misc_feature: SGI Peptide ID NO. 565623
  misc_feature (117)..(494): Pfam Id: PF07690 Pfam Desc: Major Facilitator Superfamily
  misc_feature (56)..(568): NCBI GI: 238504640 Blast Desc: MFS transporter, [Aspergillus flavus NRRL3357] gi|220691022|gb|EED47371.1| MFS transporter, [Aspergillus flavus NRRL3357]
  misc_feature (68)..(568): NCBI GI: 256723446 Blast Desc: NECHADRAFT_42319 [Nectria haematococca mpVI 77-13-4]
  misc_feature (52)..(568): NCBI GI: 238498816 Blast Desc: MFS transporter, [Aspergillus flavus NRRL3357] gi|220693917|gb|EED50262.1| MFS transporter, [Aspergillus flavus NRRL3357]
  misc_feature (56)..(568): NCBI GI: 67522449 Blast Desc: AN1681.2 [Aspergillus nidulans FGSC A4] gi|40745645|gb|EAA64801.1| AN1681.2 [Aspergillus nidulans FGSC A4] gi|259487020|tpe|CBF85356.1| TPA: MFS transporter, nidulans
  misc_feature (49)..(568): NCBI GI: 261354703 Blast Desc: inner membrane transport protein yfaV [Verticillium albo-atrum VaMs.102]
  misc_feature (48)..(568): NCBI GI: 119477053 Blast Desc: MFS transporter, [Neosartorya fischeri NRRL 181] gi|119407383|gb|EAW17332.1| MFS transporter, [Neosartorya fischeri NRRL 181]
  misc_feature (58)..(568): NCBI GI: 115385248 Blast Desc: conserved [Aspergillus terreus NIH2624] gi|114196863|gb|EAU38563.1| conserved [Aspergillus terreus NIH2624]
  misc_feature (56)..(568): NCBI GI: 70996905 Blast Desc: MFS transporter [Aspergillus fumigatus Af293] gi|66850843|gb|EAL91169.1| MFS transporter, [Aspergillus fumigatus Af293]
  misc_feature (56)..(568): NCBI GI: 159127063 Blast Desc: MFS transporter, [Aspergillus fumigatus A1163]
  misc_feature (59)..(568): NCBI GI: 255956967 Blast Desc: Pc21g22680 [Penicillium chrysogenum Wisconsin 54-1255] gi|211590947|emb|CAP97165.1| Pc21g22680 [Penicillium chrysogenum Wisconsin 54-1255]
MFTSTVIFLAPVEVQSNADDEVWATVVYSPNNLYPHLIPRFATLQARMADDKHEIEMVDDRALADPEDVEKQPVVRTIDNIRVVGLSEDEAVFYDNFGDDNRKKMLRKIDFRLVPMLSALYLISQIDRANLGNAKTEGLEEDLHLTGLQYNIAVSLFFVPYVLFEVPSNILLKRFSRPSIYLGILVASWGVIMTSHGFVQNFSGLLGVRLILGILEAGFYPGAVYLCSFWFMPNEMATRVSVFYCFSALSGAFSGLLAAAIAKLDGVGGYGGWSWIFILEGLVTIVLGGLCFWLLIDSPRLSHRWLSPEEIRYLELRILIKQGGRDSGEKEKWVHWNDLKAVVSNYRLWGQAYLLLASTACSYANKYTLPTLTKAMGFSNTNAQLLTAPPYIAGAIAAIISGRLSDHYYWRFPFAAVAMILVAVGYSIIISFKGDLAHNIGPSLFAVILTCIGIYPMQPAVSTWIANNLAPTSRKAVGVAFAIAVGNTGGIIGSYMFIDREAPAYYTGYGLGIAFGVTGALMALAVEISFAWANNKNAKMSEAEVRAGYSEHELLQMGDKSPLFKYTL

SEQ ID NO: 16862 - DNA, 1481 bp, Muscodor strobelii
  misc_feature: SGI EST ID NO. CUFF.39816.0
  misc_feature: Variant of the nucleotide sequence at SEQ ID NO 16860
cttcaatacaatatcgctgtgtcgctgttcttcgtcccatatgttctcttcgaagttcccagtaacattctattgaagagattctcaagaccctcaatctatttgggcatacttgttgcttcgtggggcgttataatgacgtcgcatgggtttgtgcagaatttctccggcttgttgggtgttcgattgattctgggaattctcgaagcaggattttaccccggtgccgtgtatctctgttctttctggtttatgccgaacgagatggcaacgagagtctctgtcttctactgctttagtgccctctctggtgcattctcaggactactcgcagcagcaatcgccaagttggatggtgttggtggatatggtggctggtcttggatcttcatacttgagggtcttgtgaccatcgtcctaggcgggctttgcttttggctgctgattgattcgcctcgtctttctcacaggtggttgagccccgaagaaatcaggtacctggaattgcgcatcctcataaagcaaggtggccgcgactctggagaaaaagaaaaatgggttcactggaatgacctcaaagctgtagtgtcgaactatcggctatggggtcaggcttacctgctcttagcttctacagcttgctcctatgccaataagtacactctgccgactctgacaaaggccatgggtttcagcaacaccaacgctcagctacttaccgctcctccgtacatagctggtgctattgccgctatcatttcgggtcgtctttcggatcattattactggcgatttcctttcgctgctgtcgctatgattttggtcgcagtcggatacagcatcattatttctttcaaaggtgacttggcgcacaacattggcccaagcttatttgctgtcattctcacctgcataggaatctatccgatgcagcccgctgtcagcacttggatcgccaacaatcttgctccaactagccggaaagccgtcggtgtagcatttgctatcgccgttggtaacacgggaggcatcatcggctcgtacatgttcattgatcgagaggctcctgcctattacactggatatgggctaggaatcgcattcggcgtgacgggcgccctaatggctttggccgtggagatttcttttgcatgggcaaataataagaatgcgaagatgtcagaggcggaggttcgtgccgggtattctgagcatgaattattgcagatgggtgacaagtccccgttattcaaatacacgttataaggatgaattgattcaatatagcctgaataatttctacgtaggcacacatgtggccatatatacaagatgctttcgccacaacttgggggctttgtattttgacagatagtaacgcaaatatctctattacgggtcaatcggactatttcaaagccgcatggcattcttggaggagctatcaagcttatatagctaccaagatcattttagtcaac

SEQ ID NO: 16863 - DNA, 1551 bp, Muscodor strobelii
  misc_feature: SGI cDNA ID NO. 565624
  misc_feature: Encodes the peptide sequence at SEQ ID NO 16864
atgaagcttcttccgatatctgcatcggccatttggaccctttctatgccaacgtgggcgaaatatgccaactcatcggccacaacgctcaactggcaagactgtcccgctgcgctggaagtcagaggtcttcctatccaatgcgcaaacctcaccgttccattggattgggattttgtagacaaggggaacacacatgtcggcgtagccagaatgcgcgctaggaagccagaagaacgcatcggcagcctcatttatcaacccgggggaccaggtcttgcgtctactgccaaattggccaattttgtgaagggcttagagtacataggtgacgatatccgcgatcgcttcgacatcgttggcatcgatgtgcgaggatcgggttacagtgacgcgctcacgtgcgatctagacacttataaccgctttctatcattgccgctcttcccatccacgcaatccgatttcgcggcagcaatcgcgcagaatcaagccttgcggaatacgtgtgtctctgagactggaaatcgggaattaattgactacacagacaccgtgagtattgctcgggattacgaggctgtgcgcgtggccctcaatgacggcccgttgtcctattacgggtcgagctacggcacttctttgggcgctcaatatgccgaactcttcccatataatattcgggccatggcgctagacggtgttgtgtctacttcacagtcggagacttctatgttcatcgagggcctggtatcagtcgaagctaccctacgcagtttcttcgaatggtgtccaacacagaacgaaactgtctgcccaatagtacatcacgttggttctaggactatggaagaagtctggtttgatcttttatctcaggccgagaccagtccactcctatgtgacaacgccgcatgtacaagctccgaggtctcggctagcaagctgcgttggcttgtactggactacctttacggcgagtcattttggcctcttcttgcacgtgcactggacgaggccgtcgcacaaggaaacgggacgcttttcgatattgataacgttcatttcttaccgagaagtacttacgactcctacatgaactcacagctctactccaaccaagctattatctgccaaaactgggagcacggtgtcacatcagcacaggacgtcctattgaagcagcgtctggccgaaagccagggaccactaatgctgggagcgtcggccaattacaggttccaagccttctgcgcaggttggcccgctaatatccgtaacccggcgcatcgtatcaacatccctagaaccgaaaagttacctaagatccttataatggaatcttatcgggatcccgccactcctcgagcttggggaacgcagctccggtcagagattggcggagacagagttgtgatggcgaccaggaatgtctcttgccactcggtgtacgagcagctagatgcaaagggaggtgacgcagcgacagctatcgagcagtacttgcttcatctggctctacctgaggacgggatcttgtatcagtcctag

SEQ ID NO: 16864 - protein, 516 aa, Muscodor strobelii
  misc_feature: SGI Peptide ID NO. 565624
  misc_feature (117)..(408): Pfam Id: PF00561 Pfam Desc: alpha/beta hydrolase fold
  misc_feature (402)..(514): Pfam Id: PF08386 Pfam Desc: TAP-like protein
  misc_feature (117)..(274): Pfam Id: PF00561 Pfam Desc: alpha/beta hydrolase fold
  misc_feature (402)..(474): Pfam Id: PF08386 Pfam Desc: TAP-like protein
  misc_feature (46)..(508): NCBI GI: 67903568 Blast Desc: AN8771.2 [Aspergillus nidulans FGSC A4] gi|40741374|gb|EAA60564.1| AN8771.2 [Aspergillus nidulans FGSC A4]
  misc_feature (46)..(508): NCBI GI: 259483025 Blast Desc: TPA: conserved [Aspergillus nidulans FGSC A4]
  misc_feature (79)..(516): NCBI GI: 169619802 Blast Desc: SNOG_13098 [Phaeosphaeria nodorum SN15] gi|160703905|gb|EAT79425.2| SNOG_13098 [Phaeosphaeria nodorum SN15]
  misc_feature (14)..(515): NCBI GI: 256728785 Blast Desc: NECHADRAFT_72599 [Nectria haematococca mpVI 77-13-4]
  misc_feature (2)..(511): NCBI GI: 229864051 Blast Desc: hydrolase or acyltransferase of alpha/beta superfamily [Stackebrandtia nassauensis DSM 44728] gi|229749367|gb|EEP07161.1| hydrolase or acyltransferase of DSM
  misc_feature (24)..(516): NCBI GI: 46110451 Blast Desc: FG02107.1 [Gibberella zeae PH-1]
  misc_feature (26)..(511): NCBI GI: 260645096 Blast Desc: ase ( secreted protein) [Streptomyces scabiei 87.22]
  misc_feature (31)..(513): NCBI GI: 269128732 Blast Desc: TAP domain protein [Thermomonospora curvata DSM 43183] gi|268313690|gb|ACZ00065.1| TAP domain protein [Thermomonospora curvata DSM 43183]
  misc_feature (46)..(466): NCBI GI: 256678412 Blast Desc: protease [Streptomyces sp. SPB78]
  misc_feature (30)..(511): NCBI GI: 282868225 Blast Desc: TAP domain protein [Streptomyces sp. ACT-1] gi|282578638|gb|EFB84049.1| TAP domain protein [Streptomyces sp. ACT-1]
MKLLPISASAIWTLSMPTWAKYANSSATTLNWQDCPAALEVRGLPIQCANLTVPLDWDFVDKGNTHVGVARMRARKPEERIGSLIYQPGGPGLASTAKLANFVKGLEYIGDDIRDRFDIVGIDVRGSGYSDALTCDLDTYNRFLSLPLFPSTQSDFAAAIAQNQALRNTCVSETGNRELIDYTDTVSIARDYEAVRVALNDGPLSYYGSSYGTSLGAQYAELFPYNIRAMALDGVVSTSQSETSMFIEGLVSVEATLRSFFEWCPTQNETVCPIVHHVGSRTMEEVWFDLLSQAETSPLLCDNAACTSSEVSASKLRWLVLDYLYGESFWPLLARALDEAVAQGNGTLFDIDNVHFLPRSTYDSYMNSQLYSNQAIICQNWEHGVTSAQDVLLKQRLAESQGPLMLGASANYRFQAFCAGWPANIRNPAHRINIPRTEKLPKILIMESYRDPATPRAWGTQLRSEIGGDRVVMATRNVSCHSVYEQLDAKGGDAATAIEQYLLHLALPEDGILYQS

SEQ ID NO: 16865 - DNA, 1845 bp, Muscodor strobelii
  misc_feature: SGI cDNA ID NO. 565625
  misc_feature: Reduced expression when VOC is produced
  misc_feature: Encodes the peptide sequence at SEQ ID NO 16866
atgggacgaagaaagatcgaaatcaaagccattaaggatgacaggaatcgttctgtcacgtttttgaagcggaaaggtggtctgttcaagaaggcgcacgagctctcagtgctctgctctgtggacgtcgccgtcttcatcttcggcaacaacaagaagctctacgagtattcttcaggtgacatgcgcgaactcgtcacaagatatacatatcacggtggccccaacgagcacaagggcccggccgattacaacggcggcgatgacgacgaagacgaggatggcgacggcactcctccccacggacacgagggctcggtcgagccccagatgatcccgccccattaccagggccagccagccttcccgcatctgcgacaccacactccgtccgcctctccgcccatcaacggcatgcccttcgtcccccgaggccatactccgacaccacagcagatgggatcccggccaaactctcgaactgacttccgacgtcccaatatgcctcagccaggccctcccggcccgcaacctgtcgcaaatggctacgcgtacatgccccagcccgccatctacaacccacagaaccagccctcgatgcacaatggagttcctccaccgccgccaccgccagctccctatcagtacgcagcagcacacccgccgcagatgcagccctacatcgaagaaccacggcattcgtctgtaccgccgagctatcctcctacctcgcggcctcagccatcaccaccccagatacacatctcccagatgccacaaccgccaccacatatgtcgcctcaacctccgtctcagcaccttgaagttcctggcccgcgttctgtgcctcagccaccgccgcaacaacatgcccccgaagctacgctacagccatccgcacagatggacccgcccaacctcaaggtcgagcggcccagtgaccggccgagccagccgggtcttgatacctctgtcatcagaaaacttccgcaacgaaaccaggcaggcagtatcttcacgcccattgacgacaaccggtccatcttgggtcagcacctggactcgttcaaccagccagacgcccaaggcaaactggaagacggcggtgtcaggtcgcaatcagtggacgtgggtacggtgtcacgaaagaagccctccgcttcgccaccccttccgcagcgctccaacaccagcggtagcctactgaaaggagctcgcaactctgtctcagcggcctctgaagcatccttcaacccaccttcccgatccaatagtctcaagatggatggtgccgcaaggccccgtctaagagtccagattccggacgaggcttcagacgcgggcagcaacactggtgagcttgctaccacatcgcaagctaccgcatcgccccgtggcgcggatgcatccgcccagcccgcccagcgcaatggcaatgctcccaacgtcgtgctcccaccgccttctccatctgcgcagactcttttatctgctggtgccactggtcctcccaacccgttcgcgagaccgcctccccagaatcatggcacgggtatgaacatagacacgccagtgtctgcattaccctcgcggtttctcaataacgaattcttgcccagcccgagtagtttttggccggaatggaatgccaggggagataacagcaacacgctgcccagtcccctgaacttcgctacgcctgttgcagcttctggcccttcttttttacgcgatgatgttggtcacaactcgaccaaaagaaaaagtcctgaaatgaacactgccggcccagcctcagatgggccagaagatttcggagccaaacgcatcaaagtagatggatga

SEQ ID NO: 16866 - protein, 614 aa, Muscodor strobelii
  misc_feature: SGI Peptide ID NO. 565625
  misc_feature (9)..(59): Pfam Id: PF00319 Pfam Desc: SRF-type transcription factor (DNA-binding and dimerisation domain)
  misc_feature (1)..(613): NCBI GI: 171695908 Blast Desc: protein product [Podospora anserina] gi|170948196|emb|CAP60360.1| protein product [Podospora anserina]
  misc_feature (1)..(613): NCBI GI: 256734869 Blast Desc: NECHADRAFT_75573 [Nectria haematococca mpVI 77-13-4]
  misc_feature (1)..(613): NCBI GI: 164427882 Blast Desc: NCU02558 [Neurospora crassa OR74A] gi|157071922|gb|EAA36453.2| NCU02558 [Neurospora crassa OR74A]
  misc_feature (1)..(591): NCBI GI: 115384874 Blast Desc: conserved [Aspergillus terreus NIH2624] gi|114196676|gb|EAU38376.1| conserved [Aspergillus terreus NIH2624]
  misc_feature (1)..(601): NCBI GI: 119492393 Blast Desc: SRF-type transcription factor RlmA [Neosartorya fischeri NRRL 181] gi|119411748|gb|EAW21691.1| SRF-type transcription factor RlmA [Neosartorya fischeri NRRL 181]
  misc_feature (1)..(612): NCBI GI: 121705216 Blast Desc: SRF-type transcription factor RlmA [Aspergillus clavatus NRRL 1] gi|119399017|gb|EAW09445.1| SRF-type transcription factor RlmA [Aspergillus clavatus NRRL 1]
  misc_feature (1)..(601): NCBI GI: 159127771 Blast Desc: SRF-type transcription factor RlmA [Aspergillus fumigatus A1163]
  misc_feature (1)..(601): NCBI GI: 71000092 Blast Desc: SRF-type transcription factor RlmA [Aspergillus fumigatus Af293] gi|66852400|gb|EAL92725.1| SRF-type transcription factor RlmA [Aspergillus fumigatus Af293]
  misc_feature (1)..(601): NCBI GI: 145233953 Blast Desc: An02g12210 [Aspergillus niger] gi|51860189|gb|AAU11334.1| transcription factor [Aspergillus niger] gi|134057288|emb|CAK37902.1| protein product [Aspergillus
  misc_feature (1)..(596): NCBI GI: 255944223 Blast Desc: Pc20g03270 [Penicillium chrysogenum Wisconsin 54-1255] gi|211587614|emb|CAP85656.1| Pc20g03270 [Penicillium chrysogenum Wisconsin 54-1255]
  misc_feature: Useful for introducing or modulating the production of volatile compounds
MGRRKIEIKAIKDDRNRSVTFLKRKGGLFKKAHELSVLCSVDVAVFIFGNNKKLYEYSSGDMRELVTRYTYHGGPNEHKGPADYNGGDDDEDEDGDGTPPHGHEGSVEPQMIPPHYQGQPAFPHLRHHTPSASPPINGMPFVPRGHTPTPQQMGSRPNSRTDFRRPNMPQPGPPGPQPVANGYAYMPQPAIYNPQNQPSMHNGVPPPPPPPAPYQYAAAHPPQMQPYIEEPRHSSVPPSYPPTSRPQPSPPQIHISQMPQPPPHMSPQPPSQHLEVPGPRSVPQPPPQQHAPEATLQPSAQMDPPNLKVERPSDRPSQPGLDTSVIRKLPQRNQAGSIFTPIDDNRSILGQHLDSFNQPDAQGKLEDGGVRSQSVDVGTVSRKKPSASPPLPQRSNTSGSLLKGARNSVSAASEASFNPPSRSNSLKMDGAARPRLRVQIPDEASDAGSNTGELATTSQATASPRGADASAQPAQRNGNAPNVVLPPPSPSAQTLLSAGATGPPNPFARPPPQNHGTGMNIDTPVSALPSRFLNNEFLPSPSSFWPEWNARGDNSNTLPSPLNFATPVAASGPSFLRDDVGHNSTKRKSPEMNTAGPASDGPEDFGAKRIKVDG

SEQ ID NO: 16867 - DNA, 3738 bp, Muscodor strobelii
  misc_feature: SGI EST ID NO. CUFF.39847.0
  misc_feature: Variant of the nucleotide sequence at SEQ ID NO 16865
caaaggactcggggttgagagcgtgagccggcaggtcattgggcgcagaaagagaggagacagtcagacaaatctgacggtcgcaggctgctcctcgttctcttggccaggaagcgagcgagaggagagaggagaggaaacagaggacagcagaggagaccgaattgagtcccccctgggcgcaaggttctgtcgtcttggtcccatccatttcactccagtcttgtctccaactcgcatcacaccgcaacccagcaaacccacgcaaccagctgcgcgagtagaaaagtcggtggtcacccaggaaaaaccgtgaacacgatctcttctattattagcagcacccacgccagattcagccccattgtccctgcaagtccaaagcaccggcagaaagacgttattgattgaatcattcctgtgcattgctctgattaagctgtggcatgtaccattgtaactcgcggtgcatctccaacgccctcgacaccgacggctgccaaccttcgcgtcgccgactatcgtcaattgtattgcccgcctctgctcgcgttgtctgcgcacccctgcactgctcactgctaccttacgggagacacactcgacagcgagcagcgcacacctcgcattgtggataataatcccagactcaaatatcaaccaccgtgccgtttcatattcctcgacccgcactactagtcttccacttgcaccgggtctgtctctccctctgctacaccatcattaatcgttgcttttctcttcctcatcgccgtcgccagcaacagcatcaccatcgtcattaacgctcaccattgcgttgctcatcattgatctcacaccgattgctcttttccgcatataaccatccccccttcgaagtgcgctgtcgtccctttagccccccttactccaatcggccctgtcgcaaagcttggcttctcccgattatatagctggtgttgcctgatcccatcacccattaattagcctacaacgattcttgccacgctggcttaccgcgctcccctcatcccctcgtgcctaagctcggcctccgcattgcaacatcgcaatcccgtcgcaaggctaagctggctagaaagtcgagaggcgcttgaatttcacgcgctgactcgacccccgttgacgtgctgaatcccgtcatttacacccgccttttgcgcataccagtgcgcctaggtccgtcaagatgggacgaagaaagatcgaaatcaaagccattaaggatgacaggaatcgttctgtcacgtttttgaagcggaaaggtggtctgttcaagaaggcgcacgagctctcagtgctctgctctgtggacgtcgccgtcttcatcttcggcaacaacaagaagctctacgagtattcttcaggtgacatgcgcgaactcgtcacaagatatacatatcacggtggccccaacgagcacaagggcccggccgattacaacggcggcgatgacgacgaagacgaggatggcgacggcactcctccccacggacacgagggctcggtcgagccccagatgatcccgccccattaccagggccagccagccttcccgcatctgcgacaccacactccgtccgcctctccgcccatcaacggcatgcccttcgtcccccgaggccatactccgacaccacagcagatgggatcccggccaaactctcgaactgacttccgacgtcccaatatgcctcagccaggccctcccggcccgcaacctgtcgcaaatggctacgcgtacatgccccagcccgccatctacaacccacagaaccagccctcgatgcacaatggagttcctccaccgccgccaccgccagctccctatcagtacgcagcagcacacccgccgcagatgcagccctacatcgaagaaccacggcattcgtctgtaccgccgagctatcctcctacctcgcggcctcagccatcaccaccccagatacacatctcccagatgccacaaccgccaccacatatgtcgcctcaacctccgtctcagcaccttgaagttcctggcccgcgttctgtgcctcagccaccgccgcaacaacatgcccccgaagctacgctacagccatccgcacagatggacccgcccaacctcaaggtcgagcggcccagtgaccggccgagccagccgggtcttgatacctctgtcatcagaaaacttccgcaacgaaaccaggcaggcagtatcttcacgcccattgacgacaaccggtccatcttgggtcagcacctggactcgttcaaccagccagacgcccaaggcaaactggaagacggcggtgtcaggtcgcaatcagtggacgtgggtacggtgtcacgaaagaagccctccgcttcgccaccccttccgcagcgctccaacaccagcggtagcctactgaaaggagctcgcaactctgtctcagcggcctctgaagcatccttcaacccaccttcccgatccaatagtctcaagatggatggtgccgcaaggccccgtctaagagtccagattccggacgaggcttcagacgcgggcagcaacactggtgagcttgctaccacatcgcaagctaccgcatcgccccgtggcgcggatgcatccgcccagcccgcccagcgcaatggcaatgctcccaacgtcgtgctcccaccgccttctccatctgcgcagactcttttatctgctggtgccactggtcctcccaacccgttcgcgagaccgcctccccagaatcatggcacgggtatgaacatagacacgccagtgtctgcattaccctcgcggtttctcaataacgaattcttgcccagcccgagtagtttttggccggaatggaatgccaggggagataacagcaacacgctgcccagtcccctgaacttcgctacgcctgttgcagcttctggcccttcttttttacgcgatgatgttggtcacaactcgaccaaaagaaaaagtcctgaaatgaacactgccggcccagcctcagatgggccagaagatttcggagccaaacgcatcaaagtagatggatgatgctcccacatttgcccgactacctattctatcctcctcctgcatcacatcatcgcctcgaacaaggggcatcatgatatctcatgtaaaacatttgtcgaagaacctgggacggacgaacccagctgcaactatggatacccattttacaccttcttgtcacatatttgatttcgattcatcacgacggacttcgctccttattcactgcgtcatgcttttggattttattttagcatggcgtggcgttacgagtttgttactcactcttcattcttttcgcggcgaaatcattgctgggactgctatctgcgcggattctgccgtcctctattagaggtgcatatgacgaatgagctcacgggcatcggcttttatttcacatacacacgacaggggcttcttatggaggaggaaaagtatgaactgctacggatcatcggagggcgttgggggatgatttgggtttgtatagtatgatatagctttgagatcgatctcgcgaggaatactggccaacggcgttctgagagatgaatcttgcttttgaaacgaattattgttttcacttccaccctcattgattgcactcgtgaagtgttatttactgcgccctcttaattctcctcggcttcgtgtgaatgcgactatgactgatgaattgctgcctactgttttcg

SEQ ID NO: 16868 - DNA, 1134 bp, Muscodor strobelii
  misc_feature: SGI cDNA ID NO. 565626
  misc_feature: Encodes the peptide sequence at SEQ ID NO 16869
atggctaccccaactcctacactacaccgcgtcgctaacgagctccaggacggtcttcgttacctctgcgacaaagtcacagagcagtatatgccgcttgtcgccagcggcacgttcagtttagcagaaagccaaaaaataattgctgcccaccgcatggttgaagagacttgtagatacgcagaggttttcaagagtgtcgaagaccacgaactcagcttcgagaacctagctgccgcggagcattcccctttctctcgtgattttacatttaaactgagggacgattgcttgccgcaggagcttgacacgatgtggctagactttctagaccattgcattaatcagaaagaagttcttgtgaggcagtatattccacatcttattggaatgcggattgggtatttcggttacagcggtctgcctgagtttccccgcatccctgaaatccttgcagcagcactagcggcgcgtaaggataaggctggaagcagaagcactagtgatgctgatgatgagtttagtagtgacgacgaggcatatagtgatgatgatttcacattacatgccatcatgccttccatgccacctgccgaacaacatcgtcttcgcgaaaaagttcttagaaggctggatctcgagagacgtcaagcagttgaatacggacaagaacatttcaatctcattttattggacgaaaccctccgcgaacgatggaagagtattgacaaactgcgtggtgatctcctggcgggtaactggatcaacgagtcaataaacaccagccttcagtcggtatgcgattcagttgaacaaacttgtgcatttgccgatatgttaggatttgatatgggggttggcagtgaggactgcgatctctatgagaagtatgcagatggatgccagtctgatgagcagcaagaccgttttggcgctcttatactggcgtatgaagcgcaagatgatgctctggaggagttgtatactacgctctcgaacctgcccaatactggcgataatagctccatcaccggtcttgtcgagcgctttccggatccgccgcaactacatcagaaaataacagagcttcaggaatctgtgcctcaaggcaatagtcaaggtgcgatgggttga

SEQ ID NO: 16869 - protein, 377 aa, Muscodor strobelii
  misc_feature: SGI Peptide ID NO. 565626
MATPTPTLHRVANELQDGLRYLCDKVTEQYMPLVASGTFSLAESQKIIAAHRMVEETCRYAEVFKSVEDHELSFENLAAAEHSPFSRDFTFKLRDDCLPQELDTMWLDFLDHCINQKEVLVRQYIPHLIGMRIGYFGYSGLPEFPRIPEILAAALAARKDKAGSRSTSDADDEFSSDDEAYSDDDFTLHAIMPSMPPAEQHRLREKVLRRLDLERRQAVEYGQEHFNLILLDETLRERWKSIDKLRGDLLAGNWINESINTSLQSVCDSVEQTCAFADMLGFDMGVGSEDCDLYEKYADGCQSDEQQDRFGALILAYEAQDDALEELYTTLSNLPNTGDNSSITGLVERFPDPPQLHQKITELQESVPQGNSQGAMG

SEQ ID NO: 16870 - DNA, 1014 bp, Muscodor strobelii
  misc_feature: SGI cDNA ID NO. 565627
  misc_feature: Encodes the peptide sequence at SEQ ID NO 16871
atggatagtcacaaactatcacccaataaccctgaggtcctagacctagagggttctgctgacaatgggctgcggcgcgaaggagcctctgacatgcctgcaactctacccgaccactctgacatgggacccatcaatcccatgctatccccctactatgtgcccgagatataccactcgttcgaccctcttgcttctgccactgagctcaagctcttgcatcttcttcttaagcttcagggcggtaccagcatctggcagtcatgcgtgtatcgccaagtgaaggaagaccagccggtatacaaccggtatctcctcgaggtcctcagagtcctagtagaagcgcgcatgtcggcggaagagcgccaggcgaagctgagccatacgatcccagtgctcgcttccatggacaacggttggaccttcaccaacttcaacgaaggcctgaccatccacgagcgcattgaaattctaccaccgaccctatgccaaccgcgtgactaccacagtagcccacaaggcgacatactcgcgtacgatcgagagctcgtcgctacttacaaggagacaatcagccagagcattcggcccgaaacacagtcagaccagcaacatgctgcgcgaccgggtcagactcttctcacgcacactagcaagcactattccctctcagagcagctagtaggaagcgaaaacaccaccagcgaagctgtttccggcctctcttatgcacgcgagcaattcgagaagttcgaggcaaccgtcaagaaggccgatatagccgtcaagaatgtcaaagccgccttcgccgatccgaagacattcgatgagaagtcagaccgtctcatggaagacttggaggaagtggccgatggacttcaagatgtccgttggtttgctagcggaatggactttgggtatgttgagattgaagtgctgcgtcatgaaatcggcatgatgatgcagcgaatcaatgagttcaacaggggcgagagtctggacagagagcagtaa

SEQ ID NO: 16871 - protein, 337 aa, Muscodor strobelii
  misc_feature: SGI Peptide ID NO. 565627
MDSHKLSPNNPEVLDLEGSADNGLRREGASDMPATLPDHSDMGPINPMLSPYYVPEIYHSFDPLASATELKLLHLLLKLQGGTSIWQSCVYRQVKEDQPVYNRYLLEVLRVLVEARMSAEERQAKLSHTIPVLASMDNGWTFTNFNEGLTIHERIEILPPTLCQPRDYHSSPQGDILAYDRELVATYKETISQSIRPETQSDQQHAARPGQTLLTHTSKHYSLSEQLVGSENTTSEAVSGLSYAREQFEKFEATVKKADIAVKNVKAAFADPKTFDEKSDRLMEDLEEVADGLQDVRWFASGMDFGYVEIEVLRHEIGMMMQRINEFNRGESLDREQ

SEQ ID NO: 16872 - DNA, 738 bp, Muscodor strobelii
  misc_feature: SGI cDNA ID NO. 565628
  misc_feature: Encodes the peptide sequence at SEQ ID NO 16873
atgaagaacctcggcgtccttctcctcttcctattcacctctcttatgcaggttgaatgtatttcacaacccacccgatacctcactcaaccctcgtcctggttcaagcgcacctatgacatgctcgattatgtcacgcccgagcagatcgaacgcgccgagactatcgtggctgggcgctatggcctcacccctgaattcttccgcaaccccgacgccaatctcacgggactgcgcaagcgtcagcagagtgatgacacgtgcctccagccgagttctgatggcgagcactgcatttcgccgtatatgtttggccatgataagagctacgactacacgccagataacaccgcggattatgtgaactgccagaaaagccctgagttcatggacaaataccacctagaggtggcgacgctgctgatgtccgactattgcgaagatggccattacatattcccttctcatcaatgggtctgggagttccgcagcgctcgcgtctgtgtgtgcaatcaccgatggtggtggcaaccttgtcacaaaagcgaaattgactccgcgtgggaggccattgacaacaaatgtcctccgcaaggagacggcgacgaccagcgggttagctggggattctggtatagtcacgcctgggacaaaggctactttcgtaaaaattgcgcctcaaaacaagtgtgcgaggacaggaatagggaggggtgcaggtggaagggtggttcatga

SEQ ID NO: 16873 - protein, 245 aa, Muscodor strobelii
  misc_feature: SGI Peptide ID NO. 565628
MKNLGVLLLFLFTSLMQVECISQPTRYLTQPSSWFKRTYDMLDYVTPEQIERAETIVAGRYGLTPEFFRNPDANLTGLRKRQQSDDTCLQPSSDGEHCISPYMFGHDKSYDYTPDNTADYVNCQKSPEFMDKYHLEVATLLMSDYCEDGHYIFPSHQWVWEFRSARVCVCNHRWWWQPCHKSEIDSAWEAIDNKCPPQGDGDDQRVSWGFWYSHAWDKGYFRKNCASKQVCEDRNREGCRWKGGS

SEQ ID NO: 16874 - DNA, 1215 bp, Muscodor strobelii
  misc_feature: SGI cDNA ID NO. 565629
  misc_feature: Elevated expression when VOC is produced
  misc_feature: Encodes the peptide sequence at SEQ ID NO 16875
atgaatcagatggaatcggcgaatcagttttaccgccgcgtgttgcgcaaacttcgaccggacacgaaggagattatccgcgaggctgaggaacagcatggtcgcttcccgcccctacctccaagagtgccacgtccagaatacgctctcactgtaaatattttagatcaaagcaatgaggctctagaattctactgggcttgtgagccaggggatctacccacagttgaagactacgttaaacgtgaaggcagcccgcgtgagcaaggaattttgcaatacgggttagagcaagcttccttcgcatgccgggtcaccgtggtgcggtatttgctagcgaatggaacagtcttgcacactaactgtttctatcgggaggttgcaattgacgagcagccggacgggaaaacggtcgaagacgtgagcatattggggagatttggaaggtctgatcgtgtgatccccaacagcgccgatgatattgctgagcttcttcgcgctttcgcacaggaaggatcttggcatccgaatcaggcatatgaggagccgagcattcttcatccgcaagtagctatttgcaccccaaaagcaacatgcgagccaattattctcaagctcctactcgattttggggcagatcccaatttggggacgcatactgatcagcactcatcagtcgtaccactaagagtggcgctcttagcagtcaatcgacaatgtcccagagttctcaatgaggtcgcaaagctttgtgacatcgcggctcttcgacttgttctcgatcatggtgctaagacagatcatgaacaagttcatctcctacatccgatcgtcatctccacacttggaccggatgaccctccattccttaatagccgccgccaggtcgctcagtaccttcttgaccacggcatcgtagatgtaaatgaagtgaagtcgacgacatccaaacagaaagattggcgatcgacactactcccagatgagcaagaaaccgcgctgacgcgcgcatgtgccgcatccgattggaagtttgtcgagtggctgctggaccatggcgctgaccctgaggcattggatagaaaggcgtacactcaacagtggtggagctcacattcgcccaagcccaaatacaatgacccatcacgtctcgttgcttttgttcagcaaaggaagaagcaagaatattctcatgtcgggaataaagttgattga

SEQ ID NO: 16875 - protein, 404 aa, Muscodor strobelii
  misc_feature: SGI Peptide ID NO. 565629
  misc_feature (329)..(361): Pfam Id: PF00023 Pfam Desc: Ankyrin repeat
  misc_feature (203)..(356): NCBI GI: 260592975 Blast Desc: ankyrin repeat-containing domain protein [Prevotella veroralis F0319] gi|260535066|gb|EEX17683.1| ankyrin repeat-containing domain protein [Prevotella veroralis F0319]
  misc_feature (203)..(356): NCBI GI: 260592973 Blast Desc: conserved [Prevotella veroralis F0319] gi|260535064|gb|EEX17681.1| conserved [Prevotella veroralis F0319]
  misc_feature (171)..(357): NCBI GI: 154288700 Blast Desc: BC1G_16391 [Botryotinia fuckeliana B05.10] gi|150853833|gb|EDN29025.1| BC1G_16391 [Botryotinia fuckeliana B05.10]
  misc_feature (203)..(356): NCBI GI: 260592969 Blast Desc: ankyrin repeat-containing domain protein [Prevotella veroralis F0319] gi|260535060|gb|EEX17677.1| ankyrin repeat-containing domain protein [Prevotella veroralis F0319]
  misc_feature (203)..(356): NCBI GI: 260592968 Blast Desc: conserved [Prevotella veroralis F0319] gi|260535059|gb|EEX17676.1| conserved [Prevotella veroralis F0319]
  misc_feature (203)..(356): NCBI GI: 260592972 Blast Desc: conserved [Prevotella veroralis F0319] gi|260535063|gb|EEX17680.1| conserved [Prevotella veroralis F0319]
  misc_feature (203)..(356): NCBI GI: 260592977 Blast Desc: conserved [Prevotella veroralis F0319] gi|260535068|gb|EEX17685.1| conserved [Prevotella veroralis F0319]
  misc_feature (205)..(356): NCBI GI: 260592976 Blast Desc: conserved [Prevotella veroralis F0319] gi|260535067|gb|EEX17684.1| conserved [Prevotella veroralis F0319]
  misc_feature (203)..(356): NCBI GI: 260592970 Blast Desc: conserved [Prevotella veroralis F0319] gi|260535061|gb|EEX17678.1| conserved [Prevotella veroralis F0319]
  misc_feature (204)..(355): NCBI GI: 109101686 Blast Desc: : ankyrin repeat and MYND domain containing 1 isoform 2 [Macaca mulatta]
  misc_feature: Useful for introducing or modulating the production of volatile compounds
MNQMESANQFYRRVLRKLRPDTKEIIREAEEQHGRFPPLPPRVPRPEYALTVNILDQSNEALEFYWACEPGDLPTVEDYVKREGSPREQGILQYGLEQASFACRVTVVRYLLANGTVLHTNCFYREVAIDEQPDGKTVEDVSILGRFGRSDRVIPNSADDIAELLRAFAQEGSWHPNQAYEEPSILHPQVAICTPKATCEPIILKLLLDFGADPNLGTHTDQHSSVVPLRVALLAVNRQCPRVLNEVAKLCDIAALRLVLDHGAKTDHEQVHLLHPIVISTLGPDDPPFLNSRRQVAQYLLDHGIVDVNEVKSTTSKQKDWRSTLLPDEQETALTRACAASDWKFVEWLLDHGADPEALDRKAYTQQWWSSHSPKPKYNDPSRLVAFVQQRKKQEYSHVGNKVD

SEQ ID NO: 16876 - DNA, 1394 bp, Muscodor strobelii
  misc_feature: SGI EST ID NO. CUFF.39909.0
  misc_feature: Variant of the nucleotide sequence at SEQ ID NO 16874
gaaaagtaatatgtctttatcaacagagactgtccgtttgattcgtcgacagatgaatcagatggaatcggcgaatcagttttaccgccgcgtgttgcgcaaacttcgaccggacacgaaggagattatccgcgaggctgaggaacagcatggtcgcttcccgcccctacctccaagagtgccacgtccagaatacgctctcactgtaaatattttagatcaaagcaatgaggctctagaattctactgggcttgtgagccaggggatctacccacagttgaagactacgttaaacgtgaaggcagcccgcgtgagcaaggaattttgcaatacgggttagagcaagcttccttcgcatgccgggtcaccgtggtgcggtatttgctagcgaatggaacagtcttgcacactaactgtttctatcgggaggttgcaattgacgagcagccggacgggaaaacggtcgaagacgtgagcatattggggagatttggaaggtctgatcgtgtgatccccaacagcgccgatgatattgctgagcttcttcgcgctttcgcacaggaaggatcttggcatccgaatcaggcatatgaggagccgagcattcttcatccgcaagtagctatttgcaccccaaaagcaacatgcgagccaattattctcaagctcctactcgattttggggcagatcccaatttggggacgcatactgatcagcactcatcagtcgtaccactaagagtggcgctcttagcagtcaatcgacaatgtcccagagttctcaatgaggtcgcaaagctttgtgacatcgcggctcttcgacttgttctcgatcatggtgctaagacagatcatgaacaagttcatctcctacatccgatcgtcatctccacacttggaccggatgaccctccattccttaatagccgccgccaggtcgctcagtaccttcttgaccacggcatcgtagatgtaaatgaagtgaagtcgacgacatccaaacagaaagattggcgatcgacactactcccagatgagcaagaaaccgcgctgacgcgcgcatgtgccgcatccgattggaagtttgtcgagtggctgctggaccatggcgctgaccctgaggcattggatagaaaggcgtacactcaacagtggtggagctcacattcgcccaagcccaaatacaatgacccatcacgtctcgttgcttttgttcagcaaaggaagaagcaagaatattctcatgtcgggaataaagttgattgaaatttctagctcgtgttgacacgaggttaccaacggaaaatctcatgaatttggcacatattgtattaatacgataatccgatccgagcataaatttaaggaatgagatcaatggtgtttaggaaat

SEQ ID NO: 16877 - DNA, 3465 bp, Muscodor strobelii
  misc_feature: SGI cDNA ID NO. 565630
  misc_feature: Reduced expression when VOC is produced
  misc_feature: Encodes the peptide sequence at SEQ ID NO 16878
atgaacggacccgtccaggccgcgcctcccagcgcgccggccaaagccctccataccatacacgacatgcccagccccatcatcaaggatgagcatgttggcgacgacgaccatggcccctccctcgacgagatcgactggactgctcaggaacgccaggacgaggccgaaatggccaaggcctttaacgacgagccgggttcttcctccgggatgcagcagctcctccatggcttcggcgacaaggacatcgaccaggccgacaaggcagacgatgctgttgatttcgaagatatcagcgatgatgatcttgccagcgaggccagcgatcttgccagcgaggccagcgatctgcccaacggtgaggtctcccaggtccccgagctggtcaacgatgaagatggtacgagtggcgagacggagggtctcgatgacctgtttggcgacgagctcgataaacaccacgacgactcaaacgatcttttcccttcttctcctccacccgcagacgctcccgcctccgccccggccgtccagcctaacactccccctccgacgacgatcgaggccctcgagcagctcgaggctgagcatgaggccgaacatgacacggcccaagagatctctgacgagcaatggcagaagatgagctttgaagagcggcggcggctcaacttcccccagcagagcgtctccatcgacaaatggatcaaccagaccactagcgaaggtccggcgggacataagcagcctgagagtgccgccgagctagtttcacagaagttcccccagtttgtcagccacgagatcctccgtttcaaccagctgcttccagagtggcccgcccagtacatgtacaaggagcccgccaacaaggaccgtgaacctccggagttcgtaccgacaaaactcgagctggaactggacgccgatgcggcgaaactcttcaggattcccgataactcgacaagccttgctaataagactaagtttcaaggcaccgaggattggccctatcaattcagcggcgcgtattcattcgaggaagacagcttctccgagtcagacgacgaggaattagtaggcggcttttcattgcaggagattgcaactgtttgccaggactgggacgccctgctcgacactgaaaccattctggcgaagagaaaggcgcaagatgtcgaccaagacgaggagctggacgagtgggaacgcgagtatatgcagtcgcaacctaaagccaagcgacccaaatacgaacctggtctcccggatatttctacgtacgacacttggggcattgatgacttcgaaggcgctgttaggaaatcgagcaagcgtgtgcgactggacgtcaacgacccgtatcttctgctggaagatgtacaatcagcacggcctgcaaagcgtccgaaggtcgaggagaagatgaaacgcatggctaatggccagctgcgaagagacatcctcgcccgtttcaacgtgtccaatgacgatgcttacgacgccttgaaactgaatcacaagagcaaggttcgagccacgctgtctaacctggcagtcgagcacagtctccctgctctcaaactgacgttcccattctaccgtacgaggttagaggggcagccttgggagtatcaccgcaagaagttcgatgtcgcgaagaccgccagaatcaatatcccgttccgcaaacccggcaaggtcaagagaaaggaaattaaaagcaagaataccatcgagattttcaagaaagccaaagacctcaccctcaatgacaactctactgccgtgctttttgaatactgcgaacaataccccattgttttatccaatttcggtatgggcagccgcattatcaattactaccgtcgcaaagaagtcggtgatgaagagaagatacctaagcttgatcttggcgagacgcataccttattgccggaagacaagtcacctttcagcaactttggtactgtcgatagtggcgaaactgtcccaaccctacacaacgaaatgtatcgcgcaccgatattcaagcacgaacctcgaccgaatgatttcctcctgggccacacaaccaacggacaggagggacctaggtggttcctccgcaatattgaccatgtctacaccgttggccagtgtcttccttccatggaagtgccgggaccccacgcccgaaaggtgacgaacacctcgaagaaccgtttaaagatgattgccttccgcatgatgaatcagaaacaatcccaagacgtgtcgctcaaagagatcactccacatgtattcgagaaagaggacccgcagaatcgccagaaattgaaggagtttctagagtacaacaaagagacgaagacctggcgaatgcgccaaggcgagaccatgatggacgaggcggcgatccgtgccatgatcaaaccggaagacgtctgtcttgtggaggctatgcaagtgggcaaccagcttattgagagcgctggctacgatccgaaagagaaagatgacaacgaagatggtgcagaagagccccttgtcgttcagttagcgccatggcgtctcaccaaaaactatctcgacgcttccgccggaaaagctatggtcgctctccacggcgaaggcgatccaacgggctgtggcttgggtttcagtttcatcaagacatcgatgaagggcggatatatcagcgctgtccaagggccactcgcgacatccgccgatgccatcgagcgcgaacgcaaggctaatggaggtcatttatacaacgtcaagaaacagcaagatatgtacagcagcgccattacccagatttggggaagacagaagaccacgctcagtgactccacctcgcacgacgacgcagatctccttgatacggcaaacgaggacgatcgcttcaacgaccgtcaaccagacgccacccctgccgctattgttgacgatggtcgtagtcaatttagtcgtcttagtgcggcgagtcgtagcaatagacgcaaacttaagatcacgaggaagaaaaagaatcccgcaggccagatagagacggagacggtcgtcttggatgatccgcttgtgatccgaaactacatgaagcaaagagctgtcctcacggagaaggatagagatgtgtatacgttccagccgtctatggatgcggacgagaatcgcgacaaggtcaaacttgtcgagaaggaattagcccgactcttgaagaaccaagatcgacgtcaagtgcgcgagaagcaagggaagggtaaaaagaagaagaatgaagctgctgtaaactcggctgcatctccggatccttctggcgataaggcgtcagtcggaacgacccgaaaatgcgcaaattgcgggcaagtgggacacatcaagacaaacaagagcaaatgcccactcttgaatggcacgatcacagcgtcgaataacaccgcggaccatggcggtttcggctcgttcagtaattag

SEQ ID NO: 16878 - protein, 1154 aa, Muscodor strobelii
  misc_feature: SGI Peptide ID NO. 565630
  misc_feature (41)..(1153): NCBI GI: 256734868 Blast Desc: transcription initiation factor TFIID, subunit TAF1 [Nectria haematococca mpVI 77-13-4]
  misc_feature (41)..(1153): NCBI GI: 46134979 Blast Desc: FG09338.1 [Gibberella zeae PH-1]
  misc_feature (41)..(1151): NCBI GI: 171695906 Blast Desc: protein product [Podospora anserina] gi|170948195|emb|CAP60359.1| protein product [Podospora anserina]
  misc_feature (41)..(1150): NCBI GI: 85119669 Blast Desc: NCU02556 [Neurospora crassa OR74A] gi|28927499|gb|EAA36451.1| NCU02556 [Neurospora crassa OR74A]
  misc_feature (84)..(1133): NCBI GI: 116181494 Blast Desc: CHGG_01375 [Chaetomium globosum CBS 148.51] gi|88185672|gb|EAQ93140.1| CHGG_01375 [Chaetomium globosum CBS 148.51]
  misc_feature (44)..(1152): NCBI GI: 156054560 Blast Desc: SS1G_06128 [Sclerotinia sclerotiorum 1980] gi|154703908|gb|EDO03647.1| SS1G_06128 [Sclerotinia sclerotiorum 1980]
  misc_feature (44)..(1152): NCBI GI: 154321017 Blast Desc: BC1G_01383 [Botryotinia fuckeliana B05.10] gi|150851921|gb|EDN27113.1| BC1G_01383 [Botryotinia fuckeliana B05.10]
  misc_feature (40)..(1127): NCBI GI: 39950356 Blast Desc: MGG_01207 [Magnaporthe grisea 70-15] gi|145020994|gb|EDK05123.1| MGG_01207 [Magnaporthe grisea 70-15]
  misc_feature (357)..(1032): NCBI GI: 261355171 Blast Desc: transcription initiation factor TFIID subunit 1 [Verticillium albo-atrum VaMs.102]
  misc_feature (79)..(1144): NCBI GI: 225681086 Blast Desc: trimethylguanosine synthase [Paracoccidioides brasiliensis Pb03]
  misc_feature (432)..(1132): SWISSPROT Homolog: EC 2.3.1.48 Histone acetyltransferase
  misc_feature: Useful for introducing or modulating the production of volatile compounds
MNGPVQAAPPSAPAKALHTIHDMPSPIIKDEHVGDDDHGPSLDEIDWTAQERQDEAEMAKAFNDEPGSSSGMQQLLHGFGDKDIDQADKADDAVDFEDISDDDLASEASDLASEASDLPNGEVSQVPELVNDEDGTSGETEGLDDLFGDELDKHHDDSNDLFPSSPPPADAPASAPAVQPNTPPPTTIEALEQLEAEHEAEHDTAQEISDEQWQKMSFEERRRLNFPQQSVSIDKWINQTTSEGPAGHKQPESAAELVSQKFPQFVSHEILRFNQLLPEWPAQYMYKEPANKDREPPEFVPTKLELELDADAAKLFRIPDNSTSLANKTKFQGTEDWPYQFSGAYSFEEDSFSESDDEELVGGFSLQEIATVCQDWDALLDTETILAKRKAQDVDQDEELDEWEREYMQSQPKAKRPKYEPGLPDISTYDTWGIDDFEGAVRKSSKRVRLDVNDPYLLLEDVQSARPAKRPKVEEKMKRMANGQLRRDILARFNVSNDDAYDALKLNHKSKVRATLSNLAVEHSLPALKLTFPFYRTRLEGQPWEYHRKKFDVAKTARINIPFRKPGKVKRKEIKSKNTIEIFKKAKDLTLNDNSTAVLFEYCEQYPIVLSNFGMGSRIINYYRRKEVGDEEKIPKLDLGETHTLLPEDKSPFSNFGTVDSGETVPTLHNEMYRAPIFKHEPRPNDFLLGHTTNGQEGPRWFLRNIDHVYTVGQCLPSMEVPGPHARKVTNTSKNRLKMIAFRMMNQKQSQDVSLKEITPHVFEKEDPQNRQKLKEFLEYNKETKTWRMRQGETMMDEAAIRAMIKPEDVCLVEAMQVGNQLIESAGYDPKEKDDNEDGAEEPLVVQLAPWRLTKNYLDASAGKAMVALHGEGDPTGCGLGFSFIKTSMKGGYISAVQGPLATSADAIERERKANGGHLYNVKKQQDMYSSAITQIWGRQKTTLSDSTSHDDADLLDTANEDDRFNDRQPDATPAAIVDDGRSQFSRLSAASRSNRRKLKITRKKKNPAGQIETETVVLDDPLVIRNYMKQRAVLTEKDRDVYTFQPSMDADENRDKVKLVEKELARLLKNQDRRQVREKQGKGKKKKNEAAVNSAASPDPSGDKASVGTTRKCANCGQVGHIKTNKSKCPLLNGTITASNNTADHGGFGSFSN

SEQ ID NO: 16879 - DNA, 4205 bp, Muscodor strobelii
  misc_feature: SGI EST ID NO. CUFF.40030.1
  misc_feature: Variant of the nucleotide sequence at SEQ ID NO 16877
ctgtcggagcctctcaacgcgccaccatcggtgctctctccacttcgatttcttggcgcatctaccatcattcacttccttgacttcatttcccgtttccccgttgctgcgaccaccgctcgccgctcgaccaccgccgccgtcgcgcccctctcgatgctgcgcatcactctgcggtatcctctaatgcactaattttcatggcgatctagtctgtggcaggactggcctcgtcaaccacccttctctctttccacgtcgctacttccttccttttcgtccgaaccctctctactccccatcacctccacctccacctcggccgcaccacacctctcgcctcctgccatgcgagaaccatcgtgcgcatcatcccacgcctgcgcgtgagcaagtagctcacatcgtcaccgagacagcgctccgccaacccctcatacccgcgctgcctatcgctacctatctcttcgagccgcccgccgccgcgatgaacggacccgtccaggccgcgcctcccagcgcgccggccaaagccctccataccatacacgacatgcccagccccatcatcaaggatgagcatgttggcgacgacgaccatggcccctccctcgacgagatcgactggactgctcaggaacgccaggacgaggccgaaatggccaaggcctttaacgacgagccgggttcttcctccgggatgcagcagctcctccatggcttcggcgacaaggacatcgaccaggccgacaaggcagacgatgctgttgatttcgaagatatcagcgatgatgatcttgccagcgaggccagcgatcttgccagcgaggccagcgatctgcccaacggtgaggtctcccaggtccccgagctggtcaacgatgaagatggtacgagtggcgagacggagggtctcgatgacctgtttggcgacgagctcgataaacaccacgacgactcaaacgatcttttcccttcttctcctccacccgcagacgctcccgcctccgccccggccgtccagcctaacactccccctccgacgacgatcgaggccctcgagcagctcgaggctgagcatgaggccgaacatgacacggcccaagagatctctgacgagcaatggcagaagatgagctttgaagagcggcggcggctcaacttcccccagcagagcgtctccatcgacaaatggatcaaccagaccactagcgaaggtccggcgggacataagcagcctgagagtgccgccgagctagtttcacagaagttcccccagtttgtcagccacgagatcctccgtttcaaccagctgcttccagagtggcccgcccagtacatgtacaaggagcccgccaacaaggaccgtgaacctccggagttcgtaccgacaaaactcgagctggaactggacgccgatgcggcgaaactcttcaggattcccgataactcgacaagccttgctaataagactaagtttcaaggcaccgaggattggccctatcaattcagcggcgcgtattcattcgaggaagacagcttctccgagtcagacgacgaggaattagtaggcggcttttcattgcaggagattgcaactgtttgccaggactgggacgccctgctcgacactgaaaccattctggcgaagagaaaggcgcaagatgtcgaccaagacgaggagctggacgagtgggaacgcgagtatatgcagtcgcaacctaaagccaagcgacccaaatacgaacctggtctcccggatatttctacgtacgacacttggggcattgatgacttcgaaggcgctgttaggaaatcgagcaagcgtgtgcgactggacgtcaacgacccgtatcttctgctggaagatgtacaatcagcacggcctgcaaagcgtccgaaggtcgaggagaagatgaaacgcatggctaatggccagctgcgaagagacatcctcgcccgtttcaacgtgtccaatgacgatgcttacgacgccttgaaactgaatcacaagagcaaggttcgagccacgctgtctaacctggcagtcgagcacagtctccctgctctcaaactgacgttcccattctaccgtacgaggttagaggggcagccttgggagtatcaccgcaagaagttcgatgtcgcgaagaccgccagaatcaatatcccgttccgcaaacccggcaaggtcaagagaaaggaaattaaaagcaagaataccatcgagattttcaagaaagccaaagacctcaccctcaatgacaactctactgccgtgctttttgaatactgcgaacaataccccattgttttatccaatttcggtatgggcagccgcattatcaattactaccgtcgcaaagaagtcggtgatgaagagaagatacctaagcttgatcttggcgagacgcataccttattgccggaagacaagtcacctttcagcaactttggtactgtcgatagtggcgaaactgtcccaaccctacacaacgaaatgtatcgcgcaccgatattcaagcacgaacctcgaccgaatgatttcctcctgggccacacaaccaacggacaggagggacctaggtggttcctccgcaatattgaccatgtctacaccgttggccagtgtcttccttccatggaagtgccgggaccccacgcccgaaaggtgacgaacacctcgaagaaccgtttaaagatgattgccttccgcatgatgaatcagaaacaatcccaagacgtgtcgctcaaagagatcactccacatgtattcgagaaagaggacccgcagaatcgccagaaattgaaggagtttctagagtacaacaaagagacgaagacctggcgaatgcgccaaggcgagaccatgatggacgaggcggcgatccgtgccatgatcaaaccggaagacgtctgtcttgtggaggctatgcaagtgggcaaccagcttattgagagcgctggctacgatccgaaagagaaagatgacaacgaagatggtgcagaagagccccttgtcgttcagttagcgccatggcgtctcaccaaaaactatctcgacgcttccgccggaaaagctatggtcgctctccacggcgaaggcgatccaacgggctgtggcttgggtttcagtttcatcaagacatcgatgaagggcggatatatcagcgctgtccaagggccactcgcgacatccgccgatgccatcgagcgcgaacgcaaggctaatggaggtcatttatacaacgtcaagaaacagcaagatatgtacagcagcgccattacccagatttggggaagacagaagaccacgctcagtgactccacctcgcacgacgacgcagatctccttgatacggcaaacgaggacgatcgcttcaacgaccgtcaaccagacgccacccctgccgctattgttgacgatggtcgtagtcaatttagtcgtcttagtgcggcgagtcgtagcaatagacgcaaacttaagatcacgaggaagaaaaagaatcccgcaggccagatagagacggagacggtcgtcttggatgatccgcttgtgatccgaaactacatgaagcaaagagctgtcctcacggagaaggatagagatgtgtatacgttccagccgtctatggatgcggacgagaatcgcgacaaggtcaaacttgtcgagaaggaattagcccgactcttgaagaaccaagatcgacgtcaagtgcgcgagaagcaagggaagggtaaaaagaagaagaatgaagctgctgtaaactcggctgcatctccggatccttctggcgataaggcgtcagtcggaacgacccgaaaatgcgcaaattgcgggcaagtgggacacatcaagacaaacaagagcaaatgcccactcttgaatggcacgatcacagcgtcgaataacaccgcggaccatggcggtttcggctcgttcagtaattaggaagtataaactaatagaagcgagaggcacgtgactgggagacccaagcgttcatactggctggaattcgctgcgtacatagtctactttgattgccaactacggatggctggcgttggccgtgggctcatttgtatggcgtaggtccaggcaggaaaatccaatgcaaaaagaagcatgtgctatcgtaatggtgtcgtccactgagtgccactatgctgtgacttaacaactgtagtttatgtgagtctaa

SEQ ID NO: 16880 - DNA, 1428 bp, Muscodor strobelii
  misc_feature: SGI cDNA ID NO. 565631
  misc_feature: Encodes the peptide sequence at SEQ ID NO 16881
atggcgacagttcaacactccaaagatgtccttcgggcacaattcgtaggcaagactctacaccaagtccccacgcctgccgcagtcttggatctagcaaaggtcgaagcgaattgcaacttaatgctcgaggctgcgcagcgactccaactcagctggcgagctcatatcaagactcacaagactgaggagctcactagactccaagtgggagacaacagctcagatcccgtgaacatcatcacgtccacgctggccgaagctgagaatgtcgtaccactactcaaggagtatcaagcaaaggggcgcaaggttgatgttctgtactcattccccctctatcaatctgcagtcgaccgcctggcagccatctcatcgcaactgggacccgaagctgtaacagtaatggtcgaccacccagaccaaatcaaatacctaacccaactggcttcaaaatccggctacccgccgcgagtctttctcaagataaacatgggctccaaccgcgcaggtgtcattccgggaaccccagcctgtacacagatgatctcgcaactcctcctatcctccacagtcggctcctcaatcttcttcggtctgtacacacacgcaggccattcctatgcggcccgcaaagactgggaagccatgggaatcctcggcacagaattcagcgcactgcacgacgtggcacaagcagtccgacaagaacgccctgatcaccctttagtactaagtgtcggcgcaacaccaacaaccaccacgctgcaacacccagacttctcctcagagggaacagagtccgacccaacgatcctgagtaacctctcagcaacaaccctaatgaagtcccaaatcgcggccatgcgatccgagggtctcacgctcgaagtccacgctggcgtctacccaacgctcgacatccaacaactggccgctcacgcccgggacagtacctatctcaacccttctgcgatcgccatatcagtcctcgcggacatcgcatcagtctacacctcccgcgcgcccgacggcacatccgaagctctgataaatgccggctgtctagctctaggtcgcgagcccgtcatcgacgccggacccgcgccgggaatccactactcctcgcacggaatcctcatgccgtggtccgggacaaagaacgaagtacccggtcctgagttccccgcgaagcatggagggtggcaagtcacgagattagcgcaggaacacgggattttgagctggaaagggaatcttagtgatgaggtgggttatgaattgaaggttggacaacgggttaggatttggcctaatcatagttgtattactggagcgggacatgcttggtatttgattgtggatagtaggaatcaggggagagaagatgagattgtggatgtttggtgtcggtggaatggatggtag

SEQ ID NO: 16881 - protein, 475 aa, Muscodor strobelii
  misc_feature: SGI Peptide ID NO. 565631
  misc_feature (8)..(475): NCBI GI: 171695902 Blast Desc: protein product [Podospora anserina] gi|170948193|emb|CAP60357.1| protein product [Podospora anserina]
  misc_feature (8)..(475): NCBI GI: 116181492 Blast Desc: CHGG_01374 [Chaetomium globosum CBS 148.51] gi|88185671|gb|EAQ93139.1| CHGG_01374 [Chaetomium globosum CBS 148.51]
  misc_feature (7)..(406): NCBI GI: 156054562 Blast Desc: SS1G_06129 [Sclerotinia sclerotiorum 1980] gi|154703909|gb|EDO03648.1| SS1G_06129 [Sclerotinia sclerotiorum 1980]
  misc_feature (7)..(475): NCBI GI: 225559982 Blast Desc: conserved [Ajellomyces capsulatus G186AR]
  misc_feature (7)..(475): NCBI GI: 239607995 Blast Desc: conserved [Ajellomyces dermatitidis ER-3]
  misc_feature (7)..(475): NCBI GI: 154287746 Blast Desc: [Ajellomyces capsulatus NAm1] gi|150408309|gb|EDN03850.1| [Ajellomyces capsulatus NAm1]
  misc_feature (7)..(475): NCBI GI: 261199994 Blast Desc: conserved [Ajellomyces dermatitidis SLH14081] gi|239594606|gb|EEQ77187.1| conserved [Ajellomyces dermatitidis SLH14081]
  misc_feature (7)..(475): NCBI GI: 240276149 Blast Desc: conserved [Ajellomyces capsulatus H143]
  misc_feature (1)..(475): NCBI GI: 240109777 Blast Desc: CPC735_032820 [Coccidioides posadasii C735 delta SOWgp]
  misc_feature (7)..(475): NCBI GI: 238487742 Blast Desc: conserved [Aspergillus flavus NRRL3357] gi|220699988|gb|EED56327.1| conserved [Aspergillus flavus NRRL3357]
  misc_feature (7)..(475): SWISSPROT Homolog: EC 4.3.1.18 D-serine ammonia-lyase
MATVQHSKDVLRAQFVGKTLHQVPTPAAVLDLAKVEANCNLMLEAAQRLQLSWRAHIKTHKTEELTRLQVGDNSSDPVNIITSTLAEAENVVPLLKEYQAKGRKVDVLYSFPLYQSAVDRLAAISSQLGPEAVTVMVDHPDQIKYLTQLASKSGYPPRVFLKINMGSNRAGVIPGTPACTQMISQLLLSSTVGSSIFFGLYTHAGHSYAARKDWEAMGILGTEFSALHDVAQAVRQERPDHPLVLSVGATPTTTTLQHPDFSSEGTESDPTILSNLSATTLMKSQIAAMRSEGLTLEVHAGVYPTLDIQQLAAHARDSTYLNPSAIAISVLADIASVYTSRAPDGTSEALINAGCLALGREPVIDAGPAPGIHYSSHGILMPWSGTKNEVPGPEFPAKHGGWQVTRLAQEHGILSWKGNLSDEVGYELKVGQRVRIWPNHSCITGAGHAWYLIVDSRNQGREDEIVDVWCRWNGW

SEQ ID NO: 16882 - DNA, 2127 bp, Muscodor strobelii
  misc_feature: SGI EST ID NO. CUFF.39946.1
  misc_feature: Variant of the nucleotide sequence at SEQ ID NO 16880
acggcagacatgattggtagctggctaggagtgactctctgggggggtcatatcgcgtcaagcctccccgcccaccacatcctcccccttatgcacatcaccatgattcagcaggttgagatgcgtagcgatcacaaggtgggggtcatgaaccctgtatcatgacatccgtaaacttagtacctactgtatcgagtcatattgacatagaaaacaccgacttggtaaagtattttgggataagtaagcaaccgagtacatgggaagtatggagatgcacgtgaactaaggttacctcgagagggtccgtcttatactagcagccggccgcggatctcttgtctaacatcacttaagacctcatgccttgctgacgcatagctataacaacagccttactcactctccttctgaacctcttgtaatacagatcatccttgaatatttatagcttcgagaaccaaacttgctggattggcacatatctcgacagtatcttctcacctcgccctttgcaacttatctctcaacccctctctgacttcactgcagcccaacgatggcgacagttcaacactccaaagatgtccttcgggcacaattcgtaggcaagactctacaccaagtccccacgcctgccgcagtcttggatctagcaaaggtcgaagcgaattgcaacttaatgctcgaggctgcgcagcgactccaactcagctggcgagctcatatcaagactcacaagactgaggagctcactagactccaagtgggagacaacagctcagatcccgtgaacatcatcacgtccacgctggccgaagctgagaatgtcgtaccactactcaaggagtatcaagcaaaggggcgcaaggttgatgttctgtactcattccccctctatcaatctgcagtcgaccgcctggcagccatctcatcgcaactgggacccgaagctgtaacagtaatggtcgaccacccagaccaaatcaaatacctaacccaactggcttcaaaatccggctacccgccgcgagtctttctcaagataaacatgggctccaaccgcgcaggtgtcattccgggaaccccagcctgtacacagatgatctcgcaactcctcctatcctccacagtcggctcctcaatcttcttcggtctgtacacacacgcaggccattcctatgcggcccgcaaagactgggaagccatgggaatcctcggcacagaattcagcgcactgcacgacgtggcacaagcagtccgacaagaacgccctgatcaccctttagtactaagtgtcggcgcaacaccaacaaccaccacgctgcaacacccagacttctcctcagagggaacagagtccgacccaacgatcctgagtaacctctcagcaacaaccctaatgaagtcccaaatcgcggccatgcgatccgagggtctcacgctcgaagtccacgctggcgtctacccaacgctcgacatccaacaactggccgctcacgcccgggacagtacctatctcaacccttctgcgatcgccatatcagtcctcgcggacatcgcatcagtctacacctcccgcgcgcccgacggcacatccgaagctctgataaatgccggctgtctagctctaggtcgcgagcccgtcatcgacgccggacccgcgccgggaatccactactcctcgcacggaatcctcatgccgtggtccgggacaaagaacgaagtacccggtcctgagttccccgcgaagcatggagggtggcaagtcacgagattagcgcaggaacacgggattttgagctggaaagggaatcttagtgatgaggtgggttatgaattgaaggttggacaacgggttaggatttggcctaatcatagttgtattactggagcgggacatgcttggtatttgattgtggatagtaggaatcaggggagagaagatgagattgtggatgtttggtgtcggtggaatggatggtagtggattaggagtagaggggatgggcggatacgagaaggtggtgggcaggtcgtgagagaagttttagcattttggcaggttgaataagaggatattcaatcatatgagcattagcattaacgaggataaagttcaccaaa

SEQ ID NO: 16883 - DNA, 1413 bp, Muscodor strobelii
  misc_feature: SGI cDNA ID NO. 565632
  misc_feature: Encodes the peptide sequence at SEQ ID NO 16884
atggccgcgcaacagcctctcccgaacacgcaggccccgctggatgtctacggtggagatgaggtgtctgccctcgtcctcgaccccggctactgccacacccgcgcaggtttcgccggcgaggatgtccccaaatctgtccttccctccttctacggccgcctgaagtctagcaactctgacagctccaccacatcctacaaagatgtattcagcgacgactgcatattcccccgcccggacttcgaggtcaagaattacatgtctcgcaccgagagcgtcgtcgaggactgggacgccgccacactgatctgggaggacatgttgatccgccgcctccagcccgagaagcagtcgcacccaaacaagaacggcctcaacgaccccgccgacgaagatggcgacgttgccatggagaatgccgaagcccaggagaaggccctcgccgagagccccgtcctcatgaccgaagccccctggaactcgggtaaagcccgcgagaaggccatcgagatcgccatggagaactggggctgtcccgccttctggctctcccgcacccccgtctgcgccgccttcgcagccggcaaggcctctgccctcgttatcgacgtcggcggtgccaacacatccgtcaccgccatccacgacggcatgatcctcaagcgcagcgtccagaagtctcagatcggtggcctttggctctcacaacagataagatcgatgtgggcagcctccgaccccaagatcgacatcgtgcccacatacctcgtcggaaataagaccgccgtcgacgccggagcccccgcccaagccgagcgcaagagctactcctacgacatccacccgagcttccacgcatatgaggaggagaagctgctgaccgagtacaaggagagtgtcatcgaggtctggaagggtcctggtcgatacttgaacccgggtaacgaggatctagtcagaacgcagcctggccgtgtcttcgagatgcccgatggttcgaaccagatgtggcgtgagcagcgattccaagtatccgagggaatgtgggatgagtccgctgcccttcctcttcccgacggcagcaaagcccagactattcccgagatgatcaaagcctgtctttcatcagtcgacgtcgatttacgtcctaacttgctgggaaatgtcgttgtgactggtagcaccagcctgctgaatgggtttaacgatcggttgaataatgagctgatggctatgcatcccggcatgaagatcaagttacatgctgctggacttacgacggagagacgctttggggcctggattggtggtagtatcctggcgagcttgggcacgttccatcagatgtggattagtaggaaggagtatgaggagaatggcgccgggattgttgagaagagatgtaagtag

SEQ ID NO: 16884 - protein, 470 aa, Muscodor strobelii
  misc_feature: SGI Peptide ID NO. 565632
  misc_feature (19)..(470): Pfam Id: PF00022 Pfam Desc: Actin
  misc_feature (3)..(470): NCBI GI: 256734728 Blast Desc: Actin-related protein, ARP4 class [Nectria haematococca mpVI 77-13-4]
  misc_feature (3)..(470): NCBI GI: 46107984 Blast Desc: FG00874.1 [Gibberella zeae PH-1] gi|84027761|sp|Q4IPI4.1|ARP4_GIBZE RecName: Full=Actin-related protein 4; AltName: Full=Actin-like protein ARP4; protein 4
  misc_feature (1)..(470): NCBI GI: 164427884 Blast Desc: NCU02555 [Neurospora crassa OR74A] gi|84027762|sp|Q7SHR0.2|ARP4_NEUCR RecName: Full=Actin-related protein 4; AltName: Full=Actin-like protein arp-4; protein 4
  misc_feature (3)..(470): NCBI GI: 116181490 Blast Desc: CHGG_01373 [Chaetomium globosum CBS 148.51] gi|88185670|gb|EAQ93138.1| CHGG_01373 [Chaetomium globosum CBS 148.51]
  misc_feature (3)..(470): NCBI GI: 171695904 Blast Desc: protein product [Podospora anserina] gi|170948194|emb|CAP60358.1| protein product [Podospora anserina]
  misc_feature (3)..(470): NCBI GI: 261355172 Blast Desc: actin [Verticillium albo-atrum VaMs.102]
  misc_feature (3)..(470): NCBI GI: 154321013 Blast Desc: BC1G_01381 [Botryotinia fuckeliana B05.10] gi|150851919|gb|EDN27111.1| BC1G_01381 [Botryotinia fuckeliana B05.10]
  misc_feature (3)..(470): NCBI GI: 156054564 Blast Desc: SS1G_06130 [Sclerotinia sclerotiorum 1980] gi|154703910|gb|EDO03649.1| SS1G_06130 [Sclerotinia sclerotiorum 1980]
  misc_feature (76)..(470): NCBI GI: 145613950 Blast Desc: MGG_11256 [Magnaporthe grisea 70-15] gi|145616841|ref|XP_001414800.1| MGG_01241 [Magnaporthe grisea 70-15] gi|145020953|gb|EDK05082.1| MGG_11256 [Magnaporthe grisea
  misc_feature (17)..(470): NCBI GI: 115398383 Blast Desc: ATEG_05605 [Aspergillus terreus NIH2624] gi|114192974|gb|EAU34674.1| ATEG_05605 [Aspergillus terreus NIH2624]
MAAQQPLPNTQAPLDVYGGDEVSALVLDPGYCHTRAGFAGEDVPKSVLPSFYGRLKSSNSDSSTTSYKDVFSDDCIFPRPDFEVKNYMSRTESVVEDWDAATLIWEDMLIRRLQPEKQSHPNKNGLNDPADEDGDVAMENAEAQEKALAESPVLMTEAPWNSGKAREKAIEIAMENWGCPAFWLSRTPVCAAFAAGKASALVIDVGGANTSVTAIHDGMILKRSVQKSQIGGLWLSQQIRSMWAASDPKIDIVPTYLVGNKTAVDAGAPAQAERKSYSYDIHPSFHAYEEEKLLTEYKESVIEVWKGPGRYLNPGNEDLVRTQPGRVFEMPDGSNQMWREQRFQVSEGMWDESAALPLPDGSKAQTIPEMIKACLSSVDVDLRPNLLGNVVVTGSTSLLNGFNDRLNNELMAMHPGMKIKLHAAGLTTERRFGAWIGGSILASLGTFHQMWISRKEYEENGAGIVEKRCK

SEQ ID NO: 16885 - DNA, 1937 bp, Muscodor strobelii
  misc_feature: SGI EST ID NO. CUFF.39944.0
  misc_feature: Variant of the nucleotide sequence at SEQ ID NO 16883
aaaaaacaacacctctttgcgacaatcccaccctcgcccacacaactcatcttcttcacacctccacaactcctgtcgctgaccatcttcacattgttccaattggccatagccagccctcgcgatggccgcgcaacagcctctcccgaacacgcaggccccgctggatgtctacggtggagatgaggtgtctgccctcgtcctcgaccccggctactgccacacccgcgcaggtttcgccggcgaggatgtccccaaatctgtccttccctccttctacggccgcctgaagtctagcaactctgacagctccaccacatcctacaaagatgtattcagcgacgactgcatattcccccgcccggacttcgaggtcaagaattacatgtctcgcaccgagagcgtcgtcgaggactgggacgccgccacactgatctgggaggacatgttgatccgccgcctccagcccgagaagcagtcgcacccaaacaagaacggcctcaacgaccccgccgacgaagatggcgacgttgccatggagaatgccgaagcccaggagaaggccctcgccgagagccccgtcctcatgaccgaagccccctggaactcgggtaaagcccgcgagaaggccatcgagatcgccatggagaactggggctgtcccgccttctggctctcccgcacccccgtctgcgccgccttcgcagccggcaaggcctctgccctcgttatcgacgtcggcggtgccaacacatccgtcaccgccatccacgacggcatgatcctcaagcgcagcgtccagaagtctcagatcggtggcctttggctctcacaacagataagatcgatgtgggcagcctccgaccccaagatcgacatcgtgcccacatacctcgtcggaaataagaccgccgtcgacgccggagcccccgcccaagccgagcgcaagagctactcctacgacatccacccgagcttccacgcatatgaggaggagaagctgctgaccgagtacaaggagagtgtcatcgaggtctggaagggtcctggtcgatacttgaacccgggtaacgaggatctagtcagaacgcagcctggccgtgtcttcgagatgcccgatggttcgaaccagatgtggcgtgagcagcgattccaagtatccgagggaatgtgggatgagtccgctgcccttcctcttcccgacggcagcaaagcccagactattcccgagatgatcaaagcctgtctttcatcagtcgacgtcgatttacgtcctaacttgctgggaaatgtcgttgtgactggtagcaccagcctgctgaatgggtttaacgatcggttgaataatgagctgatggctatgcatcccggcatgaagatcaagttacatgctgctggacttacgacggagagacgctttggggcctggattggtggtagtatcctggcgagcttgggcacgttccatcagatgtggattagtaggaaggagtatgaggagaatggcgccgggattgttgagaagagatgtaagtagacttctctgaggatgggtttactacgagagatactggtctgggagaaatgagcgattgccgtggaaaaagaccggcgagtgctgggaaagtccatgaatgttagagaaccagttctcagcccgtcagtgtgaggtatgcggatctgagagggaaattggcgtaaggagtttctctgctgagactaaaatgtaccattgcgcaccgaaagaactgttttacactgtttgagcactgcagcgggagatctgggtcctgtggatgagagcgttgtctagatctgtaggcaatcaaacagtcagaccatgaataaaaaagatgatacattctctccatgttccatattcagacaacattgtggttcgaataggatagacatgtagtaatatttgcagataaata

SEQ ID NO: 16886 - DNA, 726 bp, Muscodor strobelii
  misc_feature: SGI cDNA ID NO. 565633
  misc_feature: Encodes the peptide sequence at SEQ ID NO 16887
atgtccctaatatcagccgacgaggacgacttcctctctgataaccaatccaatgcctcctcctcaggcgacgatgagcccttccctcccgtaccactgagtcagaactacttcgcaccacccttctacggtcgtccaccaacacctctgccaccctcaccatccttgacatctctcctgcgcccatcacgtcccacgactccagacccctcagacgatgagctcgagcccgtgccccgcgcctcgcccaaagtgcccacttacgaatactatggctttgtcctctacctcttttcctcactgacctttttggtatacctcctctgggcctacctcccggcgccattcctccatgccctaggaatatactactaccccaaccgctggtgggcacttgccatcccttccttcatcaccatgttgctggtgtacatatatgtcgcgcttgctctcctcaataccgaggtcttgacgctgcccatgacatccatcgaaaccatcgtcgacgaagcagcaaagattgccaccatcgacagcaaagggcgcatcaaaagcggagagcggaagcagatcacacaggaaaaggctcagcagctggactggaaaaacatatggagtacaggcacggatgccgtcatggatgtcccgctcgctggtgtttgtgaggtgctctacggggacttggtctcggatgaagaagatggttgtgttgatgatacctattga

SEQ ID NO: 16887 - protein, 241 aa, Muscodor strobelii
  misc_feature: SGI Peptide ID NO. 565633
  misc_feature (86)..(226): Pfam Id: PF08510 Pfam Desc: PIG-P
  misc_feature (1)..(239): NCBI GI: 46107998 Blast Desc: FG00881.1 [Gibberella zeae PH-1]
  misc_feature (1)..(228): NCBI GI: 261355173 Blast Desc: PIG-P domain-containing protein [Verticillium albo-atrum VaMs.102]
  misc_feature (12)..(224): NCBI GI: 171695900 Blast Desc: protein product [Podospora anserina] gi|170948192|emb|CAP60356.1| protein product [Podospora anserina]
  misc_feature (33)..(227): NCBI GI: 116181486 Blast Desc: CHGG_01371 [Chaetomium globosum CBS 148.51] gi|88185668|gb|EAQ93136.1| CHGG_01371 [Chaetomium globosum CBS 148.51]
  misc_feature (5)..(233): NCBI GI: 39944956 Blast Desc: MGG_04460 [Magnaporthe grisea 70-15] gi|145021517|gb|EDK05646.1| MGG_04460 [Magnaporthe grisea 70-15]
  misc_feature (36)..(233): NCBI GI: 119182746 Blast Desc: CIMG_06383 [Coccidioides immitis RS]
  misc_feature (36)..(233): NCBI GI: 240109384 Blast Desc: CPC735_028890 [Coccidioides posadasii C735 delta SOWgp]
  misc_feature (36)..(238): NCBI GI: 67902166 Blast Desc: AN8070.2 [Aspergillus nidulans FGSC A4] gi|40740502|gb|EAA59692.1| AN8070.2 [Aspergillus nidulans FGSC A4] gi|169144958|gb|ACA49235.1| GPI-GlcNAc transferase subunit P
  misc_feature (21)..(231): NCBI GI: 154277164 Blast Desc: conserved [Ajellomyces capsulatus NAm1] gi|150413008|gb|EDN08391.1| conserved [Ajellomyces capsulatus NAm1]
  misc_feature (38)..(232): NCBI GI: 238839487 Blast Desc: PIG-P [Microsporum canis CBS 113480]
MSLISADEDDFLSDNQSNASSSGDDEPFPPVPLSQNYFAPPFYGRPPTPLPPSPSLTSLLRPSRPTTPDPSDDELEPVPRASPKVPTYEYYGFVLYLFSSLTFLVYLLWAYLPAPFLHALGIYYYPNRWWALAIPSFITMLLVYIYVALALLNTEVLTLPMTSIETIVDEAAKIATIDSKGRIKSGERKQITQEKAQQLDWKNIWSTGTDAVMDVPLAGVCEVLYGDLVSDEEDGCVDDTY

SEQ ID NO: 16888 - DNA, 1130 bp, Muscodor strobelii
  misc_feature: SGI EST ID NO. CUFF.39937.0
  misc_feature: Variant of the nucleotide sequence at SEQ ID NO 16886
cactactatcacaaaaactcaatcatctaagaaacatagatacaatcacaccagctcaaatggctcgaatgcagcgcatgtgggtattgtgatagggccagatcggaaaattacgagtcatcccatatgaaagctacagcaatcagcccttcggacaggttctggacagaatgtccctaatatcagccgacgaggacgacttcctctctgataaccaatccaatgcctcctcctcaggcgacgatgagcccttccctcccgtaccactgagtcagaactacttcgcaccacccttctacggtcgtccaccaacacctctgccaccctcaccatccttgacatctctcctgcgcccatcacgtcccacgactccagacccctcagacgatgagctcgagcccgtgccccgcgcctcgcccaaagtgcccacttacgaatactatggctttgtcctctacctcttttcctcactgacctttttggtatacctcctctgggcctacctcccggcgccattcctccatgccctaggaatatactactaccccaaccgctggtgggcacttgccatcccttccttcatcaccatgttgctggtgtacatatatgtcgcgcttgctctcctcaataccgaggtcttgacgctgcccatgacatccatcgaaaccatcgtcgacgaagcagcaaagattgccaccatcgacagcaaagggcgcatcaaaagcggagagcggaagcagatcacacaggaaaaggctcagcagctggactggaaaaacatatggagtacaggcacggatgccgtcatggatgtcccgctcgctggtgtttgtgaggtgctctacggggacttggtctcggatgaagaagatggttgtgttgatgatacctattgattttacggcattggttcaagcattgcgtcggcgttcaagggcgaatctgaccccggatcataataagggattaaccgtgttgggtacacatacatattttacgtctggaattgacttcatccttttagatcgacttgtggtatgtggcgaaacattcgacattcgacctggtccataccactgttagactctcttattgggcatgttacattacatacacgagctgtcacaacc

SEQ ID NO: 16889 - DNA, 3447 bp, Muscodor strobelii
  misc_feature: SGI cDNA ID NO. 565634
  misc_feature: Elevated expression when VOC is produced
  misc_feature: Encodes the peptide sequence at SEQ ID NO 16890
atgggaagtcaacttgagaagaactcaaatgctgtgcggaaacgcatagagaatcatgagttcacggatgaagacggtgaggaatatggagccagcgcctttggtggcttctccgactactttcgtcgcaaaaagatcaaacttcaaaatcttgatgcagaggttcgagcgacttcggacaagccccctatcttcaaaggagtcgtagcatttgtgaatggatatacacagccaccacttcatatcattcatcgcgatctcgttgaacatggtgccgggtttcttcaatatcttgacggcaaaactatggcgacacacatcgtagcttcgacattgacacctaagaagatggtcgagttccgaagatacagggttgtaaaacccgcttgggtcgtcgattctatcaaggccgggaagatgcttccatgggccgactatcgcgtcgttcaggaaggccctcgacaaaagactttaatgctcaatgggaatggtatctctgcgcaagctacttctccacagtctacaatttccggataccgggaacagatggcgaacagcttttataccagccagttgcaaggagaagctagccccgttgataatggaacagtagcaatggaccgaacaccggcgagcccgggaaaggtatcgactctttcttctgagcctgtgattgacgaggacgggaataatgaaagcagacttgccaccgaacacgatgaggtttcagactttcaagagcactcactccacgagaatgttcagtcagccacacacaataccccacaagcaactgtgccaatgatcatcacatcagatacaactgatctcgtagaaatggtcgacggggatcagtccgcgcagatggcttccaagcaggactccaagccaatgacttcagaagaacacaatgctttgttacttcaagatccgcgcatgagaaaatcgtcaacagcaaatcctgatttcatacaacaatattactccgaaagtcgacttcatcatttatctacctggaaggctgagttgaagtctcagatgcagaagcttgcatttgaaaagagttcgcagaggaaacttccccgtcgaaaaccaggcgcacgacgttacgtgatgcacgtcgacttcgatagttttttctgcgctgtatccttgaagaaagcgcccgaattcgttgacaaacctgctgtcgttgcgcatggcacaggaacgggatcagagattgccagttgcaattacccagcgagagcttttggggtaaagaacggcatgtggatgaaaacagctaaagaaaagtgtcccgatctaaaggttctcccatacgactttccagcttatgaagacgcaagcaagttattttacgagtccatcttagatgtaggaggcgtggtacagagtgttagtattgatgaagcactggtagatgtgacgctagttgttctcgaggcggtcggatccgatggctttggcgtcaatgaggggagcatatggcgagaacaagaacacgctgaccggctcgcgacatctctgagagatcaaatcaaaatcaagacaggctgtgctgtttcagttggcattggcgacaacattttacttgcaaaagttgcgctgagaaaagcaaagccagctgggcaatatcagatcaaacctgaggaaatacaagatttcctgggaagcttgaaagttagtgatctcccgggtgttgcatatagcatatcaggcaaactcgaagagattggcatcaaatatgtcaacgatatccgacaaacatcaagagagcgtctagttacaactctaggacccaagacgggagagaagctctgggactatgcccgaggtatagataaaaccgaggtcggcgaccagccgattcgaaagtcagtgtcggctgaagtcaattggggcattcgtttcattaatcaagaggaggcggatgagtttgtcgttaatctctgcaaagagctagagaagaggctactgaatgagggagttaagggcaagcagctcactatgaaaatcatgcgacgttctttggacgccccgttggatccgccgaagcacttaggccacggcaaatgcgacacgttcaacaaaagcgttgccttcggtgttgcgacgaacgatcaccaagtcctaagcaaagaagccgtctccgtattacgtgctttcaagtttagcccaggtgatctacgcggactaggagttcagttgacaaaactcgagccgatcaaaaccagtctctccggccccgatgggagtcagaagaagcttaatttcggtgtcttcaagaccccagtgttagcgaagaagtcgactacagatcccattcaagacgctacggcttcagagcctatacgtaccgattcgctgcaaaagcatgaagccacacctgacccgatcgtcgatggacctgtaactccacgaaagtcaaagactggcatgcagcaccctgctttgataattgctaaggcaggtgataaagacataaacgcacggacgcctctcaatcttggaggcacacaattcgtcatgccaacaaatcctgacctcagtgttttagaagaattacctcaagacattcgaagcaggatattggcccaaagccgagcaaaaccggcggaggccaaaacggaggagcaaagtgcggaatttctgaacgaaatccctccagaattcgacccggacgtgttccatgccctgccagatgacatgaaagccgagattctcgagtctcacagacgccaatcaaagcaagccacgccaaaagactcaccttataaagatcgatcaatgcaacagtttaagcaaacgaccccaagcaagaagcgtggccctggactattcatcggttccaaggaaaaacaggctgataagaatgcaaaggtggcgcaaagtaatctcttgtttcaaaaggatacggagtccaactccaacgacgtgccagaactggatgaggatttcctccgagagttgcctgaggatatgcgtaaggagattatcgcagatcatcgacaacgcaaagcgcagcggtcaggtctagatatcaaggttaataccaaacgggagcagaatcgggctggagctttagccgagggccagactcggctgaatttctctcctaagccagctaaggttgtatttgccaatgggttgacaaccatctcggagatccgagacatgctcaacgtgtggcaccgagagacgagcgttgaagggccgcacaggagagatgtcgagatgctggagaagtatctggttagagtcgtgtttgaagaaaaggatatggataaagttcagaaacttgtccgatggttagaatacctcacagacgcgattgagtcggagggtttaggtaagcaaaattggcgagaagcggtgagtggcattaaaggagaaatacagaaagctgttcgatctcgaggacttggacacttggatttagaatag

SEQ ID NO: 16890 - protein, 1148 aa, Muscodor strobelii
  misc_feature: SGI Peptide ID NO. 565634
  misc_feature (60)..(135): Pfam Id: PF00533 Pfam Desc: BRCA1 C Terminus (BRCT) domain
  misc_feature (374)..(742): Pfam Id: PF00817 Pfam Desc: impB/mucB/samB family
  misc_feature (1)..(1147): NCBI GI: 256734443 Blast Desc: NECHADRAFT_74720 [Nectria haematococca mpVI 77-13-4]
  misc_feature (1)..(1145): NCBI GI: 46108306 Blast Desc: FG01035.1 [Gibberella zeae PH-1]
  misc_feature (1)..(1147): NCBI GI: 39974737 Blast Desc: MGG_00485 [Magnaporthe grisea 70-15] gi|145018619|gb|EDK02898.1| MGG_00485 [Magnaporthe grisea 70-15]
  misc_feature (5)..(992): NCBI GI: 22164048 Blast Desc: MUS42 [Neurospora crassa]
  misc_feature (5)..(992): NCBI GI: 85111590 Blast Desc: NCU02053 [Neurospora crassa OR74A] gi|28925767|gb|EAA34773.1| NCU02053 [Neurospora crassa OR74A]
  misc_feature (5)..(1007): NCBI GI: 85699992 Blast Desc: REV1 [Neurospora crassa]
  misc_feature (5)..(992): NCBI GI: 85699996 Blast Desc: REV1 [Neurospora tetrasperma]
  misc_feature (5)..(1007): NCBI GI: 85699994 Blast Desc: REV1 [Neurospora tetrasperma]
  misc_feature (1)..(1147): NCBI GI: 238842032 Blast Desc: DNA repair protein REV1 [Microsporum canis CBS 113480]
  misc_feature (1)..(1142): NCBI GI: 258574661 Blast Desc: MUS42 protein [Uncinocarpus reesii 1704] gi|237901778|gb|EEP76179.1| MUS42 protein [Uncinocarpus reesii 1704]
  misc_feature: Useful for introducing or modulating the production of volatile compounds
MGSQLEKNSNAVRKRIENHEFTDEDGEEYGASAFGGFSDYFRRKKIKLQNLDAEVRATSDKPPIFKGVVAFVNGYTQPPLHIIHRDLVEHGAGFLQYLDGKTMATHIVASTLTPKKMVEFRRYRVVKPAWVVDSIKAGKMLPWADYRVVQEGPRQKTLMLNGNGISAQATSPQSTISGYREQMANSFYTSQLQGEASPVDNGTVAMDRTPASPGKVSTLSSEPVIDEDGNNESRLATEHDEVSDFQEHSLHENVQSATHNTPQATVPMIITSDTTDLVEMVDGDQSAQMASKQDSKPMTSEEHNALLLQDPRMRKSSTANPDFIQQYYSESRLHHLSTWKAELKSQMQKLAFEKSSQRKLPRRKPGARRYVMHVDFDSFFCAVSLKKAPEFVDKPAVVAHGTGTGSEIASCNYPARAFGVKNGMWMKTAKEKCPDLKVLPYDFPAYEDASKLFYESILDVGGVVQSVSIDEALVDVTLVVLEAVGSDGFGVNEGSIWREQEHADRLATSLRDQIKIKTGCAVSVGIGDNILLAKVALRKAKPAGQYQIKPEEIQDFLGSLKVSDLPGVAYSISGKLEEIGIKYVNDIRQTSRERLVTTLGPKTGEKLWDYARGIDKTEVGDQPIRKSVSAEVNWGIRFINQEEADEFVVNLCKELEKRLLNEGVKGKQLTMKIMRRSLDAPLDPPKHLGHGKCDTFNKSVAFGVATNDHQVLSKEAVSVLRAFKFSPGDLRGLGVQLTKLEPIKTSLSGPDGSQKKLNFGVFKTPVLAKKSTTDPIQDATASEPIRTDSLQKHEATPDPIVDGPVTPRKSKTGMQHPALIIAKAGDKDINARTPLNLGGTQFVMPTNPDLSVLEELPQDIRSRILAQSRAKPAEAKTEEQSAEFLNEIPPEFDPDVFHALPDDMKAEILESHRRQSKQATPKDSPYKDRSMQQFKQTTPSKKRGPGLFIGSKEKQADKNAKVAQSNLLFQKDTESNSNDVPELDEDFLRELPEDMRKEIIADHRQRKAQRSGLDIKVNTKREQNRAGALAEGQTRLNFSPKPAKVVFANGLTTISEIRDMLNVWHRETSVEGPHRRDVEMLEKYLVRVVFEEKDMDKVQKLVRWLEYLTDAIESEGLGKQNWREAVSGIKGEIQKAVRSRGLGHLDLE

SEQ ID NO: 16891 - DNA, 1623 bp, Muscodor strobelii
  misc_feature: SGI cDNA ID NO. 565635
  misc_feature: Encodes the peptide sequence at SEQ ID NO 16892
atgaacaacgagcagttccgtcgcttagtcgacggtagctctgctaaatcccaaccatcaggcagtggtaataatggtacgccgtccactggcccgcgcctggccgctctcggatcccgccagatatctagcattcctatgacaccgtatgtgttctctacaatacctcgaagctcccctctgactaaaacaagacgctcagtatctcgcctccctaacgacgatttcgcccgacaattagccgagaagaatcaatccgcaaagcaacaacagaagtttcgctcatttgcccctaaaggttcaaagttggccgctggatacgtcgatcgtgcaaagacgagagaatctgtagaagatgacgaacgagtcgcaaggctacaggcactagaggaggctttcaagaaggaagagatcgaccaagagacttacgagaaactccggaaacaggtagccggtggcgatctgtcgagtacccatctagtaaaggggctcgatttcgagctccttgcccgaatacggaagggagagaatgtttacggcgacaatgatactcgagaccaacaagaagagccatctgaggacatcgacgatgagcttgatcagttggaagaagaagatgtaggggccatagaaaaggagcggtctagaaagaaaggtcaactgtcaacatcatctctcaatccgtccaaaaagcggacgagagatcaagtcctagcagaaatgaaggctgccagagaagccgcaaaggctaagcaggaatcaagtctgggttcaagattcaagaagtttggcgcaaaagcacctggcatgcgtatggagagagacagcaaaggtcaagaggttatgattattgtcgacgaggatggcaacgagaaacgcaaagtacgcaagcttcagccaaaggccgaggaatctttacaaaaagagagggatctgatggcaccggaccccaaagcaaagcctcttggaatggatgtcccggatttttacaaatcgaaagtcgaggagccagaagatgaagacgtcaacatttttgacgacgtcgatgatgattacgatccactggcgggactagacgaagattcagatgacgattcaatcgaaaagcagaaaccggatgatgcaggaaaagagcctagcgctactatgccgccgccacccaagcctcctggagcttctgaatcaaggaattacttcaaagatgctaagactgcgctggcttctgccgaatctctgaaagcgccatcaatgtccgacccagcaatccaggcagccctcaagaaagctgcctccatccagaaacttgcgagtgcttccgaagaggatgatgaggaagccagggcgaaggcagagagacggcggaaaatgttggaaaataacgaccgtgatgctgaagacatggatatgggtttcggcacgagtagattcgaagatgacgccgattttgacgacaagaaagtcaagctttctcaatggggtcgtgaagatgaagacgatggcggcgatcgggttgaaagaggcggcggctccaagcgcaaacgagggccgaagaaaaggaaaggcgatgccaataacgcggccgatgtcatgagagaaatggagaggcagcgagctgccaaataa

SEQ ID NO: 16892 - protein, 540 aa, Muscodor strobelii
  misc_feature: SGI Peptide ID NO. 565635
  misc_feature (152)..(173): Pfam Id: PF07808 Pfam Desc: RED-like protein N-terminal region
  misc_feature (75)..(537): NCBI GI: 256735163 Blast Desc: NECHADRAFT_74719 [Nectria haematococca mpVI 77-13-4]
  misc_feature (14)..(534): NCBI GI: 46108308 Blast Desc: FG01036.1 [Gibberella zeae PH-1]
  misc_feature (1)..(539): NCBI GI: 261356080 Blast Desc: conserved [Verticillium albo-atrum VaMs.102]
  misc_feature (1)..(539): NCBI GI: 154311166 Blast Desc: BC1G_06701 [Botryotinia fuckeliana B05.10] gi|150851105|gb|EDN26298.1| BC1G_06701 [Botryotinia fuckeliana B05.10]
  misc_feature (1)..(492): NCBI GI: 116180712 Blast Desc: CHGG_00984 [Chaetomium globosum CBS 148.51] gi|88185281|gb|EAQ92749.1| CHGG_00984 [Chaetomium globosum CBS 148.51]
  misc_feature (1)..(539): NCBI GI: 156034697 Blast Desc: SS1G_13283 [Sclerotinia sclerotiorum 1980] gi|154698687|gb|EDN98425.1| SS1G_13283 [Sclerotinia sclerotiorum 1980]
  misc_feature (1)..(538): NCBI GI: 85111592 Blast Desc: NCU02054 [Neurospora crassa OR74A] gi|28925768|gb|EAA34774.1| [Neurospora crassa OR74A]
  misc_feature (1)..(501): NCBI GI: 145611316 Blast Desc: MGG_11570 [Magnaporthe grisea 70-15] gi|145018620|gb|EDK02899.1| MGG_11570 [Magnaporthe grisea 70-15]
  misc_feature (1)..(540): NCBI GI: 169600921 Blast Desc: SNOG_03315 [Phaeosphaeria nodorum SN15] gi|111068926|gb|EAT90046.1| SNOG_03315 [Phaeosphaeria nodorum SN15]
  misc_feature (1)..(540): NCBI GI: 189211123 Blast Desc: conserved [Pyrenophora tritici-repentis Pt-1C-BFP] gi|187977985|gb|EDU44611.1| conserved [Pyrenophora tritici-repentis Pt-1C-BFP]
MNNEQFRRLVDGSSAKSQPSGSGNNGTPSTGPRLAALGSRQISSIPMTPYVFSTIPRSSPLTKTRRSVSRLPNDDFARQLAEKNQSAKQQQKFRSFAPKGSKLAAGYVDRAKTRESVEDDERVARLQALEEAFKKEEIDQETYEKLRKQVAGGDLSSTHLVKGLDFELLARIRKGENVYGDNDTRDQQEEPSEDIDDELDQLEEEDVGAIEKERSRKKGQLSTSSLNPSKKRTRDQVLAEMKAAREAAKAKQESSLGSRFKKFGAKAPGMRMERDSKGQEVMIIVDEDGNEKRKVRKLQPKAEESLQKERDLMAPDPKAKPLGMDVPDFYKSKVEEPEDEDVNIFDDVDDDYDPLAGLDEDSDDDSIEKQKPDDAGKEPSATMPPPPKPPGASESRNYFKDAKTALASAESLKAPSMSDPAIQAALKKAASIQKLASASEEDDEEARAKAERRRKMLENNDRDAEDMDMGFGTSRFEDDADFDDKKVKLSQWGREDEDDGGDRVERGGGSKRKRGPKKRKGDANNAADVMREMERQRAAK

SEQ ID NO: 16893 - DNA, 2617 bp, Muscodor strobelii
  misc_feature: SGI EST ID NO. CUFF.39994.0
  misc_feature: Variant of the nucleotide sequence at SEQ ID NO 16891
tccgaagtcgctcgaacctctgcatcaagattttgaagtttgatctttttgcgacgaaagtagtcggagaagccaccaaaggcgctggctccatattcctcaccgtcttcatccgtgaactcatgattctctatgcgtttccgcacagcatttgagttcttctcaagttgacttcccatcttcaagtgttaccacacgcgtcacctttcctttgttcttgtattacatggctttggaatctgcacggcgtgctacagcagataccgaaatggaatccgacgaccaaagatttgttcgtatcagtcgcagcttccgtaacgatggttgaactactcaagttgagctaatgaggatgcttagaatagcgcgtaaagaggtttggacgcgaccggcacacgtcatcccgtgactgctttcaaagtggccgcaggtgaggtaggcggctaccccaccttaggtccctgctttccgacgactagcgtattacataatacagaatcctctacattcgctcggcgccctaacgagaacctccgtgtaggcgcggcagggcccaggcgcatctatcttcatctcgcaatctacccaggctactgatcacgttcgttcttcgcgactatacaaccatctctctaacatgcagtcatagcgacaaggtgaaccagtccccgcgtatttagatcaacagcctccgatttcgcagtgagagctattgtggtagctgcaaagatgaacaacgagcagttccgtcgcttagtcgacggtagctctgctaaatcccaaccatcaggcagtggtaataatggtacgccgtccactggcccgcgcctggccgctctcggatcccgccagatatctagcattcctatgacaccgtatgtgttctctacaatacctcgaagctcccctctgactaaaacaagacgctcagtatctcgcctccctaacgacgatttcgcccgacaattagccgagaagaatcaatccgcaaagcaacaacagaagtttcgctcatttgcccctaaaggttcaaagttggccgctggatacgtcgatcgtgcaaagacgagagaatctgtagaagatgacgaacgagtcgcaaggctacaggcactagaggaggctttcaagaaggaagagatcgaccaagagacttacgagaaactccggaaacaggtagccggtggcgatctgtcgagtacccatctagtaaaggggctcgatttcgagctccttgcccgaatacggaagggagagaatgtttacggcgacaatgatactcgagaccaacaagaagagccatctgaggacatcgacgatgagcttgatcagttggaagaagaagatgtaggggccatagaaaaggagcggtctagaaagaaaggtcaactgtcaacatcatctctcaatccgtccaaaaagcggacgagagatcaagtcctagcagaaatgaaggctgccagagaagccgcaaaggctaagcaggaatcaagtctgggttcaagattcaagaagtttggcgcaaaagcacctggcatgcgtatggagagagacagcaaaggtcaagaggttatgattattgtcgacgaggatggcaacgagaaacgcaaagtacgcaagcttcagccaaaggccgaggaatctttacaaaaagagagggatctgatggcaccggaccccaaagcaaagcctcttggaatggatgtcccggatttttacaaatcgaaagtcgaggagccagaagatgaagacgtcaacatttttgacgacgtcgatgatgattacgatccactggcgggactagacgaagattcagatgacgattcaatcgaaaagcagaaaccggatgatgcaggaaaagagcctagcgctactatgccgccgccacccaagcctcctggagcttctgaatcaaggaattacttcaaagatgctaagactgcgctggcttctgccgaatctctgaaagcgccatcaatgtccgacccagcaatccaggcagccctcaagaaagctgcctccatccagaaacttgcgagtgcttccgaagaggatgatgaggaagccagggcgaaggcagagagacggcggaaaatgttggaaaataacgaccgtgatgctgaagacatggatatgggtttcggcacgagtagattcgaagatgacgccgattttgacgacaagaaagtcaagctttctcaatggggtcgtgaagatgaagacgatggcggcgatcgggttgaaagaggcggcggctccaagcgcaaacgagggccgaagaaaaggaaaggcgatgccaataacgcggccgatgtcatgagagaaatggagaggcagcgagctgccaaataacaaaaaagtcacataagcagtgttaactgtggcaattaccgtgcgatcatataatcaactatttgggcatgtcgttggtcaaaacgttgagacaattaccaataagaactcagttttacctaatgactagcacactcaaatttgaggcagctcgatgctagtacgagagaccctccagtgcctaagactgagtgtaccatgccataatattgaattacatatcgcttatcaccaaaatcaatccttttgcaggtgcaaagacgag

SEQ ID NO: 16894 - DNA, 1131 bp, Muscodor strobelii
  misc_feature: SGI cDNA ID NO. 565636
  misc_feature: Reduced expression when VOC is produced
  misc_feature: Encodes the peptide sequence at SEQ ID NO 16895
atgtcggctgctgttcctctttggctggactgcgacccaggtcatgatgacgtcttcgccattcttctcggcgcataccaccccgccattcggttgctaggaatcagtactgttcacggcaacgcatctttagacaagaccacaaacaacgcgctatcggttctctcagcaattggaaagcatgacaacgtcaaagtgtatccaggcgccccaagagcgctccgtcgcgctcctttccccgcatccgagatccacggggaatccggactagacggcacgactctactcccggacccggcaaccgcagcccatgcactggaaaaatcagtcccggcaagcgaggccatggcctccgctctttggtcctgcgaaccgggaaccgcgtgggtagtaaccacaggcgcaggaacaaacgtcgcgacgatgttcacagcaaaccccgacctacgcgctcacgtcgcgggagtaagtatcatgggcggcagtgtagggggtagtttcaccagcgccgtgatgagccgtaacgagcccacgcgcgtagggaactacaccccatgggctgaatttaatattctcatcgacccggaggccgcggcactactacttgaagacccgattctggccccgaagacaacactcatacctctcgatctcacacatctcgtgctcgcgacgaaggaggtgcaggatttactgttgtgtgggaagatgggcgagaaagatggcaaggcgaagacgacgctgcggcagatgcttgttgagcttttgatgtttttcgctgggacttatgccgacgtcttcggcatcgtcgaaggacctccgctgcacgatccactagccgtagctgctatactagcgggcactagccatgagattccgtttcatgactttgaccccaagaacccagaggtgagggaacgcttcgaagtaaaaatagtgacagaaggcacgctagaagacgcgcaagagaggggagcgcagacgggacgcacggtggtaaggctgctggaacctggaaaggagggtgtgaggattcctcgaggcttggatattgagaagttttggaaggtcattgaggagtgttgccgcagtgctgatgaggttaatgcccaacgagctgcagcgaattga

SEQ ID NO: 16895 - protein, 376 aa, Muscodor strobelii
  misc_feature: SGI Peptide ID NO. 565636
  misc_feature (4)..(366): Pfam Id: PF01156 Pfam Desc: Inosine-uridine preferring nucleoside hydrolase
  misc_feature (4)..(285): Pfam Id: PF01156 Pfam Desc: Inosine-uridine preferring nucleoside hydrolase
  misc_feature (3)..(363): NCBI GI: 46108310 Blast Desc: FG01037.1 [Gibberella zeae PH-1]
  misc_feature (3)..(376): NCBI GI: 256735162 Blast Desc: NECHADRAFT_74718 [Nectria haematococca mpVI 77-13-4]
  misc_feature (5)..(371): NCBI GI: 85111594 Blast Desc: NCU02055 [Neurospora crassa OR74A] gi|28925769|gb|EAA34775.1| conserved [Neurospora crassa OR74A]
  misc_feature (1)..(374): NCBI GI: 39941498 Blast Desc: MGG_05660 [Magnaporthe grisea 70-15] gi|145022349|gb|EDK06369.1| MGG_05660 [Magnaporthe grisea 70-15]
  misc_feature (5)..(375): NCBI GI: 171687499 Blast Desc: protein product [Podospora anserina] gi|170943711|emb|CAP69363.1| protein product [Podospora anserina]
  misc_feature (1)..(370): NCBI GI: 261356079 Blast Desc: uridine nucleosidase [Verticillium albo-atrum VaMs.102]
  misc_feature (6)..(372): NCBI GI: 225556736 Blast Desc: uridine nucleosidase [Ajellomyces capsulatus G186AR]
  misc_feature (6)..(372): NCBI GI: 240281593 Blast Desc: uridine nucleosidase [Ajellomyces capsulatus H143]
  misc_feature (5)..(376): NCBI GI: 119187745 Blast Desc: CIMG_03920 [Coccidioides immitis RS]
  misc_feature (5)..(376): NCBI GI: 240108085 Blast Desc: Inosine-uridine preferring nucleoside hydrolase family protein [Coccidioides posadasii C735 delta SOWgp]
  misc_feature (3)..(369): SWISSPROT Homolog: EC 3.2.2.3 Uridine nucleosidase
  misc_feature: Useful for introducing or modulating the production of volatile compounds
MSAAVPLWLDCDPGHDDVFAILLGAYHPAIRLLGISTVHGNASLDKTTNNALSVLSAIGKHDNVKVYPGAPRALRRAPFPASEIHGESGLDGTTLLPDPATAAHALEKSVPASEAMASALWSCEPGTAWVVTTGAGTNVATMFTANPDLRAHVAGVSIMGGSVGGSFTSAVMSRNEPTRVGNYTPWAEFNILIDPEAAALLLEDPILAPKTTLIPLDLTHLVLATKEVQDLLLCGKMGEKDGKAKTTLRQMLVELLMFFAGTYADVFGIVEGPPLHDPLAVAAILAGTSHEIPFHDFDPKNPEVRERFEVKIVTEGTLEDAQERGAQTGRTVVRLLEPGKEGVRIPRGLDIEKFWKVIEECCRSADEVNAQRAAAN

SEQ ID NO: 16896 - DNA, 3808 bp, Muscodor strobelii
  misc_feature: SGI EST ID NO. CUFF.40062.0
  misc_feature: Variant of the nucleotide sequence at SEQ ID NO 16894
gatcgatctgccttgtttgcgtcagatttgacttaatgcgtgttctctcgcaaactactcaatcccgtgaatgaaacaaagctggaacggggaacccaaatccactggatcagtcgctagcacactctgagaaatcatcgcgatgtcggctgctgttcctctttggctggactgcgacccaggtcatgatgacgtcttcgccattcttctcggcgcataccaccccgccattcggttgctaggaatcagtactgttcacggcaacgcatctttagacaagaccacaaacaacgcgctatcggttctctcagcaattggaaagcatgacaacgtcaaagtgtatccaggcgccccaagagcgctccgtcgcgctcctttccccgcatccgagatccacggggaatccggactagacggcacgactctactcccggacccggcaaccgcagcccatgcactggaaaaatcagtcccggcaagcgaggccatggcctccgctctttggtcctgcgaaccgggaaccgcgtgggtagtaaccacaggcgcaggaacaaacgtcgcgacgatgttcacagcaaaccccgacctacgcgctcacgtcgcgggagtaagtatcatgggcggcagtgtagggggtagtttcaccagcgccgtgatgagccgtaacgagcccacgcgcgtagggaactacaccccatgggctgaatttaatattctcatcgacccggaggccgcggcactactacttgaagacccgattctggccccgaagacaacactcatacctctcgatctcacacatctcgtgctcgcgacgaaggaggtgcaggatttactgttgtgtgggaagatgggcgagaaagatggcaaggcgaagacgacgctgcggcagatgcttgttgagcttttgatgtttttcgctgggacttatgccgacgtcttcggcatcgtcgaaggacctccgctgcacgatccactagccgtagctgctatactagcgggcactagccatgagattccgtttcatgactttgaccccaagaacccagaggtgagggaacgcttcgaagtaaaaatagtgacagaaggcacgctagaagacgcgcaagagaggggagcgcagacgggacgcacggtggtaaggctgctggaacctggaaaggagggtgtgaggattcctcgaggcttggatattgagaagttttggaaggtcattgaggagtgttgccgcagtgctgatgaggttaatgcccaacgagctgcagcgaattgacgtgatagggggtttttgggtaaggctggtaagtttggatacggataatagactatttgcgcaagtatgggtgggaatctaaaatttattaagatcttaacatgcaagaggtactgagaacgatcctttattgacaactagaatagcggtaaaaaggtggttcgtgtttataaatctttgcatgattttgtgcagtagtatacgttgaatgagtaggtcgtgcaacaatctagatgagactatgaattgcaaataccctctaacctgcatgacttctatgactcgaactcgctatttaacatttcccagctgttatattgagcatttaggggacatgttcgtcgtccaatttagatgttgaccgaaggctgcgtagctctaagctactccggcttatcagtgtctcgcattgcaacctgcaaaggtagtgatataaagcttgttctgtctttggaagatgtcaagctcacttagatctccacacatctgcgtgaccccaaacctttgtgataataatctattgcatgtgacgccgaggctcctgtgagaccagctggcgtccttcctcgacgggatattgtatgggataggtcgatggaaggtggctctcaagccatcgcaaggctgtagcgatggatggatggatttatattcaagactgcgtttccgcggatttgatgcgcggtatagtggaattgggatggcacttaagactgaggactcaagtctctttaccgtacccattgatcaaccttccttggacggtttcgacccggggtcgtcagcggcaggcttggccttgagttcgccgtcggcatcaaagcccagagcctcgagctcgcgaacgagttcattgatttttataaccttggcaatctgctcaggtagcagagagccaccgccctctttcttctctcggagctcgcgcgcctgcttgagcttcttcttcaggttgcgcgctttcttctctttctcagcctcggggtccacctcctcaggcttcgtttcgggctcggcctgtttgtgggccgaagcagagtcctgcgactcgttggcggattttgccttttttctagcctcgcggcgtttggcgttcttgttgctagcggtcgaagaggggtcttccttctgctctttcaggccctcggcgccgggtataccgcctttgccgcggttgcgaaatgtctcggcggtgcggttcttgtagacctcgacatcctcgggaggtcggtatcccgggcgaatcctgatggctttcctagtggtgccatcggcgcgcatagactcgggaatctcgcgctcgccgctgttttcgtcggtgacgatgccggacttggacggttcggatggcattgtgcgatctcggagacaggatagggtaacgagggaaaacaaaaggcacagtagctactgaaggagctcctcctaggcttcactgaggaagacttggggaggagttggagaggatgcaagtagcgaataacgaatggttagcgaaacttattctttacagaacagcccttaataaagaatgccttagcagctaggaggggcagtggcagggccagaatgggatgaagtacaggggatgtagtgggatgtccaccgtacatttaagcacattaagcggtggggcggccagctcgactgcagccaatgggcttcgatctctttcaaagtcttgggaatgcctgaattgcactacttttacagcctcaccgaattgtctgccagtgcgccctgcttctatcgacgttttgacctatctgcagccctcctacacctcgtccgttgtcacgccatcactgccgacatcaatatcgaaagtctgtcacaatggccgccgtcagccccatttacaatgccttttttcgccgcaacttcaccatgctgggcgttgtcttcgcttccgctttcgcctttgagatgacgtacgacaccggcatgaacaagctctgggacaacctgaacaggggccgacaatggaaggacatccgcgccaagtacgtcgaggaggaataaatcagccatgtcgatgaactttatacgcgcgaaaaagaaaacaaacagcagcatgatcggacccaaaatgcgagtgggatgtgatggctgcagagtgtataaccgtgccattgtaccatatcaatagagcgaggatatagaacaggcccccaacgccaattatctgttccttatgtatttacacgcgacgacccgagttatcgacccgtcccatgcacagcttgtgtccattgatccgatgacagtctctcaactccatatttggattcttgagtgactgtgaccaaccatgtccatgtgtgcaaggcaacttctcttcctgactctgtatggtagcggatgcgcactcaggaaatagcgaaagatgcagtcagggtcatccggaagtattgtctacggtcttgcgatataagcacaatccattcgtcagtcattattcacgtagtcttggtcattcttcgaggtttttaatagggtcaatattatgccagtaagaagagtgttggaaagcga

SEQ ID NO: 16897 - DNA, 606 bp, Muscodor strobelii
  misc_feature: SGI cDNA ID NO. 565637
  misc_feature: Encodes the peptide sequence at SEQ ID NO 16898
atgccatccgaaccgtccaagtccggcatcgtcaccgacgaaaacagcggcgagcgcgagattcccgagtctatgcgcgccgatggcaccactaggaaagccatcaggattcgcccgggataccgacctcccgaggatgtcgaggtctacaagaaccgcaccgccgagacatttcgcaaccgcggcaaaggcggtatacccggcgccgagggcctgaaagagcagaaggaagacccctcttcgaccgctagcaacaagaacgccaaacgccgcgaggctagaaaaaaggcaaaatccgccaacgagtcgcaggactctgcttcggcccacaaacaggccgagcccgaaacgaagcctgaggaggtggaccccgaggctgagaaagagaagaaagcgcgcaacctgaagaagaagctcaagcaggcgcgcgagctccgagagaagaaagagggcggtggctctctgctacctgagcagattgccaaggttataaaaatcaatgaactcgttcgcgagctcgaggctctgggctttgatgccgacggcgaactcaaggccaagcctgccgctgacgaccccgggtcgaaaccgtccaaggaaggttga

SEQ ID NO: 16898 - protein, 201 aa, Muscodor strobelii
  misc_feature: SGI Peptide ID NO. 565637
  misc_feature (17)..(43): Pfam Id: PF09282 Pfam Desc: Mago binding
  misc_feature (1)..(190): NCBI GI: 256735092 Blast Desc: NECHADRAFT_98709 [Nectria haematococca mpVI 77-13-4]
  misc_feature (1)..(189): NCBI GI: 116182522 Blast Desc: CHGG_01889 [Chaetomium globosum CBS 148.51] gi|88186186|gb|EAQ93654.1| CHGG_01889 [Chaetomium globosum CBS 148.51]
  misc_feature (3)..(193): NCBI GI: 85117808 Blast Desc: NCU03232 [Neurospora crassa OR74A] gi|28927139|gb|EAA36096.1| conserved [Neurospora crassa OR74A]
  misc_feature (1)..(183): NCBI GI: 46108630 Blast Desc: FG01197.1 [Gibberella zeae PH-1]
  misc_feature (1)..(187): NCBI GI: 156034709 Blast Desc: SS1G_13289 [Sclerotinia sclerotiorum 1980] gi|154698693|gb|EDN98431.1| SS1G_13289 [Sclerotinia sclerotiorum 1980]
  misc_feature (1)..(192): NCBI GI: 258574705 Blast Desc: [Uncinocarpus reesii 1704] gi|237901800|gb|EEP76201.1| [Uncinocarpus reesii 1704]
  misc_feature (1)..(192): NCBI GI: 154311186 Blast Desc: BC1G_06711 [Botryotinia fuckeliana B05.10] gi|150851115|gb|EDN26308.1| BC1G_06711 [Botryotinia fuckeliana B05.10]
  misc_feature (6)..(182): NCBI GI: 159124294 Blast Desc: RNA binding protein Pym, [Aspergillus fumigatus A1163]
  misc_feature (6)..(182): NCBI GI: 70991767 Blast Desc: RNA binding protein Pym [Aspergillus fumigatus Af293] gi|66848365|gb|EAL88694.1| RNA binding protein Pym, [Aspergillus fumigatus Af293]
  misc_feature (2)..(185): NCBI GI: 145243254 Blast Desc: An11g01600 [Aspergillus niger] gi|134078835|emb|CAK45894.1| protein product [Aspergillus niger]
MPSEPSKSGIVTDENSGEREIPESMRADGTTRKAIRIRPGYRPPEDVEVYKNRTAETFRNRGKGGIPGAEGLKEQKEDPSSTASNKNAKRREARKKAKSANESQDSASAHKQAEPETKPEEVDPEAEKEKKARNLKKKLKQARELREKKEGGGSLLPEQIAKVIKINELVRELEALGFDADGELKAKPAADDPGSKPSKEG

SEQ ID NO: 16899 - DNA, 3555 bp, Muscodor strobelii
  misc_feature: SGI EST ID NO. CUFF.40062.1
  misc_feature: Variant of the nucleotide sequence at SEQ ID NO 16897
ctgacggcggcctggaggttgcgcgattagttagccggtacagcgcgagatgaggagggccaattgactgcggttgggcataccattgtgacagactttcgatattgatgtcggcagtgatggcgtgacaacggacgaggtgtaggagggctgcagataggtcaaaacgtcgatagaagcagggcgcactggcagacaattcggtgaggctgtaaaagtagtgcaattcaggcattcccaagactttgaaagagatcgaagcccattggctgcagtcgagctggccgccccaccgcttaatgtgcttaaatgtacggtggacatcccactacatcccctgtacttcatcccattctggccctgccactgcccctcctagctgctaaggcattctttattaagggctgttctgtaaagaataagtttcgctaaccattcgttattcgctacttgcatcctctccaactcctccccaagtcttcctcagtgaagcctaggaggagctccttcagtagctactgtgccttttgttttccctcgttaccctatcctgtctccgagatcgcacaatgccatccgaaccgtccaagtccggcatcgtcaccgacgaaaacagcggcgagcgcgagattcccgagtctatgcgcgccgatggcaccactaggaaagccatcaggattcgcccgggataccgacctcccgaggatgtcgaggtctacaagaaccgcaccgccgagacatttcgcaaccgcggcaaaggcggtatacccggcgccgagggcctgaaagagcagaaggaagacccctcttcgaccgctagcaacaagaacgccaaacgccgcgaggctagaaaaaaggcaaaatccgccaacgagtcgcaggactctgcttcggcccacaaacaggccgagcccgaaacgaagcctgaggaggtggaccccgaggctgagaaagagaagaaagcgcgcaacctgaagaagaagctcaagcaggcgcgcgagctccgagagaagaaagagggcggtggctctctgctacctgagcagattgccaaggttataaaaatcaatgaactcgttcgcgagctcgaggctctgggctttgatgccgacggcgaactcaaggccaagcctgccgctgacgaccccgggtcgaaaccgtccaaggaaggttgatcaatgggtacggtaaagagacttgagtcctcagtcttaagtgccatcccaattccactataccgcgcatcaaatccgcggaaacgcagtcttgaatataaatccatccatccatcgctacagccttgcgatggcttgagagccaccttccatcgacctatcccatacaatatcccgtcgaggaaggacgccagctggtctcacaggagcctcggcgtcacatgcaatagattattatcacaaaggtttggggtcacgcagatgtgtggagatctaagtgagcttgacatcttccaaagacagaacaagctttatatcactacctttgcaggttgcaatgcgagacactgataagccggagtagcttagagctacgcagccttcggtcaacatctaaattggacgacgaacatgtcccctaaatgctcaatataacagctgggaaatgttaaatagcgagttcgagtcatagaagtcatgcaggttagagggtatttgcaattcatagtctcatctagattgttgcacgacctactcattcaacgtatactactgcacaaaatcatgcaaagatttataaacacgaaccacctttttaccgctattctagttgtcaataaaggatcgttctcagtacctcttgcatgttaagatcttaataaattttagattcccacccatacttgcgcaaatagtctattatccgtatccaaacttaccagccttacccaaaaaccccctatcacgtcaattcgctgcagctcgttgggcattaacctcatcagcactgcggcaacactcctcaatgaccttccaaaacttctcaatatccaagcctcgaggaatcctcacaccctcctttccaggttccagcagccttaccaccgtgcgtcccgtctgcgctcccctctcttgcgcgtcttctagcgtgccttctgtcactatttttacttcgaagcgttccctcacctctgggttcttggggtcaaagtcatgaaacggaatctcatggctagtgcccgctagtatagcagctacggctagtggatcgtgcagcggaggtccttcgacgatgccgaagacgtcgctgggtaggtgcatgtcagtataagatatgtaacaaatggttgaacaaacgaggttgtaggaatgagtgacacccacgcataagtcccagcgaaaaacatcaaaagctcaacaagcatctgccgcagcgtcgtcttcgccttgccatctttctcgcccatcttcccacacaacagtaaatcctgcacctccttcgtcgcgagcacgagatgtgtgagatcgagaggtatgagtgttgtcttcggggccagaatcgggtcttcaagtagtagtgccgcggcctccgggtcgatgagaatattaaattcagcccatggggtgtagttccctacgcgcgtgggctcgttacggctcatcacggcgctggtgaaactaccccctacactgccgcccatgatacttactcccgcgacgtgagcgcgtaggtcggggtttgctgtgaacatcgtcgcgacgtttgttcctgcgcctgtggttactacccacgcggttcccggttcgcaggaccaaagagcggaggccatggcctcgcttgccgggactgatttttccagtgcatgggctgcggttgccgggtccgggagtagagtcgtgccgtctagtccggattccccgtggatctcggatgcggggaaaggagcgcgacggagcgctcttggggcgcctggatacactttgacgttgtcatgctttccaattgctgagagaaccgatagcgcgttgtttgtggtcttgtctaaagatgcgttgccgtgaacagtactgattcctagcaaccgaatggcggggtggtatgcgccgagaagaatggcgaagacgtcctaattagttctgttagatagttatagagacacaagtgtgtcaagattgtgaggatctccaaggttttcaccactaggtgacacttgatgacatagcatatgcattttcctcctatttaggcatctgtgttgcttataatgagaactgcagtggcccgttccgtttgattgcctggttctctcaatccgtttataggtcacagccgagcaatataagctatgagagatgagacgaaaccctcaagtctcagaaaacgcacggagtaatttgaatatgacgtacatcatgacctgggtcgcagtccagccaaagaggaacagcagccgacatcgcgatgatttctcagagtgtgctagcgactgatccagtggatttgggttccccgttccagctttgtttcattcacgggattgagtagtttgcgagagaacacgcattaagtcaaatctgacgcaaacaaggcagatcgatc

SEQ ID NO: 16900 - DNA, 6411 bp, Muscodor strobelii
  misc_feature: SGI cDNA ID NO. 565638
  misc_feature: Encodes the peptide sequence at SEQ ID NO 16901
atggacacgcacatgtctacccaagagcaacagctctgcgaatacctgcgcgatctgccccgccagcatggctaccgctacgacgatgccgcctaccgcgccctcttgcagaacctcttctggtccatggccggcggcaggcccgaatacatgcgtctgttcttcccggatggcttcgacagccacaagacctccctgaagctccgtgtcgcccagggcgccttggacggtgccgagtacaccgaggccgcacgcggcaaggcctgcggtcacatcttcagggccggcgaagctacctacggctgcaagacctgcagcacagatgacacatgctgcctgtgcagcaagtgcttcgactctactgatcatactggccacatggtgcgcatctccatatcgccggggaatagtggttgctgcgactgtggagatccggaagcttggaagatccccatgttctgcaccatacacagtgagcgtcatcacgaccgcgccaagggcaaggacaaggaggccgccgcgctatctgacgagcttatcgccaacatccgcatgaccgtctcgcgggtcttggacttcatctgcgatgtcatttcttgcgcacccgagcagctgagacaggccaagaccagagagtctatcgagcgggacgagaagatgtcccgcctagcttcaacctacaatggaggagatatcgattcgcccgaagagttcgccttgttgctctggaacgacgagaaacataccgtgagcgaggttcaggatcaagttgcccgagcctgtagcgtctctatcgcacacggctatcaggccgcactcgagactgactccataggaaggagtattctgaaatatgactctgatatagacacactccttaaatgcgccaccgtcctagaacacataaaaatcactgtcaccattcgctcttcacgcgacacattccgcgaagagatgtgtggcaccatgatcgaatggctcaacgacattgccggttgttctgtcggctccgaccacaatgttctcagaatgactgtctgtgaagaactcctcaagccctggcgtaagggaagccctgctagtcacgctattccgggcaaggatggcctcgaggatgaagagaaattagaaggctcgccttttgaaacctacgccagcgctatccttatccaacgtgctagagtcatcgcagaaggggatatcgagaactttgtagactctgatggtgacgatgaagatgaagatgacgatatggatgaggggaataggactccttcgagtggagacgaggacgaggatgatgatgctgatgccgacgacgacgaagaggacgacgatgtcatgatgctagacgcccgtcctgaaactaataccaacgatgtcaatactctcattgactgggtcggcccgcttgaggaggaagaagcaacgatagcaggctatccaccgccgccaccgccgcctcccgtccagagacgtacagctcgagatagagatctgactccctcagattccgatacggccgagcctctcattgcacctactgtgtatgcgaaagccaatttagagattccaaaaactcttggtctagccaagactgatgagtcaacaccacctaaaccagggcgatattgggttgagactccggccgcctacaccgagcgtgacaatttagatccttatgaggacgtattccagcgtgttcgtttggactggctcgtcttgttcgatctcagaatgtggaaaaaggtacgcaacgatttgcgttccctctatatatctaccgtagtcaccattcccgagttcaaacgcatcctgggtctacgcttcgccgcattgtataccactctcgcccagctatacctcataggcgatcgtgagcccgatcactccatcatcaatatctctctccagatgcttacaaccccgtctatcaccgccgaagttgtggaaaggggcaacttcctgactacgttaatggctatcttgtacaccttcctcactacgcggcaagttggctacccctttcaagtttcctccaatgctgtattgggatttgataccgggtctgtgaccaataggagaatgtatcacttttacgttgatctcaagtacttgctcgggtctcctcacgttcaagaacacatgcgtacagaagagcggtatctcttacagttccttgatctagtcaaactgcatcaaggaatatgtcccaatgtacgtgccgtgggagagcacgtggaatatgagaccgatagctggatcggcgcctccttgatgacaagagagatcaacaagctttgtcggcttttagcaggttctttccgatacttacctgaacaggactctcaatatctgtcgagagctattcgattaacagccaagctggtcatcactaattctattggagctgaacgtgcacgtttcactcagtccgaaattaaagacgagatccgttttaagacactacaggacttcgaatttactggtgagggcactaaattcagcgttgtaaaattcatcgtggaggagcagcccattagcttccaccacgcgttgcattccactctgtcatggttgatcgagtgtggaaagcatatgaatacccaacaacttaaaacaatactcagcttcacagctcaagaactcaaaatgaagccgcggtcgatgggtcgcaaagcattgcccaagaaggagcatactcccgaagactacttgatggctgcctttgacttcccccttcgggtgtgcacatggttagcacagatcaaggctggcatgtgggtgcgcaacggtattagtcttcgacatcaggccatgacatatcgcaacatgttgactagagacgttactcatgcgcgcgacatcttcctccttcagaccgccatggtagtctgtgaccccagccgtgtacttgcttctatcatcgatcgtgctgggatggagaaatgggtcaaaggcttatatgaaatcgcacaggatgagattcaacatctagatgtggtagaagatatcattcacctcttgatcgtattagcgagcgatcgcatatccctcatacccaccgcgggcgagcagcaaacacaactcatggcacttcaccgagacatcacacatatactgtgcttccgaccgatgtcttttaatgagatatctgccaagttgcccgagaaattccatgagcatgaagacttccatagtgtgcttgacgaggtcgccacctttaaggctcctgaaggtgtgtcggacgtgggtacattcgagttgaaaccacacttcattgaggatatcgacccatatgttgcgcattataataagaaccaaagagaagaatccgaaacggcttaccgcaagtggatggcgaagaagaccgggaagcctgtcgaagagatcgtatacgaacccaagctcagacccatcgagtctggaattttcacaggacttaccgacttcatgacaacggggatgtttggacaaatagtctattatgccttgttataccctcttgttgctgcgaggtacactcctaaagtgcccttcactagggttgaagcatttttgcaagttgtgctgcatttggtacttcttgcgatcgcggaagacaagcccaatgacggcaatctccccaatccgaaatcgtttgtgtttattgccttgactatacaagctcgcggcagtatgatgcaggacgctcccactgcgaggaccattgtctcacttctggacttactatctaccaaggaagagttcaaagcatgtcatccaaaaatcaacctgattttaaagagaatgagacaaaaatttcctcaacacttcgatacagcctacatgcgattggggatcccgctagatcgcatcgacactgcgtcgccggcaagcactcagaacatcgaagaggagcgtgaacgaaagaagaaggccgccatggatcgccaagcaaaagtaatggcacaatttcagcagcaacagaagagtttcctggaaatgcaaggcaatattgactggggtgaggaagagcttgaggacctcgaggatgctgcgccaatggaagaacagaaaaacttccggaaatatcccaagggtacatgtatcttgtgtcaagaagaggctgatgatggacgcttgtatggcacattcgcactcttcagcaagagcctgattctgcgtcagaccgatcttcaagatcctgattttgtcagagaagctgcgaacacgccagtgagcctcgatcgttccgccgaggatatccgaccttttggcctggcgcatgaaaaccgcatgatggttgaaaaagtcaatgcggccggtgagacgttcctagctgagcgacaaggcattgggaagggatttccggcccagctttgccgggacggcacggtgtctgtcagctgcggccatattatgcatttcagttgcttcgaaacatacatggatgccaccgtacgtagacatggccatcaaatcgcccgtcatcatccagaatcattggaacgacttgagtttgtatgtcctttgtgcaaagcccttggcaatgcattcttacccattacgtgggatggcaaggaagaatcatatcccggcatacttcagactagcacggacttcaactccttcgtcgatcaacacgcaagtgaggtctacgagacaggagggtatagctcggagccacagtcaggcatgatatttgccaactatctccgtacgaggatgccagatacgttctcttctgaaccgccgagagatacgacatgggagactgtaacttcccattcatcagcctcgactactccttacagtgagacatttccccctataatcacgcctggtacaagcgtccgttcgcgttccccgtctgaggcacgcacagccagctcagaattgctcctcgtttatcaaaggctccgagacactctccgaaagaataaacttattaaaagtgatgagaaggaagatctatgtggcagccaggaactcgcgcggtcggtgggctactccatttctgccgcagaaatacaacaacgcggtctcgatacggaatatggaatgactcttattgaaaagataccggaacagattctagtacaacttcggatactgtccgagaccgtgtcgtcgtacatctcagttggcgggctaaagcgtggcggtgacaaccaaatccaacgggagttcagtgcgagcaacgaacgacagcattatcaactttttgttccaaaaatgaaaggttcggaatccgactatcaacacgcgccacttttcgacgaagataccttccttttcctatgcgacgccatgtttggcttgtccgtggcccagggtatagaccccatgcatcttgttcgagtttgctatctcgcggagatcgtgagagttgcccatttcatctcgaggaacataaccataaccaaatggctagagtacatgggccaccgcaataccgaagaccccgtgatgaacaattttgcacagttctttcaacatatcatcatgaggggcatggatgtgacttccgagctgccgggcgcgactaacaatctcccaaatgctgcatttgaccagccggccttggatggcctagcaaacctccattcctttgtcaagaaatatgcacttacttttctccggaaagtagtcatacttctccacgtccatcatggagtggacttcggcggtcacatttccagtgttcctgaagcggatgaacttactcgcctcacacatgccttgcgacttccatcttttgacgagatgtgcactgtcctgacacctctatgcgagcaacaaggctggccgaagtacatggccaacgttgttgatggctggattcgacatcaaatgatgtatcgcaaatcggacacgaccgggctagaagcagagcttccttacccggtgtcgcatctgatcagtcatccgggtattcctgagctagtaggactgcccaagaattttgacacacttatagaagaatgtgcgaagcgaagatgtcctaagacaggcaaagacctagccgatcctatcgtctgccttatgtgcggtgacattttctgcgggcaaaccatgtgctgcatcatggactacatcgagccgggcccgaacaagccagttcagcggatagggggcgcacagcagcatatgcgattcaagtgtcacggtaacatcggactcttcatcacgatccgcaagtgcgccatcttctatttgcatcgggtgtcaggcagctttagcaacgcgccttacatagacaaatacggcgaggtcgatgtcgggctcagacatggacggcaactgtacttgaaccagaaaagatatgattccatgatcaggaatctgtggctcagccatgggatcccgagttttatctcgaggaagcttgaggcagatataaataacgggggatgggagacaatttga

SEQ ID NO: 16901 - protein, 2136 aa, Muscodor strobelii
  misc_feature: SGI Peptide ID NO. 565638
  misc_feature (87)..(158): Pfam Id: PF02207 Pfam Desc: zinc finger in N-recognin (UBR box)
  misc_feature (1)..(2136): NCBI GI: 116182518 Blast Desc: CHGG_01887 [Chaetomium globosum CBS 148.51] gi|88186184|gb|EAQ93652.1| CHGG_01887 [Chaetomium globosum CBS 148.51]
  misc_feature (1)..(2136): NCBI GI: 171694980 Blast Desc: protein product [Podospora anserina] gi|170947732|emb|CAP59895.1| protein product [Podospora anserina]
  misc_feature (1)..(2136): NCBI GI: 256734372 Blast Desc: [Nectria haematococca mpVI 77-13-4]
  misc_feature (6)..(2136): NCBI GI: 154311182 Blast Desc: BC1G_06709 [Botryotinia fuckeliana B05.10] gi|150851113|gb|EDN26306.1| BC1G_06709 [Botryotinia fuckeliana B05.10]
  misc_feature (500)..(2136): NCBI GI: 145615671 Blast Desc: MGG_13171 [Magnaporthe grisea 70-15] gi|145022456|gb|EDK06476.1| MGG_13171 [Magnaporthe grisea 70-15]
  misc_feature (471)..(2108): NCBI GI: 46108624 Blast Desc: FG01194.1 [Gibberella zeae PH-1]
  misc_feature (4)..(2136): NCBI GI: 189192148 Blast Desc: RING finger domain containing protein [Pyrenophora tritici-repentis Pt-1C-BFP] gi|187974019|gb|EDU41518.1| RING finger domain containing protein [Pyrenophora tritici-repentis
  misc_feature (9)..(2136): NCBI GI: 121699259 Blast Desc: ubiquitin-protein ligase E3 component (UBR1), [Aspergillus clavatus NRRL 1] gi|119396103|gb|EAW06535.1| ubiquitin-protein ligase E3 component (UBR1), [Aspergillus NRRL
  misc_feature (9)..(2136): NCBI GI: 169769080 Blast Desc: [Aspergillus oryzae RIB40] gi|83766868|dbj|BAE57008.1| protein product [Aspergillus oryzae]
  misc_feature (9)..(2136): NCBI GI: 238501512 Blast Desc: ubiquitin-protein ligase E3 component (UBR1), [Aspergillus flavus NRRL3357] gi|220692227|gb|EED48574.1| ubiquitin-protein ligase E3 component (UBR1), [Aspergillus flavus
MDTHMSTQEQQLCEYLRDLPRQHGYRYDDAAYRALLQNLFWSMAGGRPEYMRLFFPDGFDSHKTSLKLRVAQGALDGAEYTEAARGKACGHIFRAGEATYGCKTCSTDDTCCLCSKCFDSTDHTGHMVRISISPGNSGCCDCGDPEAWKIPMFCTIHSERHHDRAKGKDKEAAALSDELIANIRMTVSRVLDFICDVISCAPEQLRQAKTRESIERDEKMSRLASTYNGGDIDSPEEFALLLWNDEKHTVSEVQDQVARACSVSIAHGYQAALETDSIGRSILKYDSDIDTLLKCATVLEHIKITVTIRSSRDTFREEMCGTMIEWLNDIAGCSVGSDHNVLRMTVCEELLKPWRKGSPASHAIPGKDGLEDEEKLEGSPFETYASAILIQRARVIAEGDIENFVDSDGDDEDEDDDMDEGNRTPSSGDEDEDDDADADDDEEDDDVMMLDARPETNTNDVNTLIDWVGPLEEEEATIAGYPPPPPPPPVQRRTARDRDLTPSDSDTAEPLIAPTVYAKANLEIPKTLGLAKTDESTPPKPGRYWVETPAAYTERDNLDPYEDVFQRVRLDWLVLFDLRMWKKVRNDLRSLYISTVVTIPEFKRILGLRFAALYTTLAQLYLIGDREPDHSIINISLQMLTTPSITAEVVERGNFLTTLMAILYTFLTTRQVGYPFQVSSNAVLGFDTGSVTNRRMYHFYVDLKYLLGSPHVQEHMRTEERYLLQFLDLVKLHQGICPNVRAVGEHVEYETDSWIGASLMTREINKLCRLLAGSFRYLPEQDSQYLSRAIRLTAKLVITNSIGAERARFTQSEIKDEIRFKTLQDFEFTGEGTKFSVVKFIVEEQPISFHHALHSTLSWLIECGKHMNTQQLKTILSFTAQELKMKPRSMGRKALPKKEHTPEDYLMAAFDFPLRVCTWLAQIKAGMWVRNGISLRHQAMTYRNMLTRDVTHARDIFLLQTAMVVCDPSRVLASIIDRAGMEKWVKGLYEIAQDEIQHLDVVEDIIHLLIVLASDRISLIPTAGEQQTQLMALHRDITHILCFRPMSFNEISAKLPEKFHEHEDFHSVLDEVATFKAPEGVSDVGTFELKPHFIEDIDPYVAHYNKNQREESETAYRKWMAKKTGKPVEEIVYEPKLRPIESGIFTGLTDFMTTGMFGQIVYYALLYPLVAARYTPKVPFTRVEAFLQVVLHLVLLAIAEDKPNDGNLPNPKSFVFIALTIQARGSMMQDAPTARTIVSLLDLLSTKEEFKACHPKINLILKRMRQKFPQHFDTAYMRLGIPLDRIDTASPASTQNIEEERERKKKAAMDRQAKVMAQFQQQQKSFLEMQGNIDWGEEELEDLEDAAPMEEQKNFRKYPKGTCILCQEEADDGRLYGTFALFSKSLILRQTDLQDPDFVREAANTPVSLDRSAEDIRPFGLAHENRMMVEKVNAAGETFLAERQGIGKGFPAQLCRDGTVSVSCGHIMHFSCFETYMDATVRRHGHQIARHHPESLERLEFVCPLCKALGNAFLPITWDGKEESYPGILQTSTDFNSFVDQHASEVYETGGYSSEPQSGMIFANYLRTRMPDTFSSEPPRDTTWETVTSHSSASTTPYSETFPPIITPGTSVRSRSPSEARTASSELLLVYQRLRDTLRKNKLIKSDEKEDLCGSQELARSVGYSISAAEIQQRGLDTEYGMTLIEKIPEQILVQLRILSETVSSYISVGGLKRGGDNQIQREFSASNERQHYQLFVPKMKGSESDYQHAPLFDEDTFLFLCDAMFGLSVAQGIDPMHLVRVCYLAEIVRVAHFISRNITITKWLEYMGHRNTEDPVMNNFAQFFQHIIMRGMDVTSELPGATNNLPNAAFDQPALDGLANLHSFVKKYALTFLRKVVILLHVHHGVDFGGHISSVPEADELTRLTHALRLPSFDEMCTVLTPLCEQQGWPKYMANVVDGWIRHQMMYRKSDTTGLEAELPYPVSHLISHPGIPELVGLPKNFDTLIEECAKRRCPKTGKDLADPIVCLMCGDIFCGQTMCCIMDYIEPGPNKPVQRIGGAQQHMRFKCHGNIGLFITIRKCAIFYLHRVSGSFSNAPYIDKYGEVDVGLRHGRQLYLNQKRYDSMIRNLWLSHGIPSFISRKLEADINNGGWETI

SEQ ID NO: 16902 - DNA, 7250 bp, Muscodor strobelii
  misc_feature: SGI EST ID NO. CUFF.40004.1
  misc_feature: Variant of the nucleotide sequence at SEQ ID NO 16900
caaaggtacatgtacgtatgaccgtatcgcttgctccgtataacgcttcgagttcctgcccgaaactgaaaccagtacattctggctcagcaatacgattgataagtagaagcttgaaacaaggagagactaccatcaacttgtaccagactctcgaaatcaccgaacatctaaaaatccgacgatacaacgccaacatttgaagttcgccttactttgaaggcaagctgcattgaagaccgccacttgacggagatacaccccctgccgcgaccaccccatcgcccctccaaagaagacattccagcttcaacgtctacacacttacaagagtgccgcttccccgtccaagtctatgggtggcacatataaaatcgaaataagcatgatacaataaactcgaccctcatggacacgcacatgtctacccaagagcaacagctctgcgaatacctgcgcgatctgccccgccagcatggctaccgctacgacgatgccgcctaccgcgccctcttgcagaacctcttctggtccatggccggcggcaggcccgaatacatgcgtctgttcttcccggatggcttcgacagccacaagacctccctgaagctccgtgtcgcccagggcgccttggacggtgccgagtacaccgaggccgcacgcggcaaggcctgcggtcacatcttcagggccggcgaagctacctacggctgcaagacctgcagcacagatgacacatgctgcctgtgcagcaagtgcttcgactctactgatcatactggccacatggtgcgcatctccatatcgccggggaatagtggttgctgcgactgtggagatccggaagcttggaagatccccatgttctgcaccatacacagtgagcgtcatcacgaccgcgccaagggcaaggacaaggaggccgccgcgctatctgacgagcttatcgccaacatccgcatgaccgtctcgcgggtcttggacttcatctgcgatgtcatttcttgcgcacccgagcagctgagacaggccaagaccagagagtctatcgagcgggacgagaagatgtcccgcctagcttcaacctacaatggaggagatatcgattcgcccgaagagttcgccttgttgctctggaacgacgagaaacataccgtgagcgaggttcaggatcaagttgcccgagcctgtagcgtctctatcgcacacggctatcaggccgcactcgagactgactccataggaaggagtattctgaaatatgactctgatatagacacactccttaaatgcgccaccgtcctagaacacataaaaatcactgtcaccattcgctcttcacgcgacacattccgcgaagagatgtgtggcaccatgatcgaatggctcaacgacattgccggttgttctgtcggctccgaccacaatgttctcagaatgactgtctgtgaagaactcctcaagccctggcgtaagggaagccctgctagtcacgctattccgggcaaggatggcctcgaggatgaagagaaattagaaggctcgccttttgaaacctacgccagcgctatccttatccaacgtgctagagtcatcgcagaaggggatatcgagaactttgtagactctgatggtgacgatgaagatgaagatgacgatatggatgaggggaataggactccttcgagtggagacgaggacgaggatgatgatgctgatgccgacgacgacgaagaggacgacgatgtcatgatgctagacgcccgtcctgaaactaataccaacgatgtcaatactctcattgactgggtcggcccgcttgaggaggaagaagcaacgatagcaggctatccaccgccgccaccgccgcctcccgtccagagacgtacagctcgagatagagatctgactccctcagattccgatacggccgagcctctcattgcacctactgtgtatgcgaaagccaatttagagattccaaaaactcttggtctagccaagactgatgagtcaacaccacctaaaccagggcgatattgggttgagactccggccgcctacaccgagcgtgacaatttagatccttatgaggacgtattccagcgtgttcgtttggactggctcgtcttgttcgatctcagaatgtggaaaaaggtacgcaacgatttgcgttccctctatatatctaccgtagtcaccattcccgagttcaaacgcatcctgggtctacgcttcgccgcattgtataccactctcgcccagctatacctcataggcgatcgtgagcccgatcactccatcatcaatatctctctccagatgcttacaaccccgtctatcaccgccgaagttgtggaaaggggcaacttcctgactacgttaatggctatcttgtacaccttcctcactacgcggcaagttggctacccctttcaagtttcctccaatgctgtattgggatttgataccgggtctgtgaccaataggagaatgtatcacttttacgttgatctcaagtacttgctcgggtctcctcacgttcaagaacacatgcgtacagaagagcggtatctcttacagttccttgatctagtcaaactgcatcaaggaatatgtcccaatgtacgtgccgtgggagagcacgtggaatatgagaccgatagctggatcggcgcctccttgatgacaagagagatcaacaagctttgtcggcttttagcaggttctttccgatacttacctgaacaggactctcaatatctgtcgagagctattcgattaacagccaagctggtcatcactaattctattggagctgaacgtgcacgtttcactcagtccgaaattaaagacgagatccgttttaagacactacaggacttcgaatttactggtgagggcactaaattcagcgttgtaaaattcatcgtggaggagcagcccattagcttccaccacgcgttgcattccactctgtcatggttgatcgagtgtggaaagcatatgaatacccaacaacttaaaacaatactcagcttcacagctcaagaactcaaaatgaagccgcggtcgatgggtcgcaaagcattgcccaagaaggagcatactcccgaagactacttgatggctgcctttgacttcccccttcgggtgtgcacatggttagcacagatcaaggctggcatgtgggtgcgcaacggtattagtcttcgacatcaggccatgacatatcgcaacatgttgactagagacgttactcatgcgcgcgacatcttcctccttcagaccgccatggtagtctgtgaccccagccgtgtacttgcttctatcatcgatcgtgctgggatggagaaatgggtcaaaggcttatatgaaatcgcacaggatgagattcaacatctagatgtggtagaagatatcattcacctcttgatcgtattagcgagcgatcgcatatccctcatacccaccgcgggcgagcagcaaacacaactcatggcacttcaccgagacatcacacatatactgtgcttccgaccgatgtcttttaatgagatatctgccaagttgcccgagaaattccatgagcatgaagacttccatagtgtgcttgacgaggtcgccacctttaaggctcctgaaggtgtgtcggacgtgggtacattcgagttgaaaccacacttcattgaggatatcgacccatatgttgcgcattataataagaaccaaagagaagaatccgaaacggcttaccgcaagtggatggcgaagaagaccgggaagcctgtcgaagagatcgtatacgaacccaagctcagacccatcgagtctggaattttcacaggacttaccgacttcatgacaacggggatgtttggacaaatagtctattatgccttgttataccctcttgttgctgcgaggtacactcctaaagtgcccttcactagggttgaagcatttttgcaagttgtgctgcatttggtacttcttgcgatcgcggaagacaagcccaatgacggcaatctccccaatccgaaatcgtttgtgtttattgccttgactatacaagctcgcggcagtatgatgcaggacgctcccactgcgaggaccattgtctcacttctggacttactatctaccaaggaagagttcaaagcatgtcatccaaaaatcaacctgattttaaagagaatgagacaaaaatttcctcaacacttcgatacagcctacatgcgattggggatcccgctagatcgcatcgacactgcgtcgccggcaagcactcagaacatcgaagaggagcgtgaacgaaagaagaaggccgccatggatcgccaagcaaaagtaatggcacaatttcagcagcaacagaagagtttcctggaaatgcaaggcaatattgactggggtgaggaagagcttgaggacctcgaggatgctgcgccaatggaagaacagaaaaacttccggaaatatcccaagggtacatgtatcttgtgtcaagaagaggctgatgatggacgcttgtatggcacattcgcactcttcagcaagagcctgattctgcgtcagaccgatcttcaagatcctgattttgtcagagaagctgcgaacacgccagtgagcctcgatcgttccgccgaggatatccgaccttttggcctggcgcatgaaaaccgcatgatggttgaaaaagtcaatgcggccggtgagacgttcctagctgagcgacaaggcattgggaagggatttccggcccagctttgccgggacggcacggtgtctgtcagctgcggccatattatgcatttcagttgcttcgaaacatacatggatgccaccgtacgtagacatggccatcaaatcgcccgtcatcatccagaatcattggaacgacttgagtttgtatgtcctttgtgcaaagcccttggcaatgcattcttacccattacgtgggatggcaaggaagaatcatatcccggcatacttcagactagcacggacttcaactccttcgtcgatcaacacgcaagtgaggtctacgagacaggagggtatagctcggagccacagtcaggcatgatatttgccaactatctccgtacgaggatgccagatacgttctcttctgaaccgccgagagatacgacatgggagactgtaacttcccattcatcagcctcgactactccttacagtgagacatttccccctataatcacgcctggtacaagcgtccgttcgcgttccccgtctgaggcacgcacagccagctcagaattgctcctcgtttatcaaaggctccgagacactctccgaaagaataaacttattaaaagtgatgagaaggaagatctatgtggcagccaggaactcgcgcggtcggtgggctactccatttctgccgcagaaatacaacaacgcggtctcgatacggaatatggaatgactcttattgaaaagataccggaacagattctagtacaacttcggatactgtccgagaccgtgtcgtcgtacatctcagttggcgggctaaagcgtggcggtgacaaccaaatccaacgggagttcagtgcgagcaacgaacgacagcattatcaactttttgttccaaaaatgaaaggttcggaatccgactatcaacacgcgccacttttcgacgaagataccttccttttcctatgcgacgccatgtttggcttgtccgtggcccagggtatagaccccatgcatcttgttcgagtttgctatctcgcggagatcgtgagagttgcccatttcatctcgaggaacataaccataaccaaatggctagagtacatgggccaccgcaataccgaagaccccgtgatgaacaattttgcacagttctttcaacatatcatcatgaggggcatggatgtgacttccgagctgccgggcgcgactaacaatctcccaaatgctgcatttgaccagccggccttggatggcctagcaaacctccattcctttgtcaagaaatatgcacttacttttctccggaaagtagtcatacttctccacgtccatcatggagtggacttcggcggtcacatttccagtgttcctgaagcggatgaacttactcgcctcacacatgccttgcgacttccatcttttgacgagatgtgcactgtcctgacacctctatgcgagcaacaaggctggccgaagtacatggccaacgttgttgatggctggattcgacatcaaatgatgtatcgcaaatcggacacgaccgggctagaagcagagcttccttacccggtgtcgcatctgatcagtcatccgggtattcctgagctagtaggactgcccaagaattttgacacacttatagaagaatgtgcgaagcgaagatgtcctaagacaggcaaagacctagccgatcctatcgtctgccttatgtgcggtgacattttctgcgggcaaaccatgtgctgcatcatggactacatcgagccgggcccgaacaagccagttcagcggatagggggcgcacagcagcatatgcgattcaagtgtcacggtaacatcggactcttcatcacgatccgcaagtgcgccatcttctatttgcatcgggtgtcaggcagctttagcaacgcgccttacatagacaaatacggcgaggtcgatgtcgggctcagacatggacggcaactgtacttgaaccagaaaagatatgattccatgatcaggaatctgtggctcagccatgggatcccgagttttatctcgaggaagcttgaggcagatataaataacgggggatgggagacaatttgaatggttatacgtagcttgaaacgacttgaagcatttatataggcgttgtggtgtcgcgtatatcatgagggggacgaaggcgttacaattatcgaaggagaaagtggaagtgaagggagccatgcaaggcaggacataacttagatatattgcaaaccaaggcgcttctgatgtttcgctcgtcacgatcctggtaaattgactatgattcctatcaattcatacggtgcccctcccacttcaacggtccattgttaatggcgctgaaatgtaagtcctgaacattcacgcatacacaggaagcatcatctcaactaaaagtacacatttgtagatacattttcattctaagtataagtgttattttgaactaactatgttatggcatatatatcatgcgtattggtgtgcctgagcctaggacactcgag

SEQ ID NO: 16903 - DNA, 1212 bp, Muscodor strobelii
  misc_feature: SGI cDNA ID NO. 565639
  misc_feature: Encodes the peptide sequence at SEQ ID NO 16904
atgagcctcagagcgatcctaggaggagggcgggttaagaagcggtcctcgtcctccaaagcaaagcgaacaccatcgtccacaagcacaacctcagcctcgccatcgccctccccattaccgaagcgcaaacccgccactaaaccgaaacttaaatctacgagtagtagagatgacgatgattacttcgacgacaaactagacgactgtgggctcgtcagagccttagccaccgacctgaaactccgcgacacaccgcaagcgattcggtatataaggtcacgcatgttcacgcctgttccggaatcaggcggtatgagcagtacgaggatcgcacaggtgttgaattacaggaggaatttaccgccgatcgtcagcgtggcgcatatacaggcactgctttcgagccctagcacggtcgagagggaaattgcggagcttgtgaggatgggaacgctgagacggattacggttccgaagcgggggtggatgggggaggttgtctgtcttgatgacgagtataagggtttattggagggagataaggggttgagcgagacgacgaagaaagccatgctgaggtttcttgaggaaggcgaagcggggaagttgggggaaaaggatgttggtgagttattgagggctggttatatcacgcagcatcatactggggggatggtcacttatggggatatgagcgggactatgaatacctatgcccggccgcaagacaagtcgagcttgacgagcctggaaacagtgagcagacatgctacaggatcgctaggcacagtcggaggccagggcgccgtgcataatgccggaggcagtggtggaaggtccggttctggaacagtcacggcatctgggacagagtatcgagttgcggcacctggggctgggagttatctcaagcttatttctggagccgttgagcatttggtgagcttgcttgggaaatcaaagtttaaagaagctcccgaaacggtgctaaaagagcgttgggacgggggcattgcgagtggggaggaaggacatgctgctgcgaagagggcgcgcggggagttttatggcgtactgccggctcagacgaggaaatggagacagttttatgggctgagctttgagtgggtgttgcaggaagctgttggggcgggcttggtagaggtttttcaaaccgggagcgttgggcggggtgtcagggcgctttaa

SEQ ID NO: 16904 - protein, 403 aa, Muscodor strobelii
  misc_feature: SGI Peptide ID NO. 565639
  misc_feature (18)..(403): NCBI GI: 156058137 Blast Desc: SS1G_04800 [Sclerotinia sclerotiorum 1980] gi|154702585|gb|EDO02324.1| SS1G_04800 [Sclerotinia sclerotiorum 1980]
  misc_feature (40)..(403): NCBI GI: 154299069 Blast Desc: BC1G_11847 [Botryotinia fuckeliana B05.10] gi|150857550|gb|EDN32742.1| BC1G_11847 [Botryotinia fuckeliana B05.10]
  misc_feature (1)..(403): NCBI GI: 145614696 Blast Desc: MGG_04367 [Magnaporthe grisea 70-15] gi|145021595|gb|EDK05724.1| MGG_04367 [Magnaporthe grisea 70-15]
  misc_feature (46)..(403): NCBI GI: 261356298 Blast Desc: conserved [Verticillium albo-atrum VaMs.102]
  misc_feature (2)..(403): NCBI GI: 256734460 Blast Desc: [Nectria haematococca mpVI 77-13-4]
  misc_feature (12)..(403): NCBI GI: 67523465 Blast Desc: AN2188.2 [Aspergillus nidulans FGSC A4] gi|40745076|gb|EAA64232.1| AN2188.2 [Aspergillus nidulans FGSC A4] gi|259487572|tpe|CBF86348.1| TPA: conserved [Aspergillus FGSC
  misc_feature (18)..(403): NCBI GI: 240107791 Blast Desc: CPC735_044140 [Coccidioides posadasii C735 delta SOWgp]
  misc_feature (18)..(403): NCBI GI: 119177018 Blast Desc: CIMG_07508 [Coccidioides immitis RS]
  misc_feature (2)..(400): NCBI GI: 46108246 Blast Desc: FG01005.1 [Gibberella zeae PH-1]
  misc_feature (11)..(401): NCBI GI: 261190694 Blast Desc: conserved [Ajellomyces dermatitidis SLH14081] gi|239591179|gb|EEQ73760.1| conserved [Ajellomyces dermatitidis SLH14081] gi|239614865|gb|EEQ91852.1| conserved [Ajellomyces
MSLRAILGGGRVKKRSSSSKAKRTPSSTSTTSASPSPSPLPKRKPATKPKLKSTSSRDDDDYFDDKLDDCGLVRALATDLKLRDTPQAIRYIRSRMFTPVPESGGMSSTRIAQVLNYRRNLPPIVSVAHIQALLSSPSTVEREIAELVRMGTLRRITVPKRGWMGEVVCLDDEYKGLLEGDKGLSETTKKAMLRFLEEGEAGKLGEKDVGELLRAGYITQHHTGGMVTYGDMSGTMNTYARPQDKSSLTSLETVSRHATGSLGTVGGQGAVHNAGGSGGRSGSGTVTASGTEYRVAAPGAGSYLKLISGAVEHLVSLLGKSKFKEAPETVLKERWDGGIASGEEGHAAAKRARGEFYGVLPAQTRKWRQFYGLSFEWVLQEAVGAGLVEVFQTGSVGRGVRAL

SEQ ID NO: 16905 - DNA, 1618 bp, Muscodor strobelii
  misc_feature: SGI EST ID NO. CUFF.39949.0
  misc_feature: Variant of the nucleotide sequence at SEQ ID NO 16903
ccggtcatcgccacccttaaacatcccacccagagcccgcctgtcagttgatcagcatcttaactagaccttgactctccactaccaagcttacttgctacaccaacatatctagacatagacatgtcccaatcccagagctcaaaccatgagcctcagagcgatcctaggaggagggcgggttaagaagcggtcctcgtcctccaaagcaaagcgaacaccatcgtccacaagcacaacctcagcctcgccatcgccctccccattaccgaagcgcaaacccgccactaaaccgaaacttaaatctacgagtagtagagatgacgatgattacttcgacgacaaactagacgactgtgggctcgtcagagccttagccaccgacctgaaactccgcgacacaccgcaagcgattcggtatataaggtcacgcatgttcacgcctgttccggaatcaggcggtatgagcagtacgaggatcgcacaggtgttgaattacaggaggaatttaccgccgatcgtcagcgtggcgcatatacaggcactgctttcgagccctagcacggtcgagagggaaattgcggagcttgtgaggatgggaacgctgagacggattacggttccgaagcgggggtggatgggggaggttgtctgtcttgatgacgagtataagggtttattggagggagataaggggttgagcgagacgacgaagaaagccatgctgaggtttcttgaggaaggcgaagcggggaagttgggggaaaaggatgttggtgagttattgagggctggttatatcacgcagcatcatactggggggatggtcacttatggggatatgagcgggactatgaatacctatgcccggccgcaagacaagtcgagcttgacgagcctggaaacagtgagcagacatgctacaggatcgctaggcacagtcggaggccagggcgccgtgcataatgccggaggcagtggtggaaggtccggttctggaacagtcacggcatctgggacagagtatcgagttgcggcacctggggctgggagttatctcaagcttatttctggagccgttgagcatttggtgagcttgcttgggaaatcaaagtttaaagaagctcccgaaacggtgctaaaagagcgttgggacgggggcattgcgagtggggaggaaggacatgctgctgcgaagagggcgcgcggggagttttatggcgtactgccggctcagacgaggaaatggagacagttttatgggctgagctttgagtgggtgttgcaggaagctgttggggcgggcttggtagaggtttttcaaaccgggagcgttgggcggggtgtcagggcgctttaatgggcttggtgttttgtgatatatcacccctaggccaccgctacgatacagctgagtttagaaaaacgccggattatggaaatctaggggcagacctgttattatgcgatcttatgttattgtgcgggatggcataccatcattgattatcaatgatattatgttgacttactaaatatcatgcccatagcatagccaaaagatgtataaacatcacgtctatcaagcatactcattgctcagtaaccctgaccctat

SEQ ID NO: 16906 - DNA, 2859 bp, Muscodor strobelii
  misc_feature: SGI cDNA ID NO. 565640
  misc_feature: Encodes the peptide sequence at SEQ ID NO 16907
atggctaccacgttgccacgactacgaggatctaatgatcctccatcaggttcttccggtgccctgccgataccaaaaagccggaagagcactggtgggatcacgagtcccagcagattgggtacgcccagaagtggattgagaactccgtccgctgctactatacatagcggcccccctttatcacctgcgcctactacggcgcttccgattccgaaaggtgtcggggtgaatgctgcggggaaatctattcgaaaaacggtcagtatcaattcgttcccacagccaccgagaactccaagtgtgcctccaagtccgttgtctggatccattacaccgtctagaaaagcccgtacgccccaaacgaaacttagttttcagtccggcgggacacccagtctcctcaatggaagtggagaaggcaaatcgcttttgggcggtgttactgcaagacattcagacggcttgataagcgttgcctcgccaccacaaagccgtagctcttcggcacaagactcctactcaacatcagcaacgacgtacgatgatctcgctgagacgagtgccacatctacaaaggatagacgggcttcgaagggcatggatggcaaaggcaacgttattgtaagtgtacgtgtgagaccagatgctggaggcagcaacggcaactcggaaggcgagtggatggtcgacgggcggaagtctttagtggcatatcgaggaaaagagggaggggactactattatgataacgttttcacgacccacgacaataatagccgtgtgtacgaccatagtgcgaaacgcttggttcgtcgggtcatggaaggttaccatggaacagtatttgcgtatggtatgacagggacaggcaagacgttttcgatgcaaggcaccgcttcatctccaggagtaataccacttgctattactgacatcttctcgtatattcgcgagacgccgtccagagagtttctgcttcgtgtgagttatcttgagatatacaatgagaggatacacgaccttctgagtatgcccacgggaaatgctgctggagcagcaggcacccaggaagaaatcaaacttcgagaagacagcaacaggggagtctatgcaactcccctgaaagaagagatcgtgcaaagccctacccagctactgcgagtcattgctcgtggtgatcaagctcgtaggactgcaagcacgcaattcaatgctaggagttctcgcagtcatgctgttgtccaaattgtcgtcgaaagcagagaaagaatgccaggtggatccggagagaacaagcgctcagccctaccaccaggcggggttcgtgtctctacgctgagtttaatcgatctagccggttccgaaaaagccgctgaaacaaaggagcgccgacaggaaggctcgcatatcaacaaaagtttgctgacgcttggcaccgtcatttccaagctctctgaacataaagagaaagaaggaaagggtgcagataaggatagcaccaagcacttgccttacagagacagtaagctcaccaggctgttgcaaggtgcactgtcggggaactcgctagtcagtattctctgcacaattcagactgggtcggcaggcagtgcagcatcagcaaatactcatgctaccgagaccatcaacacgctgaaattcgcatcgagagccaagaatagcattgtgagccatgcaaagcgatccgaagaagcattgggtgctggtggagaaggaggcgcaagggtccttcttgaaaggtatcgcatggagattcttgagctacgacaacagctggatagtcaagcgaaggccaacaacgccaagagcgaagaagaagagactgctagggacgttgaagaagagttggctcgggagaaagaagcggaagcgaggcatgaagaacagattctggaaatgcaacttgcgcgcacagctttgaaagagcgtatcgaacatttaaaccgcttaattttgagctccaagtctagcggagtcaactctaatggcacttatagctctcttgggaaccatcctcgcttctcgcagaactcgattcgaacttccatggcaactccaaacggcctggagaggacaatctcgacgggttcctctgcctctacgatagggcgccggtcaattggggcgcgacactcaagcggtggcgaagacggaactgctaatgaagaagaggatatcgccggcgaagatggtgatggtgttgcatctttacacgcgcagaaccaggcattacaagctgatctagctgataagaaccggtacattgctacactagagaagagactgttgcaggctcgacgaactagctcgtcacggacgttagcgggattttccgcgccgaacaaaggcattatggttggagaagaccatagtgtgtcagccttgatcaaagataaagacgctgaaattgccgagttgaaagcaaaactagaagacaaagatcggatgctagccgctcttcgaactgtcgctcggtcgagagaagtggttgacggactggaaaccatgaggagtgaagcgcgtgcatccctcttgttagaatccgccagcccgccaccacaggacgcactccccgacccaccaataaaaaagagaatatcaccagtgcggaagcgaagtgtggatgaaatgagtcgaattcttgatgagatgatccaggaccgtgtcgatgctgggagtattgtgaagacagtgcgcggcagtgtccggattgctcatgatgataaggttcgggaaaatcttccgacggatcttcctcagcatgctattcttcgtcccctacggagtccacagccgccagcggacgaggcaaatccatttgatcaaggcgcatga

SEQ ID NO: 16907 - protein, 952 aa, Muscodor strobelii
  misc_feature: SGI Peptide ID NO. 565640
  misc_feature (212)..(563): Pfam Id: PF00225 Pfam Desc: Kinesin motor domain
  misc_feature (3)..(917): NCBI GI: 39944768 Blast Desc: MGG_04366 [Magnaporthe grisea 70-15] gi|145021598|gb|EDK05727.1| MGG_04366 [Magnaporthe grisea 70-15]
  misc_feature (3)..(912): NCBI GI: 171695454 Blast Desc: protein product [Podospora anserina] gi|170947969|emb|CAP60133.1| protein product [Podospora anserina]
  misc_feature (21)..(943): NCBI GI: 46108244 Blast Desc: FG01004.1 [Gibberella zeae PH-1]
  misc_feature (21)..(918): NCBI GI: 256734461 Blast Desc: [Nectria haematococca mpVI 77-13-4]
  misc_feature (1)..(947): NCBI GI: 261356299 Blast Desc: kinesin-II 95 kDa subunit [Verticillium albo-atrum VaMs.102]
  misc_feature (1)..(951): NCBI GI: 154299063 Blast Desc: BC1G_11844 [Botryotinia fuckeliana B05.10] gi|150857547|gb|EDN32739.1| BC1G_11844 [Botryotinia fuckeliana B05.10]
  misc_feature (42)..(952): NCBI GI: 156058135 Blast Desc: SS1G_04799 [Sclerotinia sclerotiorum 1980] gi|154702584|gb|EDO02323.1| SS1G_04799 [Sclerotinia sclerotiorum 1980]
  misc_feature (1)..(912): NCBI GI: 85111678 Blast Desc: NCU02626 [Neurospora crassa OR74A] gi|28925813|gb|EAA34815.1| conserved [Neurospora crassa OR74A]
  misc_feature (1)..(702): NCBI GI: 29421280 Blast Desc: kinesin [Gibberella moniliformis]
  misc_feature (25)..(912): NCBI GI: 226282344 Blast Desc: kinesin heavy chain isoform 5C [Paracoccidioides brasiliensis Pb01]
MATTLPRLRGSNDPPSGSSGALPIPKSRKSTGGITSPSRLGTPRSGLRTPSAATIHSGPPLSPAPTTALPIPKGVGVNAAGKSIRKTVSINSFPQPPRTPSVPPSPLSGSITPSRKARTPQTKLSFQSGGTPSLLNGSGEGKSLLGGVTARHSDGLISVASPPQSRSSSAQDSYSTSATTYDDLAETSATSTKDRRASKGMDGKGNVIVSVRVRPDAGGSNGNSEGEWMVDGRKSLVAYRGKEGGDYYYDNVFTTHDNNSRVYDHSAKRLVRRVMEGYHGTVFAYGMTGTGKTFSMQGTASSPGVIPLAITDIFSYIRETPSREFLLRVSYLEIYNERIHDLLSMPTGNAAGAAGTQEEIKLREDSNRGVYATPLKEEIVQSPTQLLRVIARGDQARRTASTQFNARSSRSHAVVQIVVESRERMPGGSGENKRSALPPGGVRVSTLSLIDLAGSEKAAETKERRQEGSHINKSLLTLGTVISKLSEHKEKEGKGADKDSTKHLPYRDSKLTRLLQGALSGNSLVSILCTIQTGSAGSAASANTHATETINTLKFASRAKNSIVSHAKRSEEALGAGGEGGARVLLERYRMEILELRQQLDSQAKANNAKSEEEETARDVEEELAREKEAEARHEEQILEMQLARTALKERIEHLNRLILSSKSSGVNSNGTYSSLGNHPRFSQNSIRTSMATPNGLERTISTGSSASTIGRRSIGARHSSGGEDGTANEEEDIAGEDGDGVASLHAQNQALQADLADKNRYIATLEKRLLQARRTSSSRTLAGFSAPNKGIMVGEDHSVSALIKDKDAEIAELKAKLEDKDRMLAALRTVARSREVVDGLETMRSEARASLLLESASPPPQDALPDPPIKKRISPVRKRSVDEMSRILDEMIQDRVDAGSIVKTVRGSVRIAHDDKVRENLPTDLPQHAILRPLRSPQPPADEANPFDQGA

SEQ ID NO: 16908 - DNA, 4594 bp, Muscodor strobelii
  misc_feature: SGI EST ID NO. CUFF.39961.0
  misc_feature: Variant of the nucleotide sequence at SEQ ID NO 16906
caccgtgtgctcccctcgaactttccacctcttgtcgaactcaatcttcatcggttatttcgctactcccaagacgtctggttgtctttaccgtggcgctcgcctactgaatttctgcttcgttccttttccttttcaaccacgtaatataattcttctccttcctttgcaggcagttcatgctgccgtgccgcactgactctttgctgcgttgacagccgccactcacttctcaagaaggcttgcattaggtcggggtgcacactgcaggtgccacattattcgtgccctgtccgactctcatcgcgacccaacacaccatacatagatagacgtgcacgtacacgacgcacgagctatagaacagagaatccagcactgcgagacgtctaatagacgatagactaatcacaagatatcttctctgctgtccattctgctgcgcgtcattaatgggaaaccccctcggccgacgataagacggcgaatccacccataccacagactgagactgtgcccagatttgtctcaagataacttccagcaccagcacgcgcgtcgcctctcttctgtttgtttgcgacttgaagcgtcactgcccagcttgctggtgcatttcagccgggttttgttaagccaacgtcaaccatctcttcgtctggtctgcccgactattcacttcgttggcgtcaaccgaatcgacacgctccaaccttaccgattgtgcgaccggctcacggcgtcatctttgtggagggttcaggttacttgctcaagacttcttacacattaatttgtcctcaaccgcaccgtcacagaaccgtattgctgtgtgcctaactattcttttgcaccggccctaccaaacatacagctgtactttctcctgcaacgatcgagcgaatgttacacagcgcaacactgtcattcacactgcactccactccgacatcacgggaaacggcgatagaattgggtgtccacttgaacccggctccaatctgcaactctcgattcacatagagcggattctaacaccgtatagcgcatgggcgctgatcgtgagactgaggcccaccgtgcaggccctggaattgatcttctgttttttggggacagttctacattagccaggatcgcgcgagagcattactccgcggatggagttttgaattgcagtctgcacctcgctggaaacactgttctgcgagtgacctttcacgaaccgcacaatggctaccacgttgccacgactacgaggatctaatgatcctccatcaggttcttccggtgccctgccgataccaaaaagccggaagagcactggtgggatcacgagtcccagcagattgggtacgcccagaagtggattgagaactccgtccgctgctactatacatagcggcccccctttatcacctgcgcctactacggcgcttccgattccgaaaggtgtcggggtgaatgctgcggggaaatctattcgaaaaacggtcagtatcaattcgttcccacagccaccgagaactccaagtgtgcctccaagtccgttgtctggatccattacaccgtctagaaaagcccgtacgccccaaacgaaacttagttttcagtccggcgggacacccagtctcctcaatggaagtggagaaggcaaatcgcttttgggcggtgttactgcaagacattcagacggcttgataagcgttgcctcgccaccacaaagccgtagctcttcggcacaagactcctactcaacatcagcaacgacgtacgatgatctcgctgagacgagtgccacatctacaaaggatagacgggcttcgaagggcatggatggcaaaggcaacgttattgtaagtgtacgtgtgagaccagatgctggaggcagcaacggcaactcggaaggcgagtggatggtcgacgggcggaagtctttagtggcatatcgaggaaaagagggaggggactactattatgataacgttttcacgacccacgacaataatagccgtgtgtacgaccatagtgcgaaacgcttggttcgtcgggtcatggaaggttaccatggaacagtatttgcgtatggtatgacagggacaggcaagacgttttcgatgcaaggcaccgcttcatctccaggagtaataccacttgctattactgacatcttctcgtatattcgcgagacgccgtccagagagtttctgcttcgtgtgagttatcttgagatatacaatgagaggatacacgaccttctgagtatgcccacgggaaatgctgctggagcagcaggcacccaggaagaaatcaaacttcgagaagacagcaacaggggagtctatgcaactcccctgaaagaagagatcgtgcaaagccctacccagctactgcgagtcattgctcgtggtgatcaagctcgtaggactgcaagcacgcaattcaatgctaggagttctcgcagtcatgctgttgtccaaattgtcgtcgaaagcagagaaagaatgccaggtggatccggagagaacaagcgctcagccctaccaccaggcggggttcgtgtctctacgctgagtttaatcgatctagccggttccgaaaaagccgctgaaacaaaggagcgccgacaggaaggctcgcatatcaacaaaagtttgctgacgcttggcaccgtcatttccaagctctctgaacataaagagaaagaaggaaagggtgcagataaggatagcaccaagcacttgccttacagagacagtaagctcaccaggctgttgcaaggtgcactgtcggggaactcgctagtcagtattctctgcacaattcagactgggtcggcaggcagtgcagcatcagcaaatactcatgctaccgagaccatcaacacgctgaaattcgcatcgagagccaagaatagcattgtgagccatgcaaagcgatccgaagaagcattgggtgctggtggagaaggaggcgcaagggtccttcttgaaaggtatcgcatggagattcttgagctacgacaacagctggatagtcaagcgaaggccaacaacgccaagagcgaagaagaagagactgctagggacgttgaagaagagttggctcgggagaaagaagcggaagcgaggcatgaagaacagattctggaaatgcaacttgcgcgcacagctttgaaagagcgtatcgaacatttaaaccgcttaattttgagctccaagtctagcggagtcaactctaatggcacttatagctctcttgggaaccatcctcgcttctcgcagaactcgattcgaacttccatggcaactccaaacggcctggagaggacaatctcgacgggttcctctgcctctacgatagggcgccggtcaattggggcgcgacactcaagcggtggcgaagacggaactgctaatgaagaagaggatatcgccggcgaagatggtgatggtgttgcatctttacacgcgcagaaccaggcattacaagctgatctagctgataagaaccggtacattgctacactagagaagagactgttgcaggctcgacgaactagctcgtcacggacgttagcgggattttccgcgccgaacaaaggcattatggttggagaagaccatagtgtgtcagccttgatcaaagataaagacgctgaaattgccgagttgaaagcaaaactagaagacaaagatcggatgctagccgctcttcgaactgtcgctcggtcgagagaagtggttgacggactggaaaccatgaggagtgaagcgcgtgcatccctcttgttagaatccgccagcccgccaccacaggacgcactccccgacccaccaataaaaaagagaatatcaccagtgcggaagcgaagtgtggatgaaatgagtcgaattcttgatgagatgatccaggaccgtgtcgatgctgggagtattgtgaagacagtgcgcggcagtgtccggattgctcatgatgataaggttcgggaaaatcttccgacggatcttcctcagcatgctattcttcgtcccctacggagtccacagccgccagcggacgaggcaaatccatttgatcaaggcgcatgaaagccttgtcgaagcgtagtgacaggaatgcagtcgcccttcctggatttttttgtgcaataaaacgggcgtttaggtcaggctgttcacatttctggtcttttattttatacccctattatgttctttgtatctgtttgctatggctttatttcacgtgcggcacgggaactatccgcaatgagcaaaaggagggtttcgcagtggatgtgatacggaaaggttataatttgtttggttgcgtcgggtccccctcatttcgtcagtgtcggacgcaaaaggtcgtctcttgctattggcatttttgggggggacgacaataaccaagtagctggaagggtgctcggttcttctcgcatatactttggaagctgcgacgacggccatttttattattgttgtacattattcaatgcagggctcaagctcgctgagatacctacctttggaagaatagccttgtgttggcaagtgtcagtcgtattgattgctttatacacagc

SEQ ID NO: 16909 - DNA, 1845 bp, Muscodor strobelii
  misc_feature: SGI cDNA ID NO. 565641
  misc_feature: Reduced expression when VOC is produced
  misc_feature: Encodes the peptide sequence at SEQ ID NO 16910
atggcgcctgccctcgatctttcgcgcagcacccataagatgatggtcgcgccgccccgactcaatctgcgcagagcggcttcgtaccagggcgagaaggctcaactatcttccacctcagcacgattcagctttaatcacctcctattcgcctcgcctccaccttcacctgggctaccagcactggtacctcgtccacgcaaaacctcatcggccccaagaccaagccgagtcttcaggctgacggcttatgtcatcggcctagtgctactgctcttactcactcgcgcagtagtccaaggcgataagcaaaatccaatcgtgggatggccgtttgaggaaagggaagagtatgaaatggttggacaggatgaccttcccgaatttcccacccctatagctgtaacagatcgtcacggaagatcaaaatggaccgtctccatcccgcctacatattctttcccgctccccatgagccagtatttggatatttgcgataagtgccacgaggtcgctgcgcacgtcagagacttacatagcgtttcgcaaccgaccacagcggactactaccacgaggatcctttctttctggatgttaaagatgccgaaaaacggggccttctgcctggattagagggaaaggcctggtcagtgacagctcaatcgcagtatggtcaattgatcggagagagaaaagtcggccttagcgatatgggcacttgcaaaacgtctctgacctatgtcctagaatcatcggacgcaggattagggtctacgttgatgatgctctggatggcatatggactcgctcgcaaagaacaacgtgccttctttatcgatgactcgcgatgggcctacggtaaatttacggacatattccaatctcctccagttcaggactgcagaccacccccgaggcatcaaatgctcccttgtcctcgcacagcacagcacattgtcgtctcagcagcaactgccaagaccacgttcgggcaggcctttaatgtcgagtacggagatgccaaggggcttggtgttagtgggcagcgtcacgtgttcgaacttgcgcgttcgggatttgaggctcttttccatctcagctcagatgaccagccatatgtcaaatcgcgagtcgatgaactccgagccagagcgaaggtacctcaaggaaactataataatggcgccattgtcggtgtacatattcgtcacggtgatgtccatccgtacgagtatgagtataacggtgcatacatccctttggacctatacaccgcaaggtctcgagagctcatcgaagaacgtcacaatttcagcactcctttaggtggagaagatgttgttgccaaacaacattcattcatggtactggcatcagataatcccgatgtctacgaggctgatgatttttccgatgctgttcgggcccaggaacagatcaagctggccggaaagcaacacgccgatgctgagaagccttctcggtccattatgcataaatttgtcgacgaagcatttggttgggaaggtggcttctatgcaagcatgttctggaatctaggccgcacgactctgcataacgtggaagcggctgatataggattgctccaagaggcacaggcagtccagccaacggccgaggccatgcggcttagatcgttaattgggcgagcctacatgatcgacctagctgttcttgctgaggcaggagacatgatcgtctgtaccgtgagcgcaatggggtgccgcctattggcagtgatgatggggtgggacgaagcaatgatccaaggaaactgggtcaacgttgatggaaacttccagtggactggcgtcccattataa

SEQ ID NO: 16910 - protein, 614 aa, Muscodor strobelii
  misc_feature: SGI Peptide ID NO. 565641
  misc_feature (1)..(612): NCBI GI: 85111676 Blast Desc: NCU02625 [Neurospora crassa OR74A] gi|28925812|gb|EAA34814.1| [Neurospora crassa OR74A]
  misc_feature (1)..(612): NCBI GI: 116182046 Blast Desc: CHGG_01651 [Chaetomium globosum CBS 148.51] gi|88185948|gb|EAQ93416.1| CHGG_01651 [Chaetomium globosum CBS 148.51]
  misc_feature (1)..(611): NCBI GI: 145614702 Blast Desc: MGG_04365 [Magnaporthe grisea 70-15] gi|145021599|gb|EDK05728.1| MGG_04365 [Magnaporthe grisea 70-15]
  misc_feature (13)..(612): NCBI GI: 256734462 Blast Desc: NECHADRAFT_31019 [Nectria haematococca mpVI 77-13-4]
  misc_feature (7)..(612): NCBI GI: 46108242 Blast Desc: FG01003.1 [Gibberella zeae PH-1]
  misc_feature (108)..(612): NCBI GI: 154299059 Blast Desc: BC1G_11842 [Botryotinia fuckeliana B05.10] gi|150857545|gb|EDN32737.1| BC1G_11842 [Botryotinia fuckeliana B05.10]
  misc_feature (1)..(568): NCBI GI: 261356301 Blast Desc: conserved [Verticillium albo-atrum VaMs.102]
  misc_feature (108)..(598): NCBI GI: 156058131 Blast Desc: SS1G_04797 [Sclerotinia sclerotiorum 1980] gi|154702582|gb|EDO02321.1| SS1G_04797 [Sclerotinia sclerotiorum 1980]
  misc_feature (1)..(612): NCBI GI: 171695452 Blast Desc: protein product [Podospora anserina] gi|170947968|emb|CAP60132.1| protein product [Podospora anserina]
  misc_feature (65)..(612): NCBI GI: 239611760 Blast Desc: conserved [Ajellomyces dermatitidis ER-3]
  misc_feature: Useful for introducing or modulating the production of volatile compounds
MAPALDLSRSTHKMMVAPPRLNLRRAASYQGEKAQLSSTSARFSFNHLLFASPPPSPGLPALVPRPRKTSSAPRPSRVFRLTAYVIGLVLLLLLTRAVVQGDKQNPIVGWPFEEREEYEMVGQDDLPEFPTPIAVTDRHGRSKWTVSIPPTYSFPLPMSQYLDICDKCHEVAAHVRDLHSVSQPTTADYYHEDPFFLDVKDAEKRGLLPGLEGKAWSVTAQSQYGQLIGERKVGLSDMGTCKTSLTYVLESSDAGLGSTLMMLWMAYGLARKEQRAFFIDDSRWAYGKFTDIFQSPPVQDCRPPPRHQMLPCPRTAQHIVVSAATAKTTFGQAFNVEYGDAKGLGVSGQRHVFELARSGFEALFHLSSDDQPYVKSRVDELRARAKVPQGNYNNGAIVGVHIRHGDVHPYEYEYNGAYIPLDLYTARSRELIEERHNFSTPLGGEDVVAKQHSFMVLASDNPDVYEADDFSDAVRAQEQIKLAGKQHADAEKPSRSIMHKFVDEAFGWEGGFYASMFWNLGRTTLHNVEAADIGLLQEAQAVQPTAEAMRLRSLIGRAYMIDLAVLAEAGDMIVCTVSAMGCRLLAVMMGWDEAMIQGNWVNVDGNFQWTGVPL

SEQ ID NO: 16911 - DNA, 3889 bp, Muscodor strobelii
  misc_feature: SGI EST ID NO. CUFF.39976.0
  misc_feature: Variant of the nucleotide sequence at SEQ ID NO 16909
cgagaatcttgtgatttatcttcctgcttctcttttactgagtcttatctgtcagagttaactttagattatagacgacgatgagattatagtatattgcgtttgtgtgtagcagtactgtgcactagatccctgactgggaatgctagatattgtgacatcacccgcccctccattgttgtcgatcttttgctcgtttgttttccgcctctgtgtcaattccatacaagagtcgccgcacattgtgcaatggcaattatgccctcggaagtctccagtaggttgtcaggggaccaacgagtgacatgccaatcttgcccacgatgctgctcctcccttgacatcctagctccgccctgacgagctggtgctagaccgcccggcttgctagtcaataatgagatgatcccatgcggatcgcaacggttcttccatcgttggttgggccctgtgcagattcatggggagacttttcatgtagtcattctcaagcaattccctattcaagcaaagtacttgtcagacaggcataaccgggagggtggccatcataagcggcacatccttctttgccacatctgaaacacagccagttctttaaatatcgagactatttctcttgcgcgccaccatcgtcagctggattttttgaggcttgaatgagattcgtgaaaatacctacttgaggcaatcatcccctacgaatctggatgtttgtcgtttccctcccatcgaacgactcgttgaagccaagtgccaccacacgatcgtcaagcattcctgatacaggtcgtcacaccatgtcaggtgcatagatgttcctgcgccctcagggatttcttgtctttcattgctcgtccgtctgttcgcccttctgctttcttttacaaaatcagctgtcgtacacgtcaagcccaaacaacaccaatttagaatctatcaattataaccgagccccagaggagaccattccatacttataaccctgacccaagtgaacccacactcattgagctttacgtacgagcacaatcccacttctgctcatcacctactgttttaggccacgatcttctcttgcctatgttgtcagggagccgtcacgtcgctagttcgccttttcatcattccgagcctcacctgtcgacttaacatttctcagtttcaggaccagacacagacgagatactccatacagttggtctgggatagtatcgaagactgatatgtaatggcaattttgcgacagtacttgacttagtcggccgttttcttcttgatgtaacttcgttgtctcgccgggtttccgctcagttggtcttaatctttgagatttcttcttgtcggggagtccaacgctatttcaacacgtcaagaacgcatcatcctattgtcgcggcttcaatcatctactaaaatatatggggacgaaaggatatagtcgcaataatggcgcctgccctcgatctttcgcgcagcacccataagatgatggtcgcgccgccccgactcaatctgcgcagagcggcttcgtaccagggcgagaaggctcaactatcttccacctcagcacgattcagctttaatcacctcctattcgcctcgcctccaccttcacctgggctaccagcactggtacctcgtccacgcaaaacctcatcggccccaagaccaagccgagtcttcaggctgacggcttatgtcatcggcctagtgctactgctcttactcactcgcgcagtagtccaaggcgataagcaaaatccaatcgtgggatggccgtttgaggaaagggaagagtatgaaatggttggacaggatgaccttcccgaatttcccacccctatagctgtaacagatcgtcacggaagatcaaaatggaccgtctccatcccgcctacatattctttcccgctccccatgagccagtatttggatatttgcgataagtgccacgaggtcgctgcgcacgtcagagacttacatagcgtttcgcaaccgaccacagcggactactaccacgaggatcctttctttctggatgttaaagatgccgaaaaacggggccttctgcctggattagagggaaaggcctggtcagtgacagctcaatcgcagtatggtcaattgatcggagagagaaaagtcggccttagcgatatgggcacttgcaaaacgtctctgacctatgtcctagaatcatcggacgcaggattagggtctacgttgatgatgctctggatggcatatggactcgctcgcaaagaacaacgtgccttctttatcgatgactcgcgatgggcctacggtaaatttacggacatattccaatctcctccagttcaggactgcagaccacccccgaggcatcaaatgctcccttgtcctcgcacagcacagcacattgtcgtctcagcagcaactgccaagaccacgttcgggcaggcctttaatgtcgagtacggagatgccaaggggcttggtgttagtgggcagcgtcacgtgttcgaacttgcgcgttcgggatttgaggctcttttccatctcagctcagatgaccagccatatgtcaaatcgcgagtcgatgaactccgagccagagcgaaggtacctcaaggaaactataataatggcgccattgtcggtgtacatattcgtcacggtgatgtccatccgtacgagtatgagtataacggtgcatacatccctttggacctatacaccgcaaggtctcgagagctcatcgaagaacgtcacaatttcagcactcctttaggtggagaagatgttgttgccaaacaacattcattcatggtactggcatcagataatcccgatgtctacgaggctgatgatttttccgatgctgttcgggcccaggaacagatcaagctggccggaaagcaacacgccgatgctgagaagccttctcggtccattatgcataaatttgtcgacgaagcatttggttgggaaggtggcttctatgcaagcatgttctggaatctaggccgcacgactctgcataacgtggaagcggctgatataggattgctccaagaggcacaggcagtccagccaacggccgaggccatgcggcttagatcgttaattgggcgagcctacatgatcgacctagctgttcttgctgaggcaggagacatgatcgtctgtaccgtgagcgcaatggggtgccgcctattggcagtgatgatggggtgggacgaagcaatgatccaaggaaactgggtcaacgttgatggaaacttccagtggactggcgtcccattataattggcatttacctggcgtttaggttggaaataggtcccggtactgtcaccaggcaaattggtttattttatcgggcaagaaagatatctagatatctatcatgggcggcgtcaggagactacaccccctttgtgtcgtgcgaaaagcatatatacccatagcattgtgcaatgcgtctctcgttagttgcgacgacgcgactcaatatttctttatagttcaaatacaagctgcagatgacaatctcccaatttgagtcttgaaactgcattcatacgatatatgatcagagcgtagctgtgttgggtggaaaatcagcagagatcgaatgagaagttgatatttgatgaacgtgatggtacgttttcatattactcttttccgcaagttgcggggtcctgaagacctcattttggtccttcaaggtttctctgggggtttacgggaccgtcagctgcttacgaagagggttctatggctagcaatagcatgcgaccgtataatcaccaaatggtgacagacgtctactatgcagtctagtagaggacacaatgcttttatccgattgattactgtgctggttgttttggcgttg

SEQ ID NO: 16912 - DNA, 1578 bp, Muscodor strobelii
  misc_feature: SGI cDNA ID NO. 565642
  misc_feature: Encodes the peptide sequence at SEQ ID NO 16913
atgggtctcctacaggacatctcggggcctgtgtcccaacaattctcccagctgtcgatcgtgtcacaggttggtgccgtgtttggcgccgtcctgttcgtctctgtcttcctcaatgtcttgcagcaggtcctgctcaagaactcgaacgagcctcccgtcgtcttccattggttcccactgatcgggagcaccatcacctatggcatggatcccccgcgcttcttcaaggagaatcgtgagaagtatggcgatatcttcactttcgttctgctcggcaagaagaccaccgtgtacgtcgggccgcagggtaacgattttatcctgaacggcaagctgaaggacgtcaacgccgaggaaatctacacggttcttacaactcccgtatttggaaaagacgtggtctacgattgccccaactccaaactcatggagcagaaaaagttcatgaaaatcgctctcaccacccaggctttccaatcttacgtccccatcattgccgacgaggtcaccaactacttcaagagatgtccggactttaagggcaaatcgggtgtcgtcaacattcccaagaatatggcccagattaccatcttcaccgcctcccactccctgcaaggttccgaaatccgaagcaagttcgacgagtcgcttgccgatctataccacgacctggatatgggctttagccctgtcaacttcatgttgcactgggcaccgcttccatggaacacgagacgagaccacgcccagcgaaccattgccaaagtctacatggacaccatcaaggagcgccgtgctgcaggttcatctgactctcaggacatcatgtggcatctgatgaattcgagctacaagaacggtgtcaaggtccctgaccacgaggttgctcacatgatgattgctctcctcatggctggacagcattcgtcttcctctactagctcttggatcatgctccgattggcatcccgacccgatatccttgaagcactgtaccgtgagcagatcgaggcctttggacccgagcttccacccctcacatatgaggacctggcgaagttgcctctcaaccaagccatcatcaaggagaccctgagactgcatgctcccatccactcgattcttcgtgccgttaaatcgccaatgcctgtgcctggaaccaagtatgttgttcctactagccacaaccttctcgcggcttcaggcgtcagcgctaccgatcccaccttcttccccgagcctgatctatgggagccaacgaggtggagcaaagactcggctctcgcccccaagattagcggctcgttggaggaggaggagaaagtcgattatggatacggactggtcagcaaaggtgccaactcaccttatttgccatttggcgctggccgtcacagatgcattggcgagcagttcgccaatgtgcagttgcagacgattaccgcaatggtggtccgagagttcaagcttcgcaatgttgacggcagcaacaaggtgattgggacagactacgcatcattattctcacggccccttgagccggctaatattcactgggagagacgagagcaatga

SEQ ID NO: 16913 - protein, 525 aa, Muscodor strobelii
  misc_feature: SGI Peptide ID NO. 565642
  misc_feature (52)..(520): Pfam Id: PF00067 Pfam Desc: Cytochrome P450
  misc_feature (197)..(491): Pfam Id: PF00067 Pfam Desc: Cytochrome P450
  misc_feature (52)..(170): Pfam Id: PF00067 Pfam Desc: Cytochrome P450
  misc_feature (1)..(524): NCBI GI: 70987441 Blast Desc: 14-alpha sterol demethylase Cyp51B [Aspergillus fumigatus Af293] gi|14861415|gb|AAK73660.1| 14-alpha sterol demethylase [Aspergillus fumigatus] gi|66846764|gb|EAL87096.1|
  misc_feature (7)..(523): NCBI GI: 5881952 Blast Desc: AF042067_1 eburicol 14-alpha demethylase [Erysiphe necator]
  misc_feature (1)..(523): NCBI GI: 254036145 Blast Desc: eburicol 14 alpha demethylase [Podosphaera fusca]
  misc_feature (1)..(524): NCBI GI: 164427848 Blast Desc: cytochrome P450 51 [Neurospora crassa OR74A] gi|157071908|gb|EAA34813.2| cytochrome P450 51 [Neurospora crassa OR74A]
  misc_feature (1)..(525): NCBI GI: 116182048 Blast Desc: conserved [Chaetomium globosum CBS 148.51] gi|88185949|gb|EAQ93417.1| conserved [Chaetomium globosum CBS 148.51]
  misc_feature (1)..(524): NCBI GI: 256735177 Blast Desc: [Nectria haematococca mpVI 77-13-4]
  misc_feature (1)..(524): NCBI GI: 220961910 Blast Desc: cytochrome P450 51B [Gibberella zeae] gi|220961912|gb|ACL93393.1| cytochrome P450 51B [Gibberella zeae] gi|220961914|gb|ACL93394.1| cytochrome P450 51B [Gibberella zeae]
  misc_feature (1)..(524): NCBI GI: 46108236 Blast Desc: FG01000.1 [Gibberella zeae PH-1] gi|220961916|gb|ACL93395.1| cytochrome P450 51B [Gibberella zeae] gi|220961918|gb|ACL93396.1| cytochrome P450 51B [Gibberella zeae]
  misc_feature (1)..(523): NCBI GI: 171695450 Blast Desc: protein product [Podospora anserina] gi|170947967|emb|CAP60131.1| protein product [Podospora anserina]
  misc_feature (1)..(523): NCBI GI: 39944900 Blast Desc: MGG_04432 [Magnaporthe grisea 70-15] gi|145021546|gb|EDK05675.1| MGG_04432 [Magnaporthe grisea 70-15]
  misc_feature (7)..(523): SWISSPROT Homolog: EC 1.14.13.70 Sterol 14-demethylase
MGLLQDISGPVSQQFSQLSIVSQVGAVFGAVLFVSVFLNVLQQVLLKNSNEPPVVFHWFPLIGSTITYGMDPPRFFKENREKYGDIFTFVLLGKKTTVYVGPQGNDFILNGKLKDVNAEEIYTVLTTPVFGKDVVYDCPNSKLMEQKKFMKIALTTQAFQSYVPIIADEVTNYFKRCPDFKGKSGVVNIPKNMAQITIFTASHSLQGSEIRSKFDESLADLYHDLDMGFSPVNFMLHWAPLPWNTRRDHAQRTIAKVYMDTIKERRAAGSSDSQDIMWHLMNSSYKNGVKVPDHEVAHMMIALLMAGQHSSSSTSSWIMLRLASRPDILEALYREQIEAFGPELPPLTYEDLAKLPLNQAIIKETLRLHAPIHSILRAVKSPMPVPGTKYVVPTSHNLLAASGVSATDPTFFPEPDLWEPTRWSKDSALAPKISGSLEEEEKVDYGYGLVSKGANSPYLPFGAGRHRCIGEQFANVQLQTITAMVVREFKLRNVDGSNKVIGTDYASLFSRPLEPANIHWERREQ

SEQ ID NO: 16914 - DNA, 2279 bp, Muscodor strobelii
  misc_feature: SGI EST ID NO. CUFF.39982.0
  misc_feature: Variant of the nucleotide sequence at SEQ ID NO 16912
atgcgatttagctaattccaaaatcagcgaattccaattggacccaggacgggggttcttcagcatctgcagcagataccagtgggcaattgtcctcgctagcatgggaagtgccgtcgcctgcattgggatgtgtgtaacttggcaccattagttttcccttcaaatgttgcctcccgcctggctactactcctaagcagtacatatacttttaattgaggtctaaagctgggtaatctaataccttcaagactcttagttcttagcgaaacctcctactcctactccctttcctcccctttcccctctattataccccccgacgacaacaccgacttcatttgtgcccaggacgagtcgccaaagagagagatagcaattccggctgaagagaagctcagaagagccaacaccaggcccgactgcccaccatgggtctcctacaggacatctcggggcctgtgtcccaacaattctcccagctgtcgatcgtgtcacaggttggtgccgtgtttggcgccgtcctgttcgtctctgtcttcctcaatgtcttgcagcaggtcctgctcaagaactcgaacgagcctcccgtcgtcttccattggttcccactgatcgggagcaccatcacctatggcatggatcccccgcgcttcttcaaggagaatcgtgagaagtatggcgatatcttcactttcgttctgctcggcaagaagaccaccgtgtacgtcgggccgcagggtaacgattttatcctgaacggcaagctgaaggacgtcaacgccgaggaaatctacacggttcttacaactcccgtatttggaaaagacgtggtctacgattgccccaactccaaactcatggagcagaaaaagttcatgaaaatcgctctcaccacccaggctttccaatcttacgtccccatcattgccgacgaggtcaccaactacttcaagagatgtccggactttaagggcaaatcgggtgtcgtcaacattcccaagaatatggcccagattaccatcttcaccgcctcccactccctgcaaggttccgaaatccgaagcaagttcgacgagtcgcttgccgatctataccacgacctggatatgggctttagccctgtcaacttcatgttgcactgggcaccgcttccatggaacacgagacgagaccacgcccagcgaaccattgccaaagtctacatggacaccatcaaggagcgccgtgctgcaggttcatctgactctcaggacatcatgtggcatctgatgaattcgagctacaagaacggtgtcaaggtccctgaccacgaggttgctcacatgatgattgctctcctcatggctggacagcattcgtcttcctctactagctcttggatcatgctccgattggcatcccgacccgatatccttgaagcactgtaccgtgagcagatcgaggcctttggacccgagcttccacccctcacatatgaggacctggcgaagttgcctctcaaccaagccatcatcaaggagaccctgagactgcatgctcccatccactcgattcttcgtgccgttaaatcgccaatgcctgtgcctggaaccaagtatgttgttcctactagccacaaccttctcgcggcttcaggcgtcagcgctaccgatcccaccttcttccccgagcctgatctatgggagccaacgaggtggagcaaagactcggctctcgcccccaagattagcggctcgttggaggaggaggagaaagtcgattatggatacggactggtcagcaaaggtgccaactcaccttatttgccatttggcgctggccgtcacagatgcattggcgagcagttcgccaatgtgcagttgcagacgattaccgcaatggtggtccgagagttcaagcttcgcaatgttgacggcagcaacaaggtgattgggacagactacgcatcattattctcacggccccttgagccggctaatattcactgggagagacgagagcaatgatatgtcttgatgaaagtgaaaagttcttgatagattatgcatgtatatagatttggcatagtgacactttgtgatgacaaagtcgcacaagaggcactgagagaagatggctctctcggcgacttcaaagattatgagaaaacggattagaagacgatatataataataacaagggccacgacgctcgtcaaattagacgagtgcaaatagaacgatatagctataacgaatatgcatacctacatgtgtgcctgtagacattgatgaa

SEQ ID NO: 16915 - DNA, 1092 bp, Muscodor strobelii
  misc_feature: SGI cDNA ID NO. 565643
  misc_feature: Encodes the peptide sequence at SEQ ID NO 16916
atggccacggaaagcgaattaggaccacttgtgcggcgctggggtattcccatcaaagacctcccggcggcaacagcaaccgccgaagaattgaagccgttcatcgtctccatcctcaaagaggcgattccattcatcgacggcgtagcacctaagacgtcgtcccctactgccaagctttggaaatccaaaggttttaaatctagcccggacacgaccgcaaaggttgagactagagatcgtgagctctccgccagcgaacttcgggctgtcgcgtctaagcatggcattaaggccaaagtagagtccgaactctgggttgccaggctcagtgtccatcaggacgctgccgaaaaagggaccgcatcctgggctgagttcgatcactcgttccgtctagctcatggcaagacggaaatggctttcacgccagacgtcattggtgccaatgaggctcagaaatgggacgccagtggactcgaggttgaggagtcgggtcaatcttgggatagaattacgcttgttgttgaagagatgcggcataagattggtcgaccggtccttaaggaccggacttttcccgttctgcaattgaccgccactgttaaggagggtaccggggcagacgaattcgtcattgtcagtatccctgttccggactttgcaaacagtgatcatgcaaatctagccaaggagaagggggcccagatcgcctactacgccagcattgagcgtattcgcaagctcaatgatggaaagatcgagtggctcttggcaactgccagtgatgctgctggcgtcttgccgctttggatccaggataaggctctcgagggtattgtctggaaggatgtcccgctttacttgggatacatggcgagggaggggagaaaatctgggcagaaggctgttgctgctgcgccagctccggaagctgtcccggccggcaaggaaaccccgaaggctgttcctgaagtagcgccggagcctacggagacaaagcccacggagcccacggccgaggcaagcgaggtaggaagcgcccctgaagttgttgctggtgaagcgtctaccaagaccgtaggggcatga

SEQ ID NO: 16916 - protein, 363 aa, Muscodor strobelii
  misc_feature: SGI Peptide ID NO. 565643
  misc_feature (1)..(300): NCBI GI: 85118568 Blast Desc: NCU02700 [Neurospora crassa OR74A] gi|28927282|gb|EAA36237.1| [Neurospora crassa OR74A] gi|38567219|emb|CAE76511.1| [Neurospora crassa]
  misc_feature (8)..(285): NCBI GI: 46108238 Blast Desc: FG01001.1 [Gibberella zeae PH-1]
  misc_feature (3)..(292): NCBI GI: 39944764 Blast Desc: MGG_04364 [Magnaporthe grisea 70-15] gi|145021600|gb|EDK05729.1| MGG_04364 [Magnaporthe grisea 70-15]
  misc_feature (5)..(297): NCBI GI: 154323376 Blast Desc: BC1G_00087 [Botryotinia fuckeliana B05.10] gi|150842316|gb|EDN17509.1| BC1G_00087 [Botryotinia fuckeliana B05.10]
  misc_feature (4)..(260): NCBI GI: 156057897 Blast Desc: SS1G_04680 [Sclerotinia sclerotiorum 1980] gi|154702465|gb|EDO02204.1| SS1G_04680 [Sclerotinia sclerotiorum 1980]
  misc_feature (16)..(295): NCBI GI: 242775593 Blast Desc: conserved [Talaromyces stipitatus ATCC 10500] gi|218722291|gb|EED21709.1| conserved [Talaromyces stipitatus ATCC 10500]
  misc_feature (187)..(303): NCBI GI: 261356303 Blast Desc: conserved [Verticillium albo-atrum VaMs.102]
  misc_feature (22)..(295): NCBI GI: 212532453 Blast Desc: conserved [Penicillium marneffei ATCC 18224] gi|210071747|gb|EEA25836.1| conserved [Penicillium marneffei ATCC 18224]
  misc_feature (8)..(341): NCBI GI: 121711233 Blast Desc: conserved [Aspergillus clavatus NRRL 1] gi|119401383|gb|EAW11806.1| conserved [Aspergillus clavatus NRRL 1]
  misc_feature (9)..(292): NCBI GI: 70987276 Blast Desc: conserved [Aspergillus fumigatus Af293] gi|66846746|gb|EAL87078.1| conserved [Aspergillus fumigatus Af293]
MATESELGPLVRRWGIPIKDLPAATATAEELKPFIVSILKEAIPFIDGVAPKTSSPTAKLWKSKGFKSSPDTTAKVETRDRELSASELRAVASKHGIKAKVESELWVARLSVHQDAAEKGTASWAEFDHSFRLAHGKTEMAFTPDVIGANEAQKWDASGLEVEESGQSWDRITLVVEEMRHKIGRPVLKDRTFPVLQLTATVKEGTGADEFVIVSIPVPDFANSDHANLAKEKGAQIAYYASIERIRKLNDGKIEWLLATASDAAGVLPLWIQDKALEGIVWKDVPLYLGYMAREGRKSGQKAVAAAPAPEAVPAGKETPKAVPEVAPEPTETKPTEPTAEASEVGSAPEVVAGEASTKTVGA

SEQ ID NO: 16917 - DNA, 2341 bp, Muscodor strobelii
  misc_feature: SGI EST ID NO. CUFF.39997.0
  misc_feature: Variant of the nucleotide sequence at SEQ ID NO 16915
cggtaattgagatctggcagaggatctgggtctgagagctcctactgtgtgttacatacatctaatgcaccttggtagctagtaggcatctgtaagctaccagggtctaggaccatgtcttgtaatgcggctaccatttagagcggtaatatattcatttgtatgactgtacacaggtcgcgcccacagatgttgtcaatccttctgaaattattcttcccttaagtatatttttgtttgttttccagatagaagagcaaactacttcctcccgaatcttggcatcattgcacccgtcaatctcttggctgaaattgcccaggatccttgtctgtgcatcccttacctattgtacctaagtttcaacatttgcttaaatctgacacacccgggtcacctcatcaaatacgcgttgagtgaagtgtgctccacgatacaatcaccagccgactaccagcaaccatggccacggaaagcgaattaggaccacttgtgcggcgctggggtattcccatcaaagacctcccggcggcaacagcaaccgccgaagaattgaagccgttcatcgtctccatcctcaaagaggcgattccattcatcgacggcgtagcacctaagacgtcgtcccctactgccaagctttggaaatccaaaggttttaaatctagcccggacacgaccgcaaaggttgagactagagatcgtgagctctccgccagcgaacttcgggctgtcgcgtctaagcatggcattaaggccaaagtagagtccgaactctgggttgccaggctcagtgtccatcaggacgctgccgaaaaagggaccgcatcctgggctgagttcgatcactcgttccgtctagctcatggcaagacggaaatggctttcacgccagacgtcattggtgccaatgaggctcagaaatgggacgccagtggactcgaggttgaggagtcgggtcaatcttgggatagaattacgcttgttgttgaagagatgcggcataagattggtcgaccggtccttaaggaccggacttttcccgttctgcaattgaccgccactgttaaggagggtaccggggcagacgaattcgtcattgtcagtatccctgttccggactttgcaaacagtgatcatgcaaatctagccaaggagaagggggcccagatcgcctactacgccagcattgagcgtattcgcaagctcaatgatggaaagatcgagtggctcttggcaactgccagtgatgctgctggcgtcttgccgctttggatccaggataaggctctcgagggtattgtctggaaggatgtcccgctttacttgggatacatggcgagggaggggagaaaatctgggcagaaggctgttgctgctgcgccagctccggaagctgtcccggccggcaaggaaaccccgaaggctgttcctgaagtagcgccggagcctacggagacaaagcccacggagcccacggccgaggcaagcgaggtaggaagcgcccctgaagttgttgctggtgaagcgtctaccaagaccgtaggggcatgatccgagcaatccggttatgagatatcgagtcgagtgcaatcatgtacatgatcacgtttgacagcatatttggggtcagtatagatactctatacgaggcttatttgtttcgtgctggatgggagattcaggcttggtctgggccttgacctagtaatattttcagtatttgataccatttgttgccatttgcgtcctttaatgtaccaattagtttacctatacagctctatcatttacgaagcacacaagattttatatgtctggtccggtagtagtccaccatggcctcgaatcacacataaccaaggttagatatgcatcgtagcggctggacgtgagactagtttccttctcttgttggccacagaattcaaacgcctttttggactcggaccgcgtcagttcttgagtctgatctgatatcatcgtgtagaatatggtccaaagctgggcattgcgtatctcttacaccctgtcgagctcttagcctttgtataagccgggaggatcaacacgctcacggtcacgtaaggccaagctcccctgtcgttcatgcagcggcaaccccagccaacggtgacaaactaatgtgcgtcaactacaaggccgactcggacccgtctccagggtacaaaatcgatcttagcagggagctaatcctgtggcaacatcagtgactcgtaaggacggagacgtctccctcagcctttctggcaaatatgattcaagaactcaattagatgagcggcgggccaatcggaaatttgcgatttatatctgttcg

SEQ ID NO: 16918 - DNA, 1371 bp, Muscodor strobelii
  misc_feature: SGI cDNA ID NO. 565644
  misc_feature: Reduced expression when VOC is produced
  misc_feature: Encodes the peptide sequence at SEQ ID NO 16919
atgctgcgcccgaggcagctgattgttcaagtagccgtgggcttaagtctcgtcatactcgcaatcatagctctacggaccacgtcttcacatggactcttcaaaatcaacccgttccagataggcacacaaaaacagacaggcgagccagaacgtccacatccgaagtataaacccaaaccaaccttcgatccgttcccggccctagctacatcaacaccaccgccgattccatcctacaacgtccccgagaaagacggatggaagaaatatggcctcgaaatcgcgccacctcttctcatcggattcacacgatcatacccgatgcttctgcaggcggtcgtatcctacatcactgccggctggccacctgagcagatctacgttgtcgagaatacgggcatgcagcaagcaaacaagcgcggccagttgacgctgcagcacccctggttccttaatcacaccgctcttcagaagttgggcgtcaaagttatccagacaccggtgttgctgagctttgcgcagctgcagaatttctatctctcgatttcctatgcgcacgagtggccgtactatttttggagtcatatggatgtcttggccttgggccacgaggacggggttgagaatcacggcccacgtggaggcgagcccggttacaagagcctttacaccctatgtatcgaagaactgaaccgaacactggctgcggacaatagatggggggtaagactgttcgcctacgattggttgacgttacaaaaccgacgagcagttgaagacgtcaacggatgggacgcactgattccatattacatgaccgattgcgatttttactcgcgcctctcccagcggaattggacgcagcgtgatgcgaactgcggcgtcatcacggacacgagttccgtgctgaatgacctgcgagcattataccgtgacccaagtattacacctacattcaatgatctgaacccacctccacctccgagtgcatcggagaaaaaggttgagcgagacattgtagcgaggaaagataatgaaagcccgcctctgaatttgaccgaggtgttactaattaaagatagagaagaccccgtggagtactggaaagagcttaaacgaattgccgattccatgtttgattacaaacacggagatcgtggccgcaatacgtggcaggctggccagcacggtggacagggcgaacctttctactacgataatctaggttttagtgaggcgcttgacgtactcactcaggccggaaaggaagtatttcgccggaaatggggacatcaagactgcgaccttatcagtggcgccggattgaagtttgaagaccagtggcaggttgagaaggattggcaatga

SEQ ID NO: 16919 - protein, 456 aa, Muscodor strobelii
  misc_feature: SGI Peptide ID NO. 565644
  misc_feature (66)..(455): NCBI GI: 171679058 Blast Desc: protein product [Podospora anserina] gi|170937600|emb|CAP62259.1| protein product [Podospora anserina]
  misc_feature (97)..(455): NCBI GI: 116205900 Blast Desc: CHGG_02243 [Chaetomium globosum CBS 148.51] gi|88182840|gb|EAQ90308.1| CHGG_02243 [Chaetomium globosum CBS 148.51]
  misc_feature (16)..(451): NCBI GI: 171683125 Blast Desc: protein product [Podospora anserina] gi|170941522|emb|CAP67174.1| protein product [Podospora anserina]
  misc_feature (2)..(455): NCBI GI: 156054056 Blast Desc: SS1G_05876 [Sclerotinia sclerotiorum 1980] gi|154703656|gb|EDO03395.1| SS1G_05876 [Sclerotinia sclerotiorum 1980]
  misc_feature (43)..(456): NCBI GI: 154317025 Blast Desc: BC1G_03930 [Botryotinia fuckeliana B05.10] gi|150845542|gb|EDN20735.1| BC1G_03930 [Botryotinia fuckeliana B05.10]
  misc_feature (98)..(455): NCBI GI: 85109940 Blast Desc: NCU09494 [Neurospora crassa OR74A] gi|28924824|gb|EAA33924.1| [Neurospora crassa OR74A]
  misc_feature (44)..(456): NCBI GI: 156043813 Blast Desc: SS1G_10910 [Sclerotinia sclerotiorum 1980] gi|154695297|gb|EDN95035.1| SS1G_10910 [Sclerotinia sclerotiorum 1980]
  misc_feature (61)..(456): NCBI GI: 171689688 Blast Desc: protein product [Podospora anserina] gi|170944806|emb|CAP70918.1| protein product [Podospora anserina]
  misc_feature (49)..(451): NCBI GI: 116205237 Blast Desc: CHGG_10502 [Chaetomium globosum CBS 148.51] gi|88176630|gb|EAQ84098.1| CHGG_10502 [Chaetomium globosum CBS 148.51]
  misc_feature (98)..(455): NCBI GI: 38524260 Blast Desc: [Neurospora crassa]
  misc_feature: Useful for introducing or modulating the production of volatile compounds
MLRPRQLIVQVAVGLSLVILAIIALRTTSSHGLFKINPFQIGTQKQTGEPERPHPKYKPKPTFDPFPALATSTPPPIPSYNVPEKDGWKKYGLEIAPPLLIGFTRSYPMLLQAVVSYITAGWPPEQIYVVENTGMQQANKRGQLTLQHPWFLNHTALQKLGVKVIQTPVLLSFAQLQNFYLSISYAHEWPYYFWSHMDVLALGHEDGVENHGPRGGEPGYKSLYTLCIEELNRTLAADNRWGVRLFAYDWLTLQNRRAVEDVNGWDALIPYYMTDCDFYSRLSQRNWTQRDANCGVITDTSSVLNDLRALYRDPSITPTFNDLNPPPPPSASEKKVERDIVARKDNESPPLNLTEVLLIKDREDPVEYWKELKRIADSMFDYKHGDRGRNTWQAGQHGGQGEPFYYDNLGFSEALDVLTQAGKEVFRRKWGHQDCDLISGAGLKFEDQWQVEKDWQ

SEQ ID NO: 16920 - DNA, 3340 bp, Muscodor strobelii
  misc_feature: SGI EST ID NO. CUFF.39989.0
  misc_feature: Variant of the nucleotide sequence at SEQ ID NO 16918
cgaagctcctgctaggggcccttccttcagcgatagagaaatacgagttcaactgcagtatgcgcgtatgtggcggaggggcaagtcttcatcagggagtctgaggtagtgaaaatcgcaagtgaaaatcgtaatcgatgcaatatattgcgatccaggtcagaagtagacatatgtaggctagaagaaaggaggccgggtacgcagatgctcaaggcctattgagtttgaagttctagccgcgttccgatctagatcttgaattaggtcggcagaagttgacttctactcgatgattttcctataaatcacccacgggaaaaggtctacttttaatgctattgctacaataggcagtgcgctaagaactttacagccacagaagattcgtaatgtgatggcgtaggcgggaatacataatcggagtgtcgtgggcacctgtgattagctcctgtcatgacggctgcgtttcatgactttcgtttactcaatgccgtctgagcaagcccatataatctcacttcctattcacttgcgggagcttatttgtagacgaacgagatgggtggacttttcaacacaggaataccccagttggcaacacaacaaattaggcacttgtttgacatgtctaggaactggggtcacctcatagttgtttgtcctttatttagcttcattctcactcttaatactatccactatatttatcggttagagacatctatggttcggctttgatgcaagggcaacaaagagatgaaaatacgttcttacattccccagccattacaacagtgtctatgcatgtttgtccagtgagaatctactgataagcaagaatgcccccaaccagtaaattgggcagattggaagcttttataatcgaagtgatttagactgacgctgcccaagtcatgtttgagaatgtagctatagtgcggcgcagtccaaagtttatttggatctgaatgcaaccttatgtacctcatatctaccatctacgggataccagtcttagatcgctttttccttgtttgtggctttgccgtatgctccttcccaatgttgcaggcatcaaaaatgattttcctctacccctaaccggattgcattcatcatctcgctacaaaccgcggcaaaacacttcgtccgcgtcacttgtttactttacataaccaaagccatcccttagctgcacaccttttggttacccctatgtccattgttttgtatatttcacttttgctgtacaattattgcgcgtcagagggatcggattacaatcgtcaataacacccagggaggccttagtgaatcatcgtctggaaggggctattctcgaaaacccacggaaggtgcacagaagctctaaaagccacactatactgcggagggtccaaccacgcatcatgctgcgcccgaggcagctgattgttcaagtagccgtgggcttaagtctcgtcatactcgcaatcatagctctacggaccacgtcttcacatggactcttcaaaatcaacccgttccagataggcacacaaaaacagacaggcgagccagaacgtccacatccgaagtataaacccaaaccaaccttcggtatgtgtagaaagctcacacgagagtcattttttgatcgtattcctaagatatggtactaatttcctaatagtaagtgattaaactgccatgtatcgaagacaagctcttcgtgtcttaaaaccacgcggcccccgtgaaagtcgtgaaaactgaccgaagtcaatatcttctcggcaaccagacaccgccgcccatatcagatccgttcccggccctagctacatcaacaccaccgccgattccatcctacaacgtccccgagaaagacggatggaagaaatatggcctcgaaatcgcgccacctcttctcatcggattcacacgatcatacccgatgcttctgcaggcggtcgtatcctacatcactgccggctggccacctgagcagatctacgttgtcgagaatacgggcatgcagcaagcaaacaagcgcggccagttgacgctgcagcacccctggttccttaatcacaccgctcttcagaagttgggcgtcaaagttatccagacaccggtgttgctgagctttgcgcagctgcagaatttctatctctcgatttcctatgcgcacgagtggccgtactatttttggagtcatatggatgtcttggccttgggccacgaggacggggttgagaatcacggcccacgtggaggcgagcccggttacaagagcctttacaccctatgtatcgaagaactgaaccgaacactggctgcggacaatagatggggggtaagactgttcgcctacgattggttgacgttacaaaaccgacgagcagttgaagacgtcaacggatgggacgcactgattccatattacatgaccgattgcgatttttactcgcgcctctcccagcggaattggacgcagcgtgatgcgaactgcggcgtcatcacggacacgagttccgtgctgaatgacctgcgagcattataccgtgacccaagtattacacctacattcaatgatctgaacccacctccacctccgagtgcatcggagaaaaaggttgagcgagacattgtagcgaggaaagataatgaaagcccgcctctgaatttgaccgaggtgttactaattaaagatagagaagaccccgtggagtactggaaagagcttaaacgaattgccgattccatgtttgattacaaacacggagatcgtggccgcaatacgtggcaggctggccagcacggtggacagggcgaacctttctactacgataatctaggttttagtgaggcgcttgacgtactcactcaggccggaaaggaagtatttcgccggaaatggggacatcaagactgcgaccttatcagtggcgccggattgaagtttgaagaccagtggcaggttgagaaggattggcaatgattagcgtatcgcacgagtcgcaaaagacttcgatgcctgcctctacactgcttttcaagggatatctggatatcccgtatgctatatttgcaacatctatggtagcgatatatcacgagtagtctatgacaattgtacattaagccacgccgggatccctttagggtcccctgtatacaatagacatttgaatatagcgcgttggatgttcctacatagcattgagcaagacgctacactaaatacatcggctggtggcattatttcttggtggcatagactagtcggagaagttgataaagtaagcgactagctgtaacgatatgatgagattagacccctgcaccatgccag

SEQ ID NO: 16921 - DNA, 1488 bp, Muscodor strobelii
  misc_feature: SGI cDNA ID NO. 565645
  misc_feature: Reduced expression when VOC is produced
  misc_feature: Encodes the peptide sequence at SEQ ID NO 16922
atgcatcccgccgctcgcacaacgacgtctttcaaacgctcccaagaattggcctcacagccacgcaatgcgcggctggtctactacggcgcaacttgcgccgttgcaatcctaaccactatcctcttcgttgacgcgcgttacttacgtcccggtcccatcaccacttcacagaaactcggagcactactgctcataattctcgcgttatacaccaccacctcactccgggctgcacacatccactttcaaaagtccgcagtggcaggctgttcgcctgtaccgaggtttccaaatgactttgcgggaatacgatatctcttagagacagcgcgcaatattaagacgcacaggttgttgcaccaaagagcagagctattcgaagagctgggccatacttttgttcatgaaactttcccagatcgcgaggagaccatcaccacggatgagtgggaaaacgtgaaggccgtccttgcgggcaagtttgaggactgggatttacctgccgttagaatcaggagcttcctgcccgtcctaggaagacactcgatattcaccaccaacggcgctgaatggcaacattcacgctctattttacgcccggcattcgtgcgggaccagatctcagatgtcgagtgtttcgatcggcacatcagcaagcttatcgcgcgaatcccgaaagatggcagcgcgtttgacctacaggccatgttttccatgatgacgacggacagcatatcagactttatgttcgggcagagcaccgatcttcagggcagcgcaccagaagagagcttcaagttcggcaactactttgatgcttcgatgcacaaaatcgccatgcgagctcgcttgggctggatcacaatgttgagagctgatccagagttgaacgagtattcaaatttcatgaagagcttcgttgcgaaattcgtcaaagaggtgaggatgaatgtagcgaccaatgcgcaccgggaaaatgcaaagaaatacgtgttcctaggggatcacctacttagtatcttcaccgctggtcgcgataccacgaccagtgttctcagttatttgttcttccaactatcccgtcgtggagacattgtgtccaacatacagcgtgagatcgaggaactcggggtgcaaacaccaacttgggaacatttgaggggcatgcgttacctcaactgggtgcttaaagaggctctcagacttaatcctccggtcgcgagtaatcagcgccaggcagtacgagacacggtcttacccgtcggcggtggaccggatgggaagagtccagttttcgatgcggaggagtttcggcctgaaaggtggcaggacttaagagtcacttacgaatatgttccgtttaatgctggtccacgcatttgcatcggtcagcagttcgcgttgacgcagatggcaatgattgtgttcagaatgcttcaagcattcaagacgattgaacgccgcgatgatcgccagccaatgtaa

SEQ ID NO: 16922 - protein, 495 aa, Muscodor strobelii
  misc_feature: SGI Peptide ID NO. 565645
  misc_feature (95)..(495): Pfam Id: PF00067 Pfam Desc: Cytochrome P450
  misc_feature (338)..(421): Pfam Id: PF00067 Pfam Desc: Cytochrome P450
  misc_feature (434)..(484): Pfam Id: PF00067 Pfam Desc: Cytochrome P450
  misc_feature (88)..(495): NCBI GI: 256733620 Blast Desc: NECHADRAFT_36280 [Nectria haematococca mpVI 77-13-4]
  misc_feature (82)..(495): NCBI GI: 261354489 Blast Desc: cytochrome P450 52E1 [Verticillium albo-atrum VaMs.102]
  misc_feature (90)..(495): NCBI GI: 10303293 Blast Desc: related to n-alkane-inducible cytochrome P450 [Neurospora crassa]
  misc_feature (90)..(491): NCBI GI: 149210127 Blast Desc: MGCH7_ch7g545 [Magnaporthe grisea 70-15] gi|86196500|gb|EAQ71138.1| MGCH7_ch7g545 [Magnaporthe grisea 70-15]
  misc_feature (54)..(490): NCBI GI: 156040904 Blast Desc: SS1G_11430 [Sclerotinia sclerotiorum 1980] gi|154695814|gb|EDN95552.1| SS1G_11430 [Sclerotinia sclerotiorum 1980]
  misc_feature (60)..(490): NCBI GI: 169598696 Blast Desc: SNOG_02153 [Phaeosphaeria nodorum SN15] gi|111069245|gb|EAT90365.1| SNOG_02153 [Phaeosphaeria nodorum SN15]
  misc_feature (114)..(495): NCBI GI: 164429645 Blast Desc: NCU02031 [Neurospora crassa OR74A] gi|157073561|gb|EAA35417.2| conserved [Neurospora crassa OR74A]
  misc_feature (64)..(493): NCBI GI: 189204508 Blast Desc: cytochrome P450 52A12 [Pyrenophora tritici-repentis Pt-1C-BFP] gi|187985688|gb|EDU51176.1| cytochrome P450 52A12 [Pyrenophora tritici-repentis Pt-1C-BFP]
  misc_feature (61)..(490): NCBI GI: 154310961 Blast Desc: BC1G_06459 [Botryotinia fuckeliana B05.10] gi|150851258|gb|EDN26451.1| BC1G_06459 [Botryotinia fuckeliana B05.10]
  misc_feature (88)..(495): NCBI GI: 242796608 Blast Desc: cytochrome P450, [Talaromyces stipitatus ATCC 10500] gi|218719422|gb|EED18842.1| cytochrome P450, [Talaromyces stipitatus ATCC 10500]
  misc_feature (79)..(495): SWISSPROT Homolog: EC 1.14.14.1 Unspecific monooxygenase
  misc_feature: Useful for introducing or modulating the production of volatile compounds
MHPAARTTTSFKRSQELASQPRNARLVYYGATCAVAILTTILFVDARYLRPGPITTSQKLGALLLIILALYTTTSLRAAHIHFQKSAVAGCSPVPRFPNDFAGIRYLLETARNIKTHRLLHQRAELFEELGHTFVHETFPDREETITTDEWENVKAVLAGKFEDWDLPAVRIRSFLPVLGRHSIFTTNGAEWQHSRSILRPAFVRDQISDVECFDRHISKLIARIPKDGSAFDLQAMFSMMTTDSISDFMFGQSTDLQGSAPEESFKFGNYFDASMHKIAMRARLGWITMLRADPELNEYSNFMKSFVAKFVKEVRMNVATNAHRENAKKYVFLGDHLLSIFTAGRDTTTSVLSYLFFQLSRRGDIVSNIQREIEELGVQTPTWEHLRGMRYLNWVLKEALRLNPPVASNQRQAVRDTVLPVGGGPDGKSPVFDAEEFRPERWQDLRVTYEYVPFNAGPRICIGQQFALTQMAMIVFRMLQAFKTIERRDDRQPM

SEQ ID NO: 16923 - DNA, 2383 bp, Muscodor strobelii
  misc_feature: SGI EST ID NO. CUFF.40014.1
  misc_feature: Variant of the nucleotide sequence at SEQ ID NO 16921
gaagggcgttgtacagtagagagaccacctaccttttctgtcgggtacttaaagggacccggcatgaattttgtgattcttgcgttctctgtcgcattggggttgcaatctgccatgtatcatcagcacttttagaaagagaccttgcataaggtgcgttgatcacagtctgcatgggtagatagccaagatgggacctttttgggacctgaccgctgccgttactgtcttgcaaaggaatgtcaaattatggtggcagggctgcttgttaaggcgtgacaactattcgtaagattgcttggccctcgatagcctatttgtatggagtgagatgcttggatatatgccaaccacatttataaaacgccatgtcatcacaccctcgtgacgtcttctaatcatcatccgtcacctagagtgatcctcgccccgttcaatcttaccacgtactaagatctagatgaggcatatgagagaagaaaaaataatgagtctcaaggcttgttactgagattaatcaagcacctcatcgtctctaggtaggacgcgggaactatttcactttgactctaggacaatcaggaagcaccgcagaggatagcaaagcgtccgcacacaagagcgctctctcagcgatgcatcccgccgctcgcacaacgacgtctttcaaacgctcccaagaattggcctcacagccacgcaatgcgcggctggtctactacggcgcaacttgcgccgttgcaatcctaaccactatcctcttcgttgacgcgcgttacttacgtcccggtcccatcaccacttcacagaaactcggagcactactgctcataattctcgcgttatacaccaccacctcactccgggctgcacacatccactttcaaaagtccgcagtggcaggctgttcgcctgtaccgaggtttccaaatgactttgcgggaatacgatatctcttagagacagcgcgcaatattaagacgcacaggttgttgcaccaaagagcagagctattcgaagagctgggccatacttttgttcatgaaactttcccagatcgcgaggagaccatcaccacggatgagtgggaaaacgtgaaggccgtccttgcgggcaagtttgaggactgggatttacctgccgttagaatcaggagcttcctgcccgtcctaggaagacactcgatattcaccaccaacggcgctgaatggcaacattcacgctctattttacgcccggcattcgtgcgggaccagatctcagatgtcgagtgtttcgatcggcacatcagcaagcttatcgcgcgaatcccgaaagatggcagcgcgtttgacctacaggccatgttttccatgatgacgacggacagcatatcagactttatgttcgggcagagcaccgatcttcagggcagcgcaccagaagagagcttcaagttcggcaactactttgatgcttcgatgcacaaaatcgccatgcgagctcgcttgggctggatcacaatgttgagagctgatccagagttgaacgagtattcaaatttcatgaagagcttcgttgcgaaattcgtcaaagaggtgaggatgaatgtagcgaccaatgcgcaccgggaaaatgcaaagaaatacgtgttcctaggtaagtgacctaatctattaactattagaaactagctctttgttttaaaaccggcggccccgctaatagtcgtgaaaaataactaacccaatatctttctggctaccagatgagctccttaagtctggcgagccggacaacgttattagggatcacctacttagtatcttcaccgctggtcgcgataccacgaccagtgttctcagttatttgttcttccaactatcccgtcgtggagacattgtgtccaacatacagcgtgagatcgaggaactcggggtgcaaacaccaacttgggaacatttgaggggcatgcgttacctcaactgggtgcttaaagaggctctcagacttaatcctccggtcgcgagtaatcagcgccaggcagtacgagacacggtcttacccgtcggcggtggaccggatgggaagagtccagttttcgtgagtaaggggacaaattttagatatttaccatggacgatgcatcgacggaaggacatctttggacaggatgcggaggagtttcggcctgaaaggtggcaggacttaagagtcacttacgaatatgttccgtttaatgctggtccacgcatttgcatcggtcagcagttcgcgttgacgcagatggcaatgattgtgttcagaatgcttcaagcattcaagacgattgaacgccgcgatgatcgccagccaatggtatgtgtagaaagatcccgcgcgacttattttttgatcgttttcc

SEQ ID NO: 16924 - DNA, 792 bp, Muscodor strobelii
  misc_feature: SGI cDNA ID NO. 565646
  misc_feature: Encodes the peptide sequence at SEQ ID NO 16925
atgcatgaaatattcttgactgcgacagtgaagtcgaccgactttgacatggcgtgcgctgttctgtcaggtttgacatggatgaaagcccgccgcaccatctaccgcattctctttttcgctggtcagccgcaacccaaaggactatcggccattccaccacaagccgtgttccatcgcgagcgctttcagccggaccgccagctttgggcagagctcagcaaacaactcctccgtgcatcctacattctacaggtagcatacgagattcctccagacacaggtttcgggaaggacacgtcgatggattttgcagctttgccagcaaccctgcgctggactgacatgcctgatcccttgcgggactctcccatcacttcaaggaagaagattgagattccgcttctgcgaggtgtacccaacatattgcacgaaaacaagcacacgtatactcacgagctcattcaggagacatactcgttcatcaaaggcgatgttgagatagtcttcagcaggcattaccacttgccagactcgccatcacgccctgtccaacagatgcccgccttcgaagaactgcgacctgtggattcggcactgaagtgggtgctgaacgttaagatgaatgtcattgaggatagccaaccagacaagcttcggaaagcaaacgaggagctcatgcgcgtcaagactgaattcgacaagctgttcgattttaaggtcgttgatcgcagggtattcgatacgagaatcgcacagctgcctcaggtcccgggccgaggtcctccgtga

SEQ ID NO: 16925 - protein, 263 aa, Muscodor strobelii
  misc_feature: SGI Peptide ID NO. 565646
  misc_feature (2)..(250): Pfam Id: PF09637 Pfam Desc: Med18 protein
  misc_feature (1)..(256): NCBI GI: 46137933 Blast Desc: FG10481.1 [Gibberella zeae PH-1]
  misc_feature (1)..(261): NCBI GI: 256735622 Blast Desc: NECHADRAFT_75667 [Nectria haematococca mpVI 77-13-4]
  misc_feature (1)..(253): NCBI GI: 145614178 Blast Desc: MGG_08928 [Magnaporthe grisea 70-15] gi|145021127|gb|EDK05256.1| MGG_08928 [Magnaporthe grisea 70-15]
  misc_feature (1)..(251): NCBI GI: 156059882 Blast Desc: SS1G_03954 [Sclerotinia sclerotiorum 1980] gi|154701740|gb|EDO01479.1| SS1G_03954 [Sclerotinia sclerotiorum 1980]
  misc_feature (1)..(252): NCBI GI: 261354420 Blast Desc: conserved [Verticillium albo-atrum VaMs.102]
  misc_feature (1)..(251): NCBI GI: 154292212 Blast Desc: [Botryotinia fuckeliana B05.10] gi|150846209|gb|EDN21402.1| [Botryotinia fuckeliana B05.10]
  misc_feature (1)..(250): NCBI GI: 67539164 Blast Desc: AN5752.2 [Aspergillus nidulans FGSC A4] gi|74594902|sp|Q5B128.1|MED18_EMENI RecName: Full=Mediator of RNA polymerase II transcription subunit 18; AltName: Full=Mediator 18
  misc_feature (1)..(250): NCBI GI: 70991455 Blast Desc: RNA polymerase II mediator complex subunit Srb5 [Aspergillus fumigatus Af293] gi|74671023|sp|Q4WNC6.1|MED18_ASPFU RecName: Full=Mediator of RNA polymerase II transcription subunit
  misc_feature (1)..(250): NCBI GI: 119467988 Blast Desc: RNA polymerase II mediator complex subunit Srb5, [Neosartorya fischeri NRRL 181] gi|158512657|sp|A1DM82.1|MED18_NEOFI RecName: Full=Mediator of II
  misc_feature (1)..(251): NCBI GI: 240107999 Blast Desc: CPC735_003420 [Coccidioides posadasii C735 delta SOWgp]
MHEIFLTATVKSTDFDMACAVLSGLTWMKARRTIYRILFFAGQPQPKGLSAIPPQAVFHRERFQPDRQLWAELSKQLLRASYILQVAYEIPPDTGFGKDTSMDFAALPATLRWTDMPDPLRDSPITSRKKIEIPLLRGVPNILHENKHTYTHELIQETYSFIKGDVEIVFSRHYHLPDSPSRPVQQMPAFEELRPVDSALKWVLNVKMNVIEDSQPDKLRKANEELMRVKTEFDKLFDFKVVDRRVFDTRIAQLPQVPGRGPP

SEQ ID NO: 16926 - DNA, 4403 bp, Muscodor strobelii
  misc_feature: SGI EST ID NO. CUFF.40008.0
  misc_feature: Variant of the nucleotide sequence at SEQ ID NO 16924
cagcgaccaagctgtgcatctgggacttgcagcagacgaccaaataagctgccgaatttcgcttccaacaagccaagtatcgtggcaaatctccaccacttgggcgatggatcgtgaaatctactagttgggctactgggatcgagctaggaatatggagacatgtaagatggctcataagtctctagacatcgggaccagaagcgaacccaaatgagacaggccaggctcaggagatggacgatttgcaggtattagactcttgttacccgctgtccggataccattccttgcatgtgcaccgtttccgcccggtggaactacttgacacccatggctcatcttgatagttaaatacatcttgtactgcccatgctcctgcatatcagcactctacttgctccatcaccattgtgtgtccatgctgggctgctagtatactctgctaacccatcccttggcgactacgataatcaccatgaggaaccctttccgagccaccgttgccaccgagcagcccattgtagaggacactcccaccgtcgtcaacgacaaggagggtggtctggtcaccggaacccaccctacttctgaatccgggaacgagagtgacaacgattctatcgacaaaaatgcccaagctggtgtccaggccgtcgaggccatgaccaaaacctggtcgaagcgtgatctatatatcgcttatgctcttatctggattatctatctcttcgatgcattgcagcaaggcacaaccggcatcttgacaccttatgtagttagtgcgttcgaggagcattctttgacggctaccgtcaacgtcgcatccggtggtacgtgtagaaagatcccccgcgagttattttttgatcgtattcctaaaacgcggtactgacttctctgtagtaagtgatctaacctattaattatcagaaactagccctttgttttaaaacccgcggccccgcgaaaagtcatcaaaaataactgacccgatacctttctggctactagatcattggtggcgtctctaaacttcctttggccaaaatattggacgtctggggacgaccccagggttaccttgtcacggcattcttcatgaccttcggtctgctactcatggccgtttgtcaaaacgtgcagacttacgctgctgcgcaggttttctattgggttggttacaatggaatttcttactgtatcagcgtcttcgttgccgacacttcgtctttgaagaaccgaggtttcatgctggcgttcacgagctcaccctacctcatcaccgtttgggtcactggtcgcctcgctgacgctatttactttggccctggtttccgatgggggttcggtatcttcgccattattacaccttttgtccttacgcctctttggtatttattctggtccaatcagaacaaggccatcaagtctggtgtactagtccgcgaaaagagcggcaggaccactttccaatcgatcaagcactattttttcgagtttgacatcgtctgcttgattctgatcgttgctggcttctcgctcttccttttgtcattcagtatttactcgttccagaaatacggctggagagatcccttgaccatctccttcatcgtcgttggtttcatcctccttctcaccgccgtcttctgggagaagtactggtcacccgttaagttcctgccctgggagcttcttaaagaccgcactgtcttgggtgcctgtattctcgctgccgttctgttcgtcgaatattacatctggacctcctacttcacgtccttccttcaagtcgtactccgactggacctgacgacagtaggatatatctcgaacatttacaccttgggctcttgcttcttttccttccctgtgggtatcttcattcgctggactggtcgcttcaagtggatcactgtactctttggcgtgccggcgacaattctatctatcggtctcctcatccagtttagagcgcccagcacttcgctcggctggatcatcttcgttgaaatcttgtacgcctttgctggcggtgcttgtgtcatctgtgaacaggtggctgtgatggccgcggctgctcatcaacacgttgccgtcgttcttgccattgagggtatgttcagcagtgttggtggtgcgataggatccactgtggccggagccatttggactggcatttttcccggtaggcttcacagatatctgccagaggagtcgcaagccaatttcacccagatctatggcgacgtcctcacccagatctcctaccctgtcggctctccgacgcacgacgccatcgtccatgcctacggcgactccctgagaatcatgtatattgctgccaccgccatcaccgtcatcggcctcggcgcgactttaatgtggcgcgacatcaaggtcaaggaatttaagcaggtcaagggtaccgttatctgatctcaagcagcgtcagcaatgttacaatgcttttaatctgggatgggagctctgtgggtgaaactaattctatagatcacttcgacggaacaaaataccaaacatagtgtcacacggtctacttagatccaaatcaaatttttgttcaaatactcgggtgctttctttgttgtgacccatttacgactgtgtaccgctaaaaggctgcatataaattatcagacaatcttggcctttcaaggctacaatcggacgattcaaatttgatagattttggtacagtgatgcgctagtggataatatcttctacatctgcctgagatgtgattgaaggtattgaattgcatcggagatgctcattgacttgggcactggtgtctaagatggcttttaggtggggctatgtcaacattgctgcagggtctcacgatagcttagcacctcaacctcgactttatttgcaccttcgaaccaatttcctcatcaagtgaccttactcagcttcagcctacatttcattgtactctgaatctgctcagacacaaggcacgaagattcttttcatgtcatgagccgggctaggtaagacggagcgtggggggttcataaacacccaatcgacgccctacggacagacagaccgcagccagcatgcatgaaatattcttgactgcgacagtgaagtcgaccgactttgacatggcgtgcgctgttctgtcaggtttgacatggatgaaagcccgccgcaccatctaccgcattctctttttcgctggtcagccgcaacccaaaggactatcggccattccaccacaagccgtgttccatcgcgagcgctttcagccggaccgccagctttgggcagagctcagcaaacaactcctccgtgcatcctacattctacaggtagcatacgagattcctccagacacaggtttcgggaaggacacgtcgatggattttgcagctttgccagcaaccctgcgctggactgacatgcctgatcccttgcgggactctcccatcacttcaaggaagaagattgagattccgcttctgcgaggtgtacccaacatattgcacgaaaacaagcacacgtatactcacgagctcattcaggagacatactcgttcatcaaaggcgatgttgagatagtcttcagcaggcattaccacttgccagactcgccatcacgccctgtccaacagatgcccgccttcgaagaactgcgacctgtggattcggcactgaagtgggtgctgaacgttaagatgaatgtcattgaggatagccaaccagacaagcttcggaaagcaaacgaggagctcatgcgcgtcaagactgaattcgacaagctgttcgattttaaggtcgttgatcgcagggtattcgatacgagaatcgcacagctgcctcaggtcccgggccgaggtcctccgtgacacctccaatggtctttactatttcgttccgaccggctcggtgaacctttgagaacggtcatagcatgctgccataacgggctttctcaatggtgcacatacagccactggtcttttcagctacctctttgacacgcactataacattgaaagagaaacgctcttccgagggtatagcaatcgataaagactgcatatgccaaattgtgtgcatttgcggtggtcctagcaatatataccctaacactgtatgaagagaccgacctggtatgggggctaggccaagatcaaagagcaaagcacaaggcgcttgcaaaacatcctgtaaagcatgcaattttcgacacttaagtagtgcgttatttgtttgccaagcgtacggacatagccagaatagaatattcgttatcaatttcaactttaatggaaaatatcgcgccccaaccataacagtgtctctctccaatgtctactactgggctgactcgcattatctcctgttcaatatcactcctgtt

SEQ ID NO: 16927 - DNA, 1728 bp, Muscodor strobelii
  misc_feature: SGI cDNA ID NO. 565647
  misc_feature: Reduced expression when VOC is produced
  misc_feature: Encodes the peptide sequence at SEQ ID NO 16928
atgaggaaccctttccgagccaccgttgccaccgagcagcccattgtagaggacactcccaccgtcgtcaacgacaaggagggtggtctggtcaccggaacccaccctacttctgaatccgggaacgagagtgacaacgattctatcgacaaaaatgcccaagctggtgtccaggccgtcgaggccatgaccaaaacctggtcgaagcgtgatctatatatcgcttatgctcttatctggattatctatctcttcgatgcattgcagcaaggcacaaccggcatcttgacaccttatgtaatcattggtggcgtctctaaacttcctttggccaaaatattggacgtctggggacgaccccagggttaccttgtcacggcattcttcatgaccttcggtctgctactcatggccgtttgtcaaaacgtgcagacttacgctgctgcgcaggttttctattgggttggttacaatggaatttcttactgtatcagcgtcttcgttgccgacacttcgtctttgaagaaccgaggtttcatgctggcgttcacgagctcaccctacctcatcaccgtttgggtcactggtcgcctcgctgacgctatttactttggccctggtttccgatgggggttcggtatcttcgccattattacaccttttgtccttacgcctctttggtatttattctggtccaatcagaacaaggccatcaagtctggtgtactagtccgcgaaaagagcggcaggaccactttccaatcgatcaagcactattttttcgagtttgacatcgtctgcttgattctgatcgttgctggcttctcgctcttccttttgtcattcagtatttactcgttccagaaatacggctggagagatcccttgaccatctccttcatcgtcgttggtttcatcctccttctcaccgccgtcttctgggagaagtactggtcacccgttaagttcctgccctgggagcttcttaaagaccgcactgtcttgggtgcctgtattctcgctgccgttctgttcgtcgaatattacatctggacctcctacttcacgtccttccttcaagtcgtactccgactggacctgacgacagtaggatatatctcgaacatttacaccttgggctcttgcttcttttccttccctgtgggtatcttcattcgctggactggtcgcttcaagtggatcactgtactctttggcgtgccggcgacaattctatctatcggtctcctcatccagtttagagcgcccagcacttcgctcggctggatcatcttcgttgaaatcttgtacgcctttgctggcggtgcttgtgtcatctgtgaacaggtggctgtgatggccgcggctgctcatcaacacgttgccgtcgttcttgccattgagggtatgttcagcagtgttggtggtgcgataggatccactgtggccggagccatttggactggcatttttcccggtaggcttcacagatatctgccagaggagtcgcaagccaatttcacccagatctatggcgacgtcctcacccagatctcctaccctgtcggctctccgacgcacgacgccatcgtccatgcctacggcgactccctgagaatcatgtatattgctgccaccgccatcaccgtcatcggcctcggcgcgactttaatgtggcgcgacatcaaggtcaaggaatttaagcaggtcaagggtaccgttatctga

SEQ ID NO: 16928 - protein, 575 aa, Muscodor strobelii
  misc_feature: SGI Peptide ID NO. 565647
  misc_feature (54)..(480): Pfam Id: PF07690 Pfam Desc: Major Facilitator Superfamily
  misc_feature (323)..(480): Pfam Id: PF07690 Pfam Desc: Major Facilitator Superfamily
  misc_feature (12)..(575): NCBI GI: 116204041 Blast Desc: CHGG_09904 [Chaetomium globosum CBS 148.51] gi|88176032|gb|EAQ83500.1| CHGG_09904 [Chaetomium globosum CBS 148.51]
  misc_feature (1)..(575): NCBI GI: 183604871 Blast Desc: major facilitator superfamily transporter [Ajellomyces capsulatus] gi|225554458|gb|EEH02756.1| siderophore iron transporter [Ajellomyces capsulatus G186AR]
  misc_feature (12)..(575): NCBI GI: 119194123 Blast Desc: siderophore iron transporter [Coccidioides immitis RS]
  misc_feature (12)..(575): NCBI GI: 240105437 Blast Desc: Major Facilitator Superfamily protein [Coccidioides posadasii C735 delta SOWgp]
  misc_feature (1)..(575): NCBI GI: 226283657 Blast Desc: siderophore iron transporter mirB [Paracoccidioides brasiliensis Pb01]
  misc_feature (12)..(575): NCBI GI: 258575309 Blast Desc: conserved [Uncinocarpus reesii 1704] gi|237902102|gb|EEP76503.1| conserved [Uncinocarpus reesii 1704]
  misc_feature (1)..(575): NCBI GI: 226288294 Blast Desc: siderophore iron transporter mirB [Paracoccidioides brasiliensis Pb18]
  misc_feature (1)..(575): NCBI GI: 225683232 Blast Desc: siderophore iron transporter mirB [Paracoccidioides brasiliensis Pb03]
  misc_feature (1)..(575): NCBI GI: 261203181 Blast Desc: siderophore iron transporter [Ajellomyces dermatitidis SLH14081] gi|239586589|gb|EEQ69232.1| siderophore iron transporter [Ajellomyces dermatitidis SLH14081] siderophore iron
  misc_feature (1)..(575): NCBI GI: 171679896 Blast Desc: protein product [Podospora anserina] gi|170939574|emb|CAP64801.1| protein product [Podospora anserina]
  misc_feature: Useful for introducing or modulating the production of volatile compounds
MRNPFRATVATEQPIVEDTPTVVNDKEGGLVTGTHPTSESGNESDNDSIDKNAQAGVQAVEAMTKTWSKRDLYIAYALIWIIYLFDALQQGTTGILTPYVIIGGVSKLPLAKILDVWGRPQGYLVTAFFMTFGLLLMAVCQNVQTYAAAQVFYWVGYNGISYCISVFVADTSSLKNRGFMLAFTSSPYLITVWVTGRLADAIYFGPGFRWGFGIFAIITPFVLTPLWYLFWSNQNKAIKSGVLVREKSGRTTFQSIKHYFFEFDIVCLILIVAGFSLFLLSFSIYSFQKYGWRDPLTISFIVVGFILLLTAVFWEKYWSPVKFLPWELLKDRTVLGACILAAVLFVEYYIWTSYFTSFLQVVLRLDLTTVGYISNIYTLGSCFFSFPVGIFIRWTGRFKWITVLFGVPATILSIGLLIQFRAPSTSLGWIIFVEILYAFAGGACVICEQVAVMAAAAHQHVAVVLAIEGMFSSVGGAIGSTVAGAIWTGIFPGRLHRYLPEESQANFTQIYGDVLTQISYPVGSPTHDAIVHAYGDSLRIMYIAATAITVIGLGATLMWRDIKVKEFKQVKGTVI

SEQ ID NO: 16929 - DNA, 4403 bp, Muscodor strobelii; identical to SEQ ID NO: 16926
  misc_feature: SGI EST ID NO. CUFF.40008.0
  misc_feature: Variant of the nucleotide sequence at SEQ ID NO 16927

SEQ ID NO: 16930 - DNA, 282 bp, Muscodor strobelii
  misc_feature: SGI cDNA ID NO. 565648
  misc_feature: Reduced expression when VOC is produced
  misc_feature: Encodes the peptide sequence at SEQ ID NO 16931
atgtcggcagcacaaaagcccatccgcctcccgcctttaaaggctctccgcgtgcggaaccccaacggcgtgaaagagcgcccgtgcatggccatcatgtcgtcggtactctcatgctgggcctcagctgggtatagcaccgccggatgcgcccaggtcgaacaggctctgcgccagtgcatggacggccccaagcctggcccgccccgcaagagcgaagtcaactaccacctcgggagattcaaggacaagctcacctatcccgagaagaagaagagatga

SEQ ID NO: 16931 - protein, 93 aa, Muscodor strobelii
  misc_feature: SGI Peptide ID NO. 565648
  misc_feature (5)..(92): NCBI GI: 85094131 Blast Desc: NCU06066 [Neurospora crassa OR74A] gi|28921284|gb|EAA30593.1| NCU06066 [Neurospora crassa OR74A]
  misc_feature (1)..(90): NCBI GI: 39963052 Blast Desc: MGG_09698 [Magnaporthe grisea 70-15] gi|145015522|gb|EDK00059.1| MGG_09698 [Magnaporthe grisea 70-15]
  misc_feature (1)..(92): NCBI GI: 46137995 Blast Desc: FG10512.1 [Gibberella zeae PH-1]
  misc_feature (3)..(93): NCBI GI: 116204519 Blast Desc: CHGG_10143 [Chaetomium globosum CBS 148.51] gi|88176271|gb|EAQ83739.1| CHGG_10143 [Chaetomium globosum CBS 148.51]
  misc_feature (2)..(92): NCBI GI: 156053750 Blast Desc: [Sclerotinia sclerotiorum 1980] gi|154703503|gb|EDO03242.1| [Sclerotinia sclerotiorum 1980]
  misc_feature (2)..(92): NCBI GI: 154303293 Blast Desc: [Botryotinia fuckeliana B05.10] gi|150854958|gb|EDN30150.1| [Botryotinia fuckeliana B05.10]
  misc_feature (4)..(85): NCBI GI: 171679773 Blast Desc: protein product [Podospora anserina] gi|170939512|emb|CAP64740.1| protein product [Podospora anserina]
  misc_feature (5)..(93): NCBI GI: 261354322 Blast Desc: conserved [Verticillium albo-atrum VaMs.102]
  misc_feature (1)..(92): NCBI GI: 119496905 Blast Desc: 37S ribosomal protein Mrp10, mitochondrial [Neosartorya fischeri NRRL 181] gi|119413388|gb|EAW23329.1| 37S ribosomal protein Mrp10, mitochondrial [Neosartorya fischeri NRRL
  misc_feature (7)..(92): NCBI GI: 238486364 Blast Desc: 37S ribosomal protein Mrp10, mitochondrial [Aspergillus flavus NRRL3357] gi|220699299|gb|EED55638.1| 37S ribosomal protein Mrp10, mitochondrial [Aspergillus flavus
  misc_feature: Useful for introducing or modulating the production of volatile compounds
MSAAQKPIRLPPLKALRVRNPNGVKERPCMAIMSSVLSCWASAGYSTAGCAQVEQALRQCMDGPKPGPPRKSEVNYHLGRFKDKLTYPEKKKR

SEQ ID NO: 16932 - DNA, 2116 bp, Muscodor strobelii
  misc_feature: SGI EST ID NO. CUFF.40098.0
  misc_feature: Variant of the nucleotide sequence at SEQ ID NO 16930
gcgcgtttcgtcgacccatcgtcgacgactccatctttggctcaattttatgtcccaacttaagcttcttccgatacaattgataatgagatcatgaggcgaaattggatcggaagcttaagtggggtttgcgcacgaggccatcacgctatgatcaaactgcttcggggacacgatgccaactggactgacgtgaagtggacagccgtgtctagaattggcgcagtctctccagcgttcctttgcatgatattttgggagttatgttttgaccgaacaaaattgaccgttatagcttcttgcatagaatgcgagcttagcgggtgaaaatcgaacatgacaacgctggaccaaatctttctcgagtcatttttcctcggttacttctagacccttcacagagcaagttgatagaacaagtcgatactagcggtcgcatagaaatggcgacagagctattacggatcgaagtcgcgagagatcggcatcatcactacatgaaaaatgtcgtgagtagcaagttaagcatttatgtagtcagcagcgacagacaatgagctgagtcgttattttcatatagtgctacgtgaacgaagttagagagaaggaaacggctctctgacggctaagagcgatatctccaaatagtgcagcgcaagcatagagatcggtgccatgaatgcatgcgtacttcggcaagtgggaggtagagagctgggttactgcccaccaggctgtggactggagaggctacggaatgcaaccttgggcctcagtaagtgatagacaagtgggttcaagcatttgtacgcgtgtgccagaaggcggcgtgccagggccccagtctgaatcaacctgcgccaatctgccgccaagaagcaagatgctactgtatgatggttcagatgggatacaagacagtccttggcaggtagttgacaggtagtattcggacagatgtcttcccatggagtgtgttaccagacgccgggcgacctgagcaggttctccaggcaaagtgcagagtgcaggatatgaccagatataccagctgcccatcggctgtctgctttgctgacaactgtcatgacttgctctgattaaagatcgaggttgttagcataggccaatgggagcgcggtaacggccaatggcatcactcgagatagactgggtccaactttttgtagccagactccagaagccgtcttagctgtctcgggcggcatcgcgaacaacaccctctcgacacagcaacccgattcgccatgtcggcagcacaaaagcccatccgcctcccgcctttaaaggctctccgcgtgcggaaccccaacggcgtgaaagagcgcccgtgcatggccatcatgtcgtcggtactctcatgctgggcctcagctgggtatagcaccgccggatgcgcccaggtcgaacaggctctgcgccagtgcatggacggccccaagcctggcccgccccgcaagagcgaagtcaactaccacctcgggagattcaaggacaagctcacctatcccgagaagaagaagagatgatggagcggcaccatggatgtctcgtcgacgactgcatcgacaacaacgtcaaagctccaccgttcagacacccttaacgcaaattacactagcaggcctcccaactatcgaatcgagacgagcaggatagaaactgatcgaacaagaaagaagagcatggcacggcgttacggactgcccatacgagattgctgggcctgaattagagaatatttcggccaatctcgccatgtaccaaaaactacacacatttgtactaaactgtatatcaagatatcaaatgcgttttctagaatattatacgatcgacatcgagtcatccaaaaacaagctgaaggcttcaatgaagcaggcgacgggtaatacgataactgaatactgcattgacccctatcccaaagcctcatcctccaaagccaatcccaccactagcaaagacaaggtaaatgcaaactctgataattagaacaactcctgcccgacggtacatcactccccgtctgcagatacacctgccaataatccgcggagccgcccatctgacacaccaaaaagttgagctgtct

SEQ ID NO: 16933 - DNA, 357 bp, Muscodor strobelii
  misc_feature: SGI cDNA ID NO. 565649
  misc_feature: Encodes the peptide sequence at SEQ ID NO 16934
atgcgctcaacacttgcgcttcttgttgctggagccgccttcgtggtggctaaaccagagcagattcgtgctgtgtcgtcgcctattttccattattacttgcaagcttctccgcagaatgcatccatcccagtcatgggtccggagtcgagcagcgagtacttcaacatcgcgtcgggatcgattcagagcaccaacacctcggcgtatctcacagtcggatcagacagcacgtcgtacaagactctgaccttgagctcgacgtcgtctgcgcctgggtgggcgctggagggcgacacgatcatcacggggactagtatggtgggattggctttggaggatgaggctttgggatag

SEQ ID NO: 16934 - protein, 118 aa, Muscodor strobelii
  misc_feature: SGI Peptide ID NO. 565649
  misc_feature (21)..(103): NCBI GI: 169608476 Blast Desc: SNOG_07318 [Phaeosphaeria nodorum SN15] gi|160701652|gb|EAT84784.2| SNOG_07318 [Phaeosphaeria nodorum SN15]
  misc_feature (21)..(102): NCBI GI: 238579173 Blast Desc: MPER_11962 [Moniliophthora perniciosa FA553] gi|215450742|gb|EEB89894.1| MPER_11962 [Moniliophthora perniciosa FA553]
  misc_feature (21)..(102): NCBI GI: 169846788 Blast Desc: CC1G_04541 [Coprinopsis cinerea okayama7#130] gi|116508878|gb|EAU91773.1| CC1G_04541 [Coprinopsis cinerea okayama7#130]
MRSTLALLVAGAAFVVAKPEQIRAVSSPIFHYYLQASPQNASIPVMGPESSSEYFNIASGSIQSTNTSAYLTVGSDSTSYKTLTLSSTSSAPGWALEGDTIITGTSMVGLALEDEALG

SEQ ID NO: 16935 - DNA, 2982 bp, Muscodor strobelii
  misc_feature: SGI cDNA ID NO. 565650
  misc_feature: Reduced expression when VOC is produced
  misc_feature: Encodes the peptide sequence at SEQ ID NO 16936
atggcacatgcaccggcgctactgaggacgaacaccgccccggtcttccccgccaacagcaactacggcggcatcatgtccggcaccagggccagccaactctcgggctcgaccatcgtcaactcggcctcgtccacctcgctcgcctccatgtcgaccgccaccaccgtctcgcccgccaacggcgccgtcgccgccaccgccaacatcatcaaccagcgcgccgacgcctcccgctccctctaccagatctgcgtcgccctcaagcagcgcctgcagcaggtccccgacttcgacgacttcctgcaccagctcgactcccagatcgccaccggccaggaccccgtcgagtccctgtggaacctgctgcgcaccggcctccccctgatcaccatctacaactgcctgcagcccgaccccgtcctcgagatcgccgacaccatcagggaccccgccagacgtgccaagacggccatgttcaagttcatcgaggcctgcctgagaaagctgcagatccccgccgccgagtgcttcgtcattgccgacctgatgaaccaggacacgacgggtttcgtcaaggtcatccaagtcatcaaccgtgtcctcgatgtggccgaacaaagaggcctgcttctccagatcacgccctatcccgaagacactgacgtagtggcacccacccctcagatgacataccgagaccacatcatacgcgaactggtcgacacggagcgcaaatacgtacaggacctagaaaatctccacgacttgaagaagtccctgacggacaaagccgtcattcccggagacgtggcctaccaaatattcttgaatgtccacgggatccttgacttccagcgacgtttcttgatccaggtggagatgacaaatagcatgccacagtcgcagcagcattggggagctccattcgtcacttacgaggaggcgttcgagctctatctcccttttatagccaaccagcggaaggccgcccaggtggccaatcaagtcttcgacaagatccagacgtcggagcatgccgtcgccgtcgatttcaacacactggatgggtttctattaaaaccaatgcaaagactagtgaaatatcctctactactcaaggacttgcttaagaagagtgaggaccagagcaccaaggatgatctttctcgaggaatcgaggcatccgagcgcgttctcatgaaggcgaacgaggctgtaaaccgtgacctgttaaatgaagctctggaagagctgcggcttcgagtggacgactggaagaaccataaggtcgaccagtttggccaactcctgttgcacggtgtatataccgtagtaactggtcgcagcgaacaggagaaggattatgagatctacctgttcgagcacatcctactatgctgcaaagaggtacagcccaataaaagcaaggacaagaaggacaaaaataagtccctccccaaaatccggaacaagaacaacaaattgcagctcaagggccgaatcttcatgaccaatgtcacggaaattctctcgtttgcaaaacctggttcttatactgtacaaatttggtggaaaggagaccccggagtagagaatttcattatcaagttctcgaacgaggagaccatgaaaaaatgggctaccggacttgatgtgcaacgaaaaagcaatattcagacttcaactacgagcccggcacaaacgacgaccgagttcacttggatgcgaaccgccagcggcttagagaatccttataagaatgacgaggaggaggacgatgaggaggacggatcgctcacccaggtgccttcgaatgtcagctataccaactcaacaggaggcgtcatggtccgcagcagcacctctagtactgcccttcgcgctcggtcgatcacaaatgatagcactcaatcgttagctggcttagcacgggcaccaccaccgcaattcccgttacccgcccctcccagacagttgagtgtccaaaccggcgggggacaatctcccgggccacgagtaggcgattcgtatttctcgcccaccgtggaatccccagcgtcatcacggactagcaccgccagtatgctcaatcaaaacggtcagtacccatttccccggactgccacaccgcaaggcgggtgggaagacatcaacaatcgctacacagcaccggccatgccccgggctccatctcgagacgggccttcccctatcaacagccgaaaccccagaggcccctccatgccggttatggcgtcacagcaatccctggcccagcagcaacgaagccgatcctacagcacacctgacatcaatgggcaagcgaatgggcggaggacaaacagcgccaccccagttcccgcagtccccggcattccacctcatcttcacccggcccatgatgcctctatcccccgctcacagacagggtctcctcgacaggatctcccaatacgcgctaacacgcagagcccaggtgttcagcgggagcgcatgaatcagtccaatggtcaatacggcggaacactaacccaattcccatcgcaacccattcacgcccggcaagccactccttctggccagccttcagtccccatgcctttgagcctcgatgggcggcaggccgctgtgtcacccgctctaggtagcgcaatgctcaatgacctgccgattccaacacagctcaaggtcaaggtcaattgcgatacgggcacctacgtcacgcttgtcgtgcctttcaacattacgtatcagtccctcattgaccggatcgacgtaaagctcacgcggttcaccaacagctcgattggtaagggcaatctcagactgcggtaccgtgacgaggatggagacttggtgacaatcgagagcgacgacgacatccagatcgcattcctggaatggcgtgaaggcgtgcgcaacatgtacaccaacggcgtcggagaaatagagctcttttgcgtgggcgacatgaactaa

SEQ ID NO: 16936 - protein, 993 aa, Muscodor strobelii
  misc_feature: SGI Peptide ID NO. 565650
  misc_feature (114)..(202): Pfam Id: PF06395 Pfam Desc: CDC24 Calponin
  misc_feature (895)..(991): Pfam Id: PF00564 Pfam Desc: PB1 domain
  misc_feature (236)..(405): Pfam Id: PF00621 Pfam Desc: RhoGEF domain
  misc_feature (908)..(991): Pfam Id: PF00564 Pfam Desc: PB1 domain
  misc_feature (58)..(988): NCBI GI: 255947714 Blast Desc: Pc22g05920 [Penicillium chrysogenum Wisconsin 54-1255] gi|211591641|emb|CAP97880.1| Pc22g05920 [Penicillium chrysogenum Wisconsin 54-1255]
  misc_feature (66)..(988): NCBI GI: 225559838 Blast Desc: conserved [Ajellomyces capsulatus G186AR]
  misc_feature (66)..(988): NCBI GI: 240276286 Blast Desc: rho guanyl nucleotide exchange factor [Ajellomyces capsulatus H143]
  misc_feature (56)..(988): NCBI GI: 240105333 Blast Desc: RhoGEF domain containing protein [Coccidioides posadasii C735 delta SOWgp]
  misc_feature (60)..(988): NCBI GI: 159125393 Blast Desc: Rho guanyl nucleotide exchange factor, [Aspergillus fumigatus A1163]
  misc_feature (1)..(991): NCBI GI: 270045965 Blast Desc: guanine-nucleotide exchange factor Cdc24 [Epichloe festucae]
  misc_feature (30)..(991): NCBI GI: 256735661 Blast Desc: [Nectria haematococca mpVI 77-13-4]
  misc_feature (30)..(991): NCBI GI: 46137993 Blast Desc: FG10511.1 [Gibberella zeae PH-1]
  misc_feature (25)..(992): NCBI GI: 164425647 Blast Desc: NCU06067 [Neurospora crassa OR74A] gi|157071007|gb|EAA30594.2| conserved [Neurospora crassa OR74A]
  misc_feature (1)..(990): NCBI GI: 39963045 Blast Desc: MGG_09697 [Magnaporthe grisea 70-15] gi|145015523|gb|EDK00060.1| MGG_09697 [Magnaporthe grisea 70-15]
  misc_feature: Useful for introducing or modulating the production of volatile compounds
MAHAPALLRTNTAPVFPANSNYGGIMSGTRASQLSGSTIVNSASSTSLASMSTATTVSPANGAVAATANIINQRADASRSLYQICVALKQRLQQVPDFDDFLHQLDSQIATGQDPVESLWNLLRTGLPLITIYNCLQPDPVLEIADTIRDPARRAKTAMFKFIEACLRKLQIPAAECFVIADLMNQDTTGFVKVIQVINRVLDVAEQRGLLLQITPYPEDTDVVAPTPQMTYRDHIIRELVDTERKYVQDLENLHDLKKSLTDKAVIPGDVAYQIFLNVHGILDFQRRFLIQVEMTNSMPQSQQHWGAPFVTYEEAFELYLPFIANQRKAAQVANQVFDKIQTSEHAVAVDFNTLDGFLLKPMQRLVKYPLLLKDLLKKSEDQSTKDDLSRGIEASERVLMKANEAVNRDLLNEALEELRLRVDDWKNHKVDQFGQLLLHGVYTVVTGRSEQEKDYEIYLFEHILLCCKEVQPNKSKDKKDKNKSLPKIRNKNNKLQLKGRIFMTNVTEILSFAKPGSYTVQIWWKGDPGVENFIIKFSNEETMKKWATGLDVQRKSNIQTSTTSPAQTTTEFTWMRTASGLENPYKNDEEEDDEEDGSLTQVPSNVSYTNSTGGVMVRSSTSSTALRARSITNDSTQSLAGLARAPPPQFPLPAPPRQLSVQTGGGQSPGPRVGDSYFSPTVESPASSRTSTASMLNQNGQYPFPRTATPQGGWEDINNRYTAPAMPRAPSRDGPSPINSRNPRGPSMPVMASQQSLAQQQRSRSYSTPDINGQANGRRTNSATPVPAVPGIPPHLHPAHDASIPRSQTGSPRQDLPIRANTQSPGVQRERMNQSNGQYGGTLTQFPSQPIHARQATPSGQPSVPMPLSLDGRQAAVSPALGSAMLNDLPIPTQLKVKVNCDTGTYVTLVVPFNITYQSLIDRIDVKLTRFTNSSIGKGNLRLRYRDEDGDLVTIESDDDIQIAFLEWREGVRNMYTNGVGEIELFCVGDMN

SEQ ID NO: 16937 - DNA, 4029 bp, Muscodor strobelii
  misc_feature: SGI EST ID NO. CUFF.40297.0
  misc_feature: Variant of the nucleotide sequence at SEQ ID NO 16935
cccttgccacccagacgacgacaacgacagcaacgacgccagcgacgcccgggcctcggatggagtagacggcgatggcacatgcaccggcgctactgaggacgaacaccgccccggtcttccccgccaacagcaactacggcggcatcatgtccggcaccagggccagccaactctcgggctcgaccatcgtcaactcggcctcgtccacctcgctcgcctccatgtcgaccgccaccaccgtctcgcccgccaacggcgccgtcgccgccaccgccaacatcatcaaccagcgcgccgacgcctcccgctccctctaccagatctgcgtcgccctcaagcagcgcctgcagcaggtccccgacttcgacgacttcctgcaccagctcgactcccagatcgccaccggccaggaccccgtcgagtccctgtggaacctgctgcgcaccggcctccccctgatcaccatctacaactgcctgcagcccgaccccgtcctcgagatcgccgacaccatcagggaccccgccagacgtgccaagacggccatgttcaagttcatcgaggcctgcctgagaaagctgcagatccccgccgccgagtgcttcgtcattgccgacctgatgaaccaggacacgacgggtttcgtcaaggtcatccaagtcatcaaccgtgtcctcgatgtggccgaacaaagaggcctgcttctccagatcacgccctatcccgaagacactgacgtagtggcacccacccctcagatgacataccgagaccacatcatacgcgaactggtcgacacggagcgcaaatacgtacaggacctagaaaatctccacgacttgaagaagtccctgacggacaaagccgtcattcccggagacgtggcctaccaaatattcttgaatgtccacgggatccttgacttccagcgacgtttcttgatccaggtggagatgacaaatagcatgccacagtcgcagcagcattggggagctccattcgtcacttacgaggaggcgttcgagctctatctcccttttatagccaaccagcggaaggccgcccaggtggccaatcaagtcttcgacaagatccagacgtcggagcatgccgtcgccgtcgatttcaacacactggatgggtttctattaaaaccaatgcaaagactagtgaaatatcctctactactcaaggtccgttgcgcccccttgtgtccccccagctaggctgtagttaatgcccttcaggacttgcttaagaagagtgaggaccagagcaccaaggatgatctttctcgaggaatcgaggcatccgagcgcgttctcatgaaggcgaacgaggctgtaaaccgtgacctgttaaatgaagctctggaagagctgcggcttcgagtggacgactggaagaaccataaggtcgaccagtttggccaactcctgttgcacggtgtatataccgtagtaactggtcgcagcgaacaggagaaggattatgagatctacctgttcgagcacatcctactatgctgcaaagaggtacagcccaataaaagcaaggacaagaaggacaaaaataagtccctccccaaaatccggaacaagaacaacaaattgcagctcaagggccgaatcttcatgaccaatgtcacggaaattctctcgtttgcaaaacctggttcttatactgtacaaatttggtggaaaggagaccccggagtagagaatttcattatcaagttctcgaacgaggagaccatgaaaaaatgggctaccggacttgatgtgcaacgaaaaagcaatattcagacttcaactacgagcccggcacaaacgacgaccgagttcacttggatgcgaaccgccagcggcttagagaatccttataagaatgacgaggaggaggacgatgaggaggacggatcgctcacccaggtgccttcgaatgtcagctataccaactcaacaggaggcgtcatggtccgcagcagcacctctagtactgcccttcgcgctcggtcgatcacaaatgatagcactcaatcgttagctggcttagcacgggcaccaccaccgcaattcccgttacccgcccctcccagacagttgagtgtccaaaccggcgggggacaatctcccgggccacgagtaggcgattcgtatttctcgcccaccgtggaatccccagcgtcatcacggactagcaccgccagtatgctcaatcaaaacggtcagtacccatttccccggactgccacaccgcaaggcgggtgggaagacatcaacaatcgctacacagcaccggccatgccccgggctccatctcgagacgggccttcccctatcaacagccgaaaccccagaggcccctccatgccggttatggcgtcacagcaatccctggcccagcagcaacgaagccgatcctacagcacacctgacatcaatgggcaagcgaatgggcggaggacaaacagcgccaccccagttcccgcagtccccggcattccacctcatcttcacccggcccatgatgcctctatcccccgctcacagacagggtctcctcgacaggatctcccaatacgcgctaacacgcagagcccaggtgttcagcgggagcgcatgaatcagtccaatggtcaatacggcggaacactaacccaattcccatcgcaacccattcacgcccggcaagccactccttctggccagccttcagtccccatgcctttgagcctcgatgggcggcaggccgctgtgtcacccgctctaggtagcgcaatgctcaatgacctgccgattccaacacagctcaaggtcaaggtcaattgcgatacgggcacctacgtcacgcttgtcgtgcctttcaacattacgtatcagtccctcattgaccggatcgacgtaaagctcacgcggttcaccaacagctcgattggtaagggcaatctcagactgcggtaccgtgacgaggatggagacttggtgacaatcgagagcgacgacgacatccagatcgcattcctggaatggcgtgaaggcgtgcgcaacatgtacaccaacggcgtcggagaaatagagctcttttgcgtgggcgacatgaactaagtatgcgaggctaggactggtggagatacaacgatcatgtgtcttcagcgtctcactccgaatatcattgtcagacgatacatcgagcgatcgcttttatcatttactcagccgctatcatgttacttgactgatatttcggtccaccggatatccgggaatatgaacaccttggacagcttttcttggtatgaccgcttccgctagccgcatagcatacgtcttcacttatcgctgtcagcaccctcatagcacctgtcacgatgtaacgtgtagcaaggcagccaactgaggaatcgcagctgaggcgagctcgtgttgacaaaacgtggcaacgaagcgaatgcagcggacagcagcactggattgattgactatatgttcaatgagaagatgggggaggaggccattgtttcttagcattaacggcgttccggacggaaggcgtggttgaaattcttgggcttgcggcgctagttaaaggaaggcgtttttcatcgttatacatatttgatgaagacaagcagatatatggacgcaaagaaagcggttcgaaagctgtcttgttttgggacgaaagcgagcagagaatttacgagacgccggaatcgaggctcgatgagatgcgacgagagtgatgaggatgagccgcgtctttatatatagaagcggtaacagtcgatattgtcgtcagatggtaatgcagggctacctacctaagtagtataattacatctaaaacgatatatagggagcgggttcttgaatagggaacttgcgcttgcgacgaaatgagaggttgcttgacaattcacacactgtggactctactacgtctgaatctagactttctgcgctggatctttggtcctttgacgtgtgttttaggtgtgttatgttgtccgtgaattaatttcag

SEQ ID NO: 16938 - DNA, 774 bp, Muscodor strobelii
  misc_feature: SGI cDNA ID NO. 565651
  misc_feature: Elevated expression when VOC is produced
  misc_feature: Encodes the peptide sequence at SEQ ID NO 16939
aacgatgctgggaaattcgtgatgtactacaccgcgtggaagaagggtggcccgttcacacccaatcctacgcctttgatatgcaacgatgccggtggtggcgcgatcgatgcatctggttatgatgatggcacaaatcgctggatcttgtggaaagtcgatggctcagcgctcggtggcgccacgacctgccagcgtaagtcttccacgattcaatatcaatatgcatattttgcacttgaaatccgtggccgtgcacgggaaaaatcgcggaaaataactgatgcggccttgtctgactgtcagaaacccctactggaacaacatacgtactccactcctatcatgatccaacaggtggcacgagatgcgatcactcttgtggggagcgcatataaaatcttggataacgtcggtgcgaacaacgatggcatcgtagaggctcctgctctatataagcttcccagtggtggatatgttttattctacagcgctcattgttactcgagcgacaattacgatatcgaagcagcattctctagcactgcctatgacctacagatcaacggagcatatacaaatcgcatcattgtaatgaatactgccaataattacggcatcaaggggccgggtgggcttgatctcgatcccaatgggcaatctgtggtctttcacggacgcctgaatgccaacaaccctaccggtattcgtgagctatttgctggcgatattcatatcagtggaggcggcagcggcggcagcgtgacgtattga

SEQ ID NO: 16939 - protein, 257 aa, Muscodor strobelii
  misc_feature: SGI Peptide ID NO. 565651
  misc_feature (4)..(249): NCBI GI: 212539021 Blast Desc: endo-arabinase, [Penicillium marneffei ATCC 18224] gi|210069408|gb|EEA23499.1| endo-arabinase, [Penicillium marneffei ATCC 18224]
  misc_feature (1)..(248): NCBI GI: 261203207 Blast Desc: endo-arabinase [Ajellomyces dermatitidis SLH14081] gi|239586602|gb|EEQ69245.1| endo-arabinase [Ajellomyces dermatitidis SLH14081]
  misc_feature (1)..(248): NCBI GI: 239608363 Blast Desc: endo-arabinase [Ajellomyces dermatitidis ER-3]
  misc_feature (4)..(229): NCBI GI: 256731348 Blast Desc: NECHADRAFT_84732 [Nectria haematococca mpVI 77-13-4]
  misc_feature (4)..(246): NCBI GI: 115398738 Blast Desc: conserved [Aspergillus terreus NIH2624] gi|114191841|gb|EAU33541.1| conserved [Aspergillus terreus NIH2624]
  misc_feature (4)..(248): NCBI GI: 242819890 Blast Desc: endo-arabinase, [Talaromyces stipitatus ATCC 10500] gi|218713871|gb|EED13295.1| endo-arabinase, [Talaromyces stipitatus ATCC 10500]
  misc_feature (2)..(248): NCBI GI: 255930951 Blast Desc: Pc12g01330 [Penicillium chrysogenum Wisconsin 54-1255] gi|211581651|emb|CAP79760.1| Pc12g01330 [Penicillium chrysogenum Wisconsin 54-1255]
  misc_feature (4)..(247): NCBI GI: 169775479 Blast Desc: [Aspergillus oryzae RIB40] gi|83770070|dbj|BAE60205.1| protein product [Aspergillus oryzae]
  misc_feature (4)..(247): NCBI GI: 238495871 Blast Desc: endo-arabinase, [Aspergillus flavus NRRL3357] gi|220694051|gb|EED50395.1| endo-arabinase, [Aspergillus flavus NRRL3357]
  misc_feature (4)..(248): NCBI GI: 115401700 Blast Desc: conserved [Aspergillus terreus NIH2624] gi|114190379|gb|EAU32079.1| conserved [Aspergillus terreus NIH2624]
  misc_feature: Useful for introducing or modulating the production of volatile compounds
NDAGKFVMYYTAWKKGGPFTPNPTPLICNDAGGGAIDASGYDDGTNRWILWKVDGSALGGATTCQRKSSTIQYQYAYFALEIRGRAREKSRKITDAALSDCQKPLLEQHTYSTPIMIQQVARDAITLVGSAYKILDNVGANNDGIVEAPALYKLPSGGYVLFYSAHCYSSDNYDIEAAFSSTAYDLQINGAYTNRIIVMNTANNYGIKGPGGLDLDPNGQSVVFHGRLNANNPTGIRELFAGDIHISGGGSGGSVTY

SEQ ID NO: 16940 - DNA, 1535 bp, Muscodor strobelii
  misc_feature: SGI EST ID NO. CUFF.40026.1
  misc_feature: Variant of the nucleotide sequence at SEQ ID NO 16938
cgcggattttcgtgaaaaataactaacgcgacacctttccggctaccagcaacgatgctgggaaattcgtgatgtactacaccgcgtggaagaagggtggtacgcattgcattggattggcactgtcgtaagcgattcaaactatcagacattaaaaactacctagtcctttgttttaaagtcccgggccacgtagcgaaaccttgtgaaaaataactaacgcgacacctttctggctaccagaaacacagcaacaggcccgttcacacccaatcctacgcctttgatatgcaacgatgccggtggtggcgcgatcgatgcatctggttatgatgatggcacaaatcgctggatcttgtggaaagtcgatggctcagcgctcggtggcgccacgacctgccagcggtatgattgcatcttttgagcataagaaaagcaacgtactaacatagttatagtaagtcttccacgattcaatatcaatatgcatattttgcacttgaaatccgtggccgtgcacgggaaaaatcgcggaaaataactgatgcggccttgtctgactgtcagaaacccctactggaacaacatacgtatgagagccctctgctacttaccccactgcccttaggccatggtagttttaacgaagtacaagacgctgatatttgcatgcgtagtactccactcctatcatgatccaacaggtggcacgagatgcgatcactcttgtggggagcgcatataaaatcttggataacgttcatgccatatgcaaacacacatacacccttcttgtctgtctctgtattatatccttgacacctgatttaaaatagcggtgcgaacaacgatggcatcgtagaggctcctgctctatataagcttcccagtggtggatatgttttattctacagcgctcattgttactcgagcgacaattacgatatcgaagcagcattctctagcactggtacgtgttgaacgtgactatttgcggcctgaaatgctgtgcctatggtagcccgtccgactcaaaagactgacttagcctaatcaacggagcatatacaaatcgcatcattgtaatgaatactgccaataattacggcatcaaggggccgggtgggcttgatctcgatcccaatgggcaatctgtggtctttcacggacgcctgaatgccaacaaccctaccggtattcgtgagctatttgctggcgatattcatatcagtggaggcggcagcggcggcagcgtgacgtattgagtgctggaacgatttgcgagtagaggctttcgggttgtcacggggtgagtttcaagaaatgctcttattcgagaactgtaaatgattcctacaagacggaacctttataggacaagatgtagataattttgggggaggcataatgaaaagcgtgtgtaaatgtaacgacaaatgaatgatggatatcctaaagttcttgcagaggagattttgtccgaatcacctattacataaatattgtagtacgagtagagaactgaggcaatattc

SEQ ID NO: 16941 - DNA, 657 bp, Muscodor strobelii
  misc_feature: SGI cDNA ID NO. 565652
  misc_feature: Encodes the peptide sequence at SEQ ID NO 16942
atgtcttctgatcagctcgataagttggccatgcatgccgccgctcgtgacgggaagttgtctctattcgagtctctacttaataccgatcccaagtcagcacaacgcaaggatgaagatggtcgttacccgcttcactgggccgcttcttccaaccagcatgccatagtcctgctcctctccgagcagacggactttgaccctgatgccgaagatgaaagtggatggacccccctcatgatagcagctagtattaaggatggtgacgcggtggttgatactctactgcagcgaggtgccgacgctaatcaaaaaaatcacaacggccagaccgcattacacttcgttgcatccaagaacaacattgaggtggctcgcaagctctttagctgcaagtctcctgcttctgcccgagtcagagacaaacgcggccaatacccattacgtccgttgaacgcaacggacaatgcaggctatacggccctgcatcatgccgtggccgagggacatggcgatacggcagttgctctgctcaaggcaggcgccgagactgacaagaaagactcgggtgggttcctcgccctagatcttgcgccggataaagaggtccgcaaatacattgaaagagaagcagagaatgagggcatcgagctttga

SEQ ID NO: 16942 - protein, 218 aa, Muscodor strobelii
  misc_feature: SGI Peptide ID NO. 565652
  misc_feature (74)..(107): Pfam Id: PF00023 Pfam Desc: Ankyrin repeat
  misc_feature (157)..(189): Pfam Id: PF00023 Pfam Desc: Ankyrin repeat
  misc_feature (40)..(73): Pfam Id: PF00023 Pfam Desc: Ankyrin repeat
  misc_feature (108)..(142): Pfam Id: PF00023 Pfam Desc: Ankyrin repeat
  misc_feature (7)..(218): NCBI GI: 85117986 Blast Desc: NCU02967 [Neurospora crassa OR74A] gi|9367288|emb|CAB97304.1| related to 26s proteasome subunit p28 [Neurospora crassa] gi|28927162|gb|EAA36118.1| NCU02967 crassa
  misc_feature (4)..(218): NCBI GI: 261356550 Blast Desc: ankyrin repeat-containing protein [Verticillium albo-atrum VaMs.102]
  misc_feature (7)..(218): NCBI GI: 171684737 Blast Desc: protein product [Podospora anserina] gi|170942329|emb|CAP67981.1| protein product [Podospora anserina]
  misc_feature (7)..(218): NCBI GI: 156053497 Blast Desc: SS1G_06916 [Sclerotinia sclerotiorum 1980] gi|154704694|gb|EDO04433.1| SS1G_06916 [Sclerotinia sclerotiorum 1980]
  misc_feature (4)..(218): NCBI GI: 145615476 Blast Desc: MGG_05617 [Magnaporthe grisea 70-15] gi|145022299|gb|EDK06319.1| MGG_05617 [Magnaporthe grisea 70-15]
  misc_feature (8)..(218): NCBI GI: 67518089 Blast Desc: AN1209.2 [Aspergillus nidulans FGSC A4] gi|40746646|gb|EAA65802.1| AN1209.2 [Aspergillus nidulans FGSC A4] gi|259488471|tpe|CBF87930.1| TPA: proteasome regulatory FGSC
  misc_feature (1)..(218): NCBI GI: 119495845 Blast Desc: proteasome regulatory particle subunit (Nas6), [Neosartorya fischeri NRRL 181] gi|119412861|gb|EAW22802.1| proteasome regulatory particle subunit (Nas6), [Neosartorya NRRL
  misc_feature (1)..(218): NCBI GI: 145239499 Blast Desc: An08g02790 [Aspergillus niger] gi|134076907|emb|CAK45316.1| protein product [Aspergillus niger]
  misc_feature (1)..(218): NCBI GI: 255940078 Blast Desc: Pc16g04570 [Penicillium chrysogenum Wisconsin 54-1255] gi|211585431|emb|CAP93127.1| Pc16g04570 [Penicillium chrysogenum Wisconsin 54-1255]
  misc_feature (7)..(218): NCBI GI: 46108912 Blast Desc: FG01338.1 [Gibberella zeae PH-1]
  misc_feature (37)..(201): SWISSPROT Homolog: EC 2.1.1.43 Histone-lysine N-methyltransferase
MSSDQLDKLAMHAAARDGKLSLFESLLNTDPKSAQRKDEDGRYPLHWAASSNQHAIVLLLSEQTDFDPDAEDESGWTPLMIAASIKDGDAVVDTLLQRGADANQKNHNGQTALHFVASKNNIEVARKLFSCKSPASARVRDKRGQYPLRPLNATDNAGYTALHHAVAEGHGDTAVALLKAGAETDKKDSGGFLALDLAPDKEVRKYIEREAENEGIEL

SEQ ID NO: 16943 - DNA, 4218 bp, Muscodor strobelii
  misc_feature: SGI EST ID NO. CUFF.40207.0
  misc_feature: Variant of the nucleotide sequence at SEQ ID NO 16941
catgggtaaaatatgtaggcgctttgtattcttggagaaatctttcaacaaacaagtcgtcttatgcgcacattagtcttctctctcacctactcaccatcaaaatagttgtcccggtctgtctctcgtcatgtcttctgatcagctcgataagttggccatgcatgccgccgctcgtgacgggaagttgtctctattcgagtctctacttaataccgatcccaagtcagcacaacgcaaggatgaagatggtcgttacccgcttcactgggccgcttcttccaaccagcatgccatagtcctgctcctctccgagcagacggactttgaccctgatgccgaagatgaaagtggatggacccccctcatgatagcagctagtattaaggatggtgacgcggtggttgatactctactgcagcgaggtgccgacgctaatcaaaaaaatcacaacggccagaccgcattacacttcgttgcatccaagaacaacattgaggtggctcgcaagctctttagctgcaagtctcctgcttctgcccgagtcagagacaaacgcggccaatacccattacggtacgtgtgcagatatattgtgcgagtggtaggaatcgtgctgatcttctctccttatagtgagttactgaacttctcagatgctaggacaatgtgatttggtttataaaccggggctccatatgaaaaaccgtgaagcatgactaacgcagcacctttctgggtatcagatcgagcggccgccgtgggttccgtgccaatggtcaagttgttgctcgagcaccgtagtccgttgaacgcaacggacaatgcaggctatacggccctgcatcatgccgtggccgagggacatggcgatacggcagttgctctgctcaaggcaggcgccgagactgacaagaaagactcgggtgggttcctcgccctagatcttgcgccggataaagaggtccgcaaatacattgaaagagaagcagagaatgagggcatcgagctttgaacataaataaaaggggcgatgtgggtgggtagaacttgttgcaaaatgctgcgaaataggcagctggggtatcctgaaacaaaccacatcgaaactatggcggaacgatgagggttctataaagtcctctctaccaagtctctatacatggcctttacatcttgtacatctgccttgagctcctctaccagctcactcttctcacctagcatttctaatgtggtctggtatcgctcgttgatctctgccgtctccttctctaattcctcgactctcttcgtggctgccttggctgactccgaggctcgcatcaaggccacgatctcaccgcgtgcgtcgtcacgctgggccgagatacgcgccagttcctcacgagctgcgaccttctcgctctctagccggcggatggccgcactcatcctctctacgagctgtaccgaagggccggccgtcatggtggacaccgaggtgatatcttgcagcacattctggggagacgctgatctctccataccatccagcacgtcatcccggtcgaccatctgcgcgggaggcgaggctaggtggtcgaagccactgccgaccgatggggctgtggcgctggggaaattttgcagcgtggggaacatgggagatcgagtgggcggctgagcagagggtcgcctcgccgacgacggcggtctctcgctcggactcggctccccgttactagaaggggccgacgtcttgcggagtcttgtagggtagctgtgtagcccaagaaaattatcgccgctgaaagtgcgtgtgggcgccgtaaagggagaatctgggcggaccgggttccggaagggggtggcggccacctcatccagccagttgcgtcgatcactatcgccctcgtcgttcttctgctcctttgaagatgcctgtgatttggctaggtcggctttggccttggtcaaggctgcctcggcctgctctgccctacttttcagctgactaagttgtgactggtacgaggtgagatcacgttgtacgtttggtaactgagtgcgcatctcgtcgagctcttcctcttggtgcttgacgcggtttgcctttttagcgacgttagcggcaggcacgtagttggcaagctcgagattagtacgatgaacttaccgtctcgcgagctttcttcctcatgtctgactctcggcgaagtgcctcgtctcgctcctttctacactcacaatcctggctccgagagatgcctccatgccctgccagttgtcactggctacagagtactgtgtttggagagtctctatctggcgaagtagtttggcctgcgtgtctcccacggctccggacgaggcttcttcggccttggttcgtaaagcctccagcttgctctccaacatctgcacctcacctttcagttccagttctacggcgcgagcgcggtccagagcaccgtctgccttcttttgcgactcggctatctgtgacttggctcggtctgctgcgaagcctttctcgatctcgagggcagccacggtgtcttcgaggtctttgatccgcctctgagcggcgtccagagcatgatcatttgccttgctcgcgagcgactttgccctctgggactcgtcttgcaactggctcctgagatgagcgatggactcgtccttggcttcgttctcagctttgagtctgtcaatgtccttgcccatttggctgagttggatatgtgtcttctcgttggctttctcgagctctgatgcttcctcggctcgcctgcgcaggccggccgtttcagcctcggccctctggcgccagatcctatggtcggtgagaagcttctcgttatcggtcagctgtgctcggagcttcttgatgatggcgcgatgcttctgctcggtggcggcgagcttctggccttcgagcatcagctgggcgacttggtcgtccttgtcggccatcttcttctccaagctgccgccgggggcattggaggcggccgacctcgcattctgagccgcctccttggcaaggtactggagtttggcttgcagggcatctacacgctcggcgtggctgtgcagttcgtcgtggtgttgagcctggatggcctcaagcgaggcctccaggtctgtgatgcgctgctgatacagatcgggagccactccgtcagccaacagaggctgggctggaggctcgggttcaggcagctcttggggtgctccggggggttgcagtggctcgacttgtgacgaaacgggtagatgcgtcacgggcgaagcctcggcactggtaggggggtgtggtacagtaggcacagtaggcacaggctcgcctgacggctgctctaagacggctgccgaggtcgggggagctgctgtagcggacgtgtcgtcgacagacaaactggatcgcggacttgtggcaggaggagcagcagctgggggcgggccgcggggcgcatcggagctgggccgggggctggaggtggcggaagggatgtcggtgctttgcctggcggaggcggcggcagcgttgtttcgggaggcaacggcgcgggcgaggcgctcttgcaggcggtcgttggcggatctggagggcgtgctggaccgcgagggcggaggatgagcagtggtggtgatagcattagcagcactagcagtggccgcaggagctggcgtggtgtccttggtgtccttggtgtctctgtctcgggatgctcgctggggatcgtcctcggcgaggatgttgtcgagccgggcctcgacgccggcgacggcctgggacagaaaggacccccatctcgaggaagacggcttttggggggcgctcatatctcgcgatggggctgcaatggccggaatgacatggcatgggaaagtgtcagacgaggaagagctcaggagcgtgtcagatggcggccggggctgggctgggtgtcgatgcgcaggatcgcaggtaagatggccctttgtgcttttttgccgtgggacggctggatgcattaggttcgacactcgagtagctgcgacgatggtgatgtgcagttgcattggactgcgctgcactacgcgcgacggtggtggactcaagggcgggagtccaacgtggccctgagctccgagttgcacgcagctcgtttatcgacctaggcagctcttgtaacttgtcacggccccagcgagacgaaacaagtgccttgcagctccggcagcttccaa

SEQ ID NO: 16944 - DNA, 2580 bp, Muscodor strobelii
  misc_feature: SGI cDNA ID NO. 565653
  misc_feature: Reduced expression when VOC is produced
  misc_feature: Encodes the peptide sequence at SEQ ID NO 16945
atgagcgccccccaaaagccgtcttcctcgagatgggggtcctttctgtcccaggccgtcgccggcgtcgaggcccggctcgacaacatcctcgccgaggacgatccccagcgagcatcccgagacagagacaccaaggacaccaaggacaccacgccagctcctgcggccactgctagtgctgctaatgctatcaccaccactgctcatcctccgccctcgcggtccagcacgccctccagatccgccaacgaccgcctgcaagagcgcctcgcccgcgccgttgcctcccgaaacaacgctgccgccgcctccgccaggcaaagcaccgacatcccttccgccacctccagcccccggcccagctccgatgcgccccgcggcccgcccccagctgctgctcctcctgccacaagtccgcgatccagtttgtctgtcgacgacacgtccgctacagcagctcccccgacctcggcagccgtcttagagcagccgtcaggcgagcctgtgcctactgtgcctactgtaccacacccccctaccagtgccgaggcttcgcccgtgacgcatctacccgtttcgtcacaagtcgagccactgcaaccccccggagcaccccaagagctgcctgaacccgagcctccagcccagcctctgttggctgacggagtggctcccgatctgtatcagcagcgcatcacagacctggaggcctcgcttgaggccatccaggctcaacaccacgacgaactgcacagccacgccgagcgtgtagatgccctgcaagccaaactccagtaccttgccaaggaggcggctcagaatgcgaggtcggccgcctccaatgcccccggcggcagcttggagaagaagatggccgacaaggacgaccaagtcgcccagctgatgctcgaaggccagaagctcgccgccaccgagcagaagcatcgcgccatcatcaagaagctccgagcacagctgaccgataacgagaagcttctcaccgaccataggatctggcgccagagggccgaggctgaaacggccggcctgcgcaggcgagccgaggaagcatcagagctcgagaaagccaacgagaagacacatatccaactcagccaaatgggcaaggacattgacagactcaaagctgagaacgaagccaaggacgagtccatcgctcatctcaggagccagttgcaagacgagtcccagagggcaaagtcgctcgcgagcaaggcaaatgatcatgctctggacgccgctcagaggcggatcaaagacctcgaagacaccgtggctgccctcgagatcgagaaaggcttcgcagcagaccgagccaagtcacagatagccgagtcgcaaaagaaggcagacggtgctctggaccgcgctcgcgccgtagaactggaactgaaaggtgaggtgcagatgttggagagcaagctggaggctttacgaaccaaggccgaagaagcctcgtccggagccgtgggagacacgcaggccaaactacttcgccagatagagactctccaaacacagtactctgtagccagtgacaactggcagggcatggaggcatctctcggagccaggattaaagctcgcgagacggcaaaccgcgtcaagcaccaagaggaagagctcgacgagatgcgcactcagttaccaaacgtacaacgtgatctcacctcgtaccagtcacaacttagtcagctgaaaagtagggcagagcaggccgaggcagccttgaccaaggccaaagccgacctagccaaatcacaggcatcttcaaaggagcagaagaacgacgagggcgatagtgatcgacgcaactggctggatgaggtggccgccacccccttccggaacccggtccgcccagattctccctttacggcgcccacacgcactttcagcggcgataattttcttgggctacacagctaccctacaagactccgcaagacgtcggccccttctagtaacggggagccgagtccgagcgagagaccgccgtcgtcggcgaggcgaccctctgctcagccgcccactcgatctcccatgttccccacgctgcaaaatttccccagcgccacagccccatcggtcggcagtggcttcgaccacctagcctcgcctcccgcgcagatggtcgaccgggatgacgtgctggatggtatggagagatcagcgtctccccagaatgtgctgcaagatatcacctcggtgtccaccatgacggccggcccttcggtacagctcgtagagaggatgagtgcggccatccgccggctagagagcgagaaggtcgcagctcgtgaggaactggcgcgtatctcggcccagcgtgacgacgcacgcggtgagatcgtggccttgatgcgagcctcggagtcagccaaggcagccacgaagagagtcgaggaattagagaaggagacggcagagatcaacgagcgataccagaccacattagaaatgctaggtgagaagagtgagctggtagaggagctcaaggcagatgtacaagatgtaaaggccatgtatagagacttggtagagaggactttatag

SEQ ID NO: 16945 - protein, 859 aa, Muscodor strobelii
  misc_feature: SGI Peptide ID NO. 565653
  misc_feature (9)..(859): NCBI GI: 171684741 Blast Desc: protein product [Podospora anserina] gi|170942331|emb|CAP67983.1| protein product [Podospora anserina]
  misc_feature (9)..(858): NCBI GI: 39941414 Blast Desc: MGG_05618 [Magnaporthe grisea 70-15] gi|145022300|gb|EDK06320.1| MGG_05618 [Magnaporthe grisea 70-15]
  misc_feature (1)..(859): NCBI GI: 85117990 Blast Desc: NCU02968 [Neurospora crassa OR74A] gi|16945384|emb|CAB97305.2| related to transcription factor TMF [Neurospora crassa] gi|28927163|gb|EAA36119.1| [Neurospora crassa
  misc_feature (1)..(859): NCBI GI: 156030627 Blast Desc: SS1G_14409 [Sclerotinia sclerotiorum 1980] gi|154700800|gb|EDO00539.1| SS1G_14409 [Sclerotinia sclerotiorum 1980]
  misc_feature (244)..(859): NCBI GI: 116192371 Blast Desc: CHGG_05903 [Chaetomium globosum CBS 148.51] gi|88181816|gb|EAQ89284.1| CHGG_05903 [Chaetomium globosum CBS 148.51]
  misc_feature (1)..(859): NCBI GI: 46108914 Blast Desc: FG01339.1 [Gibberella zeae PH-1]
  misc_feature (10)..(859): NCBI GI: 261356551 Blast Desc: conserved [Verticillium albo-atrum VaMs.102]
  misc_feature (1)..(859): NCBI GI: 242768083 Blast Desc: M protein repeat protein [Talaromyces stipitatus ATCC 10500] gi|218724695|gb|EED24112.1| M protein repeat protein [Talaromyces stipitatus ATCC 10500]
  misc_feature (4)..(859): NCBI GI: 225559620 Blast Desc: conserved [Ajellomyces capsulatus G186AR]
  misc_feature (4)..(859): NCBI GI: 240279359 Blast Desc: M protein repeat protein [Ajellomyces capsulatus H143]
  misc_feature: Useful for introducing or modulating the production of volatile compounds
MSAPQKPSSSRWGSFLSQAVAGVEARLDNILAEDDPQRASRDRDTKDTKDTTPAPAATASAANAITTTAHPPPSRSSTPSRSANDRLQERLARAVASRNNAAAASARQSTDIPSATSSPRPSSDAPRGPPPAAAPPATSPRSSLSVDDTSATAAPPTSAAVLEQPSGEPVPTVPTVPHPPTSAEASPVTHLPVSSQVEPLQPPGAPQELPEPEPPAQPLLADGVAPDLYQQRITDLEASLEAIQAQHHDELHSHAERVDALQAKLQYLAKEAAQNARSAASNAPGGSLEKKMADKDDQVAQLMLEGQKLAATEQKHRAIIKKLRAQLTDNEKLLTDHRIWRQRAEAETAGLRRRAEEASELEKANEKTHIQLSQMGKDIDRLKAENEAKDESIAHLRSQLQDESQRAKSLASKANDHALDAAQRRIKDLEDTVAALEIEKGFAADRAKSQIAESQKKADGALDRARAVELELKGEVQMLESKLEALRTKAEEASSGAVGDTQAKLLRQIETLQTQYSVASDNWQGMEASLGARIKARETANRVKHQEEELDEMRTQLPNVQRDLTSYQSQLSQLKSRAEQAEAALTKAKADLAKSQASSKEQKNDEGDSDRRNWLDEVAATPFRNPVRPDSPFTAPTRTFSGDNFLGLHSYPTRLRKTSAPSSNGEPSPSERPPSSARRPSAQPPTRSPMFPTLQNFPSATAPSVGSGFDHLASPPAQMVDRDDVLDGMERSASPQNVLQDITSVSTMTAGPSVQLVERMSAAIRRLESEKVAAREELARISAQRDDARGEIVALMRASESAKAATKRVEELEKETAEINERYQTTLEMLGEKSELVEELKADVQDVKAMYRDLVERTL

SEQ ID NO: 16946 - DNA, 4345 bp, Muscodor strobelii
  misc_feature: SGI EST ID NO. CUFF.40208.1
  misc_feature: Variant of the nucleotide sequence at SEQ ID NO 16944
ttggaagctgccggagctgcaaggcacttgtttcgtctcgctggggccgtgacaagttacaagagctgcctaggtcgataaacgagctgcgtgcaactcggagctcagggccacgttggactcccgcccttgagtccaccaccgtcgcgcgtagtgcagcgcagtccaatgcaactgcacatcaccatcgtcgcagctactcgagtgtcgaacctaatgcatccagccgtcccacggcaaaaaagcacaaagggccatcttacctgcgatcctgcgcatcgacacccagcccagccccggccgccatctgacacgctcctgagctcttcctcgtctgacactttcccatgccatgtcattccggccattgcagccccatcgcgagatatgagcgccccccaaaagccgtcttcctcgagatgggggtcctttctgtcccaggccgtcgccggcgtcgaggcccggctcgacaacatcctcgccgaggacgatccccagcgagcatcccgagacagagacaccaaggacaccaaggacaccacgccagctcctgcggccactgctagtgctgctaatgctatcaccaccactgctcatcctccgccctcgcggtccagcacgccctccagatccgccaacgaccgcctgcaagagcgcctcgcccgcgccgttgcctcccgaaacaacgctgccgccgcctccgccaggcaaagcaccgacatcccttccgccacctccagcccccggcccagctccgatgcgccccgcggcccgcccccagctgctgctcctcctgccacaagtccgcgatccagtttgtctgtcgacgacacgtccgctacagcagctcccccgacctcggcagccgtcttagagcagccgtcaggcgagcctgtgcctactgtgcctactgtaccacacccccctaccagtgccgaggcttcgcccgtgacgcatctacccgtttcgtcacaagtcgagccactgcaaccccccggagcaccccaagagctgcctgaacccgagcctccagcccagcctctgttggctgacggagtggctcccgatctgtatcagcagcgcatcacagacctggaggcctcgcttgaggccatccaggctcaacaccacgacgaactgcacagccacgccgagcgtgtagatgccctgcaagccaaactccagtaccttgccaaggaggcggctcagaatgcgaggtcggccgcctccaatgcccccggcggcagcttggagaagaagatggccgacaaggacgaccaagtcgcccagctgatgctcgaaggccagaagctcgccgccaccgagcagaagcatcgcgccatcatcaagaagctccgagcacagctgaccgataacgagaagcttctcaccgaccataggatctggcgccagagggccgaggctgaaacggccggcctgcgcaggcgagccgaggaagcatcagagctcgagaaagccaacgagaagacacatatccaactcagccaaatgggcaaggacattgacagactcaaagctgagaacgaagccaaggacgagtccatcgctcatctcaggagccagttgcaagacgagtcccagagggcaaagtcgctcgcgagcaaggcaaatgatcatgctctggacgccgctcagaggcggatcaaagacctcgaagacaccgtggctgccctcgagatcgagaaaggcttcgcagcagaccgagccaagtcacagatagccgagtcgcaaaagaaggcagacggtgctctggaccgcgctcgcgccgtagaactggaactgaaaggtgaggtgcagatgttggagagcaagctggaggctttacgaaccaaggccgaagaagcctcgtccggagccgtgggagacacgcaggccaaactacttcgccagatagagactctccaaacacagtactctgtagccagtgacaactggcagggcatggaggcatctctcggagccaggattgtgagtgtagaaaggagcgagacgaggcacttcgccgagagtcagacatgaggaagaaagctcgcgagacggcaaaccgcgtcaagcaccaagaggaagagctcgacgagatgcgcactcagttaccaaacgtacaacgtgatctcacctcgtaccagtcacaacttagtcagctgaaaagtagggcagagcaggccgaggcagccttgaccaaggccaaagccgacctagccaaatcacaggcatcttcaaaggagcagaagaacgacgagggcgatagtgatcgacgcaactggctggatgaggtggccgccacccccttccggaacccggtccgcccagattctccctttacggcgcccacacgcactttcagcggcgataattttcttgggctacacagctaccctacaagactccgcaagacgtcggccccttctagtaacggggagccgagtccgagcgagagaccgccgtcgtcggcgaggcgaccctctgctcagccgcccactcgatctcccatgttccccacgctgcaaaatttccccagcgccacagccccatcggtcggcagtggcttcgaccacctagcctcgcctcccgcgcagatggtcgaccgggatgacgtgctggatggtatggagagatcagcgtctccccagaatgtgctgcaagatatcacctcggtgtccaccatgacggccggcccttcggtacagctcgtagagaggatgagtgcggccatccgccggctagagagcgagaaggtcgcagctcgtgaggaactggcgcgtatctcggcccagcgtgacgacgcacgcggtgagatcgtggccttgatgcgagcctcggagtcagccaaggcagccacgaagagagtcgaggaattagagaaggagacggcagagatcaacgagcgataccagaccacattagaaatgctaggtgagaagagtgagctggtagaggagctcaaggcagatgtacaagatgtaaaggccatgtatagagacttggtagagaggactttatagaaccctcatcgttccgccatagtttcgatgtggtttgtttcaggataccccagctgcctatttcgcagcattttgcaacaagttctacccacccacatcgccccttttatttatgttcaaagctcgatgccctcattctctgcttctctttcaatgtatttgcggacctatgagcccctcattagctttgtgcattaaagtgctcgagaaacaaacaagcggcgcgagtgcgatatgacgcaacagcatcagagtagacaacaagggctaagggaaagtccgacctctttatccggcgcaagatctagggcgaggaacccacccgagtctttcttgtcagtctcggcgcctgccttgagcagagcaactgccgtatcgcctatgcaagtattagcgactagctggtcggaacttttggtgtccgcggaagagaattgagaagtggttcaccatgtccctcggccacggcatgatgcagggccgtatagcctgcattgtccgttgcgttcaacggactacggtgctcgagcaacaacttgaccattggcacggaacccacggcggccgctcgatctgatacccagaaaggtgctgcgttagtcatgcttcacggtttttcatatggagccccggtttataaaccaaatcacattgtcctagcatctgagaagttcagtaactcactataaggagagaagatcagcacgattcctaccactcgcacaatatatctgcacacgtaccgtaatgggtattggccgcgtttgtctctgactcgggcagaagcaggagacttgcagctaaagagcttgcgagccacctcaatgttgttcttggatgcaacgaagtgtaatgcggtctatacctatagttaagtacatgaggtttaggaagcagtaacccgagtacgaacctggccgttgtgatctaatagaataagcaattagtggtagattcaactgtttagatagtagagatagcagatcatgtgacttttttgattagcgtcggcacctcgctgcagtagagtatcaaccaccgcgtcaccatccttaatactagctgctatcatgaggggggtccatccactttcatcctagagtgaggagaatttttagcgatttcgaggtcgatctaggcgaacaagatggctcacttcggcatcagggtcaaagtccgtctgctcggagaggagcaggactatggcatgctggttggaagaagcggcccagtgaagcgggtaacgaccatcttcatccttgcgttgtgctgacttgggatcggtctgcatggcaggtcagcgtggcatcagaagatataag

SEQ ID NO: 16947 - DNA, 894 bp, Muscodor strobelii
  misc_feature: SGI cDNA ID NO. 565654
  misc_feature: Reduced expression when VOC is produced
  misc_feature: Encodes the peptide sequence at SEQ ID NO 16948
atgactactttcagcttcccctaccgccagctgggtgatggcttctggggcgccaagacatccaccttgaatttctgtgaagaggactatgtcatgagctactactgtgccgaagtctgtaatactgtcaccaatgcgctattcctgtggtttggctatcggggcattagggattgtcttcgatatgcccaccccgctattttcttggtcacctttgttggctatgttatcgtgggcgttgggtcgacgtttttccatgccactctcaagtaccctatgcaattactagacgaactggctatgatttatactacttgctttatggtccatgctacatttgcgtacaagcgctcgttcggtttctcttgcgctttaggtgtggcactcattgcactggcctggtatattacgacaaggtattatcagacaaaagatcctcaatttcatcaggatgcatacgcgatgctcacggctttggtggttttctccaatatgtggattatggagaaaaatgtacgtcccggtctcaagcttcgagagggcgcaagatcaaaaacgtcgcctgtgcctacgacacaggcgatcatgtcgcagatgtggatcatggtagctacagggttgagcgtatttttaggtggatttctcatatggaatctcgacaatttattttgcaatacgattcgtggctggcgtcatcgccttgggctgccctggggcgtggttttcgaaggccatgcttggtggcacctcatgaccggtgttggagtattgtatggcgtatatggattcatagatgtttggatggagatgaagacaaatttgaactgcaatggacatcagtattcagccttccagaggtcaaacgacgcgaagccatacgggctgaccgagtga

SEQ ID NO: 16948 - protein, 297 aa, Muscodor strobelii
  misc_feature: SGI Peptide ID NO. 565654
  misc_feature (13)..(280): Pfam Id: PF05875 Pfam Desc: Alkaline phytoceramidase (aPHC)
  misc_feature (13)..(256): Pfam Id: PF05875 Pfam Desc: Alkaline phytoceramidase (aPHC)
  misc_feature (5)..(282): NCBI GI: 119500094 Blast Desc: Alkaline phytoceramidase, [Neosartorya fischeri NRRL 181] gi|119414969|gb|EAW24907.1| Alkaline phytoceramidase, [Neosartorya fischeri NRRL 181]
  misc_feature (1)..(273): NCBI GI: 154303985 Blast Desc: alkaline ceramidase [Botryotinia fuckeliana B05.10] gi|150854263|gb|EDN29455.1| alkaline ceramidase [Botryotinia fuckeliana B05.10]
  misc_feature (6)..(273): NCBI GI: 239611110 Blast Desc: alkaline dihydroceramidase Ydc1 [Ajellomyces dermatitidis ER-3]
  misc_feature (6)..(273): NCBI GI: 261205868 Blast Desc: alkaline dihydroceramidase Ydc1 [Ajellomyces dermatitidis SLH14081] gi|239592730|gb|EEQ75311.1| alkaline dihydroceramidase Ydc1 [Ajellomyces dermatitidis SLH14081]
  misc_feature (4)..(273): NCBI GI: 121708291 Blast Desc: Alkaline phytoceramidase, [Aspergillus clavatus NRRL 1] gi|119400234|gb|EAW10660.1| Alkaline phytoceramidase, [Aspergillus clavatus NRRL 1]
  misc_feature (1)..(280): NCBI GI: 189189684 Blast Desc: dihydroceramidase [Pyrenophora tritici-repentis Pt-1C-BFP] gi|187972787|gb|EDU40286.1| dihydroceramidase [Pyrenophora tritici-repentis Pt-1C-BFP]
  misc_feature (5)..(281): NCBI GI: 67526409 Blast Desc: AN3662.2 [Aspergillus nidulans FGSC A4] gi|40740680|gb|EAA59870.1| AN3662.2 [Aspergillus nidulans FGSC A4]
  misc_feature (5)..(263): NCBI GI: 259481803 Blast Desc: TPA: conserved similar to alkaline phytoceramidase (Eurofung) [Aspergillus nidulans FGSC A4]
  misc_feature (4)..(273): NCBI GI: 240109908 Blast Desc: Alkaline phytoceramidase family protein [Coccidioides posadasii C735 delta SOWgp]
  misc_feature (2)..(256): NCBI GI: 116192375 Blast Desc: CHGG_05905 [Chaetomium globosum CBS 148.51] gi|88181818|gb|EAQ89286.1| CHGG_05905 [Chaetomium globosum CBS 148.51]
  misc_feature: Useful for introducing or modulating the production of volatile compounds
MTTFSFPYRQLGDGFWGAKTSTLNFCEEDYVMSYYCAEVCNTVTNALFLWFGYRGIRDCLRYAHPAIFLVTFVGYVIVGVGSTFFHATLKYPMQLLDELAMIYTTCFMVHATFAYKRSFGFSCALGVALIALAWYITTRYYQTKDPQFHQDAYAMLTALVVFSNMWIMEKNVRPGLKLREGARSKTSPVPTTQAIMSQMWIMVATGLSVFLGGFLIWNLDNLFCNTIRGWRHRLGLPWGVVFEGHAWWHLMTGVGVLYGVYGFIDVWMEMKTNLNCNGHQYSAFQRSNDAKPYGLTE

SEQ ID NO: 16949 - DNA, 1491 bp, Muscodor strobelii
  misc_feature: SGI EST ID NO. CUFF.40077.4
  misc_feature: Variant of the nucleotide sequence at SEQ ID NO 16947
tagtagtgtggttgctttggagtcccatctattttttcgcgcgcctcgcctaggtattcctacttgcttggctacgatgcctgtcatctattctcatagtagaccttggtcgacatcttcacacatcacaatacttgcctacctccatggagatttcgcaagatatcatacgcaacaaggttttcttcatggccacatgtgtggaggtcgctgacggtagcattttccatatcctcagctgagcactcataactaagctcggcggggctgacacatcgtcgatacgacatgtccgaagctaataaagtatactcttagaatattctcgacttcatacctttcttcatcagctccccatactgcttcgtatctttattttaagttgtctcgccctggagcatttcctttcctacaccccttagtgattctcgctccgtgccagcgccgcctcttgccgctcatatacccgaacgccgaagaacatcccggattcccgaatcagcggcatcttctcattccaacgcactttctttccgtgcaaatgactactttcagcttcccctaccgccagctgggtgatggcttctggggcgccaagacatccaccttgaatttctgtgaagaggtcctttcacgccaatcatctttccctcgccgcactgtcttgctgatgtctcctctccctcactaggactatgtcatgagctactactgtgccgaagtctgtaatactgtcaccaatgcgctattcctgtggtttggctatcggggcattagggattgtcttcgatatgcccaccccgctattttcttggtcacctttgttggctatgttatcgtgggcgttgggtcgacgtttttccatgccactctcaagtaccctatgcaattactagacgaactggctatgatttatactacttgctttatggtccatgctacatttgcgtacaagcgctcgttcggtttctcttgcgctttaggtgtggcactcattgcactggcctggtatattacgacaaggtattatcagacaaaagatcctcaatttcatcaggatgcatacgcgatgctcacggctttggtggttttctccaatatgtggattatggagaaaaatgtacgtcccggtctcaagcttcgagagggcgcaagatcaaaaacgtcgcctgtgcctacgacacaggcgatcatgtcgcagatgtggatcatggtagctacagggttgagcgtatttttaggtggatttctcatatggaatctcgacaatttattttgcaatacgattcgtggctggcgtcatcgccttgggctgccctggggcgtggttttcgaaggccatgcttggtggcacctcagtgagtgacgaacccctcatgatcgctattatcgagatatcatcatccaatatgatgatatttgcactattctctctttacgtatacttttaaggcatataattgaccgcccttctaatagtgaccggtgttg

SEQ ID NO: 16950 - DNA, 906 bp, Muscodor strobelii
  misc_feature: SGI cDNA ID NO. 565655
  misc_feature: Encodes the peptide sequence at SEQ ID NO 16951
atgactactttcagcttcccctaccgccagctgggtgatggcttctggggcgccaagacatccaccttgaatttctgtgaagaggactatgtcatgagctactactgtgccgaagtctgtaatactgtcaccaatgcgctattcctgtggtttggctatcggggcattagggattgtcttcgatatgcccaccccgctattttcttggtcacctttgttggctatgttatcgtgggcgttgggtcgacgtttttccatgccactctcaagtaccctatgcaattactagacgaactggctatgatttatactacttgctttatggtccatgctacatttgcgtacaagcgctcgttcggtttctcttgcgctttaggtgtggcactcattgcactggcctggtatattacggtgtgttgctgcacaaggtattatcagacaaaagatcctcaatttcatcaggatgcatacgcgatgctcacggctttggtggttttctccaatatgtggattatggagaaaaatgtacgtcccggtctcaagcttcgagagggcgcaagatcaaaaacgtcgcctgtgcctacgacacaggcgatcatgtcgcagatgtggatcatggtagctacagggttgagcgtatttttaggtggatttctcatatggaatctcgacaatttattttgcaatacgattcgtggctggcgtcatcgccttgggctgccctggggcgtggttttcgaaggccatgcttggtggcacctcatgaccggtgttggagtattgtatggcgtatatggattcatagatgtttggatggagatgaagacaaatttgaactgcaatggacatcagtattcagccttccagaggtcaaacgacgcgaagccatacgggctgaccgagtga

SEQ ID NO: 16951 - protein, 301 aa, Muscodor strobelii
  misc_feature: SGI Peptide ID NO. 565655
  misc_feature (13)..(284): Pfam Id: PF05875 Pfam Desc: Alkaline phytoceramidase (aPHC)
  misc_feature (13)..(260): Pfam Id: PF05875 Pfam Desc: Alkaline phytoceramidase (aPHC)
  misc_feature (5)..(286): NCBI GI: 119500094 Blast Desc: Alkaline phytoceramidase, [Neosartorya fischeri NRRL 181] gi|119414969|gb|EAW24907.1| Alkaline phytoceramidase, [Neosartorya fischeri NRRL 181]
  misc_feature (1)..(259): NCBI GI: 154303985 Blast Desc: alkaline ceramidase [Botryotinia fuckeliana B05.10] gi|150854263|gb|EDN29455.1| alkaline ceramidase [Botryotinia fuckeliana B05.10]
  misc_feature (6)..(273): NCBI GI: 239611110 Blast Desc: alkaline dihydroceramidase Ydc1 [Ajellomyces dermatitidis ER-3]
  misc_feature (6)..(273): NCBI GI: 261205868 Blast Desc: alkaline dihydroceramidase Ydc1 [Ajellomyces dermatitidis SLH14081] gi|239592730|gb|EEQ75311.1| alkaline dihydroceramidase Ydc1 [Ajellomyces dermatitidis SLH14081]
  misc_feature (4)..(266): NCBI GI: 121708291 Blast Desc: Alkaline phytoceramidase, [Aspergillus clavatus NRRL 1] gi|119400234|gb|EAW10660.1| Alkaline phytoceramidase, [Aspergillus clavatus NRRL 1]
  misc_feature (1)..(284): NCBI GI: 189189684 Blast Desc: dihydroceramidase [Pyrenophora tritici-repentis Pt-1C-BFP] gi|187972787|gb|EDU40286.1| dihydroceramidase [Pyrenophora tritici-repentis Pt-1C-BFP]
  misc_feature (5)..(285): NCBI GI: 67526409 Blast Desc: AN3662.2 [Aspergillus nidulans FGSC A4] gi|40740680|gb|EAA59870.1| AN3662.2 [Aspergillus nidulans FGSC A4]
  misc_feature (5)..(267): NCBI GI: 259481803 Blast Desc: TPA: conserved similar to alkaline phytoceramidase (Eurofung) [Aspergillus nidulans FGSC A4]
  misc_feature (2)..(260): NCBI GI: 116192375 Blast Desc: CHGG_05905 [Chaetomium globosum CBS 148.51] gi|88181818|gb|EAQ89286.1| CHGG_05905 [Chaetomium globosum CBS 148.51]
  misc_feature (4)..(273): NCBI GI: 240109908 Blast Desc: Alkaline phytoceramidase family protein [Coccidioides posadasii C735 delta SOWgp]
MTTFSFPYRQLGDGFWGAKTSTLNFCEEDYVMSYYCAEVCNTVTNALFLWFGYRGIRDCLRYAHPAIFLVTFVGYVIVGVGSTFFHATLKYPMQLLDELAMIYTTCFMVHATFAYKRSFGFSCALGVALIALAWYITVCCCTRYYQTKDPQFHQDAYAMLTALVVFSNMWIMEKNVRPGLKLREGARSKTSPVPTTQAIMSQMWIMVATGLSVFLGGFLIWNLDNLFCNTIRGWRHRLGLPWGVVFEGHAWWHLMTGVGVLYGVYGFIDVWMEMKTNLNCNGHQYSAFQRSNDAKPYGLTE

SEQ ID NO: 16952 - DNA, 1491 bp, Muscodor strobelii; identical to SEQ ID NO: 16949
  misc_feature: SGI EST ID NO. CUFF.40077.4
  misc_feature: Variant of the nucleotide sequence at SEQ ID NO 16950

SEQ ID NO: 16953 - DNA, 363 bp, Muscodor strobelii
  misc_feature: SGI cDNA ID NO. 565656
  misc_feature: Encodes the peptide sequence at SEQ ID NO 16954
atgtccatctcgaacgaggctttacaaaagctcctgcgtgaggtcgagacgcaggccgtggccgcacaacagcaaatcgtgcttgtgcgcacgcagcaagcgtccaagcaacgagagatgcgaatggcgcaactgacacgcaccgaattatcatcactacccaaggacaccaacgtctatgaaggccggggcaagatgttcatatccctgcccgttgacgccatgaagagcaagctggagacacagatcaaggagttggaaggcgatgtagacggactcggcaagcgactgcattatctcgaggtgtcacagaagaacagcaaggaccagatagatcgtatgttacgtggaggtgcgtcttga

SEQ ID NO: 16954 - protein, 120 aa, Muscodor strobelii
  misc_feature: SGI Peptide ID NO. 565656
  misc_feature (13)..(118): Pfam Id: PF01920 Pfam Desc: Prefoldin subunit
  misc_feature (1)..(119): NCBI GI: 85117998 Blast Desc: NCU02970 [Neurospora crassa OR74A] gi|16945386|emb|CAB97307.2| related to prefoldin subunit 1 [Neurospora crassa] gi|28927165|gb|EAA36121.1| conserved crassa
  misc_feature (1)..(119): NCBI GI: 171684745 Blast Desc: protein product [Podospora anserina] gi|170942333|emb|CAP67985.1| protein product [Podospora anserina]
  misc_feature (1)..(119): NCBI GI: 116192375 Blast Desc: CHGG_05905 [Chaetomium globosum CBS 148.51] gi|88181818|gb|EAQ89286.1| CHGG_05905 [Chaetomium globosum CBS 148.51]
  misc_feature (1)..(118): NCBI GI: 145615480 Blast Desc: MGG_05621 [Magnaporthe grisea 70-15] gi|145022303|gb|EDK06323.1| MGG_05621 [Magnaporthe grisea 70-15]
  misc_feature (1)..(116): NCBI GI: 46108990 Blast Desc: FG01377.1 [Gibberella zeae PH-1]
  misc_feature (1)..(116): NCBI GI: 256734286 Blast Desc: [Nectria haematococca mpVI 77-13-4]
  misc_feature (1)..(116): NCBI GI: 261356553 Blast Desc: conserved [Verticillium albo-atrum VaMs.102]
  misc_feature (1)..(120): NCBI GI: 212542771 Blast Desc: prefoldin subunit 1, [Penicillium marneffei ATCC 18224] gi|210066447|gb|EEA20540.1| prefoldin subunit 1, [Penicillium marneffei ATCC 18224]
  misc_feature (1)..(119): NCBI GI: 240109907 Blast Desc: KE2 family protein [Coccidioides posadasii C735 delta SOWgp]
  misc_feature (1)..(119): NCBI GI: 226291451 Blast Desc: conserved [Paracoccidioides brasiliensis Pb18]
MSISNEALQKLLREVETQAVAAQQQIVLVRTQQASKQREMRMAQLTRTELSSLPKDTNVYEGRGKMFISLPVDAMKSKLETQIKELEGDVDGLGKRLHYLEVSQKNSKDQIDRMLRGGAS

SEQ ID NO: 16955 - DNA, 2668 bp, Muscodor strobelii
  misc_feature: SGI EST ID NO. CUFF.40055.2
  misc_feature: Variant of the nucleotide sequence at SEQ ID NO 16953
tagaggagggttgtcatctcaaagcccatatgaaggacattctcaggtttcagtcgcacatttccctccttttgagtcacgatcgaggaaaataaagccaaaccacgagttttgtgagaataagcaaccattacggattggggaagaagagaggaaaacgaaactggacgaggaaccacatacgagggttgtcctgagaaataacaatgtccatctcgaacgaggctttacaaaagctcctgcgtgaggtcgagacgcaggccgtggccgcacaacagcaaatcgtgcttgtgcgcacgcagcaagcgtccaagcaacgagagatgcgaatggcgcaactgacacgcaccgaattatcatcactacccaaggacaccaacgtctatgaaggccggggcaagatgtgagtcccccacaacatagttctgttaaagtgttcctctcgcagtcaggctaatcttggcttggccgaacctttgtcgtgtctacatgtcagacaattatcacaactgacggcgtttgtaggttcatatccctgcccgttgacgccatgaagagcaagctggagacacagatcaaggagttggaaggcgatgtagacggactcggcaagcgactgcattatctcgaggtgtcacagaagaacagcaaggaccagatagatcgtatgttacgtggaggtgcgtcttgaccgccaggttgccaggttgccatgcagccgagtatctaccgtggcatgcaaacaaatccctgtaggtcggctaccatcatgagagagtacaggaggcaaagcgcatcccgtcatcccgtcatcccgttatccctcttgcacgatcgaaaaaggaaaagaaatttacaatcggatgtgggcaaagggtgtgcaaggaaagcgtctcggctttaaggagatatcccgcaatgaggcctaacattagtcgaccacatgggcaatgccttgaagcgaacgatcattacactaaagcatgagttccagttgatctctcgcgttgcatctgctccaaagtcgcgaggacgattccgtccttccacgtgcatgtcgtcgccaccagtcactctcaagtttgtctaattatagcagcgatcgaggaagaaccattcattacctgtaatcgtactgtagagggcaatgtattaataagatagcccgctatgcacaacatatccttgcatcaactagtaaagcgttcccactgcccctcggccacccctctcgccctcttccttcagatttttggcccccaaaatcaaaggggatatccagagaagtcggtggaaggctggttgccctgggtgtgtatgacgaagcgcaggagccgaccgggttgtgtggccacctctgatttcctgcagaagtaccgcgacgtggccgtcaagaccggctcgaaagctgaggagatgggggaaagaaaggaaaggagttttaaagcgtagaggaggaaatgtagtcacggttcgtctccgaagaccctgcagccctatcatcacaggaatggcagcggccagcggcacaaggagcgacatgggtagtgtatgggtcaacgtgggtacccatgtgaggtagcgttcccatgaatgctagaccaagtaaagccctacctgccgttgagactggattctgactgtagatggcgggctgctgcacaggactggagcccggcttccacgtacgatcccgtcattatctagcttacggggggctttggtcgggtggcgcaggtggtggctgtagtggtgctgtaagtagtggtgcatcgtcatgcagtgggctgtcgcgagctgcctccaatccagaggggcggcagctgagggcagaagagagagaggagaagagggagggagtgcggttgaggcggagcgggagggaacctcgtcagcagaatgatgcgagggcaaaaagagacgataatgcaatggcgatagcgccgatttattaagtcgtgtctgaccacctggcagcgactacatgtacttagaccgtctcaccctcgccatgccggcccagagtcgatgagctgaagcagaaacagcccgacgatccagatcccagcccactctgttggtctctctccctgcttctcgcttatccacccatagttcctacagcagtatccacccctcttccccatcgcccgtcgcccgtcgcctgtcttgctaggtaccatccccttccttcctccgccgcctcgcattcctgccgcccttacacatcttctgcactatattcccacactgcaactcacaatcgcgagccttgccgtgcctacctgtctacctgtctgcctgtctgcctgtctacctgtctacctcgggtggcccagcactcctctgcggctctggatcaagaccgcgtcaggtgaccacgagagcgaagcagctgagcagccgcatccgccacacgagagacggcaccggcgcacgagctgtcgagaatgagccgctacacgtcctactccgacagcgagtcggacctggacatccacgtccgggcgaagcatcgacacccgtctccagggccccggcgccaggcccctcccgtcgcccactatgtcgaggcacgcaccgcccctcgtccgcgctacctcgacgacgaccgcgaccgcttcctgcaccccgccggcgagcgcatggtcgtgaccacccgcaactc

SEQ ID NO: 16956 - DNA, 220 bp, Muscodor strobelii
  misc_feature: SGI cDNA ID NO. 565657
  misc_feature: Reduced expression when VOC is produced
  misc_feature: Encodes the peptide sequence at SEQ ID NO 16957
atgagccgctacacgtcctactccgacagcgagtcggacctggacatccacgtccgggcgaagcatcgacacccgtctccagggccccggcgccaggcccctcccgtcgcccactatgtcgaggcacgcaccgcccctcgtccgcgctacctcgacgacgaccgcgaccgcttcctgcaccccgccggcgagcgcatggtcgtgaccacccgcaactcgc

SEQ ID NO: 16957 - protein, 73 aa, Muscodor strobelii
  misc_feature: SGI Peptide ID NO. 565657
  misc_feature: Useful for introducing or modulating the production of volatile compounds
MSRYTSYSDSESDLDIHVRAKHRHPSPGPRRQAPPVAHYVEARTAPRPRYLDDDRDRFLHPAGERMVVTTRNS

SEQ ID NO: 16958 - DNA, 2668 bp, Muscodor strobelii; identical to SEQ ID NO: 16955
  misc_feature: SGI EST ID NO. CUFF.40055.2
  misc_feature: Variant of the nucleotide sequence at SEQ ID NO 16956

SEQ ID NO: 16959 - DNA, 1164 bp, Muscodor strobelii
  misc_feature: SGI cDNA ID NO. 565658
  misc_feature: Encodes the peptide sequence at SEQ ID NO 16960
atggggctggtcgactattcagactcagacactgacaccgaacccgtcgccaaaccagccgcgccaccaccacaaagcacaagcgacagcaagaagccctttcaaaaagtcgtcgattgctccaagccaggcagaatcatcgtcaacttgccaggcgcctccgcgaccaacgacccaaagcccgacgaaccccccgcgaagcgcgcacgcatatcaaagagtggcggcgccttcagtggcttcaactcgttcctacccgcccccaagaacacaggcaagaccaacacaaccagtagccgtggcaatgcgccaaggccaggcgtcagccttgccacaggtgctgcaccggcgttcagcagaaataccaatgacatcggaaacgaggagatagaagccgagatcgcatcgtcgagggcggcccctattgttccagctgatcagaaaccagccaacgaggtgaagctagtgggcaaaccgctcatgttcaagcctctctcggtgtcgagagaaccggctaagaaggccaacccaaaatcctctacactctcaacaatccccaagtctacaggcactactatcgcccccgattcaacgcccgcgtccgcacctagcgagcctagaccagaaccgccgccggccaagaagatatcactcttctcaattgccagcaacaggacgccgtctccggaagctaccgcgcacgagagcaatggcatatacgaacccctaattgcccacgacacatcagatcaaaccacatcagaagcgtttgctgcctacgacgcgcaataccatgccgctgcacagccttcggcagcatatgtatcaaacgctaccgtgtcctcgggatcgttggacagcctagcggatggcatgaatctttccaaggcggcacgacgcgagctgttcggacggaacggtgatgcggcggccgcggccaaagtcgttaacttcgacacagagcgcgagtacgctcataacgaggtgctccgagccagcggcgaacaagccgtgcacaaccctgtacgtgccattgcgccgggcaagcacaacctcaggcaactcgtcaaccaagtccacaaccagcgcgatgcgctcgaggagagctttgcgaagggcaaggcgaagcagagcgaagccgggtcgagatatggttggcggtga

SEQ ID NO: 16960 - protein, 387 aa, Muscodor strobelii
  misc_feature: SGI Peptide ID NO. 565658
  misc_feature (1)..(386): NCBI GI: 256729922 Blast Desc: NECHADRAFT_83845 [Nectria haematococca mpVI 77-13-4]
  misc_feature (1)..(386): NCBI GI: 46122165 Blast Desc: FG05460.1 [Gibberella zeae PH-1]
  misc_feature (34)..(386): NCBI GI: 156033011 Blast Desc: SS1G_13581 [Sclerotinia sclerotiorum 1980] gi|154698984|gb|EDN98722.1| SS1G_13581 [Sclerotinia sclerotiorum 1980]
  misc_feature (1)..(386): NCBI GI: 154301473 Blast Desc: BC1G_10406 [Botryotinia fuckeliana B05.10] gi|150856146|gb|EDN31338.1| BC1G_10406 [Botryotinia fuckeliana B05.10]
  misc_feature (1)..(383): NCBI GI: 116207246 Blast Desc: CHGG_02916 [Chaetomium globosum CBS 148.51] gi|88183513|gb|EAQ90981.1| CHGG_02916 [Chaetomium globosum CBS 148.51]
  misc_feature (1)..(387): NCBI GI: 85086966 Blast Desc: NCU00325 [Neurospora crassa OR74A] gi|28918891|gb|EAA28560.1| [Neurospora crassa OR74A]
  misc_feature (2)..(387): NCBI GI: 145602318 Blast Desc: MGG_05004 [Magnaporthe grisea 70-15] gi|145010753|gb|EDJ95409.1| MGG_05004 [Magnaporthe grisea 70-15]
  misc_feature (1)..(387): NCBI GI: 171685790 Blast Desc: protein product [Podospora anserina] gi|170942856|emb|CAP68509.1| protein product [Podospora anserina]
  misc_feature (1)..(386): NCBI GI: 71001734 Blast Desc: conserved [Aspergillus fumigatus Af293] gi|66853186|gb|EAL93510.1| conserved [Aspergillus fumigatus Af293] gi|159129611|gb|EDP54725.1| conserved [Aspergillus A1163]
  misc_feature (1)..(386): NCBI GI: 258565227 Blast Desc: [Uncinocarpus reesii 1704] gi|237907059|gb|EEP81460.1| [Uncinocarpus reesii 1704]
MGLVDYSDSDTDTEPVAKPAAPPPQSTSDSKKPFQKVVDCSKPGRIIVNLPGASATNDPKPDEPPAKRARISKSGGAFSGFNSFLPAPKNTGKTNTTSSRGNAPRPGVSLATGAAPAFSRNTNDIGNEEIEAEIASSRAAPIVPADQKPANEVKLVGKPLMFKPLSVSREPAKKANPKSSTLSTIPKSTGTTIAPDSTPASAPSEPRPEPPPAKKISLFSIASNRTPSPEATAHESNGIYEPLIAHDTSDQTTSEAFAAYDAQYHAAAQPSAAYVSNATVSSGSLDSLADGMNLSKAARRELFGRNGDAAAAAKVVNFDTEREYAHNEVLRASGEQAVHNPVRAIAPGKHNLRQLVNQVHNQRDALEESFAKGKAKQSEAGSRYGWR

SEQ ID NO: 16961 - DNA, 2436 bp, Muscodor strobelii
  misc_feature: SGI cDNA ID NO. 565659
  misc_feature: Encodes the peptide sequence at SEQ ID NO 16962
atgtccttgatccaggttgaggacttggtggcctaccaattgcgcaccagctacctgaccgaggtcgcagacggcgtcggcgagcgcctcatcaccatcaacgacggcttcctcaacactgcccccttcaaagccgctggctggcgctccaatcccgcacatctcaaacggacccattcgcccccgatccccactgcggtcgcctccgagtactttcaagccgccccgagaacgacttccgcgctcgacgatgaagccgaagagggagggatgctcaccggcggcgggggagacaccctagggcctggcaatgctgtgaaacgccgcagagagaggcgccgagagcagatggaggaggacgatagcagtgatctgagcgacgagaccgacgatgagaccgaccagcgtgccgctcagcagataagatttgccaagatgcccgtcaggagtcgcgccgggtcctctcccatccagtcctccaacctacgccagatgactactgtgacctcccctcgtcaggccccaggcacccgtcgcggctcgcagtctgccctggagacagtcaaggagcgcgctcgtcgcgacaccgtcaccagcagtgagttttcttccgagaacgagttcgacgcttcaggatatcgcaagttgaaggcggccacacgcaccgcgagatcgcagtccaaatcaagtgacgagccaacgtacgccccaaagcggcacgatagtgatatgctggctgaagaggaggaggaagactctgatctatccgacgggtcttctgcttttgtggcgagcgtcgattctgcctctattctagatactgtcgacaaccccgtcgttggggcatcgcctggccaacaagtcgtgggtacggtgccgaaacagctgttgaggcaatcaactatacggaagccatccgcagcgccgcagcctccattgcttcaagccttgccacctccaagacccatgagcactatccgacccttaagcatcatccagccgaggagcttgctgtctgaatctctcaacgccaagaagatgaaagcttcgatgcctttcgaccagtttgcctctctttctggtcaaggagaccctaatcctctcagattgcgcatttacgccccattctctgaagacgaggggacgccatatgaggtcttgatcaggcgtaatctacaggaagcagatggcgccttacgaccggtatcagtcgccgagttaattggactgagtttatggaggtaccatgccgagaagcgagacccccctattccatcggacaagatgaatgtgaattggtggactctgagaatggtggaagaaggaggtgaagtcgatgatgactttgaacccctggaccggaagaaacctgtcaattcatttacaactgcaaataaccgagcggccaggtcacgttctgcatccaagacttacgatgattttgccctcgtacaagcctcggaggctgcgtatcttgacaacaaaaaacaaacgcccgaattcgaacagcaagaggttgttgaacaagagccagagagcgatgccaccccaacaaactccttgccacctccatctaccttgcctgtggtgtcctatccacgtgtaaacccaattatcaatacccacttccgaccagacacacctttcgctgacaagccggctgtgtcggcgactgcacctgttgcaactcgaggacagaagaagttcttgaagatccatattctttcttccgatgttgcacctggccaaatgatgactctagacgtgacgaccgacatgtatcttgccgaagtcctcgacatcgtatgccgcaagaggcagatcgacaagaatgctcacgtactaaaacttcctggcggaggcgcagtggtcttcgtagacagagccgtttcgtccataggcaatgtcacagaacttgaattacatcgccggcgatttgcaacagacgggccactcaccatcacgggctctccaggcagctcgtcgcccaagctgcatgtgtgggacaaccaggctccacaaaaggggaagaagaaaatgacggtgcatccgctcgcccaagaggctacgatggctgacgaagttggtggcagtggtaaagtcacttataagaagtatacggtttggagaaaacaacccatgagattcgctggtctgaacgagcgaaccatcgctatcgacggcgagtatatctatatcatgccttcctcgggtggtaaattgacgcgagaaggcggaaaaactacaaccgtccacttcagcaatgttgttggatgcagtgtatcgcgtcgacatcctacgaacttcaagttacttgtgtttcgagacacggatgataaaaagcgatacgacttcgaagcgaagagcatccaagaagccgcggagatcattcgcgaactgaagaaaggtgtggcaccttacaacaaagacatatga

SEQ ID NO: 16962 - protein, 811 aa, Muscodor strobelii
  misc_feature: SGI Peptide ID NO. 565659
  misc_feature (335)..(461): Pfam Id: PF05422 Pfam Desc: Stress-activated map kinase interacting protein 1 (SIN1)
  misc_feature (702)..(798): Pfam Id: PF05422 Pfam Desc: Stress-activated map kinase interacting protein 1 (SIN1)
  misc_feature (1)..(807): NCBI GI: 171685788 Blast Desc: protein product [Podospora anserina] gi|170942855|emb|CAP68508.1| protein product [Podospora anserina]
  misc_feature (1)..(804): NCBI GI: 46122163 Blast Desc: FG05459.1 [Gibberella zeae PH-1]
  misc_feature (1)..(810): NCBI GI: 156033009 Blast Desc: SS1G_13580 [Sclerotinia sclerotiorum 1980] gi|154698983|gb|EDN98721.1| SS1G_13580 [Sclerotinia sclerotiorum 1980]
  misc_feature (1)..(807): NCBI GI: 164429013 Blast Desc: NCU00324 [Neurospora crassa OR74A] gi|157072373|gb|EAA28559.2| conserved [Neurospora crassa OR74A]
  misc_feature (1)..(805): NCBI GI: 261360284 Blast Desc: stress-activated map kinase-interacting protein [Verticillium albo-atrum VaMs.102]
  misc_feature (1)..(807): NCBI GI: 145602312 Blast Desc: MGG_12955 [Magnaporthe grisea 70-15] gi|145010749|gb|EDJ95405.1| MGG_12955 [Magnaporthe grisea 70-15]
  misc_feature (1)..(810): NCBI GI: 154301471 Blast Desc: BC1G_10405 [Botryotinia fuckeliana B05.10] gi|150856145|gb|EDN31337.1| BC1G_10405 [Botryotinia fuckeliana B05.10]
  misc_feature (1)..(588): NCBI GI: 116207244 Blast Desc: CHGG_02915 [Chaetomium globosum CBS 148.51] gi|88183512|gb|EAQ90980.1| CHGG_02915 [Chaetomium globosum CBS 148.51]
  misc_feature (1)..(807): NCBI GI: 145232223 Blast Desc: An02g04280 [Aspergillus niger] gi|134056477|emb|CAK37566.1| protein product [Aspergillus niger]
  misc_feature (1)..(811): NCBI GI: 169619323 Blast Desc: SNOG_12857 [Phaeosphaeria nodorum SN15] gi|111058537|gb|EAT79657.1| SNOG_12857 [Phaeosphaeria nodorum SN15]
MSLIQVEDLVAYQLRTSYLTEVADGVGERLITINDGFLNTAPFKAAGWRSNPAHLKRTHSPPIPTAVASEYFQAAPRTTSALDDEAEEGGMLTGGGGDTLGPGNAVKRRRERRREQMEEDDSSDLSDETDDETDQRAAQQIRFAKMPVRSRAGSSPIQSSNLRQMTTVTSPRQAPGTRRGSQSALETVKERARRDTVTSSEFSSENEFDASGYRKLKAATRTARSQSKSSDEPTYAPKRHDSDMLAEEEEEDSDLSDGSSAFVASVDSASILDTVDNPVVGASPGQQVVGTVPKQLLRQSTIRKPSAAPQPPLLQALPPPRPMSTIRPLSIIQPRSLLSESLNAKKMKASMPFDQFASLSGQGDPNPLRLRIYAPFSEDEGTPYEVLIRRNLQEADGALRPVSVAELIGLSLWRYHAEKRDPPIPSDKMNVNWWTLRMVEEGGEVDDDFEPLDRKKPVNSFTTANNRAARSRSASKTYDDFALVQASEAAYLDNKKQTPEFEQQEVVEQEPESDATPTNSLPPPSTLPVVSYPRVNPIINTHFRPDTPFADKPAVSATAPVATRGQKKFLKIHILSSDVAPGQMMTLDVTTDMYLAEVLDIVCRKRQIDKNAHVLKLPGGGAVVFVDRAVSSIGNVTELELHRRRFATDGPLTITGSPGSSSPKLHVWDNQAPQKGKKKMTVHPLAQEATMADEVGGSGKVTYKKYTVWRKQPMRFAGLNERTIAIDGEYIYIMPSSGGKLTREGGKTTTVHFSNVVGCSVSRRHPTNFKLLVFRDTDDKKRYDFEAKSIQEAAEIIRELKKGVAPYNKDI

SEQ ID NO: 16963 - DNA, 5316 bp, Muscodor strobelii
  misc_feature: SGI EST ID NO. CUFF.40044.0
  misc_feature: Variant of the nucleotide sequence at SEQ ID NO 16961
ctaaaatattgtctgctgtgagtctgtgacaactcgacaagctgacaactcgacctttgcgaacatgtttgaagatctgtatttgatattaagtttcaatcgcttacaacactctttaactataatgcatcacatccattagagttgcctgacttatcggattcgtcggtccctcgtgcggagccttatttggagtactgccaaagatggggctaacccgatcagggttgacgctatatgcgaatctcaatacttccatagattcccatcaggagcaaaggatgggaattcttgactgcaagtggacttgactttgtcagccatccgaaggcaatcgttgtgccatggatacatgacccggatgagttgaagcaagtacctgaagcaaaagttctcatctgcatgcttgcgcagagaataatcttcgcgacggactgtatagtgaaataaggcagtgaactaaaatataaatcaccgccaaccatatctcgacccggcttcgctctgcttcgccttgcccttcgcaaagctctcctcgagcgcatcgcgctggttgtggacttggttgacgagttgcctgaggttgtgcttgcccggcgcaatggcacgtacagggttgtgcacggcttgttcgccgctggctcggagcacctcgttatgagcgtactcgcgctctgtgtcgaagttaacgactttggccgcggccgccgcatcaccgttccgtccgaacagctcgcgtcgtgccgccttggaaagattcatgccatccgctaggctgtccaacgatcccgaggacacggtagcgtttgatacatatgctgccgaaggctgtgcagcggcatggtattgcgcgtcgtaggcagcaaacgcttctgatgtggtttgatctgatgtgtcgtgggcaattaggggttcgtatatgccattgctctcgtgcgcggtagcttccggagacggcgtcctgttgctggcaattgagaagagtgatatcttcttggccggcggcggttctggtctaggctcgctaggtgcggacgcgggcgttgaatcgggggcgatagtagtgcctgtagacttggggattgttgagagtgtagaggattttgggttggccttcttagccggttctctcgacaccgagagaggcttgaacatgagcggtttgcccactagcttcacctcgttggctggtttctgatcagctggaacaataggggccgccctcgacgatgcgatctcggcttctatctcctcgtttccgatgtcattggtatttctgctgaacgccggtgcagcacctgtggcaaggctgacgcctggccttggcgcattgccacggctactggttgtgttggtcttgcctgtgttcttgggggcgggtaggaacgagttgaagccactgaaggcgccgccactctttgatatgcgtgcgcgcttcgcggggggttcgtcgggctttgggtcgttggtcgcggaggcgcctggcaagttgacgatgattctgcctggcttggagcaatcgacgactttttgaaagggcttcttgctgtcgcttgtgctttgtggtggtggcgcggctggtttggcgacgggttcggtgtcagtgtctgagtctgaatagtcgaccagccccattgtgttgatagataggtagtgctgcttgtgctggtgaggtagaatattggaattctatcgacgttgaacgatcagaggaatagtagtactgcaatgatgtaaaattataggctgcccagtccccaagcttcgggccccctccaatccagttgagccagggtcccccggattttagtatgaagctgtccttgtgttgctcaacagcgtttagcgtcagacatggaaggccgagacaggtcaatgctgcaatacacccctcgcattgcggcctgctagcttaccccaaagaagctccaagtgcgcatctacggattacagatccaacttgaagtatcacgattcagtcgtatcagcaaccaaggcaatcatcgcattcagccgcttccattgatatatacgttgtcattctcttaagagcacacatacgactctaccggcactagtctcgctagcattgccatgcattgatgttccaagatactacgaaatacctacgctgcggatccctccatcatagtatcatacgggcgtatcccatgtgatgggccatcttcgaaatgtccttgatccaggttgaggacttggtggcctaccaattgcgcaccagctacctgaccgaggtcgcagacggcgtcggcgagcgcctcatcaccatcaacgacggcttcctcaacactgcccccttcaaagccgctggctggcgctccaatcccgcacatctcaaacggacccattcgcccccgatccccactgcggtcgcctccgagtactttcaagccgccccgagaacgacttccgcgctcgacgatgaagccgaagagggagggatgctcaccggcggcgggggagacaccctagggcctggcaatgctgtgaaacgccgcagagagaggcgccgagagcagatggaggaggacgatagcagtgatctgagcgacgagaccgacgatgagaccgaccagcgtgccgctcagcagataagatttgccaagatgcccgtcaggagtcgcgccgggtcctctcccatccagtcctccaacctacgccagatgactactgtgacctcccctcgtcaggccccaggcacccgtcgcggctcgcagtctgccctggagacagtcaaggagcgcgctcgtcgcgacaccgtcaccagcagtgagttttcttccgagaacgagttcgacgcttcaggatatcgcaagttgaaggcggccacacgcaccgcgagatcgcagtccaaatcaagtgacgagccaacgtacgccccaaagcggcacgatagtgatatgctggctgaagaggaggaggaagactctgatctatccgacgggtcttctgcttttgtggcgagcgtcgattctgcctctattctagatactgtcgacaaccccgtcgttggggcatcgcctggccaacaagtcgtgggtacggtgccgaaacagctgttgaggcaatcaactatacggaagccatccgcagcgccgcagcctccattgcttcaagccttgccacctccaagacccatgagcactatccgacccttaagcatcatccagccgaggagcttgctgtctgaatctctcaacgccaagaagatgaaagcttcgatgcctttcgaccagtttgcctctctttctggtcaaggagaccctaatcctctcagattgcgcatttacgccccattctctgaagacgaggggacgccatatgaggtcttgatcaggcgtaatctacaggaagcagatggcgccttacgaccggtatcagtcgccgagttaattggactgagtttatggaggtaccatgccgagaagcgagacccccctattccatcggacaagatgaatgtgaattggtggactctgagaatggtggaagaaggaggtgaagtcgatgatgactttgaacccctggaccggaagaaacctgtcaattcatttacaactgcaaataaccgagcggccaggtcacgttctgcatccaagacttacgatgattttgccctcgtacaagcctcggaggctgcgtatcttgacaacaaaaaacaaacgcccgaattcgaacagcaagaggttgttgaacaagagccagagagcgatgccaccccaacaaactccttgccacctccatctaccttgcctgtggtgtcctatccacgtgtaaacccaattatcaatacccacttccgaccagacacacctttcgctgacaagccggctgtgtcggcgactgcacctgttgcaactcgaggacagaagaagttcttgaagatccatattctttcttccgatgttgcacctggccaaatgatgactctagacgtgacgaccgacatgtatcttgccgaagtcctcgacatcgtatgccgcaagaggcagatcgacaagaatgctcacgtactaaaacttcctggcggaggcgcagtggtcttcgtagacagagccgtttcgtccataggcaatgtcacagaacttgaattacatcgccggcgatttgcaacagacgggccactcaccatcacgggctctccaggcagctcgtcgcccaagctgcatgtgtgggacaaccaggctccacaaaaggggaagaagaaaatgacggtgcatccgctcgcccaagaggctacgatggctgacgaagttggtggcagtggtaaagtcacttataagaagtatacggtttggagaaaacaacccatgagattcgctggtctgaacgagcgaaccatcgctatcgacggcgagtatatctatatcatgccttcctcgggtggtaaattgacgcgagaaggcggaaaaactacaaccgtccacttcagcaatgttgttggatgcagtgtatcgcgtcgacatcctacgaacttcaagttacttgtgtttcgagacacggatgataaaaagcgatacgacttcgaagcgaagagcatccaagaagccgcggagatcattcgcgaactgaagaaaggtgtggcaccttacaacaaagacatatgatctaagtcatttctttgggaatacgattctctcgagcagccaaagatagaacacagacgtgcagtcattgatatagccgacttcatctagctttgaaagacagcttcatagagctagtgccttgaatcattcgtagttccatggaatgtacaatacgaagcatcccagcttctttcactcggggcttagataaacactagcctaggtatattcgaccactatatatgaccctacggacgacgactcattatccatgctgcaggctaccgcgcttggccaccattgattggatgctggtaccttgaagcagtattagggtatcaaagtcactcgacactctcactccgaatgctccccaataatctccgagctttcgtgctactttattcctcgaattcagatcgcaagcgtacattatagtgcagaaagaaacgcaatgcgaggctttaatatctaccataggaaataaggagactcgatgctgattgtgttggtcagtagtcagcgtcgatgagatgtgatgatttgctctaaactatcagatctagccatctgatagctgaaatatatgtgcctcgagatcccacccaaatgcaataacatttggacctgagcactcaagataagacaaattccagctaggaaaattacgtgaacactacaattaagaacaatagcagctacttag

SEQ ID NO: 16964 - DNA, 567 bp, Muscodor strobelii
  misc_feature: SGI cDNA ID NO. 565660
  misc_feature: Reduced expression when VOC is produced
  misc_feature: Encodes the peptide sequence at SEQ ID NO 16965
atgcagttcctcaagactctcgtcgtcttcatcttcgccgctaccggcatggccacccttcaggtcggcaagaaggacgtgtcctcctgcagctgcaacccgactgccactgtcaccgtcactggctcctcgacccccatcgttgccagtgagaccaccagcaccagcactcccgttggcgctactccctacggtcctggtggctcgagcatctcctcttccccttctgtccccggtgctcctactactcctactggtagcctgaccgagacctccgtcacccccactcccgttggcggtaccggcactgacaccatcgttccccctgccagtggcgcctcgactcccgtcactgtccccgagggcactgtcaccggcactcccagcggtactgagaccggctctgtcaccactggcaccatgaccaccaccggtacccccgagtctggctctggcactgcaaccactaccgagaccactgccacctctaccggtggcgcttctgctgcttctgctggcgttggtctcctcggcgccgccgtcatggctcttgtccaggtaatctaa

SEQ ID NO: 16965 - protein, 188 aa, Muscodor strobelii
  misc_feature: SGI Peptide ID NO. 565660
  misc_feature: Useful for introducing or modulating the production of volatile compounds
MQFLKTLVVFIFAATGMATLQVGKKDVSSCSCNPTATVTVTGSSTPIVASETTSTSTPVGATPYGPGGSSISSSPSVPGAPTTPTGSLTETSVTPTPVGGTGTDTIVPPASGASTPVTVPEGTVTGTPSGTETGSVTTGTMTTTGTPESGSGTATTTETTATSTGGASAASAGVGLLGAAVMALVQVI

SEQ ID NO: 16966 - DNA, 4399 bp, Muscodor strobelii
  misc_feature: SGI EST ID NO. CUFF.40260.0
  misc_feature: Variant of the nucleotide sequence at SEQ ID NO 16964
ctttggtgacggtactaccactgatacctgtgatggcgacgacattgacttacagcttgctcagatgagatcaacagatcattgaagcatcgctacattgttgtgacagtgagtctctggtacgagtgtacatgtacgcgtcaaaattgatcccagcatcgaccaatctctaaaactctgccgcctgatgacctgccaactgatctcacttcactcgcacccaccccatcacgaacctggcttgaccaacactcattcaatagcagacgtccgaacagaatcgccgtagaaaaggtgactctataccaatagattacaaggaagcattctatctcaatggtgctattgtctccccccaaagcactctaatcatctgtgttgtccagcaaccactccttgaccacccaccacaattacaaaacccggcacaacagcaaacaaaattttgccttcccttccttttctacaaaacacccaaccgcatctctcaaacttcttgcgcgtcgcctctaccacagctttccacttcgcgtcccttttgatttcttgtatctcttagtaactcatcgttacttcaacaccatacatacaagtatccttgaccactcaacactcaaccgtcacgatgcagttcctcaagactctcgtcgtcttcatcttcgccgctaccggcatggccacccttcaggtcggcaagaaggacgtgtcctcctgcagctgcaacccgactgccactgtcaccgtcactggctcctcgacccccatcgttgccagtgagaccaccagcaccagcactcccgttggcgctactccctacggtcctggtggctcgagcatctcctcttccccttctgtccccggtgctcctactactcctactggtagcctgaccgagacctccgtcacccccactcccgttggcggtaccggcactgacaccatcgttccccctgccagtggcgcctcgactcccgtcactgtccccgagggcactgtcaccggcactcccagcggtactgagaccggctctgtcaccactggcaccatgaccaccaccggtacccccgagtctggctctggcactgcaaccactaccgagaccactgccacctctaccggtggcgcttctgctgcttctgctggcgttggtctcctcggcgccgccgtcatggctcttgtccaggtaatctaagtcgagattgcagtgtgatgtttctcgtcagacgtggtcacaaaaaccctcaatccgcgaacaaatgaagagagagaaacgatgtcgaggaacccggaaccttgttccaatttcgttacacgaacagaaaccttcatcgtccatccctgaccgctctttccttaatttggtctcggccacaccacgtgtcttaccacaattctcggcctagcactttcccgccgcattgggaattgcacacgagcgagcatctcaccactcgattttttctgtctacctgtacgccccggaatgataccgaagcttctgtgtgtggagaggaggaattaatacggactaaaaactggagttgtttcatgaatgaataggtggatgggtcaccttacatgatgttgatgtccgaaccgactggactcggtggacgtacgtaatgatcggtttggctgcttgtgtactttcgacctagctagttgcataccgcagacagcactatcctaggatcaataccgacaaagtagtcttataaaacgtcccctcttcgcggcctggtgatttgtctgctcacgaactgtagtattgcaacctgtagcaaaatcgcgattagtctcatcatcaacacaccacactacacatccaccagcacttaagtaactcacttgctagcaatcatctcccccaatctctgcatagttcccatcacactccggcactcgcagccgacacccaaccttcgttcaaagtatgtgttcgatattaagttttactacatatatacagtgtatcggcgtccaagacctctactaaaggcgtatcctcccatccccgccaaaccaccgtctaatatcattttcaccactcccactgccactaccactcgcctcattatctctaccacccatccacttcggggccttgaacccatcgccaatctcctgcagccacttcggcttatcgatcgtatcgatggtatttttgaacctatgtcccaaattctcgaagaaattcccatcatcatctgcctcttcttcccttggcgctgcggtagttctgcccctcgcaggcggtctcgacgacgcagcggcatactgctgcggagacgtagcaaacggcgtccgagtccccgtcccctcatttctattcctcgacccgggcaccgtgaggatcggttgggctctcgcatctcttcgtgccggacctctcgagatactcgtcccgttcaactccctctcaattaattctctgccctctctccaactccccgtgccataccctgcactctcctcgtcctcgtcttcatccacgatatccattccaaagccaaacaatctcttgatccgtccatacaacccaaacaacgtcgccaggacaggaaacaggacaaaaatcgggaacaagttatcgaaccagttccccagcgccgaaagatcgacgtatttgcccagcagttcgtagaacaccgtcttcatgtatatcttaggcgacatgaacgtgacgaagttataagataacgggacgctgagacgcgccacctgccccgcgtaccagaacgctgactcgtgcgctgtgttgcgccggactagggcgcggcctcgccagactttgacgttggtcacagtgtgcagggcggcggagcacatgtacgatatccagaatatagcgacgagttgcccggcgaacccgacgcgaccgctgtcgcccgtccagtggtggactactgtgaatcgtatcacggatagtgccgggagaggaccgcggacaagttcggaccaggtgatgcatactgatgctagggcaaggataccaccgagtaagacgcgagcataggggagtatttggcgatgtagtaagtatcgagtatagggggtaaggaacgttactctgtctaggaatgaggaagctggtgaggctgcacctagaacaagtctcttagacgtagaagagtccaggatggcgcgggttcgtgctgcgtcgtgaagcagacggtcccactcatcaacgtatcgcgacttcgcgtgctttgcacgaacaagttggcgcgttagatcggccatgtatttctctgtgatgacgtttggtataacacgactgtcgctttcacgcgggatggcactgcgtgggcgagattctgggatgctacacatttccgcgagttcctcgacccaatctagataaactttggcactccccgtcttgcgcttgctgagctccgatacctgaaattcgagttcttctaaggtaaggatggaatcttccatcgtctcgtatagttttggcgctcttgactgcagccgtctgaggcgtctacttgcgctggcgtctcttatcagattccgggggatggcgaccagaccgtgacccatgaggtagatagcgagcaccaagccccagcagtaggcgagagccatgaccaaacccttcaagttgtcgagagatggttgataagagacgaagaagtataccaggcccacaatgccggtgctgagaacaatggcgtagtattgcgcattagagcgcagggagtagagcagtcggtccttgggctctcggtagccggcgtcggagtactcggcaaagatggggaagatgaaccaggtgaggacgaatgtcagccagtatgatatcctccaggcgaccagcaaggctcggtgggggagccaaatgcccttgatcttgtcatcgtcggggctggcgttggacgcgaggtcgatggggacgagcaggacgatgctggcggggagccatagtccgaagaatacggggagtatcaagtaggcgggtgtcgctcgtagggtgagatatcgccgcaggatgaggaggacgaggatggacaggaggatgagggcggcgctggcgaagatgatggagcctacgggcgactgtctactgcttactatctgcagcatctcgtcggcgcaagctccatcaaagagtcgaggagttatagggtcgggtatctaaagacagtagttggaatgtgtgatgttgtgataccatctacggattgatgtttgcgatctgtagaatgcgatacggtcgaactcgaatcgagaaatccgtaaagccgcaggctctgacgtcgttggctggtttgcactagacccacgttcccctggaccaaatccgccatctgacttccattttggaaacatgtgaatacgacgaatgaacagcaagaaataaggtattgtggcgcgtctccgactgtgg

SEQ ID NO: 16967 - DNA, 837 bp, Muscodor strobelii
  misc_feature: SGI cDNA ID NO. 565661
  misc_feature: Reduced expression when VOC is produced
  misc_feature: Encodes the peptide sequence at SEQ ID NO 16968
atgtgctccgccgccctgcacactgtgaccaacgtcaaagtctggcgaggccgcgccctagtccggcgcaacacagcgcacgagtcagcgttctggtacgcggggcaggtggcgcgtctcagcgtcccgttatcttataacttcgtcacgttcatgtcgcctaagatatacatgaagacggtgttctacgaactgctgggcaaatacgtcgatctttcggcgctggggaactggttcgataacttgttcccgatttttgtcctgtttcctgtcctggcgacgttgtttgggttgtatggacggatcaagagattgtttggctttggaatggatatcgtggatgaagacgaggacgaggagagtgcagggtatggcacggggagttggagagagggcagagaattaattgagagggagttgaacgggacgagtatctcgagaggtccggcacgaagagatgcgagagcccaaccgatcctcacggtgcccgggtcgaggaatagaaatgaggggacggggactcggacgccgtttgctacgtctccgcagcagtatgccgctgcgtcgtcgagaccgcctgcgaggggcagaactaccgcagcgccaagggaagaagaggcagatgatgatgggaatttcttcgagaatttgggacataggttcaaaaataccatcgatacgatcgataagccgaagtggctgcaggagattggcgatgggttcaaggccccgaagtggatgggtggtagagataatgaggcgagtggtagtggcagtgggagtggtgaaaatgatattagacggtggtttggcggggatgggaggatacgcctttag

SEQ ID NO: 16968 - protein, 278 aa, Muscodor strobelii
  misc_feature: SGI Peptide ID NO. 565661
  misc_feature (1)..(278): NCBI GI: 145602316 Blast Desc: MGG_05005 [Magnaporthe grisea 70-15] gi|145010752|gb|EDJ95408.1| MGG_05005 [Magnaporthe grisea 70-15]
  misc_feature (1)..(278): NCBI GI: 46125751 Blast Desc: FG07253.1 [Gibberella zeae PH-1]
  misc_feature (1)..(278): NCBI GI: 154315382 Blast Desc: BC1G_04730 [Botryotinia fuckeliana B05.10] gi|150847693|gb|EDN22886.1| BC1G_04730 [Botryotinia fuckeliana B05.10]
  misc_feature (1)..(278): NCBI GI: 256732791 Blast Desc: [Nectria haematococca mpVI 77-13-4]
  misc_feature (1)..(270): NCBI GI: 85084193 Blast Desc: NCU00377 [Neurospora crassa OR74A] gi|28918352|gb|EAA28027.1| conserved [Neurospora crassa OR74A]
  misc_feature (1)..(270): NCBI GI: 171685772 Blast Desc: protein product [Podospora anserina] gi|170942847|emb|CAP68500.1| protein product [Podospora anserina]
  misc_feature (1)..(247): NCBI GI: 116207228 Blast Desc: CHGG_02907 [Chaetomium globosum CBS 148.51] gi|88183504|gb|EAQ90972.1| CHGG_02907 [Chaetomium globosum CBS 148.51]
  misc_feature (1)..(278): NCBI GI: 156051790 Blast Desc: SS1G_07302 [Sclerotinia sclerotiorum 1980] gi|154705080|gb|EDO04819.1| SS1G_07302 [Sclerotinia sclerotiorum 1980]
  misc_feature (1)..(272): NCBI GI: 115389386 Blast Desc: conserved [Aspergillus terreus NIH2624] gi|114194594|gb|EAU36294.1| conserved [Aspergillus terreus NIH2624]
  misc_feature (1)..(278): NCBI GI: 225556654 Blast Desc: LMBR1 domain-containing protein [Ajellomyces capsulatus G186AR]
  misc_feature: Useful for introducing or modulating the production of volatile compounds
MCSAALHTVTNVKVWRGRALVRRNTAHESAFWYAGQVARLSVPLSYNFVTFMSPKIYMKTVFYELLGKYVDLSALGNWFDNLFPIFVLFPVLATLFGLYGRIKRLFGFGMDIVDEDEDEESAGYGTGSWREGRELIERELNGTSISRGPARRDARAQPILTVPGSRNRNEGTGTRTPFATSPQQYAAASSRPPARGRTTAAPREEEADDDGNFFENLGHRFKNTIDTIDKPKWLQEIGDGFKAPKWMGGRDNEASGSGSGSGENDIRRWFGGDGRIRL

SEQ ID NO: 16969 - DNA, 4538 bp, Muscodor strobelii
  misc_feature: SGI EST ID NO. CUFF.40261.1
  misc_feature: Variant of the nucleotide sequence at SEQ ID NO 16967
ccacagtcggagacgcgccacaataccttatttcttgctgttcattcgtcgtattcacatgtttccaaaatggaagtcagatggcggatttggtccaggggaacgtgggtctagtgcaaaccagccaacgacgtcagagcctgcggctttacggatttctcgattcgagttcgaccgtatcgcattctacagatcgcaaacatcaatccgtagatggtatcacaacatcacacattccaactactgtctttagatacccgaccctataactcctcgactctttgatggagcttgcgccgacgagatgctgcagatagtaagcagtagacagtcgcccgtaggctccatcatcttcgccagcgccgccctcatcctcctgtccatcctcgtcctcctcatcctgcggcgatatctcaccctacgagcgacacccgcctacttgatactccccgtattcttcggactatggctccccgccagcatcgtcctgctcgtccccatcgacctcgcgtccaacgccagccccgacgatgacaagatcaagggcatttggctcccccaccgagccttgctggtcgcctggaggatatcatactggctgacattcgtcctcacctggttcatcttccccatctttgccgagtactccgacgccggctaccgagagcccaaggaccgactgctctactccctgcgctctaatgcgcaatactacgccattgttctcagcaccggcattgtgggcctggtatacttcttcgtctcttatcaaccatctctcgacaacttgaagggtttggtcatggctctcgcctactgctggggcttggtgctcgctatctacctcatgggtcacggtctggtcgccatcccccggaatctgataagagacgccagcgcaagtagacgcctcagacggctgcagtcaagagcgccaaaactatacgagacgatggaagattccatccttaccttagaagaactcgaatttcaggtatcggagctcagcaagcgcaagacggggagtgccaaagtttatctagattgggtcgaggaactcgcggaaatgtgtagcatcccagaatctcgcccacgcagtgccatcccgcgtgaaagcgacagtcgtgttataccaaacgtcatcacagagaaatacatggccgatctaacgcgccaacttgttcgtgcaaagcacgcgaagtcgcgatacgttgatgagtgggaccgtctgcttcacgacgcagcacgaacccgcgccatcctggactcttctacgtctaagagacttgttctaggtgcagcctcaccagcttcctcattcctagacagagtaacgttccttaccccctatactcgatacttactacatcgccaaatactcccctatgctcgcgtcttactcggtggtatccttgccctagcatcagtatgcatcacctggtccgaacttgtccgcggtcctctcccggcactatccgtgatacgattcacagtagtccaccactggacgggcgacagcggtcgcgtcgggttcgccgggcaactcgtcgctatattctggatatcgtacatgtgctccgccgccctgcacactgtgaccaacgtcaaagtctggcgaggccgcgccctagtccggcgcaacacagcgcacgagtcagcgttctggtacgcggggcaggtggcgcgtctcagcgtcccgttatcttataacttcgtcacgttcatgtcgcctaagatatacatgaagacggtgttctacgaactgctgggcaaatacgtcgatctttcggcgctggggaactggttcgataacttgttcccgatttttgtcctgtttcctgtcctggcgacgttgtttgggttgtatggacggatcaagagattgtttggctttggaatggatatcgtggatgaagacgaggacgaggagagtgcagggtatggcacggggagttggagagagggcagagaattaattgagagggagttgaacgggacgagtatctcgagaggtccggcacgaagagatgcgagagcccaaccgatcctcacggtgcccgggtcgaggaatagaaatgaggggacggggactcggacgccgtttgctacgtctccgcagcagtatgccgctgcgtcgtcgagaccgcctgcgaggggcagaactaccgcagcgccaagggaagaagaggcagatgatgatgggaatttcttcgagaatttgggacataggttcaaaaataccatcgatacgatcgataagccgaagtggctgcaggagattggcgatgggttcaaggccccgaagtggatgggtggtagagataatgaggcgagtggtagtggcagtgggagtggtgaaaatgatattagacggtggtttggcggggatgggaggatacgcctttagtagaggtcttggacgccgatacactgtatatatgtagtaaaacttaatatcgaacacatactttgaacgaaggttgggtgtcggctgcgagtgccggagtgtgatgggaactatgcagagattgggggagatgattgctagcaagttgcaatactacagttcgtgagcagacaaatcaccaggccgcgaagaggggacgttttataagactactttgtcggtattgatcctaggatagtgctgtctgcggtatgcaactagctaggtcgaaagtacacaagcagccaaaccgatcattacgtacgtccaccgagtccagtcggttcggacatcaacatcatgtaaggtgacccatccacctattcattcatgaaacaactccagtttttagtccgtattaattcctcctctccacacacagaagcttcggtatcattccggggcgtacaggtagacagaaaaaatcgagtggtgagatgctcgctcgtgtgcaattcccaatgcggcgggaaagtgctaggccgagaattgtggtaagacacgtggtgtggccgagaccaaattaaggaaagagcggtcagggatggacgatgaaggtttctgttcgtgtaacgaaattggaacaaggttccgggttcctcgacatcgtttctctctcttcatttgttcgcggattgagggtttttgtgaccacgtctgacgagaaacatcacactgcaatctcgacttagattacctggacaagagccatgacggcggcgccgaggagaccaacgccagcagaagcagcagaagcgccaccggtagaggtggcagtggtctcggtagtggttgcagtgccagagccagactcgggggtaccggtggtggtcatggtgccagtggtgacagagccggtctcagtaccgctgggagtgccggtgacagtgccctcggggacagtgacgggagtcgaggcgccactggcagggggaacgatggtgtcagtgccggtaccgccaacgggagtgggggtgacggaggtctcggtcaggctaccagtaggagtagtaggagcaccggggacagaaggggaagaggagatgctcgagccaccaggaccgtagggagtagcgccaacgggagtgctggtgctggtggtctcactggcaacgatgggggtcgaggagccagtgacggtgacagtggcagtcgggttgcagctgcaggaggacacgtccttcttgccgacctgaagggtggcctattttcatgtcggtcagtgtttgaagtgttggatcatggcggtaaagcagaagttggaattgaatagcgaggctacaaccgattggcctacagcatttcggtggcaggaaggcgcgagtgttgggaggagtcgcgcgcggccaagagctgcgagtgggaaaacaagagctgtagtgacgcacgcgagagagaagcgaggaagagacttaccatgccggtagcggcgaagatgaagacgacgagagtcttgaggaactgcatcgtgacggttgagtgttgagtggtcaaggatacttgtatgtatggtgttgaagtaacgatgagttactaagagatacaagaaatcaaaagggacgcgaagtggaaagctgtggtagaggcgacgcgcaagaagtttgagagatgcggttgggtgttttgtagaaaaggaagggaaggcaaaattttgtttgctgttgtgccgggttttgtaattgtggtgggtggtcaaggagtggttgctggacaacacagatgattagagtgctttggggggagacaatagcaccattgagatagaatgcttccttgtaatctattggtatagagtcaccttttctacggcgattctgttcggacgtctgctattgaatgagtgttggtcaagccaggttcgtgatggggtgggtgcgagtgaagtgagatcagttggcaggtcatcaggcggcagagttttagagattggtcgatgctgggatcaattttgacgcgtacatgtacactcgtaccagagactcactgtcacaacaatgtagcgatgcttcaatgatctgttgatctcatctgagcaagctgtaagtcaatgtcgtcgccatcacaggtatcagtggtagtaccgtcaccaaag

SEQ ID NO: 16970 - DNA, 2103 bp, Muscodor strobelii
  misc_feature: SGI cDNA ID NO. 565662
  misc_feature: Reduced expression when VOC is produced
  misc_feature: Encodes the peptide sequence at SEQ ID NO 16971
atgctgcagatagtaagcagtagacagtcgcccgtaggctccatcatcttcgccagcgccgccctcatcctcctgtccatcctcgtcctcctcatcctgcggcgatatctcaccctacgagcgacacccgcctacttgatactccccgtattcttcggactatggctccccgccagcatcgtcctgctcgtccccatcgacctcgcgtccaacgccagccccgacgatgacaagatcaagggcatttggctcccccaccgagccttgctggtcgcctggaggatatcatactggctgacattcgtcctcacctggttcatcttccccatctttgccgagtactccgacgccggctaccgagagcccaaggaccgactgctctactccctgcgctctaatgcgcaatactacgccattgttctcagcaccggcattgtgggcctggtatacttcttcgtctcttatcaaccatctctcgacaacttgaagggtttggtcatggctctcgcctactgctggggcttggtgctcgctatctacctcatgggtcacggtctggtcgccatcccccggaatctgataagagacgccagcgcaagtagacgcctcagacggctgcagtcaagagcgccaaaactatacgagacgatggaagattccatccttaccttagaagaactcgaatttcaggtatcggagctcagcaagcgcaagacggggagtgccaaagtttatctagattgggtcgaggaactcgcggaaatgtgtagcatcccagaatctcgcccacgcagtgccatcccgcgtgaaagcgacagtcgtgttataccaaacgtcatcacagagaaatacatggccgatctaacgcgccaacttgttcgtgcaaagcacgcgaagtcgcgatacgttgatgagtgggaccgtctgcttcacgacgcagcacgaacccgcgccatcctggactcttctacgtctaagagacttgttctaggtgcagcctcaccagcttcctcattcctagacagagtaacgttccttaccccctatactcgatacttactacatcgccaaatactcccctatgctcgcgtcttactcggtggtatccttgccctagcatcagtatgcatcacctggtccgaacttgtccgcggtcctctcccggcactatccgtgatacgattcacagtagtccaccactggacgggcgacagcggtcgcgtcgggttcgccgggcaactcgtcgctatattctggatatcgtacatgtgctccgccgccctgcacactgtgaccaacgtcaaagtctggcgaggccgcgccctagtccggcgcaacacagcgcacgagtcagcgttctggtacgcggggcaggtggcgcgtctcagcgtcccgttatcttataacttcgtcacgttcatgtcgcctaagatatacatgaagacggtgttctacgaactgctgggcaaatacgtcgatctttcggcgctggggaactggttcgataacttgttcccgatttttgtcctgtttcctgtcctggcgacgttgtttgggttgtatggacggatcaagagattgtttggctttggaatggatatcgtggatgaagacgaggacgaggagagtgcagggtatggcacggggagttggagagagggcagagaattaattgagagggagttgaacgggacgagtatctcgagaggtccggcacgaagagatgcgagagcccaaccgatcctcacggtgcccgggtcgaggaatagaaatgaggggacggggactcggacgccgtttgctacgtctccgcagcagtatgccgctgcgtcgtcgagaccgcctgcgaggggcagaactaccgcagcgccaagggaagaagaggcagatgatgatgggaatttcttcgagaatttgggacataggttcaaaaataccatcgatacgatcgataagccgaagtggctgcaggagattggcgatgggttcaaggccccgaagtggatgggtggtagagataatgaggcgagtggtagtggcagtgggagtggtgaaaatgatattagacggtggtttggcggggatgggaggatacgcctttag

SEQ ID NO: 16971 - protein, 700 aa, Muscodor strobelii
  misc_feature: SGI Peptide ID NO. 565662
  misc_feature (17)..(520): Pfam Id: PF04791 Pfam Desc: LMBR1-like membrane protein
  misc_feature (1)..(700): NCBI GI: 46125751 Blast Desc: FG07253.1 [Gibberella zeae PH-1]
  misc_feature (10)..(700): NCBI GI: 154315382 Blast Desc: BC1G_04730 [Botryotinia fuckeliana B05.10] gi|150847693|gb|EDN22886.1| BC1G_04730 [Botryotinia fuckeliana B05.10]
  misc_feature (6)..(692): NCBI GI: 85084193 Blast Desc: NCU00377 [Neurospora crassa OR74A] gi|28918352|gb|EAA28027.1| conserved [Neurospora crassa OR74A]
  misc_feature (1)..(669): NCBI GI: 116207228 Blast Desc: CHGG_02907 [Chaetomium globosum CBS 148.51] gi|88183504|gb|EAQ90972.1| CHGG_02907 [Chaetomium globosum CBS 148.51]
  misc_feature (1)..(700): NCBI GI: 256732791 Blast Desc: [Nectria haematococca mpVI 77-13-4]
  misc_feature (1)..(700): NCBI GI: 156051790 Blast Desc: SS1G_07302 [Sclerotinia sclerotiorum 1980] gi|154705080|gb|EDO04819.1| SS1G_07302 [Sclerotinia sclerotiorum 1980]
  misc_feature (10)..(692): NCBI GI: 171685772 Blast Desc: protein product [Podospora anserina] gi|170942847|emb|CAP68500.1| protein product [Podospora anserina]
  misc_feature (28)..(586): NCBI GI: 261360274 Blast Desc: LMBR1 domain-containing protein [Verticillium albo-atrum VaMs.102]
  misc_feature (4)..(694): NCBI GI: 115389386 Blast Desc: conserved [Aspergillus terreus NIH2624] gi|114194594|gb|EAU36294.1| conserved [Aspergillus terreus NIH2624]
  misc_feature (5)..(700): NCBI GI: 255935187 Blast Desc: Pc13g01750 [Penicillium chrysogenum Wisconsin 54-1255] gi|211583240|emb|CAP91244.1| Pc13g01750 [Penicillium chrysogenum Wisconsin 54-1255]
  misc_feature: Useful for introducing or modulating the production of volatile compounds
MLQIVSSRQSPVGSIIFASAALILLSILVLLILRRYLTLRATPAYLILPVFFGLWLPASIVLLVPIDLASNASPDDDKIKGIWLPHRALLVAWRISYWLTFVLTWFIFPIFAEYSDAGYREPKDRLLYSLRSNAQYYAIVLSTGIVGLVYFFVSYQPSLDNLKGLVMALAYCWGLVLAIYLMGHGLVAIPRNLIRDASASRRLRRLQSRAPKLYETMEDSILTLEELEFQVSELSKRKTGSAKVYLDWVEELAEMCSIPESRPRSAIPRESDSRVIPNVITEKYMADLTRQLVRAKHAKSRYVDEWDRLLHDAARTRAILDSSTSKRLVLGAASPASSFLDRVTFLTPYTRYLLHRQILPYARVLLGGILALASVCITWSELVRGPLPALSVIRFTVVHHWTGDSGRVGFAGQLVAIFWISYMCSAALHTVTNVKVWRGRALVRRNTAHESAFWYAGQVARLSVPLSYNFVTFMSPKIYMKTVFYELLGKYVDLSALGNWFDNLFPIFVLFPVLATLFGLYGRIKRLFGFGMDIVDEDEDEESAGYGTGSWREGRELIERELNGTSISRGPARRDARAQPILTVPGSRNRNEGTGTRTPFATSPQQYAAASSRPPARGRTTAAPREEEADDDGNFFENLGHRFKNTIDTIDKPKWLQEIGDGFKAPKWMGGRDNEASGSGSGSGENDIRRWFGGDGRIRL

SEQ ID NO: 16972 - DNA, 4538 bp, Muscodor strobelii; identical to SEQ ID NO: 16969
  misc_feature: SGI EST ID NO. CUFF.40261.1
  misc_feature: Variant of the nucleotide sequence at SEQ ID NO 16970

SEQ ID NO: 16973 - DNA, 957 bp, Muscodor strobelii
  misc_feature: SGI cDNA ID NO. 565663
  misc_feature: Encodes the peptide sequence at SEQ ID NO 16974
atgaggtttccgtgcctgtcagcgctttggctggccgcgacggcctgggccgctgttgaacgtggtgaagatggaaatgtccggtctatcgctctccgaacgcataccttaaaacagccctatctcgactccgacatggcaagtcgctggtacgactttggcggtgatactgtcattaggactgattcatacatacgtctctcctcggaacagccttcgcaaaacggctggctcttctcccgcgtgcccctgaccgccaccaactgggagatcgaggtcgagttcaagatacatggcaagagccagctctttggcgatggtttcgccatgtggctcaccaaggagcgaggcgagatcgggcccgtctttggccacagggactacttcgagggcctcggcatctttgtcgacacctacaagaacaatcgccccggcaccgtcttcccctatgtcatggccatggtcggcgacggcaagaccggctataccaaggacaacgatggaaaggatcaagagttcgccggctgttctgcccgaggtctccgaaacccaaagatccccaccaagctgcgcttaacctacttccaggacaagtctttgaagttggagcttcagtacaagaccgaggatgagtggcaactttgcttcgagtccaacgacccgccctccatcccctccgttacctacctcggcttcagtgccgagactggtgagctcagcgacaaccacgacattatctccatcgaggccaagaacctgtacacgaccggtggcgcgtctgcaagacctgggtcacccggccgaggaaggaatgctaaggcaggcggcgccagcgaaggcggtggtagctggacttggttcttcgtcaagattgttctcttcttgctagtcttgggtggtggctatgttggctttactgcctggcgcacaaatcagaagaggtcacaccgattttag

SEQ ID NO: 16974 - protein, 318 aa, Muscodor strobelii
  misc_feature: SGI Peptide ID NO. 565663
  misc_feature (29)..(255): Pfam Id: PF03388 Pfam Desc: Legume-like lectin family
  misc_feature (5)..(318): NCBI GI: 261360277 Blast Desc: vesicular integral-membrane protein VIP36 [Verticillium albo-atrum VaMs.102]
  misc_feature (5)..(318): NCBI GI: 164425222 Blast Desc: NCU06242 [Neurospora crassa OR74A] gi|157070839|gb|EAA33857.2| NCU06242 [Neurospora crassa OR74A]
  misc_feature (1)..(318): NCBI GI: 256733238 Blast Desc: [Nectria haematococca mpVI 77-13-4]
  misc_feature (21)..(318): NCBI GI: 171686630 Blast Desc: protein product [Podospora anserina] gi|170943276|emb|CAP68929.1| protein product [Podospora anserina]
  misc_feature (5)..(318): NCBI GI: 39976929 Blast Desc: MGG_06367 [Magnaporthe grisea 70-15] gi|145016226|gb|EDK00716.1| MGG_06367 [Magnaporthe grisea 70-15]
  misc_feature (1)..(318): NCBI GI: 46125745 Blast Desc: FG07250.1 [Gibberella zeae PH-1]
  misc_feature (1)..(315): NCBI GI: 119481297 Blast Desc: lectin family integral membrane protein, [Neosartorya fischeri NRRL 181] gi|119408831|gb|EAW18780.1| lectin family integral membrane protein, [Neosartorya fischeri NRRL 181]
  misc_feature (4)..(313): NCBI GI: 189209614 Blast Desc: vesicular integral-membrane protein VIP36 precursor [Pyrenophora tritici-repentis Pt-1C-BFP] gi|187977232|gb|EDU43858.1| vesicular integral-membrane protein
  misc_feature (1)..(315): NCBI GI: 71001738 Blast Desc: lectin family integral membrane protein [Aspergillus fumigatus Af293] gi|66853188|gb|EAL93512.1| lectin family integral membrane protein, [Aspergillus fumigatus Af293] lectin
  misc_feature (1)..(315): NCBI GI: 145232217 Blast Desc: An02g04250 [Aspergillus niger] gi|134056474|emb|CAK37563.1| protein product [Aspergillus niger]
MRFPCLSALWLAATAWAAVERGEDGNVRSIALRTHTLKQPYLDSDMASRWYDFGGDTVIRTDSYIRLSSEQPSQNGWLFSRVPLTATNWEIEVEFKIHGKSQLFGDGFAMWLTKERGEIGPVFGHRDYFEGLGIFVDTYKNNRPGTVFPYVMAMVGDGKTGYTKDNDGKDQEFAGCSARGLRNPKIPTKLRLTYFQDKSLKLELQYKTEDEWQLCFESNDPPSIPSVTYLGFSAETGELSDNHDIISIEAKNLYTTGGASARPGSPGRGRNAKAGGASEGGGSWTWFFVKIVLFLLVLGGGYVGFTAWRTNQKRSHRF

SEQ ID NO: 16975 - DNA, 5385 bp, Muscodor strobelii
  misc_feature: SGI EST ID NO. CUFF.40086.0
  misc_feature: Variant of the nucleotide sequence at SEQ ID NO 16973
tgttactaaaataaagctgctgtaatccgcaaaccgagtcgatttacaatggggccgacgaggcagaggctagcgcaccaacgggagaggccagctatcatatcccgacacagtcgagcagtcgtacagtttgaagattgcaggagagcgtgaacactttcgcaacatcgccatcctccgtcattggccctcgtgcctcccttctaccccttccatttgtatcttatgttcgcttcctcaccgtgaccccctgtccatcttcttttccccgtggatttccctcctccccctgatccgccatcgcgacagaccgcacacgatgaggtttccgtgcctgtcagcgctttggctggccgcgacggcctgggccgctgttgaacgtggtgaagatggaaatgtccggtctatcgctctccgaacgcataccttaaaacagccctatctcgactccgacatggcaagtcgctggtacgactttggcggtgatactgtcattaggactgattcatacatacgtctctcctcggaacagccttcgcaaaacggctggctcttctcccgcgtgcccctgaccgccaccaactgggagatcgaggtcgagttcaagatacatggcaagagccagctctttggcgatggtttcgccatgtggctcaccaaggagcgaggcgagatcgggcccgtctttggccacagggactacttcgagggcctcggcatctttgtcgacacctacaagaacaatcgccccggcaccgtcttcccctatgtcatggccatggtcggcgacggcaagaccggctataccaaggacaacgatggaaaggatcaagagttcgccggctgttctgcccgaggtctccgaaacccaaagatccccaccaagctgcgcttaacctacttccaggacaagtctttgaagttggagcttcagtacaagaccgaggatgagtggcaactttgcttcgagtccaacgacccgccctccatcccctccgttacctacctcggcttcagtgccgagactggtgagctcagcgacaaccacgacattatctccatcgaggccaagaacctgtacacgaccggtggcgcgtctgcaagacctgggtcacccggccgaggaaggaatgctaaggcaggcggcgccagcgaaggcggtggtagctggacttggttcttcgtcaagattgttctcttcttgctagtcttgggtggtggctatgttggctttactgcctggcgcacaaatcagaagaggtcacaccgattttagatactgcgatgaaggatacatcacacagcacgtgagagacgggctgtgacgaagaaggaacgaaggagacgaaacctttcgtattgtatataccagaacgcaaaatcaggaatttgaacccgccacattccatggtgccttcacgatctatctgcaatgatgggatcatgagcgacgggatcgaccgatcatgtaaaaccagcaagcaacactcaatataccaaaagccatgaattatgaagagacgagtgcagaatcggtattctgctgtgtttttgaccggtggcatactacgagttcgctgcaaagttactggtgatgtagagtagctatgcttgacgaaatggacgaggtctttggagctgaagctggcacaaaagaggcgtcacgggtcgtgtgtggtctcgacttgctacagcggatgcaacgtccgtcagcacggatggcgatctgatctgttggtgcgggacgcacgtggctgcgtcgatgaatgaaaccccgcttcacaccaatgacttataccgaagtgtctagattgagtagtgaccagtgtaatatgaagatctcaaaacatcccctcctcgccagtactcactgttagacatgcaatatcgcgcagattaacctgcaggagatctggcgattattatttgcgagggcgcgagtgagcaagatgtgagacagacaaaaaggctgggcgaaaccccactcagatccaacaagttacaatgccgatagtctgccatgttgttcctcagatgtttgactttcgtctctgccattgctcggatatctatgtgatccccatctcctcctcgcctaggcttggccggaaaatctttctcgttgttggctgacttgtcgctcacttacatcacccatgttggcgccaacagtagaggtacatatctggtgcctatgccagcattatccgtgttctgaccgttttcgacatatggatatgtatttgtattaataccggcccttgccaatcatcagcagtgagagatagctgaagcgcctctccttgtctgtcttgtccatcgatcgacgtttggtttgtctggcggcgtccagtatcctgtccagaacatcccgacccgggtccgtgtgagaggttgggctttgggttcgaggggaaggggggttcccgtcaagtctgccccgctcataaggtcaagtcccctggcaaagtggtggcaggtagggcgctcggcgacaccagttcagaacttcagctggggggccgtccgcttcccgcttgtacgcccaccaaaaagcagctgccagcccactaacatcggacgtgctactgtcgtcattctcctcctcgtcgatcgaatccttcgtcgatgctgccgacttccataattctactcagactctagacagcaatctctcgtgagatttctatattactactattactattatcattcctagcttagcaccggtcttggccgcccgggagtcagaaaacagactgaagcctttaccatttcctttggctgtactcccttcgctgggtagctcattctcatagagcttgcatgtcccggactgctagattttatctcaccttatatcatcgtctttgtctctagcgacgcccgtcatactgcgttgcgctcacccgctctgcatcgcttcagaacagagaaggcagcctgcaaatatacagtcattactcttgccaattgacgcatctgtgttctttgtgctttgatcacagccgtcgtctaagcggtcgtctacccgaaagaagagtcggctgcaagccacacatcttcacctcgcggggtccttggctgctgccatctgctgccgttggaagtctgctggaaactctcttgctccttctttgccgtgtcatcaacccgcggctcccacccgagagaccctcgtgctctctcgtcgtgccctccagctcgaatggaccagccctagggcctgcctctgcaccctccacgacacgcctcttcgcagctgctgtgaccacatctcttgaccgtatccctatacctcgaacgctgtctcattgcttgaaatcgattactcggggctacactctcagataccttagccatagtgtgtcgtgtacctgtgtcgatcacctacctcttatattcaatacttgcatcaacccagggctcggtgacatatcctgggctgtgatatcgagacatatctgcgttgtagcattcaagaatagcttcgagggtccagaccctttttggctgatatcgtgacatatgccgactctaggcttcctcaagaaaaaacggacgagggaggagaaaccagactcctcctccagtcaacctacaagcccagtcacccctgtgacgccttcttcttccagagcttttggtagcttcaccacttcgacgagtccctccaagacagcatcgaatgcgacatcaaatacgaactcattgacacaacctcaatcaaaggatcaaagtcagagcaaggagaaaccagtttcagctggtggagggccccaaatgaatccaccggctgctcaggcgtccgctccgtatggcatccagcatactccgagccccggccatgcaggggcaccacacaacctccccagcatcaacaatctaatcaacctgcctcagactgatggccagcatagctcgccgccaccacagccacaaccacaatctcaccagccggcttccgacgtacgggtgacaaagggcaaatactcgctcaatgactttgatctcatgagaactctaggcacagggagtttcgggcgtgtccatctagtgcagtcgaagcacaaccaacgtttctatgccgtcaaggtattgaaaaaggcacaagttgtcaaaatgaagcaagtggagcatacgaatgatgagaggcgaatgcttggagaagtcaaacacccttttctgatcacgctttggggaacgtttcaagatgcaaaaaatctttacatggtcatggactttgtagagggcggtgaactattttctttactcagaaagtcagggcggtttccaaatcctgtggccaagttctacgctgctgaagtcacactcgcacttgagtatcttcattcaaagaacatcatctaccgagatctcaagcccgagaacttattgctagaccgccacggacatcttaaaataacggactttggattcgcaaagcgggttcctgataaaacgtggacactgtgcggcacgccggattacttagcccccgaggtagtctctaacaaaggttacaacaagtcggtcgactggtggtcgctcggcatcttgatttacgagatgttatgcggctacacgcctttttgggacagcggttcgcccatgaagatttacgaaaacatccttcggggtaaagtgaaatatccagcatatgttcacccagatgcccaagatctacttgagcgcttgattacacctgatcttacgaagagactggggaacctctatgccgggcctgaagatgtcaagagtcacgcgtggttcgctgaagttacatgggataggctctcgagaaaagacatcgatgctccttatacacccccagtcaaagctggcgcaggcgatgctagtcagttcgacagatacccggaggagactgagaaatacggtcatggtggatctgacgaatatgggcacctgttcgtcgatttctagagcgccagcagatttggagacgcgacctaagacaaccaccacaaggcgctgacggtgaaggataatgaaacgtgcatgtttagcaagattttctttccttgctgcataagacgtttggaagtcattgggcggtgtattcggtggtcaggtaaggttacattgggttacattgacgagcttggagtgcagacagcacatatttcagtattctctataccaaaagtcaggatcattgcatacctacttgacaagagaagcttattgatcagtagtatcgcatcgcatcacattagaacgtgagtagcttaaatgtgattgtgaaaatcagcttcgcccgacctgtgtagttcaaattgcgcttcatcgcacactgtactcgtactttgaaggatccaaacttgagcctcacaaatggcagggctaggaaattttcaatctcac

SEQ ID NO: 16976 - DNA, 1416 bp, Muscodor strobelii
  misc_feature: SGI cDNA ID NO. 565664
  misc_feature: Encodes the peptide sequence at SEQ ID NO 16977
atgccgactctaggcttcctcaagaaaaaacggacgagggaggagaaaccagactcctcctccagtcaacctacaagcccagtcacccctgtgacgccttcttcttccagagcttttggtagcttcaccacttcgacgagtccctccaagacagcatcgaatgcgacatcaaatacgaactcattgacacaacctcaatcaaaggatcaaagtcagagcaaggagaaaccagtttcagctggtggagggccccaaatgaatccaccggctgctcaggcgtccgctccgtatggcatccagcatactccgagccccggccatgcaggggcaccacacaacctccccagcatcaacaatctaatcaacctgcctcagactgatggccagcatagctcgccgccaccacagccacaaccacaatctcaccagccggcttccgacgtacgggtgacaaagggcaaatactcgctcaatgactttgatctcatgagaactctaggcacagggagtttcgggcgtgtccatctagtgcagtcgaagcacaaccaacgtttctatgccgtcaaggtattgaaaaaggcacaagttgtcaaaatgaagcaagtggagcatacgaatgatgagaggcgaatgcttggagaagtcaaacacccttttctgatcacgctttggggaacgtttcaagatgcaaaaaatctttacatggtcatggactttgtagagggcggtgaactattttctttactcagaaagtcagggcggtttccaaatcctgtggccaagttctacgctgctgaagtcacactcgcacttgagtatcttcattcaaagaacatcatctaccgagatctcaagcccgagaacttattgctagaccgccacggacatcttaaaataacggactttggattcgcaaagcgggttcctgataaaacgtggacactgtgcggcacgccggattacttagcccccgaggtagtctctaacaaaggttacaacaagtcggtcgactggtggtcgctcggcatcttgatttacgagatgttatgcggctacacgcctttttgggacagcggttcgcccatgaagatttacgaaaacatccttcggggtaaagtgaaatatccagcatatgttcacccagatgcccaagatctacttgagcgcttgattacacctgatcttacgaagagactggggaacctctatgccgggcctgaagatgtcaagagtcacgcgtggttcgctgaagttacatgggataggctctcgagaaaagacatcgatgctccttatacacccccagtcaaagctggcgcaggcgatgctagtcagttcgacagatacccggaggagactgagaaatacggtcatggtggatctgacgaatatgggcacctgttcgtcgatttctag

SEQ ID NO: 16977 - protein, 471 aa, Muscodor strobelii
  misc_feature: SGI Peptide ID NO. 565664
  misc_feature (160)..(415): Pfam Id: PF00069 Pfam Desc: Protein kinase domain
  misc_feature (160)..(371): Pfam Id: PF07714 Pfam Desc: Protein tyrosine kinase
  misc_feature (1)..(471): NCBI GI: 110747125 Blast Desc: protein kinase A catalytic subunit [Colletotrichum gloeosporioides]
  misc_feature (1)..(471): NCBI GI: 38707442 Blast Desc: catalytic subunit of cAMP-dependent protein kinase [Colletotrichum lagenarium]
  misc_feature (1)..(471): NCBI GI: 4325024 Blast Desc: cAMP-dependent protein kinase catalytic subunit [Metarhizium anisopliae]
  misc_feature (1)..(471): NCBI GI: 225685569 Blast Desc: catalytic subunit of the PKA [Botryotinia fuckeliana]
  misc_feature (1)..(471): NCBI GI: 156033003 Blast Desc: conserved [Sclerotinia sclerotiorum 1980] gi|154698980|gb|EDN98718.1| conserved [Sclerotinia sclerotiorum 1980]
  misc_feature (145)..(471): NCBI GI: 256733237 Blast Desc: NECHADRAFT_68629 [Nectria haematococca mpVI 77-13-4]
  misc_feature (1)..(471): NCBI GI: 9858805 Blast Desc: AF283106_1 protein kinase A [Blumeria graminis]
  misc_feature (146)..(471): NCBI GI: 46125747 Blast Desc: FG07251.1 [Gibberella zeae PH-1]
  misc_feature (1)..(471): NCBI GI: 6456802 Blast Desc: cAMP-dependent protein kinase A catalytic subunit [Blumeria graminis f. sp. hordei]
  misc_feature (149)..(471): NCBI GI: 2911458 Blast Desc: cAMP-dependent protein kinase catalytic subunit [Colletotrichum trifolii]
  misc_feature (150)..(471): SWISSPROT Homolog: EC 2.7.11.11 cAMP-dependent protein kinase
MPTLGFLKKKRTREEKPDSSSSQPTSPVTPVTPSSSRAFGSFTTSTSPSKTASNATSNTNSLTQPQSKDQSQSKEKPVSAGGGPQMNPPAAQASAPYGIQHTPSPGHAGAPHNLPSINNLINLPQTDGQHSSPPPQPQPQSHQPASDVRVTKGKYSLNDFDLMRTLGTGSFGRVHLVQSKHNQRFYAVKVLKKAQVVKMKQVEHTNDERRMLGEVKHPFLITLWGTFQDAKNLYMVMDFVEGGELFSLLRKSGRFPNPVAKFYAAEVTLALEYLHSKNIIYRDLKPENLLLDRHGHLKITDFGFAKRVPDKTWTLCGTPDYLAPEVVSNKGYNKSVDWWSLGILIYEMLCGYTPFWDSGSPMKIYENILRGKVKYPAYVHPDAQDLLERLITPDLTKRLGNLYAGPEDVKSHAWFAEVTWDRLSRKDIDAPYTPPVKAGAGDASQFDRYPEETEKYGHGGSDEYGHLFVDF

SEQ ID NO: 16978 - DNA, 5385 bp, Muscodor strobelii; identical to SEQ ID NO: 16975
  misc_feature: SGI EST ID NO. CUFF.40086.0
  misc_feature: Variant of the nucleotide sequence at SEQ ID NO 16976

SEQ ID NO: 16979 - DNA, 1017 bp, Muscodor strobelii
  misc_feature: SGI cDNA ID NO. 565665
  misc_feature: Encodes the peptide sequence at SEQ ID NO 16980
atggacgactatctatttgacttcaatgtcaacaactgcagatcatttgttgagtcaataagatatctcgaagtgtttaactactcggatgaatcttacaattcgaacgaaacgcaccctttaactcctgacgagtttgagaattttcttgagcgtcgtggcgcatttgagcctccaaagttaagaaaggatgtcacattacgagacggtatccggttgatcatccagggatcgtgccagcacgccgatacttttgcaccatcggtcatttcactacctaagcagcattactcgtcaatggtcaggagatggcatctaccgttcagggccatcgaaggaggcagtctcgtgggccccgcattttggtgttcttatgatcaggacgaagatgatcgccatctacagatgatctttcgcaaatccgatgtgcgaaagaagggcaagacgcgtggatgggagatcatgctctcttactcattcgcaacaggcatcacaagcggatatgtgaaaggaactccctcttccgagatgatgaaatcaattgaccactgcattgcgtgccacaaggaagttggacacccattacttcttcccgtcatcatcctcgcccacgacttatcggacaaaatcgacattcgacaacgagaggcaagagattggttacgacggcttgaaaatgcgattacaatgcgaaacgaaatcgatgagagagaagagtacacggatttcgacgtcgatgggatcaatcgagacttggtcgagtgccactcacaggtgttatggaaacggccgcaagcttaccaggagatcatcaaggagatgaaatcggcgatggagaaattcaagggcaaagtgctagaagagaaagatactaagagaatgaaagcgctgcatgaaagcatgttgtctcggctggacttttttcgcgtcaagttgaccggccaggaacattatatccataccactttggagagactgcatattcaacgccaggccgtaggttctgtcatcttatga

SEQ ID NO: 16980 - protein, 338 aa, Muscodor strobelii
  misc_feature: SGI Peptide ID NO. 565665
  misc_feature (1)..(337): NCBI GI: 261360278 Blast Desc: conserved [Verticillium albo-atrum VaMs.102]
  misc_feature (1)..(332): NCBI GI: 46125749 Blast Desc: FG07252.1 [Gibberella zeae PH-1]
  misc_feature (1)..(337): NCBI GI: 39976933 Blast Desc: MGG_06369 [Magnaporthe grisea 70-15] gi|145016224|gb|EDK00714.1| MGG_06369 [Magnaporthe grisea 70-15]
  misc_feature (1)..(337): NCBI GI: 164425224 Blast Desc: NCU06239 [Neurospora crassa OR74A] gi|157070840|gb|EAA33854.2| conserved [Neurospora crassa OR74A]
  misc_feature (1)..(337): NCBI GI: 171686626 Blast Desc: protein product [Podospora anserina] gi|170943274|emb|CAP68927.1| protein product [Podospora anserina]
  misc_feature (1)..(337): NCBI GI: 156051792 Blast Desc: SS1G_07303 [Sclerotinia sclerotiorum 1980] gi|154705081|gb|EDO04820.1| SS1G_07303 [Sclerotinia sclerotiorum 1980]
  misc_feature (1)..(289): NCBI GI: 116192239 Blast Desc: CHGG_05837 [Chaetomium globosum CBS 148.51] gi|88181750|gb|EAQ89218.1| CHGG_05837 [Chaetomium globosum CBS 148.51]
  misc_feature (84)..(170): NCBI GI: 154312922 Blast Desc: BC1G_05162 [Botryotinia fuckeliana B05.10] gi|150849864|gb|EDN25057.1| BC1G_05162 [Botryotinia fuckeliana B05.10]
  misc_feature (9)..(93): NCBI GI: 154315382 Blast Desc: BC1G_04730 [Botryotinia fuckeliana B05.10] gi|150847693|gb|EDN22886.1| BC1G_04730 [Botryotinia fuckeliana B05.10]
MDDYLFDFNVNNCRSFVESIRYLEVFNYSDESYNSNETHPLTPDEFENFLERRGAFEPPKLRKDVTLRDGIRLIIQGSCQHADTFAPSVISLPKQHYSSMVRRWHLPFRAIEGGSLVGPAFWCSYDQDEDDRHLQMIFRKSDVRKKGKTRGWEIMLSYSFATGITSGYVKGTPSSEMMKSIDHCIACHKEVGHPLLLPVIILAHDLSDKIDIRQREARDWLRRLENAITMRNEIDEREEYTDFDVDGINRDLVECHSQVLWKRPQAYQEIIKEMKSAMEKFKGKVLEEKDTKRMKALHESMLSRLDFFRVKLTGQEHYIHTTLERLHIQRQAVGSVIL

SEQ ID NO: 16981 - DNA, 2117 bp, Muscodor strobelii
  misc_feature: SGI EST ID NO. CUFF.40107.0
  misc_feature: Variant of the nucleotide sequence at SEQ ID NO 16979
ctgatgggtaatattagagctctttcttcgctgcgagacaactttgagaaagtatactgcattaccaccaattttcttactcgtctactgcggctggttacgttctgcatatcaagattatgatttctccgcatttagtcctgatccaatgcacaagactgactagagccaacgactataaagggttttgaggggggctactcgaaggcttttgacgcctgtagctcgaaaaagtgagcttttctcagcataagcagaagtttcttccgtcgcattcattacgattgaagacatggacgactatctatttgacttcaatgtcaacaactgcagatcatttgttgagtcaataagatatctcgaagtgtttaactactcggatgaatcttacaattcgaacgaaacgcaccctttaactcctgacgagtttgagaattttcttgagcgtcgtggcgcatttgagcctccaaagttaagaaaggatgtcacattacgagacggtatccggttgatcatccagggatcgtgccagcacgccgatacttttgcaccatcggtcatttcactacctaagcagcattactcgtcaatggtcaggagatggcatctaccgttcagggccatcgaaggaggcagtctcgtgggccccgcattttggtgttcttatgatcaggacgaagatgatcgccatctacagatgatctttcgcaaatccgatgtgcgaaagaagggcaagacgcgtggatgggagatcatgctctcttactcattcgcaacaggcatcacaagcggatatgtgaaaggaactccctcttccgagatgatgaaatcaattgaccactgcattgcgtgccacaaggaagttggacacccattacttcttcccgtcatcatcctcgcccacgacttatcggacaaaatcgacattcgacaacgagaggcaagagattggttacgacggcttgaaaatgcgattacaatgcgaaacgaaatcgatgagagagaagagtacacggatttcgacgtcgatgggatcaatcgagacttggtcgagtgccactcacaggtgttatggaaacggccgcaagcttaccaggagatcatcaaggagatgaaatcggcgatggagaaattcaagggcaaagtgctagaagagaaagatactaagagaatgaaagcgctgcatgaaagcatgttgtctcggctggacttttttcgcgtcaagttgaccggccaggaacattatatccataccactttggagagactgcatattcaacgccaggccgtaggttctgtcatcttatgacttcaccgaacatcctcactgactcagtaacgaagctttacaacatcatgacgcaaaaagaatccaagctcaatctcgaaatggcagcgcaacaacgaagattagcccacgcgagcaaacgcgacagcacatcgatgaaaacactgtccttactcggtgctgtgtttctacctggcacgtttctgtcctctgtattcagcatgacgttctttaacttcaaagttgccgacaacagcgaagtgtctcaggaactatggatatacttcgtaatcacgattccgctcacgcttgccattgtgctagcatggtggggactagaccgaagacgagagaagagatatgcagtcgaggacgacgatatcgagaagggtatcgagcgcatggagaccgacattctcgccatcatgcgcaagaagacgatgcagaaagtcagtactttcaactcgaacagcctgagtttgagccagcccaatagtccaactactgccactccaaaaacgcatcatcatagtctatttggttcgatggaaaaacaacacaaaaaactctaattacgatgggttgggacagatcggacctggtttggaactgggcagtcattcataatggagatatttgttgtgagttgtgatttgggggccgaggttgaatatctttctcgcgtttctaacgacttcacgaattatacgatgttacgttctaccgctacctatgtgggataattatagtaaaacctaggtcggctatatagatagtgagcattaaagcctgtgtcaaacggacaatttgaagtggagttgttttgaac

SEQ ID NO: 16982 - DNA, 504 bp, Muscodor strobelii
  misc_feature: SGI cDNA ID NO. 565666
  misc_feature: Encodes the peptide sequence at SEQ ID NO 16983
atgacgcaaaaagaatccaagctcaatctcgaaatggcagcgcaacaacgaagattagcccacgcgagcaaacgcgacagcacatcgatgaaaacactgtccttactcggtgctgtgtttctacctggcacgtttctgtcctctgtattcagcatgacgttctttaacttcaaagttgccgacaacagcgaagtgtctcaggaactatggatatacttcgtaatcacgattccgctcacgcttgccattgtgctagcatggtggggactagaccgaagacgagagaagagatatgcagtcgaggacgacgatatcgagaagggtatcgagcgcatggagaccgacattctcgccatcatgcgcaagaagacgatgcagaaagtcagtactttcaactcgaacagcctgagtttgagccagcccaatagtccaactactgccactccaaaaacgcatcatcatagtctatttggttcgatggaaaaacaacacaaaaaactctaa

SEQ ID NO: 16983 - protein, 167 aa, Muscodor strobelii
  misc_feature: SGI Peptide ID NO. 565666
  misc_feature (1)..(133): NCBI GI: 261360278 Blast Desc: conserved [Verticillium albo-atrum VaMs.102]
  misc_feature (4)..(144): NCBI GI: 46125749 Blast Desc: FG07252.1 [Gibberella zeae PH-1]
  misc_feature (1)..(131): NCBI GI: 171686626 Blast Desc: protein product [Podospora anserina] gi|170943274|emb|CAP68927.1| protein product [Podospora anserina]
  misc_feature (1)..(131): NCBI GI: 39976933 Blast Desc: MGG_06369 [Magnaporthe grisea 70-15] gi|145016224|gb|EDK00714.1| MGG_06369 [Magnaporthe grisea 70-15]
  misc_feature (4)..(133): NCBI GI: 256733236 Blast Desc: [Nectria haematococca mpVI 77-13-4]
  misc_feature (1)..(164): NCBI GI: 156051792 Blast Desc: SS1G_07303 [Sclerotinia sclerotiorum 1980] gi|154705081|gb|EDO04820.1| SS1G_07303 [Sclerotinia sclerotiorum 1980]
  misc_feature (1)..(132): NCBI GI: 164425224 Blast Desc: NCU06239 [Neurospora crassa OR74A] gi|157070840|gb|EAA33854.2| conserved [Neurospora crassa OR74A]
  misc_feature (5)..(131): NCBI GI: 116192239 Blast Desc: CHGG_05837 [Chaetomium globosum CBS 148.51] gi|88181750|gb|EAQ89218.1| CHGG_05837 [Chaetomium globosum CBS 148.51]
  misc_feature (22)..(92): NCBI GI: 154283989 Blast Desc: [Ajellomyces capsulatus NAm1] gi|150410970|gb|EDN06358.1| [Ajellomyces capsulatus NAm1]
  misc_feature (22)..(92): NCBI GI: 240273096 Blast Desc: conserved [Ajellomyces capsulatus H143]
MTQKESKLNLEMAAQQRRLAHASKRDSTSMKTLSLLGAVFLPGTFLSSVFSMTFFNFKVADNSEVSQELWIYFVITIPLTLAIVLAWWGLDRRREKRYAVEDDDIEKGIERMETDILAIMRKKTMQKVSTFNSNSLSLSQPNSPTTATPKTHHHSLFGSMEKQHKKL

SEQ ID NO: 16984 - DNA, 2117 bp, Muscodor strobelii; identical to SEQ ID NO: 16981
  misc_feature: SGI EST ID NO. CUFF.40107.0
  misc_feature: Variant of the nucleotide sequence at SEQ ID NO 16982

SEQ ID NO: 16985 - DNA, 1467 bp, Muscodor strobelii
  misc_feature: SGI cDNA ID NO. 565667
  misc_feature: Encodes the peptide sequence at SEQ ID NO 16986
atgaagtctaaggatgaatcttacaattcgaacgaaacgcaccctttaactcctgacgagtttgagaattttcttgagcgtcgtggcgcatttgagcctccaaagttaagaaaggatgtcacattacgagacggtatccggttgatcatccagggatcgtgccagcacgccgatacttttgcaccatcggtcatttcactacctaagcagcattactcgtcaatggtcaggagatggcatctaccgttcagggccatcgaaggaggcagtctcgtgggccccgcattttggtgttcttatgatcaggacgaagatgatcgccatctacagatgatctttcgcaaatccgatgtgcgaaagaagggcaagacgcgtggatgggagatcatgctctcttactcattcgcaacaggcatcacaagcggatatgtgaaaggaactccctcttccgagatgatgaaatcaattgaccactgcattgcgtgccacaaggaagttggacacccattacttcttcccgtcatcatcctcgcccacgacttatcggacaaaatcgacattcgacaacgagaggcaagagattggttacgacggcttgaaaatgcgattacaatgcgaaacgaaatcgatgagagagaagagtacacggatttcgacgtcgatgggatcaatcgagacttggtcgagtgccactcacaggtgttatggaaacggccgcaagcttaccaggagatcatcaaggagatgaaatcggcgatggagaaattcaagggcaaagtgctagaagagaaagatactaagagaatgaaagcgctgcatgaaagcatgttgtctcggctggacttttttcgcgtcaagttgaccggccaggaacattatatccataccactttggagagactgcatattcaacgccaggccctttacaacatcatgacgcaaaaagaatccaagctcaatctcgaaatggcagcgcaacaacgaagattagcccacgcgagcaaacgcgacagcacatcgatgaaaacactgtccttactcggtgctgtgtttctacctggcacgtttctgtcctctgtattcagcatgacgttctttaacttcaaagttggtgagtccgataacgatactgcagggacagccgacaacagcgaagtgtctcaggaactatggatatacttcgtaatcacgattccgctcacgcttgccattgtgctagcatggtggggactagaccgaagacgagagaagagatatgcagtcgaggacgacgatatcgagaagggtatcgagcgcatggagaccgacattctcgccatcatgcgcaagaagacgatgcagaaagtcagtactttcaactcgaacagcctgagtttgagccagcccaatagtccaactactgccactccaaaaacgcatcatcatagtctatttggttcgatggaaaaacaacacaaaaaactctaa

SEQ ID NO: 16986 - protein, 488 aa, Muscodor strobelii
  misc_feature: SGI Peptide ID NO. 565667
  misc_feature (5)..(454): NCBI GI: 261360278 Blast Desc: conserved [Verticillium albo-atrum VaMs.102]
  misc_feature (5)..(454): NCBI GI: 256733236 Blast Desc: [Nectria haematococca mpVI 77-13-4]
  misc_feature (5)..(465): NCBI GI: 46125749 Blast Desc: FG07252.1 [Gibberella zeae PH-1]
  misc_feature (5)..(452): NCBI GI: 39976933 Blast Desc: MGG_06369 [Magnaporthe grisea 70-15] gi|145016224|gb|EDK00714.1| MGG_06369 [Magnaporthe grisea 70-15]
  misc_feature (18)..(452): NCBI GI: 171686626 Blast Desc: protein product [Podospora anserina] gi|170943274|emb|CAP68927.1| protein product [Podospora anserina]
  misc_feature (5)..(453): NCBI GI: 164425224 Blast Desc: NCU06239 [Neurospora crassa OR74A] gi|157070840|gb|EAA33854.2| conserved [Neurospora crassa OR74A]
  misc_feature (5)..(485): NCBI GI: 156051792 Blast Desc: SS1G_07303 [Sclerotinia sclerotiorum 1980] gi|154705081|gb|EDO04820.1| SS1G_07303 [Sclerotinia sclerotiorum 1980]
  misc_feature (5)..(452): NCBI GI: 116192239 Blast Desc: CHGG_05837 [Chaetomium globosum CBS 148.51] gi|88181750|gb|EAQ89218.1| CHGG_05837 [Chaetomium globosum CBS 148.51]
  misc_feature (81)..(401): NCBI GI: 18375980 Blast Desc: [Neurospora crassa]
  misc_feature (129)..(418): NCBI GI: 256728825 Blast Desc: NECHADRAFT_79844 [Nectria haematococca mpVI 77-13-4]
MKSKDESYNSNETHPLTPDEFENFLERRGAFEPPKLRKDVTLRDGIRLIIQGSCQHADTFAPSVISLPKQHYSSMVRRWHLPFRAIEGGSLVGPAFWCSYDQDEDDRHLQMIFRKSDVRKKGKTRGWEIMLSYSFATGITSGYVKGTPSSEMMKSIDHCIACHKEVGHPLLLPVIILAHDLSDKIDIRQREARDWLRRLENAITMRNEIDEREEYTDFDVDGINRDLVECHSQVLWKRPQAYQEIIKEMKSAMEKFKGKVLEEKDTKRMKALHESMLSRLDFFRVKLTGQEHYIHTTLERLHIQRQALYNIMTQKESKLNLEMAAQQRRLAHASKRDSTSMKTLSLLGAVFLPGTFLSSVFSMTFFNFKVGESDNDTAGTADNSEVSQELWIYFVITIPLTLAIVLAWWGLDRRREKRYAVEDDDIEKGIERMETDILAIMRKKTMQKVSTFNSNSLSLSQPNSPTTATPKTHHHSLFGSMEKQHKKL

SEQ ID NO: 16987 - DNA, 2117 bp, Muscodor strobelii; identical to SEQ ID NO: 16981
  misc_feature: SGI EST ID NO. CUFF.40107.0
  misc_feature: Variant of the nucleotide sequence at SEQ ID NO 16985

SEQ ID NO: 16988 - DNA, 1041 bp, Muscodor strobelii
  misc_feature: SGI cDNA ID NO. 565668
  misc_feature: Encodes the peptide sequence at SEQ ID NO 16989
atggacgactatctatttgacttcaatgtcaacaactgcagatcatttgttgagtcaataagatatctcgaagtgtttaactactcggtgcttgaactaatgaagtctaaggatgaatcttacaattcgaacgaaacgcaccctttaactcctgacgagtttgagaattttcttgagcgtcgtggcgcatttgagcctccaaagttaagaaaggatgtcacattacgagacggtatccggttgatcatccagggatcgtgccagcacgccgatacttttgcaccatcggtcatttcactacctaagcagcattactcgtcaatggtcaggagatggcatctaccgttcagggccatcgaaggaggcagtctcgtgggccccgcattttggtgttcttatgatcaggacgaagatgatcgccatctacagatgatctttcgcaaatccgatgtgcgaaagaagggcaagacgcgtggatgggagatcatgctctcttactcattcgcaacaggcatcacaagcggatatgtgaaaggaactccctcttccgagatgatgaaatcaattgaccactgcattgcgtgccacaaggaagttggacacccattacttcttcccgtcatcatcctcgcccacgacttatcggacaaaatcgacattcgacaacgagaggcaagagattggttacgacggcttgaaaatgcgattacaatgcgaaacgaaatcgatgagagagaagagtacacggatttcgacgtcgatgggatcaatcgagacttggtcgagtgccactcacaggtgttatggaaacggccgcaagcttaccaggagatcatcaaggagatgaaatcggcgatggagaaattcaagggcaaagtgctagaagagaaagatactaagagaatgaaagcgctgcatgaaagcatgttgtctcggctggacttttttcgcgtcaagttgaccggccaggaacattatatccataccactttggagagactgcatattcaacgccaggccgtaggttctgtcatcttatga

SEQ ID NO: 16989 - protein, 346 aa, Muscodor strobelii
  misc_feature: SGI Peptide ID NO. 565668
  misc_feature (1)..(345): NCBI GI: 261360278 Blast Desc: conserved [Verticillium albo-atrum VaMs.102]
  misc_feature (1)..(340): NCBI GI: 46125749 Blast Desc: FG07252.1 [Gibberella zeae PH-1]
  misc_feature (1)..(345): NCBI GI: 39976933 Blast Desc: MGG_06369 [Magnaporthe grisea 70-15] gi|145016224|gb|EDK00714.1| MGG_06369 [Magnaporthe grisea 70-15]
  misc_feature (1)..(345): NCBI GI: 164425224 Blast Desc: NCU06239 [Neurospora crassa OR74A] gi|157070840|gb|EAA33854.2| conserved [Neurospora crassa OR74A]
  misc_feature (1)..(345): NCBI GI: 171686626 Blast Desc: protein product [Podospora anserina] gi|170943274|emb|CAP68927.1| protein product [Podospora anserina]
  misc_feature (1)..(345): NCBI GI: 156051792 Blast Desc: SS1G_07303 [Sclerotinia sclerotiorum 1980] gi|154705081|gb|EDO04820.1| SS1G_07303 [Sclerotinia sclerotiorum 1980]
  misc_feature (1)..(297): NCBI GI: 116192239 Blast Desc: CHGG_05837 [Chaetomium globosum CBS 148.51] gi|88181750|gb|EAQ89218.1| CHGG_05837 [Chaetomium globosum CBS 148.51]
  misc_feature (92)..(178): NCBI GI: 154312922 Blast Desc: BC1G_05162 [Botryotinia fuckeliana B05.10] gi|150849864|gb|EDN25057.1| BC1G_05162 [Botryotinia fuckeliana B05.10]
  misc_feature (9)..(101): NCBI GI: 154315382 Blast Desc: BC1G_04730 [Botryotinia fuckeliana B05.10] gi|150847693|gb|EDN22886.1| BC1G_04730 [Botryotinia fuckeliana B05.10]
MDDYLFDFNVNNCRSFVESIRYLEVFNYSVLELMKSKDESYNSNETHPLTPDEFENFLERRGAFEPPKLRKDVTLRDGIRLIIQGSCQHADTFAPSVISLPKQHYSSMVRRWHLPFRAIEGGSLVGPAFWCSYDQDEDDRHLQMIFRKSDVRKKGKTRGWEIMLSYSFATGITSGYVKGTPSSEMMKSIDHCIACHKEVGHPLLLPVIILAHDLSDKIDIRQREARDWLRRLENAITMRNEIDEREEYTDFDVDGINRDLVECHSQVLWKRPQAYQEIIKEMKSAMEKFKGKVLEEKDTKRMKALHESMLSRLDFFRVKLTGQEHYIHTTLERLHIQRQAVGSVIL

SEQ ID NO: 16990 - DNA, 2117 bp, Muscodor strobelii; identical to SEQ ID NO: 16981
  misc_feature: SGI EST ID NO. CUFF.40107.0
  misc_feature: Variant of the nucleotide sequence at SEQ ID NO 16988

SEQ ID NO: 16991 - DNA, 732 bp, Muscodor strobelii
  misc_feature: SGI cDNA ID NO. 565669
  misc_feature: Encodes the peptide sequence at SEQ ID NO 16992
atgggaggaggcaagatcgagtgttacctcgatatcgcatcgtattacagctacattgcttttgtccaactgcataacaatgagaggctactgagcgataattccgtcgaggtcgatcttcaacccttcttgatcggtgccgtcaatgtagccacaggaaactctcctccctggaaagttccagcaaaagcgaagcactcacaatatgatatcaagcgtgctgccgactcactaggactgaaggatttgaagcctccgggcccgctgatggaagttggcaagaccgttgtcccgatgcgcgcaatgacttatatcaaatctgcatttcccgcttcagtctaccttgctgccttcggatacctcttccactccttctgggctctccgaaaagcgcccaacaccctcccagttctgaaagaagtgctttctgagatcccctcgggctttcgcgtgaatacactcacttcgtcaagcaagctcttcactccggaccaagtatctgagatcctcgaagcaaccgaatcgcaggaaatcaaggacaagctgaaaggaaatgtcgaagaagcagtaaagcgtggcgcttttggcgccccttggatatgggccacgaatgagaagggtagcgaggaaccatttttcggtagtgatcgctggcattatgtctggtatggtttcttaaacctgccgtataaggggttagaattactccctccacagaaagctgcgctataa

SEQ ID NO: 16992 - protein, 243 aa, Muscodor strobelii
  misc_feature: SGI Peptide ID NO. 565669
  misc_feature (5)..(226): Pfam Id: PF01323 Pfam Desc: DSBA-like thioredoxin domain
  misc_feature (1)..(240): NCBI GI: 145608778 Blast Desc: MGG_06383 [Magnaporthe grisea 70-15] gi|145016209|gb|EDK00699.1| MGG_06383 [Magnaporthe grisea 70-15]
  misc_feature (3)..(238): NCBI GI: 261360345 Blast Desc: conserved [Verticillium albo-atrum VaMs.102]
  misc_feature (5)..(236): NCBI GI: 171686780 Blast Desc: protein product [Podospora anserina] gi|170943351|emb|CAP69004.1| protein product [Podospora anserina]
  misc_feature (1)..(238): NCBI GI: 85083514 Blast Desc: NCU06494 [Neurospora crassa OR74A] gi|28918220|gb|EAA27898.1| NCU06494 [Neurospora crassa OR74A]
  misc_feature (3)..(240): NCBI GI: 46125693 Blast Desc: FG07224.1 [Gibberella zeae PH-1]
  misc_feature (4)..(241): NCBI GI: 156037852 Blast Desc: SS1G_12640 [Sclerotinia sclerotiorum 1980] gi|154698048|gb|EDN97786.1| SS1G_12640 [Sclerotinia sclerotiorum 1980]
  misc_feature (3)..(236): NCBI GI: 226291000 Blast Desc: conserved [Paracoccidioides brasiliensis Pb18]
  misc_feature (3)..(236): NCBI GI: 261198050 Blast Desc: DSBA family oxidoreductase [Ajellomyces dermatitidis SLH14081] gi|239595390|gb|EEQ77971.1| DSBA family oxidoreductase [Ajellomyces dermatitidis SLH14081]
  misc_feature (3)..(236): NCBI GI: 239607759 Blast Desc: DSBA family oxidoreductase [Ajellomyces dermatitidis ER-3]
  misc_feature (4)..(241): NCBI GI: 169596492 Blast Desc: SNOG_01009 [Phaeosphaeria nodorum SN15] gi|111071384|gb|EAT92504.1| SNOG_01009 [Phaeosphaeria nodorum SN15]
  misc_feature (5)..(221): SWISSPROT Homolog: EC 2.5.1.18 Glutathione transferase
MGGGKIECYLDIASYYSYIAFVQLHNNERLLSDNSVEVDLQPFLIGAVNVATGNSPPWKVPAKAKHSQYDIKRAADSLGLKDLKPPGPLMEVGKTVVPMRAMTYIKSAFPASVYLAAFGYLFHSFWALRKAPNTLPVLKEVLSEIPSGFRVNTLTSSSKLFTPDQVSEILEATESQEIKDKLKGNVEEAVKRGAFGAPWIWATNEKGSEEPFFGSDRWHYVWYGFLNLPYKGLELLPPQKAAL

SEQ ID NO: 16993 - DNA, 816 bp, Muscodor strobelii
  misc_feature: SGI EST ID NO. CUFF.40081.0
  misc_feature: Variant of the nucleotide sequence at SEQ ID NO 16991
cagcatcttggattccgtgttcagtaatcaacgttcaaccctcacaaataccactcgtatgagtataactcaaaactgttactattatttcccttccttccataatcaatcacgcaataattcgcaattggcaccaggcatctaactaagtgtggcgccatgggaggaggcaagatcgagtgttacctcgatatcgcatcgtattacagctacattgcttttgtccaactgcataacaatgagaggctactgagcgataattccgtcgaggtcgatcttcaacccttcttgatcggtgccgtcaatgtagccacaggaaactctcctccctggaaagttccagcaaaagcgaagcactcacaatatgatatcaagcgtgctgccgactcactaggactgaaggatttgaagcctccgggcccgctgatggaagttggcaagaccgttgtcccgatgcgcgcaatgacttatatcaaatctgcatttcccgcttcagtctaccttgctgccttcggatacctcttccactccttctgggctctccgaaaagcgcccaacaccctcccagttctgaaagaagtgctttctgagatcccctcgggctttcgcgtgaatacactcacttcgtcaagcaagctcttcactccggaccaagtatctgagatcctcgaagcaaccgaatcgcaggaaatcaaggacaagctgaaaggaaatgtcgaagaagcagtaaagcgtggcgcttttggcgccccttggatatgggccacgaatgagaagggtagcgaggaaccatttttcggtagtgatcgctggcat

SEQ ID NO: 16994 - DNA, 1437 bp, Muscodor strobelii
  misc_feature: SGI cDNA ID NO. 565670
  misc_feature: Elevated expression when VOC is produced
  misc_feature: Encodes the peptide sequence at SEQ ID NO 16995
atggctcctcctggatcaatcagcaatttggattgggaacccggcttcgacacgatcgccgtgcacggtggtcaagagcccgaccctactaacggctcgcgcgctgtccccttataccagactgcggcttacaacttcaatgacgcagcagacggcgcaggtaaatttgcgtggtcgaaagatggatacgtttatacgcgaatgggcaacccaacgactaccgtcttcgagacacgcatgtccatgttagagggaggcgtcggggcagtggcgaccgggtcaggacatgcagctcaattcatggctttaacgcaatgctgcgagccagggcaaaatttcgtgagcacaagttggttatatggtggcagttttaatcagttccgtgtgtacttgaagaagttcggtattcgtgtgaagtgggtggagggaaacgacccagcaaaattcgacgagactatcgatgaaaatacacgggcgatatacatcgaaacgatcagcaatccaaagcacagcgtgcccgatatccctacgatcgcggccgttgcccacaagcatggaattcctcttatcgttgacaacacattcggcatgggtggctacctgtgtcagcccattaaacttggagccgatattgtaacacactcggctacgaagtggatcggcggacatggaacaagcatgggaggtattgtgattgatggtggccatttcgactggagtgcatcaggcaaattccctggctttacggagcctgctgacgggtatcatggaatgcgattttgggagacgtacggcaacaaagcactcgcggcgaagctacgaatggatgccatgcgtgatctaggtccatgcttgagcccgttcaattcttggttgtttcttcaaggtctcgagacactctcactgagaggcgctaggacggtcgagaatacgcaaaagctagcagaatggctagaagcacatccttgcgtaaattgggtcttgtatccgggcctcagatcacatgtcgactatgagctagccaagaagatccttcccaaaggttccggaggcgttttgacctttggtgtggctggcaaagtcgatcaagttcgagcaattgtggataacatgaagatggcgagtcatttggcaaacgtgggcgactgcaagactcttatcatccacccatgggtcacgacacatcagcagatgcccgatgaagagaaaatcaaaggtggtgtaactcccgatctacttcgcgtcagtcttggtatcgaggattttgaagacatcagacgcgactttgagcaagcgtttgctgctgcgggtctacaaaaggcggataaatctggggtcgatccattctcaacggctttgaacctggttagcagtgggtttatgggcaaattaagcaccggcgctccacggcccggtaccgacggaacgattcaatag

SEQ ID NO: 16995 - protein, 478 aa, Muscodor strobelii
  misc_feature: SGI Peptide ID NO. 565670
  misc_feature (17)..(434): Pfam Id: PF01053 Pfam Desc: Cys/Met metabolism PLP-dependent enzyme
  misc_feature (1)..(477): NCBI GI: 256730364 Blast Desc: NECHADRAFT_95019 [Nectria haematococca mpVI 77-13-4]
  misc_feature (1)..(471): NCBI GI: 242813741 Blast Desc: o-acetylhomoserine sulfhydrylase, [Talaromyces stipitatus ATCC 10500] gi|218714566|gb|EED13989.1| o-acetylhomoserine sulfhydrylase, [Talaromyces stipitatus ATCC
  misc_feature (5)..(442): NCBI GI: 169605599 Blast Desc: SNOG_05823 [Phaeosphaeria nodorum SN15] gi|111065767|gb|EAT86887.1| SNOG_05823 [Phaeosphaeria nodorum SN15]
  misc_feature (13)..(433): NCBI GI: 170111842 Blast Desc: [Laccaria bicolor S238N-H82] gi|164637898|gb|EDR02179.1| [Laccaria bicolor S238N-H82]
  misc_feature (16)..(437): NCBI GI: 220908253 Blast Desc: O-acetylhomoserine/O-acetylserine sulfhydrylase [Cyanothece sp. PCC 7425] gi|219864864|gb|ACL45203.1| O-acetylhomoserine/O-acetylserine sulfhydrylase [Cyanothece sp.
  misc_feature (16)..(433): NCBI GI: 193212288 Blast Desc: O-acetylhomoserine/O-acetylserine sulfhydrylase [Chlorobaculum parvum NCIB 8327] gi|193085765|gb|ACF11041.1| O-acetylhomoserine/O-acetylserine sulfhydrylase [Chlorobaculum
  misc_feature (16)..(433): NCBI GI: 21673439 Blast Desc: O-acetylhomoserine (thiol)-lyase [Chlorobium tepidum TLS] gi|21646541|gb|AAM71846.1| o-acetylhomoserine (thiol)-lyase [Chlorobium tepidum TLS]
  misc_feature (7)..(434): NCBI GI: 189347314 Blast Desc: O-acetylhomoserine/O-acetylserine sulfhydrylase [Chlorobium limicola DSM 245] gi|189341461|gb|ACD90864.1| O-acetylhomoserine/O-acetylserine sulfhydrylase [Chlorobium DSM
  misc_feature (16)..(433): NCBI GI: 186686443 Blast Desc: O-acetylhomoserine/O-acetylserine sulfhydrylase [Nostoc punctiforme PCC 73102] gi|186468895|gb|ACC84696.1| O-acetylhomoserine/O-acetylserine sulfhydrylase [Nostoc PCC
  misc_feature (16)..(434): NCBI GI: 193214991 Blast Desc: O-acetylhomoserine/O-acetylserine sulfhydrylase [Chloroherpeton thalassium ATCC 35110] gi|193088468|gb|ACF13743.1| O-acetylhomoserine/O-acetylserine
  misc_feature (16)..(435): SWISSPROT Homolog: EC 2.5.1.49 O-acetylhomoserine aminocarboxypropyltransferase
  misc_feature: Useful for introducing or modulating the production of volatile compounds
MAPPGSISNLDWEPGFDTIAVHGGQEPDPTNGSRAVPLYQTAAYNFNDAADGAGKFAWSKDGYVYTRMGNPTTTVFETRMSMLEGGVGAVATGSGHAAQFMALTQCCEPGQNFVSTSWLYGGSFNQFRVYLKKFGIRVKWVEGNDPAKFDETIDENTRAIYIETISNPKHSVPDIPTIAAVAHKHGIPLIVDNTFGMGGYLCQPIKLGADIVTHSATKWIGGHGTSMGGIVIDGGHFDWSASGKFPGFTEPADGYHGMRFWETYGNKALAAKLRMDAMRDLGPCLSPFNSWLFLQGLETLSLRGARTVENTQKLAEWLEAHPCVNWVLYPGLRSHVDYELAKKILPKGSGGVLTFGVAGKVDQVRAIVDNMKMASHLANVGDCKTLIIHPWVTTHQQMPDEEKIKGGVTPDLLRVSLGIEDFEDIRRDFEQAFAAAGLQKADKSGVDPFSTALNLVSSGFMGKLSTGAPRPGTDGTIQ

SEQ ID NO: 16996 - DNA, 1774 bp, Muscodor strobelii
  misc_feature: SGI EST ID NO. CUFF.40177.1
  misc_feature: Variant of the nucleotide sequence at SEQ ID NO 16994
gttgtatcacagatatatattgaaaatgtatatctgcttcttgccgtcgttctctccggaattgccgcttctctgcattgtcttctgtaaattcccgtatcttccgagacataggttttttacggattcgatagttcagtaaagcttcaagatggctcctcctggatcaatcagcaatttggattgggaacccggcttcgacacgatcgccgtgcacggtggtcaagagcccgaccctactaacggctcgcgcgctgtccccttataccagactgcggcttacaacttcaatgacgcagcagacggcgcaggtaaatttgcgtggtcgaaagatggatacgtttatacgcgaatgggcaacccaacgactaccgtcttcgagacacgcatgtccatgttagagggaggcgtcggggcagtggcgaccgggtcaggacatgcagctcaattcatggctttaacgcaatgctgcgagccagggcaaaatttcgtgagcacaagttggttatatggtggcagttttaatcagttccgtgtgtacttgaagaagttcggtattcgtgtgaagtgggtggagggaaacgacccagcaaaattcgacgagactatcgatgaaaatacacgggcgatatacatcgaaacgatcagcaatccaaagcacagcgtgcccgatatccctacgatcgcggccgttgcccacaagcatggaattcctcttatcgttgacaacacattcggcatgggtggctacctgtgtcagcccattaaacttggagccgatattgtaacacactcggctacgaagtggatcggcggacatggaacaagcatgggaggtattgtgattgatggtggccatttcgactggagtgcatcaggcaaattccctggctttacggagcctgctgacgggtatcatggaatgcgattttgggagacgtacggcaacaaagcactcgcggcgaagctacgaatggatgccatgcgtgatctaggtccatgcttgagcccgttcaattcttggttgtttcttcaaggtctcgagacactctcactgagaggcgctaggacggtcgagaatacgcaaaagctagcagaatggctagaagcacatccttgcgtaaattgggtcttgtatccgggcctcagatcacatgtcgactatgagctagccaagaagatccttcccaaaggttccggaggcgttttgacctttggtgtggctggcaaagtcgatcaagttcgagcaattgtggataacatgaagatggcgagtcatttggcaaacgtgggcgactgcaagactcttatcatccacccatgggtcacgacacatcagcagatgcccgatgaagagaaaatcaaaggtggtgtaactcccgatctacttcgcgtcagtcttggtatcgaggattttgaagacatcagacgcgactttgagcaagcgtttgctgctgcgggtctacaaaaggcggataaatctggggtcgatccattctcaacggctttgaacctggttagcagtgggtttatgggcaaattaagcaccggcgctccacggcccggtaccgacggaacgattcaataggtgaagtcaaacggtaacaggataggatgtacgtggtggaccccctgctgcatcatggcgctgcattgtcggtcttctgagcaaccatcagttttggtcaatattcgtagtgtgcgtaattatctttgaactatgaacagttgataatctgtatgactgggatggtcccactgataaatacgctcg

SEQ ID NO: 16997 - DNA, 651 bp, Muscodor strobelii
  misc_feature: SGI cDNA ID NO. 565671
  misc_feature: Encodes the peptide sequence at SEQ ID NO 16998
atggctcctcctggatcaatcagcaatttggattgggaacccggcttcgacacgatcgccgtgcacggtggtcaagagcccgaccctactaacggctcgcgcgctgtccccttataccagactgcggcttacaacttcaatgacgcagcagacggcgcaggtaaatttgcgtggtcgaaagatggatacgtttatacgcgaatgggcaacccaacgactaccgtcttcgagacacgcatgtccatgttagagggaggcgtcggggcagtggcgaccgggtcaggacatgcagctcaattcatggctttaacgcaatgctgcgagccagggcaaaatttcgtgagcacaagttggttatatggtggcagttttaatcagttccgtgtgtacttgaagaagttcggtattcgtgtgaagtgggtggagggaaacgacccagcaaaattcgacgagactatcgatgaaaatacacgggcgatatacatcgaaacgatcagcaatccaaagcacagcgtgcccgatatccctacgatcgcggccgttgcccacaagcatggaattcctcttatcgttgacaacacattcggcatgggtggctacctgtgtcagcccattaaacttggaggcaagtatcacagaaactggcgatag

SEQ ID NO: 16998 - protein, 216 aa, Muscodor strobelii
  misc_feature: SGI Peptide ID NO. 565671
  misc_feature (17)..(216): Pfam Id: PF01053 Pfam Desc: Cys/Met metabolism PLP-dependent enzyme
  misc_feature (17)..(208): Pfam Id: PF01053 Pfam Desc: Cys/Met metabolism PLP-dependent enzyme
  misc_feature (1)..(208): NCBI GI: 256730364 Blast Desc: NECHADRAFT_95019 [Nectria haematococca mpVI 77-13-4]
  misc_feature (1)..(208): NCBI GI: 242813741 Blast Desc: o-acetylhomoserine sulfhydrylase, [Talaromyces stipitatus ATCC 10500] gi|218714566|gb|EED13989.1| o-acetylhomoserine sulfhydrylase, [Talaromyces stipitatus ATCC
  misc_feature (5)..(208): NCBI GI: 169605599 Blast Desc: SNOG_05823 [Phaeosphaeria nodorum SN15] gi|111065767|gb|EAT86887.1| SNOG_05823 [Phaeosphaeria nodorum SN15]
  misc_feature (13)..(209): NCBI GI: 169863267 Blast Desc: CC1G_04699 [Coprinopsis cinerea okayama7#130] gi|116500548|gb|EAU83443.1| CC1G_04699 [Coprinopsis cinerea okayama7#130]
  misc_feature (16)..(208): NCBI GI: 124009551 Blast Desc: O-acetylhomoserine (Thiol)-lyase [Microscilla marina ATCC 23134] gi|123984790|gb|EAY24765.1| O-acetylhomoserine (Thiol)-lyase [Microscilla marina ATCC 23134]
  misc_feature (13)..(208): NCBI GI: 170111842 Blast Desc: [Laccaria bicolor S238N-H82] gi|164637898|gb|EDR02179.1| [Laccaria bicolor S238N-H82]
  misc_feature (7)..(210): NCBI GI: 189347314 Blast Desc: O-acetylhomoserine/O-acetylserine sulfhydrylase [Chlorobium limicola DSM 245] gi|189341461|gb|ACD90864.1| O-acetylhomoserine/O-acetylserine sulfhydrylase [Chlorobium DSM
  misc_feature (16)..(209): NCBI GI: 21673439 Blast Desc: O-acetylhomoserine (thiol)-lyase [Chlorobium tepidum TLS] gi|21646541|gb|AAM71846.1| o-acetylhomoserine (thiol)-lyase [Chlorobium tepidum TLS]
  misc_feature (16)..(209): NCBI GI: 193212288 Blast Desc: O-acetylhomoserine/O-acetylserine sulfhydrylase [Chlorobaculum parvum NCIB 8327] gi|193085765|gb|ACF11041.1| O-acetylhomoserine/O-acetylserine sulfhydrylase [Chlorobaculum
  misc_feature (16)..(208): NCBI GI: 186686443 Blast Desc: O-acetylhomoserine/O-acetylserine sulfhydrylase [Nostoc punctiforme PCC 73102] gi|186468895|gb|ACC84696.1| O-acetylhomoserine/O-acetylserine sulfhydrylase [Nostoc PCC
  misc_feature (16)..(209): SWISSPROT Homolog: EC 2.5.1.49 O-acetylhomoserine aminocarboxypropyltransferase
MAPPGSISNLDWEPGFDTIAVHGGQEPDPTNGSRAVPLYQTAAYNFNDAADGAGKFAWSKDGYVYTRMGNPTTTVFETRMSMLEGGVGAVATGSGHAAQFMALTQCCEPGQNFVSTSWLYGGSFNQFRVYLKKFGIRVKWVEGNDPAKFDETIDENTRAIYIETISNPKHSVPDIPTIAAVAHKHGIPLIVDNTFGMGGYLCQPIKLGGKYHRNWR

SEQ ID NO: 16999 - DNA, 1774 bp, Muscodor strobelii; identical to SEQ ID NO: 16996
  misc_feature: SGI EST ID NO. CUFF.40177.1
  misc_feature: Variant of the nucleotide sequence at SEQ ID NO 16997

SEQ ID NO: 17000 - DNA, 942 bp, Muscodor strobelii
  misc_feature: SGI cDNA ID NO. 565672
  misc_feature: Elevated expression when VOC is produced
  misc_feature: Encodes the peptide sequence at SEQ ID NO 17001
atggaattcctcttatcgttgacaacacattcggcatgggtggctacctgtgtcagcccattaaacttggaggcaagtatcacagaaactggcgatagagcttcgaacaaagcaattaaccaagtgacagccgatattgtaacacactcggctacgaagtggatcggcggacatggaacaagcatgggaggtattgtgattgatggtggccatttcgactggagtgcatcaggcaaattccctggctttacggagcctgctgacgggtatcatggaatgcgattttgggagacgtacggcaacaaagcactcgcggcgaagctacgaatggatgccatgcgtgatctaggtccatgcttgagcccgttcaattcttggttgtttcttcaaggtctcgagacactctcactgagaggcgctaggacggtcgagaatacgcaaaagctagcagaatggctagaagcacatccttgcgtaaattgggtcttgtatccgggcctcagatcacatgtcgactatgagctagccaagaagatccttcccaaaggttccggaggcgttttgacctttggtgtggctggcaaagtcgatcaagttcgagcaattgtggataacatgaagatggcgagtcatttggcaaacgtgggcgactgcaagactcttatcatccacccatgggtcacgacacatcagcagatgcccgatgaagagaaaatcaaaggtggtgtaactcccgatctacttcgcgtcagtcttggtatcgaggattttgaagacatcagacgcgactttgagcaagcgtttgctgctgcgggtctacaaaaggcggataaatctggggtcgatccattctcaacggctttgaacctggttagcagtgggtttatgggcaaattaagcaccggcgctccacggcccggtaccgacggaacgattcaatag

SEQ ID NO: 17001 - protein, 313 aa, Muscodor strobelii
  misc_feature: SGI Peptide ID NO. 565672
  misc_feature (1)..(269): Pfam Id: PF01053 Pfam Desc: Cys/Met metabolism PLP-dependent enzyme
  misc_feature (44)..(269): Pfam Id: PF01053 Pfam Desc: Cys/Met metabolism PLP-dependent enzyme
  misc_feature (44)..(312): NCBI GI: 256730364 Blast Desc: NECHADRAFT_95019 [Nectria haematococca mpVI 77-13-4]
  misc_feature (44)..(306): NCBI GI: 242813741 Blast Desc: o-acetylhomoserine sulfhydrylase, [Talaromyces stipitatus ATCC 10500] gi|218714566|gb|EED13989.1| o-acetylhomoserine sulfhydrylase, [Talaromyces stipitatus ATCC
  misc_feature (41)..(277): NCBI GI: 169605599 Blast Desc: SNOG_05823 [Phaeosphaeria nodorum SN15] gi|111065767|gb|EAT86887.1| SNOG_05823 [Phaeosphaeria nodorum SN15]
  misc_feature (45)..(270): NCBI GI: 164659742 Blast Desc: MGL_1994 [Malassezia globosa CBS 7966] gi|159104893|gb|EDP43781.1| MGL_1994 [Malassezia globosa CBS 7966]
  misc_feature (41)..(268): NCBI GI: 170111842 Blast Desc: [Laccaria bicolor S238N-H82] gi|164637898|gb|EDR02179.1| [Laccaria bicolor S238N-H82]
  misc_feature (44)..(269): NCBI GI: 110598392 Blast Desc: O-acetylhomoserine/O-acetylserine sulfhydrylase [Chlorobium ferrooxidans DSM 13031] gi|110340001|gb|EAT58503.1| O-acetylhomoserine/O-acetylserine sulfhydrylase [Chlorobium DSM
  misc_feature (44)..(272): NCBI GI: 220908253 Blast Desc: O-acetylhomoserine/O-acetylserine sulfhydrylase [Cyanothece sp. PCC 7425] gi|219864864|gb|ACL45203.1| O-acetylhomoserine/O-acetylserine sulfhydrylase [Cyanothece sp.
  misc_feature (44)..(268): NCBI GI: 193212288 Blast Desc: O-acetylhomoserine/O-acetylserine sulfhydrylase [Chlorobaculum parvum NCIB 8327] gi|193085765|gb|ACF11041.1| O-acetylhomoserine/O-acetylserine sulfhydrylase [Chlorobaculum
  misc_feature (44)..(312): NCBI GI: 71022997 Blast Desc: UM05581.1 [Ustilago maydis 521] gi|46101214|gb|EAK86447.1| UM05581.1 [Ustilago maydis 521]
  misc_feature (44)..(268): NCBI GI: 21673439 Blast Desc: O-acetylhomoserine (thiol)-lyase [Chlorobium tepidum TLS] gi|21646541|gb|AAM71846.1| o-acetylhomoserine (thiol)-lyase [Chlorobium tepidum TLS]
  misc_feature (44)..(271): SWISSPROT Homolog: EC 2.5.1.49 O-acetylhomoserine aminocarboxypropyltransferase
  misc_feature: Useful for introducing or modulating the production of volatile compounds
MEFLLSLTTHSAWVATCVSPLNLEASITETGDRASNKAINQVTADIVTHSATKWIGGHGTSMGGIVIDGGHFDWSASGKFPGFTEPADGYHGMRFWETYGNKALAAKLRMDAMRDLGPCLSPFNSWLFLQGLETLSLRGARTVENTQKLAEWLEAHPCVNWVLYPGLRSHVDYELAKKILPKGSGGVLTFGVAGKVDQVRAIVDNMKMASHLANVGDCKTLIIHPWVTTHQQMPDEEKIKGGVTPDLLRVSLGIEDFEDIRRDFEQAFAAAGLQKADKSGVDPFSTALNLVSSGFMGKLSTGAPRPGTDGTIQ

SEQ ID NO: 17002 - DNA, 1774 bp, Muscodor strobelii; identical to SEQ ID NO: 16996
  misc_feature: SGI EST ID NO. CUFF.40177.1
  misc_feature: Variant of the nucleotide sequence at SEQ ID NO 17000

SEQ ID NO: 17003 - DNA, 936 bp, Muscodor strobelii
  misc_feature: SGI cDNA ID NO. 565673
  misc_feature: Elevated expression when VOC is produced
  misc_feature: Encodes the peptide sequence at SEQ ID NO 17004
atgtctcctgagagaaacgtccgggttgcagcagttcaagctgcccctgtctcttttgatctggagaaaagcctggagaaattgctgacactgaccgctgaagcggcccaaaaaggtgcagaattagtggttttccctgagggctttctctccgcctatccatggcgatatgcttttgacgctactatcggggcaagagagcagcgtgggcgggagtggtatcgaaaatattacgattcggccgttaaggttccctctccagaagttgacgctatagctaaagcagcgagaactcataaagtatacatacaagtgggtatcatcgagaaagatgaggggactttatattgtacagcgttacttcttggcagagacggctcgatcctactcaaacatcgcaaattgattccgacagctgcggaacgcctagtttgggggcgaggagctggagatggtctgcaagtcgtccaaacagacattggtaagattggaacgctcatctgttgggagaactacatgcctgcagctcgcatggcgctctatcagcaaggggtagaaatttacctagcgcccaacgccgacgatctgcatgaatggacagcttccatgcagcacgtgtctgatttcccgtcagactatccgcctttcactcttgaacatcctgacaggaagccggatggatcacaatgggagccgaacgacatagtaaatcatggtggatcgttcatggccagccccttaggaactcgtgttactgaacccttgtgggatgaagagaagatcattctcgcagatttcccattacacacaatcacggaatctcgtatggattttgatcccgtaggaagctactcgcggccagacgtctttacgttgactgtgaacacaaagtctgcagatagcgtcaagtttgtgcgtgaagatggtggtatataa

SEQ ID NO: 17004 - protein, 311 aa, Muscodor strobelii
  misc_feature: SGI Peptide ID NO. 565673
  misc_feature (8)..(193): Pfam Id: PF00795 Pfam Desc: Carbon-nitrogen hydrolase
  misc_feature (1)..(304): NCBI GI: 256730366 Blast Desc: NECHADRAFT_95020 [Nectria haematococca mpVI 77-13-4]
  misc_feature (6)..(304): NCBI GI: 242813735 Blast Desc: nitrilase, [Talaromyces stipitatus ATCC 10500] gi|218714565|gb|EED13988.1| nitrilase, [Talaromyces stipitatus ATCC 10500]
  misc_feature (8)..(309): NCBI GI: 260430198 Blast Desc: nitrilase 2 [Citreicella sp. SE45] gi|260418670|gb|EEX11926.1| nitrilase 2 [Citreicella sp. SE45]
  misc_feature (8)..(304): NCBI GI: 119963129 Blast Desc: nitrilase [Arthrobacter aurescens TC1] gi|119949988|gb|ABM08899.1| nitrilase [Arthrobacter aurescens TC1]
  misc_feature (6)..(302): NCBI GI: 116749742 Blast Desc: Nitrilase/cyanide hydratase and apolipoprotein N-acyltransferase [Syntrophobacter fumaroxidans MPOB] gi|116698806|gb|ABK17994.1| Nitrilase/cyanide hydratase and MPOB]
  misc_feature (6)..(304): NCBI GI: 154245513 Blast Desc: Nitrilase/cyanide hydratase and apolipoprotein N-acyltransferase [Xanthobacter autotrophicus Py2] gi|154159598|gb|ABS66814.1| Nitrilase/cyanide hydratase and Py2]
  misc_feature (19)..(307): NCBI GI: 269928661 Blast Desc: Nitrilase/cyanide hydratase and apolipoprotein N- acyltransferase [Sphaerobacter thermophilus DSM 20745] gi|269788018|gb|ACZ40160.1| Nitrilase/cyanide hydratase and N-
  misc_feature (5)..(295): NCBI GI: 255656827 Blast Desc: nitrilase (carbon-nitrogen hydrolase) [Clostridium difficile QCD-23m63]
  misc_feature (1)..(295): NCBI GI: 126700458 Blast Desc: nitrilase (carbon-nitrogen hydrolase) [Clostridium difficile 630] gi|255102015|ref|ZP_05330992.1| nitrilase (carbon-nitrogen hydrolase) [Clostridium difficile QCD-63q42]
  misc_feature (4)..(306): NCBI GI: 226314756 Blast Desc: nitrilase [Brevibacillus brevis NBRC 100599] gi|226097706|dbj|BAH46148.1| nitrilase [Brevibacillus brevis NBRC 100599]
  misc_feature (7)..(307): SWISSPROT Homolog: EC 3.5.5.1 Nitrilase
  misc_feature: Useful for introducing or modulating the production of volatile compounds
MSPERNVRVAAVQAAPVSFDLEKSLEKLLTLTAEAAQKGAELVVFPEGFLSAYPWRYAFDATIGAREQRGREWYRKYYDSAVKVPSPEVDAIAKAARTHKVYIQVGIIEKDEGTLYCTALLLGRDGSILLKHRKLIPTAAERLVWGRGAGDGLQVVQTDIGKIGTLICWENYMPAARMALYQQGVEIYLAPNADDLHEWTASMQHVSDFPSDYPPFTLEHPDRKPDGSQWEPNDIVNHGGSFMASPLGTRVTEPLWDEEKIILADFPLHTITESRMDFDPVGSYSRPDVFTLTVNTKSADSVKFVREDGGI

SEQ ID NO: 17005 - DNA, 915 bp, Muscodor strobelii
  misc_feature: SGI EST ID NO. CUFF.40093.0
  misc_feature: Variant of the nucleotide sequence at SEQ ID NO 17003
ctttgactccatgctcaccatccaatgcccaggccctcatcggcgacatctagttgccatacactcacagcgaatcacgtcaaaacgcgtgaccaatctgacgcctatggtcaaatctattcatcagtcagaagcactcatcgataccgagctggaaggtctttcgtgaagcactacagtttccagttctcgagacattgaaagacgcaaggggaagaacgtcattttcacatcgataaacgtcgaatactatgtctcctgagagaaacgtccgggttgcagcagttcaagctgcccctgtctcttttgatctggagaaaagcctggagaaattgctgacactgaccgctgaagcggcccaaaaaggtgcagaattagtggttttccctgagggctttctctccgcctatccatggcgatatgcttttgacgctactatcggggcaagagagcagcgtgggcgggagtggtatcgaaaatattacgattcggccgttaaggttccctctccagaagttgacgctatagctaaagcagcgagaactcataaagtatacatacaagtgggtatcatcgagaaagatgaggggactttatattgtacagcgttacttcttggcagagacggctcgatcctactcaaacatcgcaaattgattccgacagctgcggaacgcctagtttgggggcgaggagctggagatggtctgcaagtcgtccaaacagacattggtaagattggaacgctcatctgttgggagaactacatgcctgcagctcgcatggcgctctatcagcaaggggtagaaatttacctagcgcccaacgccgacgatctgcatgaatggacagcttccatgcagcacggtaagtcttcatgcgcgatcacattcattctgcttcggtggtttcctt

SEQ ID NO: 17006 - DNA, 1623 bp, Muscodor strobelii
  misc_feature: SGI cDNA ID NO. 565674
  misc_feature: Encodes the peptide sequence at SEQ ID NO 17007
atgatcgccaaaaccgcagatatgatggacagacaatggcttgtacagaaatttggcggcacgagcttaggcaagctgttggccaacatttgtagcactatcataccagattataacgaggaacatcgccttgtcgttgtgtgttccgctctctccggcaatactaaggcaagcggaactacaagtctcttattggaatgtatcgagctcgctgaactaggcgtggacatgcaaccaaaattgcttgaaatcactcatttgcttcgagacaatcatttggccgtactggattcattctgtaattctgaacaaccttcatctttacacatctacaaagaaacgaaatcgagaatagtagcggaatgtgatgggctagagaattttctattagctgcgcagatcgtgggcgaactttcggctcgcgcaaaggaccgggttgtctccttaggcgagaaattggcctgtgtgattgttgccgcatgtctcgaaaatcagggcattccagcaacagcagtctatttagacgatgtggtggcatcagcttttggcacctctgcctgcgatcaggctgcggcttttgataaactaggctcgaaattctaccatgccattgcgaaagaaattgcagtccgcattgagaattgcggagagactatccccatagtgacaggcttcttcggcattatgccgaactcgttgatacagacggtcggcagaggctactctgacttctgtgcagctatgtgtgctgtcgcggtggaagctgtcgagctgcagatatggaaggaagtcgatggtattttcacggctgatccgcgcaagatcccgtcagcccagttgctgccatcggtaacggcagatgaaattgcggagctgagctactacggaagcgaagtcttgcatcctctgacaatggatcaaatccgcgaggccaacatatcgcttcgtttgaagaacgtatttaaaccaaatagcccgggcacaatcatagactcagcggtgaatctgcctcaaactattaaaattactccaccaccaggtgtgctactcaagggagacttcagcgtcggcagaaacgagcgtagacggccaacagccgttacaataaaggacgatattttacttataaatgttgtttgtaatcgaaatacgaaagtggactccaaggcttacaaacatcaatctgataggaaatccggcggccttctcgttcaagtgtttcgtcagctagagaaacataacataccaattgatttgataacaacaagcgaaagaaatgttagccttgctgtgcattcgcctggcgattcaagtgcagtattgaggcttaaagaagagctcaagaatttcggctctgttcatgtcaccgagaacatgtcgattgtaacgctagtcggacacaagatgagaagccaaattggcgtagcaaatgacgcactcgcggcgcttgcgaaagctggcatcaatatccacctaattagtcagggggcaagcgagattagtatatcatttgtcgtcagcgcaaatgaagcagaaccggctttgtatgccatccacagagacgttctcaaaatcccaacaatcgaggagagccgattccgccggagagcatggctttactga

SEQ ID NO: 17007 - protein, 540 aa, Muscodor strobelii
  misc_feature: SGI Peptide ID NO. 565674
  misc_feature (463)..(524): Pfam Id: PF01842 Pfam Desc: ACT domain
  misc_feature (12)..(319): Pfam Id: PF00696 Pfam Desc: Amino acid kinase family
  misc_feature (219)..(319): Pfam Id: PF00696 Pfam Desc: Amino acid kinase family
  misc_feature (12)..(177): Pfam Id: PF00696 Pfam Desc: Amino acid kinase family
  misc_feature (11)..(530): NCBI GI: 256730111 Blast Desc: NECHADRAFT_45463 [Nectria haematococca mpVI 77-13-4]
  misc_feature (11)..(477): NCBI GI: 242813764 Blast Desc: aspartate kinase, [Talaromyces stipitatus ATCC 10500] gi|218714570|gb|EED13993.1| aspartate kinase, [Talaromyces stipitatus ATCC 10500]
  misc_feature (12)..(525): NCBI GI: 170116364 Blast Desc: [Laccaria bicolor S238N-H82] gi|164635658|gb|EDQ99962.1| [Laccaria bicolor S238N-H82]
  misc_feature (8)..(540): NCBI GI: 170114312 Blast Desc: [Laccaria bicolor S238N-H82] gi|164636665|gb|EDR00958.1| [Laccaria bicolor S238N-H82]
  misc_feature (13)..(531): NCBI GI: 255729282 Blast Desc: aspartokinase [Candida tropicalis MYA-3404] gi|240132635|gb|EER32192.1| aspartokinase [Candida tropicalis MYA-3404]
  misc_feature (13)..(519): NCBI GI: 255943717 Blast Desc: Pc20g00640 [Penicillium chrysogenum Wisconsin 54-1255] gi|211587361|emb|CAP85393.1| Pc20g00640 [Penicillium chrysogenum Wisconsin 54-1255]
  misc_feature (9)..(527): NCBI GI: 255710693 Blast Desc: KLTH0A04004p [Lachancea thermotolerans] gi|238933007|emb|CAR21188.1| KLTH0A04004p [Lachancea thermotolerans]
  misc_feature (11)..(540): NCBI GI: 213402755 Blast Desc: aspartokinase [Schizosaccharomyces japonicus yFS275] gi|212000197|gb|EEB05857.1| aspartokinase [Schizosaccharomyces japonicus yFS275]
  misc_feature (10)..(519): NCBI GI: 145253887 Blast Desc: An17g02280 [Aspergillus niger] gi|134084032|emb|CAL00570.1| protein product [Aspergillus niger]
  misc_feature (11)..(540): NCBI GI: 19113334 Blast Desc: aspartate kinase () [Schizosaccharomyces pombe] gi|18202097|sp|O60163.1|AK_SCHPO RecName: Full= aspartokinase; AltName: Full=Aspartate kinase gi|3080523|emb|CAA18652.1| kinase
  misc_feature (11)..(540): SWISSPROT Homolog: EC 2.7.2.4 Aspartate kinase
MIAKTADMMDRQWLVQKFGGTSLGKLLANICSTIIPDYNEEHRLVVVCSALSGNTKASGTTSLLLECIELAELGVDMQPKLLEITHLLRDNHLAVLDSFCNSEQPSSLHIYKETKSRIVAECDGLENFLLAAQIVGELSARAKDRVVSLGEKLACVIVAACLENQGIPATAVYLDDVVASAFGTSACDQAAAFDKLGSKFYHAIAKEIAVRIENCGETIPIVTGFFGIMPNSLIQTVGRGYSDFCAAMCAVAVEAVELQIWKEVDGIFTADPRKIPSAQLLPSVTADEIAELSYYGSEVLHPLTMDQIREANISLRLKNVFKPNSPGTIIDSAVNLPQTIKITPPPGVLLKGDFSVGRNERRRPTAVTIKDDILLINVVCNRNTKVDSKAYKHQSDRKSGGLLVQVFRQLEKHNIPIDLITTSERNVSLAVHSPGDSSAVLRLKEELKNFGSVHVTENMSIVTLVGHKMRSQIGVANDALAALAKAGINIHLISQGASEISISFVVSANEAEPALYAIHRDVLKIPTIEESRFRRRAWLY

SEQ ID NO: 17008 - DNA, 2585 bp, Muscodor strobelii
  misc_feature: SGI EST ID NO. CUFF.40128.1
  misc_feature: Variant of the nucleotide sequence at SEQ ID NO 17006
gccgggtcttcacatatagcaaacaccgaaatatcgtaaaaaaccagcgaagcaatttgggcttgttggaaaatgatgtatgaaggattctaagcggtgagtttggaggaatgcatagttggccagatcgagtgaatgcactacggtgtaaaggcacagtatatagtcgtcgtgcagtagttcatgccgccgggatctgttggagtgtcctatatgtgggtcgggctgggcaccgactagaacccggcctcaaaggcctggccagtccgtaggccctgtaaattcagcacgaatacctaagtgctgtcagtcttggtgtcgaatctgctttcgacatctcggcgcaccacttcaggcaaaccctctctttcacaaccgaatccctgtctttccgtgtggcacgccgcatcgtcgccagcactcgcagtgcggcgtcctccctcgaatgacctcattggtaccaaacccctattgaggtatttccgagagaagaatcatttggacaagacctggacgaatattaagatgactagagtgccaccaaccccatagaaacatgatcgccaaaaccgcagatatgatggacagacaatggcttgtacagaaatttggcggcacgagcttaggcaagctgttggccaacatttgtagcactatcataccagattataacgaggaacatcgccttgtcgttgtgtgttccgctctctccggcaatactaaggcaagcggaactacaagtctcttattggaatgtatcgagctcgctgaactaggcgtggacatgcaaccaaaattgcttgaaatcactcatttgcttcgagacaatcatttggccgtactggattcattctgtaattctgaacaaccttcatctttacacatctacaaagaaacgaaatcgagaatagtagcggaatgtgatgggctagagaattttctattagctgcgcagatcgtgggcgaactttcggctcgcgcaaaggaccgggttgtctccttaggcgagaaattggcctgtgtgattgttgccgcatgtctcgaaaatcagggcattccagcaacagcagtctatttagacgatgtggtggcatcagcttttggcacctctgcctgcgatcaggctgcggcttttgataaactaggctcgaaattctaccatgccattgcgaaagaaattgcagtccgcattgagaattgcggagagactatccccatagtgacaggcttcttcggcattatgccgaactcgttgatacagacggtcggcagaggctactctgacttctgtgcagctatgtgtgctgtcgcggtggaagctgtcgagctgcagatatggaaggaagtcgatggtattttcacggctgatccgcgcaagatcccgtcagcccagttgctgccatcggtaacggcagatgaaattgcggagctgagctactacggaagcgaagtcttgcatcctctgacaatggatcaaatccgcgaggccaacatatcgcttcgtttgaagaacgtatttaaaccaaatagcccgggcacaatcatagactcagcggtgaatctgcctcaaactattaaaattactccaccaccaggtgtgctactcaagggagacttcagcgtcggcagaaacgagcgtagacggccaacagccgttacaataaaggacgatattttacttataaatgttgtttgtaatcgaaatacgtaagagaataatctactggattcatgaatggaatattttgtacactgtacatcaaaaagtctagaaagtggactccaaggcttacaaacatcaatctgataggaaatccggcggccttctcgttcaagtgtttcgtcagctagagaaacataacataccaattgatttgataacaacaagcgaaagaaatgttagccttgctgtgcattcgcctggcgattcaagtgcagtattgaggcttaaagaagagctcaagaatttcggctctgttcatgtcaccgagaacatgtcgattgtaacgctagtcggacacaagatgagaagccaaattggcgtagcaaatgacgcactcgcggcgcttgcgaaagctggcatcaatatccacctaattagtcagggggcaagcgagattagtatatcatttgtcgtcagcgcaaatgaagcagaaccggctttgtatgccatccacagagacgttctcaaaatcccaacaatcgaggagagccgattccgccggagagcatggctttactgattgtcatacttgcgctgttcagtaaagactacgagtgtcgagtttcgaatttcgcataagcgtatgatagatgaaagcattcatgagtttacaggtatatgtgtattagctttggagacaaaagtcttttcacttgggcgaaggcagatcgcgggtcgtcatgaattaatcttgttaatctggcagattagactatctcttttcgtaatgtatgctccattatctggtcgatcaagcttctagccaaatgattcattcggcttcataagacagcatccatcgacgtgattgcccttgaattagatgaataacccattcagagcttccaagcttgactcggcg

SEQ ID NO: 17009 - DNA, 933 bp, Muscodor strobelii
  misc_feature: SGI cDNA ID NO. 565675
  misc_feature: Encodes the peptide sequence at SEQ ID NO 17010
atggctgcgcaaaaggtggccttggttgtgggggcttcgcgaggaatcggtgttgctattgacctagcgctggcaaaagatggctacaaagtggtggtcgtcgcaaagtcgacaagtgatgctcagaaggtgtcacgtttcccacctgacccaaactcaccccagtcaacaatcagcaccgttcaacgagaaatccaagaagccggtggcacagcgacagccatagcagtcgatgtccgtgacttcgaaagtatccaaaaatgcgtagaaacaaccatcgaaacatacggccgtctagacgtcctagtctacaactcaggcgcaatatggtggacatcagtagaagacacgcccatgaagcgcttccaactcatgcaacgcgtcaatatcgagggcctatacggaaccgtacaagcatgtctaccgcatctcaagaaacacggcgaaggacgaatcatcgtcgtcagcccgccgatatacagccgttttttccgaggcaaaactgcgtacgcgatgggcaaagtaggtatgagcgtcttgactaaagggctggcgatggacttcaagaggcaagggttggatggtatggcgattaccagtatatggcctgcggtggcaattgagtctggagctaccaaagcaatgacggacaagaacccaaaggaggcggaagacctccgcaaagcgaatatattctccgacgccatactcgctatgctgagagctctagcctcaacagtcaacggtagactagagcttgacgaagattttttacggagcgatgctggtgtcactgatttttccaagtactccgttgttcctgggtcgagcccaaggaggatcatgccagcacagctcccgattttgacggtcgaggaggaagatgatgagggcaaacgcatgaatagtgcagagggaaagtccaagctgtaa

SEQ ID NO: 17010 - protein, 310 aa, Muscodor strobelii
  misc_feature: SGI Peptide ID NO. 565675
  misc_feature (5)..(189): Pfam Id: PF00106 Pfam Desc: short chain dehydrogenase
  misc_feature (4)..(310): NCBI GI: 261198052 Blast Desc: short chain dehydrogenase [Ajellomyces dermatitidis SLH14081] gi|239595391|gb|EEQ77972.1| short chain dehydrogenase [Ajellomyces dermatitidis SLH14081] gi|239607758|gb|EEQ84745.1|
  misc_feature (1)..(305): NCBI GI: 119186609 Blast Desc: CIMG_03352 [Coccidioides immitis RS]
  misc_feature (4)..(310): NCBI GI: 225679287 Blast Desc: short chain dehydrogenase [Paracoccidioides brasiliensis Pb03]
  misc_feature (1)..(305): NCBI GI: 240108507 Blast Desc: oxidoreductase,short chain dehydrogenase, [Coccidioides posadasii C735 delta SOWgp]
  misc_feature (1)..(310): NCBI GI: 240275550 Blast Desc: short chain dehydrogenase [Ajellomyces capsulatus H143]
  misc_feature (4)..(308): NCBI GI: 169596494 Blast Desc: SNOG_01010 [Phaeosphaeria nodorum SN15] gi|160701324|gb|EAT92505.2| SNOG_01010 [Phaeosphaeria nodorum SN15]
  misc_feature (1)..(310): NCBI GI: 225561935 Blast Desc: short-chain dehydrogenase [Ajellomyces capsulatus G186AR]
  misc_feature (4)..(303): NCBI GI: 189202506 Blast Desc: short chain dehydrogenase [Pyrenophora tritici-repentis Pt-1C-BFP] gi|187984688|gb|EDU50176.1| short chain dehydrogenase [Pyrenophora tritici-repentis Pt-1C-BFP]
  misc_feature (4)..(305): NCBI GI: 255945447 Blast Desc: Pc20g09970 [Penicillium chrysogenum Wisconsin 54-1255] gi|211588226|emb|CAP86326.1| Pc20g09970 [Penicillium chrysogenum Wisconsin 54-1255]
  misc_feature (2)..(307): NCBI GI: 256732800 Blast Desc: [Nectria haematococca mpVI 77-13-4]
  misc_feature (5)..(209): SWISSPROT Homolog: EC 1.1.1.47 Glucose 1-dehydrogenase
MAAQKVALVVGASRGIGVAIDLALAKDGYKVVVVAKSTSDAQKVSRFPPDPNSPQSTISTVQREIQEAGGTATAIAVDVRDFESIQKCVETTIETYGRLDVLVYNSGAIWWTSVEDTPMKRFQLMQRVNIEGLYGTVQACLPHLKKHGEGRIIVVSPPIYSRFFRGKTAYAMGKVGMSVLTKGLAMDFKRQGLDGMAITSIWPAVAIESGATKAMTDKNPKEAEDLRKANIFSDAILAMLRALASTVNGRLELDEDFLRSDAGVTDFSKYSVVPGSSPRRIMPAQLPILTVEEEDDEGKRMNSAEGKSKL

SEQ ID NO: 17011 - DNA, 8216 bp, Muscodor strobelii
  misc_feature: SGI EST ID NO. CUFF.40283.0
  misc_feature: Variant of the nucleotide sequence at SEQ ID NO 17009
aatttagagacaagttgctattgacctagcgctggcaaaagatggctacaaaggtatgttccaaaccatatagatccgacctatctcatgacttacccgtttctagtggtggtcgtcgcaaagtcgacaagtgatgctcagaaggtgtcacgtttcccacctgacccaaactcaccccagtcaacaatcagcaccgttcaacgagaaatccaagaagccggtggcacagcgacagccatagcagtcgatgtccgtgacttcgaaagtatccaaaaatgcgtagaaacaaccatcgaaacatacggccgtctagacgtcctagtctacaactcaggcgcaatatggtggacatcagtagaagacacgcccatgaagcgcttccaactcatgcaacgcgtcaatatcgagggcctatacggaaccgtacaagcatgtctaccgcatctcaagaaacacggcgaaggacgaatcatcgtcgtcagcccgccgatatacagccgttttttccgaggcaaaactgcgtacgcgatgggcaaagtaggtatgagcgtcttgactaaagggctggcgatggacttcaagaggcaagggttggatggtatggcgattaccagtatatggcctgcggtggcaattgagtctggagctaccaaagcaatgacggacaagaacccaaaggaggcggaagacctccgcaaagcgaatatattctccgacgccatactcgctatgctgagagctctagcctcaacagtcaacggtagactagagcttgacgaagattttttacggagcgatgctggtgtcactgatttttccaagtactccgttgttcctgggtcgagcccaaggaggatcatgccagcacagctcccgattttgacggtcgaggaggaagatgatgagggcaaacgcatgaatagtgcagagggaaagtccaagctgtaatttcgagaaacttcatagtgggcataagaataaatggcccaccacgtctatacctcaaggatctcacggctgtagaacaggacaaactgcatgtttcgttgaccatcaacggccgttgtggatgtgttattgatattgggcatcttatacatgtacatgattatatatcaacatattaggcagccgtagccagctttatacaaacgtaaccgcacaaataccacgtcacactccaagtcttatgcaaataatgatgagtacagctgccgcgatcagtctgattttcctcataattcatcgatcgatagcaacaacgaatctgcgatgcgcgcaactaatttccgttagacgatgcttaagcgttaaatctgcatctggcgtcatagctttaggcagtctgggtgaaattgtacaaattatacgaatggggttagcagacagcaaactcacgtttcactccttgtattgatatcgtgaaatctcgatttcggaccgaccccctattgtcttcgctgtcgaatctgtttcacgatttgctgaccgcccactatgatgacaaccgggaacaagcaaaagcagaaaacaactccgcgtagtacaactacccaagtacttcttcgggcagggtttgcattcttcaaagtgttagtatagcaaatcttgccggagcggagccgtcttcgcgctttatacgcggtatggctccgacaatccagacaaattgaaaccactcactatcacaccattatgaagaacaatctcgtcaaaaatatttggcataggtccaaatcgctctagtcttggatttccgtggcgaagaacacggacccccggcggtgtgagcacacgattacggggtaagtttagatccgggttctcgaacccttcatactcttcatccttgtcaattggaacgatcagtgttacgacctctttcagtcgatctggtaatgtgtataggggtctggtccgggcaaagtgattcacacgccagttgtctgccggatggagtcgaattgacgcatcctcgagtcttggcagctcggcgagtcgtttgcagaaacccctccattcggaattccaagctcgattttgattctgtagctctatcaattccgcggaatggaaactccatgagatttggagacgcttaacatccttcaaaattggcggtggatcatacatcagcaaagagagagcagtctgacggtcgtgtagggcgaatgtgacgcagtcggaaatcgaggcacggcattctatatagctaacaactgataagattgagttgtgtaagacgcttaggcaaaaatgctcaaactcacgtggctttgcagcaaagcagaagcgggaggaacatgtttacaggtagcccccagcggttcgactttgcgctttcacgacataaccagtggtttttccatggcgattgtgttggcagcagtacttgacacaggtgcggcctgaacttcaggatcagtctctatgaatatcacactggggccgagaaactcaccaggatttcattttatcggaggcatcgtcgtcatggatccatttcatgtaggactcacgacggttatgttggattatacatggagcacagcgtttcacgcgaggtttgccagggcggtagaacagatgctgtgtcaggccggagatgcgccagcattcgcgatagatcatcagccgcacctcgggaggcagcttagcgaaaaagggagaatcgacttgcttgttcgcgctctctccaagctcgacaagatttgggtatgtccgagccacatcttcaggtgaaatggtagaatcctgatcgacgtcacgattagagccgcgacggcggccgatgccagccagggcatgaagtgggcgtctccgtgtcatgatggaatgagtgtagcaacgactacggcgacgaaagcctcgactcgactagggtggtgtgaagccaccatgcagctcgaagatcggacacaggtgctctactcaatacttgtatgttttcacgagcaagggcatgagagcatcgcacagagaagagcatggatgaaggtacgggtgcatccgggccttttccggagttgttcttgatctcgtgcccaggctggtgtcaaaaattccacagcccagggcagagttgggatcgggccagctgcagcgacggtagttgggatgtcttggcttacatactgtcgggtgcttgacctgagctgtcggtgacgatgggggtggaggggccggctataagaggggcgcggtctctcggctctgtctgggccgttgatccctccccacatgtgcttggccttctggacttgcgagaggtcgaaacagtagatttctctaaactcagttgagcgagagtgtggtgcaactatcaccaattaggatactccgctgaccgtcagactgccctatgtgtgccttcatcagatgtctcactgcttcggctattctctcgctgcaatgtaaaataagagcacgaaacaatgagtcaagttgtttccatttacgacttgcctaaaggcgatggtctgaacccactcgtgcatagcacagacttcccagcacttatagtacgtcatgtcttgtcgaaatgctgcaggcgcgtgtagaaacataaaggcatccaagtttagtgctatcctattgtatcaatggaagacgagttaaaacaaacagcgccttagattgcctcgatgaggtccactaaaggtgactttgacaggacctgctatctgttatcgattgcgcatcttggcattctaccttgaactttttagaagaatggactagtcttgagctttgcaggtgggggagttgaagcttcaattgaactaagcctttgaaatttgtgtgtctgccctctgctattgtatgcgcggctgcatgaaatacctttcgtaatttctattctctctgtaaggtattcagctcctttccgcgccccttatagccttttatggcacactgtcgatgcgactttatcttcagttgaccaaatcactatggctcctgaagaaggcgccggcgagctgccgtcgagctctgatgcgcccgcagctattccccctactttcgactccacccccaacatggccgactccaatggcaatgcacacccttctgagcgccagggtcgccgaggcagagccgacccgtggggcaagaagcgaggaagaggcggaggaagaggaagaggcgccggcaggtggaagggttctcgcagtgaagacggtaacggcagggataatcacagcctgcccgaaggcactgactggcgcgacgtccgagatgcgaagcggaggaagaaggacaacggcgacggccagggcgctgacaagcccggcgagcccagctacatgagcatcaagttcgaccaggccgagatcgacgccgaggagcgcaggcccaagcgcaaggtcgccgtgctgataggctactccggcaccggctaccacggcctgcagatcaaccaccagcacaagactatcgagggcgacctcttcgccgccttcgtcgccgccgaggccatcgccaagcgcaacgccgacgaccccaaaaagtccagcttcgtccgctgcgcccgcaccgacaagggcgtccacgccggcggcaacatggtctcgctcaagctcaccatcgaggaccccgacatcgtctccaagatcaaccaccacctgcccccgcagatccgagtctggggcatcgagcgcaccaacaaccagttcagcagctaccggtcttgcgactcgcggtggtacgagtatctcatgccgacctactgcctgctccctccccatcccgagagtttcctcggccgcaaggtcctgcagtccatcaaggagcacggccttgaggatgagtacgcacagcgcatgtctagcgtgaaagactattgggccgaggtcgacaagaacgacatccagcctatcctcgacagactggagcccaagttaagagaagctgtaaagtcccatatccatgcacaagaacggcccgaagggaacaagcaggacaggcccgtcgccaaagcaaataattccgacgaggcaccggtctcggccgaagcagccgtcgatggcctcagcacttcagaagacacgagtgatgtaccggccgttactgagggccccccggtgtcgaacgaggacgagcctaagccggatcaggagtcgggcaagggctcgaaaccgaaagagctgagtccatttgagagagctgttaaagagatcaaagctgcatacgtagctgccaagcgacgatatcgagtgacgccggatcgcttagacgagctgcagacttcgctttctcagtatgagggcaccaaaaactttcacaactacactgtccaagtgtcctacaaagactcttccgcaaagcgatcgatcaaatcgtttgttgtgaaccgcacgcccatcaactatgaggacactgagtgggtttcgatcaaggtccacggccagtccttcatgatgcatcagatccggaagatggtcgcgatggccgtgcttggtgttcggtgtgccacgcccttggagcgttttgaggagaccttctcggctgcacgtatcagcattcccaaggccccgagtttgggcctgcttttggagcgtcccgtgttcgatgcctataacaagagagcaaccgagactctgaacttgcaaccccttgatttcgccaagcatgagaaggagatcgaggcattcaaggcggagtacatttacaaccacatcttccaattagaagagaaggagaactcgttccatatattcttcaatcagatcgattgtttcagaaacgaccacttcctgtggctcaccgctgatgggctcaaagcggctacacaaagaacgggaccgcgggaggtcgagtacagggcacttgatggcgatgacagtgatgaagaggagattaacaagggcggagagggcgaggaaggctgaaaagccaaggcgttctggactgcattcagttagattagattctcatttgcatacctacgcgattgtgaagtcacgcgcgtagcaggagcgaggctggcgtcggcgcatgcttccaattcgcgtaaacaacgcgacgtcacaggctgtaaataacgctggagagagatttctggcagactgcgactcagatcactaaataccacgactatctgatcgtgagctgacagcatagcacatcgcagcatcaagaagaggtagacttctcatagagaattttatgattgttttgcaatccagactattgaatcctgtctgatcgtaccgtcgtgtcatcgtaaccttgtgatgcatccttactgatccgagtactctgcaaacattgtccgagtgctcctatgtgacagaatcaatctgcatgccagcagatataccactttccgttccgtttcgttccgtttcacttcttattccgacatacagtttcatgcagtttcttccctccccagatttttttcgttccttgcaagtacatttgagccatgtatacagctagccgtctgaaagttcttccttgcaaatgcacccatcatacgtgccaaatcgtccgaactggagactcgtaactgccgcacttaggaaatcgtaactgtcgtacctaggaaatcgtaactgccgtgccaaggaaatcaaaaccattcgttcttgccgtgagtcgaacttcagaagtcagaaaacgatgcaacttgttcttgccgtgggagagcgaccaactcgttcttgtccttgccgtagatcatcgattgagcccttcacattcgggggaggcgcttcaagtcgtcgatgttgtcccaaggcgtcgggaaagtaggcttgggcttcaagttcggcttggcctgtccctcggtgtgaacatcggcaactgtgtaattgtgaggcatatccgcgccctcctgctgagtctgagactgctcctcgcggtggacgtcatttgttgtgtgagtgcgagtgatagtcatgtcattgaagttgaagttgagcttgccgccgtcgtcaagaccgagagacatgatgcgactgtcctcagcaggaggtgcgtcgttcatgctggttgacgaataggttcgccacgagtcagcaggcgaagtaggtctacgctggcgacgatgagcgggaccagggtcctcgttggcgttgacgggggcaggtgagatacggcgatagctacccagcaagataggagatgaggaaggactgcccggcacatagtactaattgtggacaggcttcacgtccgactcggaattggcaggaacagatgggattgggcgtgcgggccagccaggaggcgtagtggatctgcccaattgatcctaagcagggccagagtcctcgttcgcctctgcagtgccagaggagatgccctccacggcgtgaacatctcgaagagtgattgcgttctgcatggagataagctgctgcgacatgtccatgactgcgcgagcaccccggtccaagttcgattcgcgagctcgattggccgcatctttgggggaacaaagaggaccggtgacccagagctgtttgatctcgcgattgagagcgagcagattctcgatttcggtgatctgtttttcttagttatatatacgtgtctccgggggaacggattttagtaaaggcaaacttaccaatgcagcacactctcgatccatgcgcatacggagctgactgccctcgctaacggtcgcagtctccgcaacgcggtcagcagtagcctcgatcatgttgcggaagcgagtgaggagctgcgcaacgatgcggttgtggcgatctgcatgtttaacggcgtcagcgaaaataccaagctgagagtcaggcaacagcttggcgacgcggaacatccggttgcaaacatccttgatttcgtcatcgtaagcattgagttcatcccagagagtgcacgccttgcgccgaaagttctggaaactctctcggaggtcctgtcgcatctcgataacccacatgggtggcagggacttcttgagacgcatgggtatagcgacagatccctcagggacaggtgatcctgaggcagaggccatcttgaggctagagacaggtgatttgcctgtagatagctggtgcactttgcttggggggctgttgatggtacgcaacaagatggtggcttcaactcagagaatcgcagatcttggagatatgcgtgtttgtttgttgtgtgggaagacaaaaagactcatccccacgaggggttcatgctttgttaaatgccccacgaggggttcgatttccacgatccccgta

SEQ ID NO: 17012 - DNA, 1170 bp, Muscodor strobelii
  misc_feature: SGI cDNA ID NO. 565676
  misc_feature: Encodes the peptide sequence at SEQ ID NO 17013
atgacacggagacgcccacttcatgccctggctggcatcggccgccgtcgcggctctaatcgtgacgtcgatcaggattctaccatttcacctgaagatgtggctcggacatacccaaatcttgtcgagcttggagagagcgcgaacaagcaagtcgattctccctttttcgctaagctgcctcccgaggtgcggctgatgatctatcgcgaatgctggcgcatctccggcctgacacagcatctgttctaccgccctggcaaacctcgcgtgaaacgctgtgctccatgtataatccaacataaccgtcgtgagtcctacatgaaatggatccatgacgacgatgcctccgataaaatgaaatcctggccgcacctgtgtcaagtactgctgccaacacaatcgccatggaaaaaccactggttatgtcgtgaaagcgcaaagtcgaaccgctgggggctacctgtaaacatgttcctcccgcttctgctttgctgcaaagccacctatatagaatgccgtgcctcgatttccgactgcgtcacattcgccctacacgaccgtcagactgctctctctttgctgatgtatgatccaccgccaattttgaaggatgttaagcgtctccaaatctcatggagtttccattccgcggaattgatagagctacagaatcaaaatcgagcttggaattccgaatggaggggtttctgcaaacgactcgccgagctgccaagactcgaggatgcgtcaattcgactccatccggcagacaactggcgtgtgaatcactttgcccggaccagacccctatacacattaccagatcgactgaaagaggtcgtaacactgatcgttccaattgacaaggatgaagagtatgaagggttcgagaacccggatctaaacttaccccgtaatcgtgtgctcacaccgccgggggtccgtgttcttcgccacggaaatccaagactagagcgatttggacctatgccaaatatttttgacgagattgttcttcataatggtgtgataaatgcaaaccctgcccgaagaagtacttgggtagttgtactacgcggagttgttttctgcttttgcttgttcccggttgtcatcatagtgggcggtcagcaaatcgtgaaacagattcgacagcgaagacaatag

SEQ ID NO: 17013 - protein, 389 aa, Muscodor strobelii
  misc_feature: SGI Peptide ID NO. 565676
  misc_feature (44)..(212): NCBI GI: 46139755 Blast Desc: FG11392.1 [Gibberella zeae PH-1]
  misc_feature (51)..(258): NCBI GI: 171691294 Blast Desc: protein product [Podospora anserina] gi|170945595|emb|CAP71708.1| protein product [Podospora anserina]
MTRRRPLHALAGIGRRRGSNRDVDQDSTISPEDVARTYPNLVELGESANKQVDSPFFAKLPPEVRLMIYRECWRISGLTQHLFYRPGKPRVKRCAPCIIQHNRRESYMKWIHDDDASDKMKSWPHLCQVLLPTQSPWKNHWLCRESAKSNRWGLPVNMFLPLLLCCKATYIECRASISDCVTFALHDRQTALSLLMYDPPPILKDVKRLQISWSFHSAELIELQNQNRAWNSEWRGFCKRLAELPRLEDASIRLHPADNWRVNHFARTRPLYTLPDRLKEVVTLIVPIDKDEEYEGFENPDLNLPRNRVLTPPGVRVLRHGNPRLERFGPMPNIFDEIVLHNGVINANPARRSTWVVVLRGVVFCFCLFPVVIIVGGQQIVKQIRQRRQ

SEQ ID NO: 17014 - DNA, 7000 bp, Muscodor strobelii
  misc_feature: SGI EST ID NO. CUFF.40284.2
  misc_feature: Variant of the nucleotide sequence at SEQ ID NO 17012
caatttctcattattgctaggcagctagacttcagaacgaaatctataaatgattcctctcaaaatctcggagcaaatatgcgtgatgatcattgcaactgaagcactctaccacacctgaatccaccacatctagatccgtcaagatgaatcggagagaccagaatacactgatggatcgccacaaccgcatcgttgcgcagctcctcactcgcttccgcaacatgatcgaggctactgctgaccgcgttgcggagactgcgaccgttagcgagggcagtcagctccgtatgcgcatggatcgagagtgtgctgcattgatcaccgaaatcgagaatctgctcgctctcaatcgcgagatcaaacagctctgggtcaccggtcctctttgttcccccaaagatgcggccaatcgagctcgcgaatcgaacttggaccggggtgctcgcgcagtcatggacatgtcgcagcagcttatctccatgcagaacgcaatcactcttcgagatgttcacgccgtggagggcatctcctctggcactgcagaggcgaacgaggactctggccctgcttaggatcaattgggcagatccactacgcctcctggctggcccgcacgcccaatcccatctgttcctgccaattccgagtcggacgtgaagcctgtccacaattagtactatgtgccgggcagtccttcctcatctcctatcttgctgggtagctatcgccgtatctcacctgcccccgtcaacgccaacgaggaccctggtcccgctcatcgtcgccagcgtagacctacttcgcctgctgactcgtggcgaacctattcgtcaaccagcatgaacgacgcacctcctgctgaggacagtcgcatcatgtctctcggtcttgacgacggcggcaagctcaacttcaacttcaatgacatgactatcactcgcactcacacaacaaatgacgtccaccgcgaggagcagtctcagactcagcaggagggcgcggatatgcctcacaattacacagttgccgatgttcacaccgagggacaggccaagccgaacttgaagcccaagcctactttcccgacgccttgggacaacatcgacgacttgaagcgcctcccccgaatgtgaagggctcaatcgatgatctacggcaaggacaagaacgagttggtcgctctcccacggcaagaacaagttgcatcgttttctgacttctgaagttcgactcacggcaagaacgaatggttttgatttccttggcacggcagttacgatttcctaggtacgacagttacgatttcctaagtgcggcagttacgagtctccagttcggacgatttggcacgtatgatgggtgcatttgcaaggaagaactttcagacggctagctgtatacatggctcaaatgtacttgcaaggaacgaaaaaaatctggggagggaagaaactgcatgaaactgtatgtcggaataagaagtgaaacggaacgaaacggaacggaaagtggtatatctgctggcatgcagattgattctgtcacataggagcactcggacaatgtttgcagagtactcggatcagtaaggatgcatcacaaggttacgatgacacgacggtacgatcagacaggattcaatagtctggattgcaaaacaatcataaaattctctatgagaagtctacctcttcttgatgctgcgatgtgctatgctgtcagctcacgatcagatagtcgtggtatttagtgatctgagtcgcagtctgccagaaatctctctccagcgttatttacagcctgtgacgtcgcgttgtttacgcgaattggaagcatgcgccgacgccagcctcgctcctgctacgcgcgtgacttcacaatcgcgtaggtatgcaaatgagaatctaatctaactgaatgcagtccagaacgccttggcttttcagccttcctcgccctctccgcccttgttaatctcctcttcatcactgtcatcgccatcaagtgccctgtactcgacctcccgcggtcccgttctttgtgtagccgctttgagcccatcagcggtgagccacaggaagtggtcgtttctgaaacaatcgatctgattgaagaatatatggaacctggccatgctgtcagtacatattgtgcaaacttccgtcgtgagaaacctacgagttctccttctcttctaattggaagatgtggttgtaaatgtactccgccttgaatgcctcgatctccttctcatgcttggcgaaatcaaggggttgcaagttcagagtctcggttgctctcttgttataggcatcgaacacgggacgctccaaaagcaggcccaaactcggggccttgggaatgctgatacgtgcagccgagaaggtctcctcaaaacgctccaagggcgtggcacaccgaacaccaagcacggccatcgcgaccatcttccggatctgatgcatcatgaaggactggccgtggaccttgatcgaaacccactcagtgtcctcatagttgatgggcgtgcggttcacaacaaacgatttgatcgatcgctttgcggaagagtctttgtaggacacttggacagtgtagttgtgaaagtttttggtgccctcatactgagaaagcgaagtctgcagctcgtctaagcgatccggcgtcactcgatatcgtcgcttggcagctacgtatgcagctttgatctctttaacagctctctcaaatggactcagctctttcggtttcgagcccttgcccgactcctgatccggcttaggctcgtcctcgttcgacaccggggggccctcagtaacggccggtacatcactcgtgtcttctgaagtgctgaggccatcgacggctgcttcggccgagaccggtgcctcgtcggaattatttgctttggcgacgggcctgtcctgcttgttcccttcgggccgttcttgtgcatggatatgggactttacagcttctcttaacttgggctccagtctgtcgaggataggctggatgtcgttcttgtcgacctcggcccaatagtctttcacgctagacatgcgctgtgcgtactcatcctcaaggccgtgctccttgatggactgcaggaccttgcggccgaggaaactctcgggatggggagggagcaggcagtaggtcggcatgagatactcgtaccaccgcgagtcgcaagaccggtagctgctgaactggttgttggtgcgctcgatgccccagactcggatctgcgggggcaggtggtggttgatcttggagacgatgtcggggtcctcgatggtgagcttgagcgagaccatgttgccgccggcgtggacgcccttgtcggtgcgggcgcagcggacgaagctggactttttggggtcgtcggcgttgcgcttggcgatggcctcggcggcgacgaaggcggcgaagaggtcgccctcgatagtcttgtgctggtggttgatctgcaggccgtggtagccggtgccggagtagcctatcagcacggcgaccttgcgcttgggcctgcgctcctcggcgtcgatctcggcctggtcgaacttgatgctcatgtagctgggctcgccgggcttgtcagcgccctggccgtcgccgttgtccttcttcctccgcttcgcatctcggacgtcgcgccagtcagtgccttcgggcaggctgtgattatccctgtggttgtcgtctagttagaaggcattggcttgggcgtcgcaaatatggttgagggggagggggccagactaacctgccgttaccgtcttcactgcgagaacccttccacctgccggcgcctcttcctcttcctccgcctcttcctcgcttcttgccccacgggtcggctctgcctcggcgaccctggcgctcagaagggtgtgcattgccattggagtcggccatgttgggggtggagtcgaaagtagggggaatagctgcgggcgcatcagagctcgacggcagctcgccggcgccttcttcaggagccatagtgatttggtcaactgaagataaagtcgcatcgacagtgtgccataaaaggctataaggggcgcggaaaggagctgaataccttacagagagaatagaaattacgaaaggtatttcatgcagccgcgcatacaatagcagagggcagacacacaaatttcaaaggcttagttcaattgaagcttcaactcccccacctgcaaagctcaagactagtccattcttctaaaaagttcaaggtagaatgccaagatgcgcaatcgataacagatagcaggtcctgtcaaagtcacctttagtggacctcatcgaggcaatctaaggcgctgtttgttttaactcgtcttccattgatacaataggatagcactaaacttggatgcctttatgtttctacacgcgcctgcagcatttcgacaagacatgacgtactataagtgctgggaagtctgtgctatgcacgagtgggttcagaccatcgcctttaggcaagtcgtaaatggaaacaacttgactcattgtttcgtgctcttattttacattgcagcgagagaatagccgaagcagtgagacatctgatgaaggcacacatagggcagtctgacggtcagcggagtatcctaattggtgatagttgcaccacactctcgctcaactgagtttagagaaatctactgtttcgacctctcgcaagtccagaaggccaagcacatgtggggagggatcaacggcccagacagagccgagagaccgcgcccctcttatagccggcccctccacccccatcgtcaccgacagctcaggtcaagcacccgacagtatgtaagccaagacatcccaactaccgtcgctgcagctggcccgatcccaactctgccctgggctgtggaatttttgacaccagcctgggcacgagatcaagaacaactccggaaaaggcccggatgcacccgtaccttcatccatgctcttctctgtgcgatgctctcatgcccttgctcgtgaaaacatacaagtattgagtagagcacctgtgtccgatcttcgagctgcatggtggcttcacaccaccctagtcgagtcgaggctttcgtcgccgtagtcgttgctacactcattccatcatgacacggagacgcccacttcatgccctggctggcatcggccgccgtcgcggctctaatcgtgacgtcgatcaggattctaccatttcacctgaagatgtggctcggacatacccaaatcttgtcgagcttggagagagcgcgaacaagcaagtcgattctccctttttcgctaagctgcctcccgaggtgcggctgatgatctatcgcgaatgctggcgcatctccggcctgacacagcatctgttctaccgccctggcaaacctcgcgtgaaacgctgtgctccatgtataatccaacataaccgtcgtgagtcctacatgaaatggatccatgacgacgatgcctccgataaaatgaaatcctggccgcacctgtgtcaagtactgctgccaacacaatcgccatggaaaaaccactggttatgtcgtgaaagcgcaaagtcgaaccgctgggggctacctgtaaacatgttcctcccgcttctgctttgctgcaaagccacctatatagaatgccgtgcctcgatttccgactgcgtcacattcgccctacacgaccgtcagactgctctctctttgctgatgtatgatccaccgccaattttgaaggatgttaagcgtctccaaatctcatggagtttccattccgcggaattgatagagctacagaatcaaaatcgagcttggaattccgaatggaggggtttctgcaaacgactcgccgagctgccaagactcgaggatgcgtcaattcgactccatccggcagacaactggcgtgtgaatcactttgcccggaccagacccctatacacattaccagatcgactgaaagaggtcgtaacactgatcgttccaattgacaaggatgaagagtatgaagggttcgagaacccggatctaaacttaccccgtaatcgtgtgctcacaccgccgggggtccgtgttcttcgccacggaaatccaagactagagcgatttggacctatgccaaatatttttgacgagattgttcttcataatggtgtgataaatgcaaaccctgcccgaagaagtacttgggtagttgtactacgcggagttgttttctgcttttgcttgttcccggttgtcatcatagtgggcggtcagcaaatcgtgaaacagattcgacagcgaagacaatagggggtcggtccgaaatcgagatttcacgatatcaatacaaggagtgaaacttgcgcgcatcgcagattcgttgttgctatcgatcgatgaattatgaggaaaatcagactgatcgcggcagctgtactcatcattatttgcataagacttggagtgtgacgtggtatttgtgcggttacgtttgtataaagctggctacggctgcctaatatgttgatatataatcatgtacatgtataagatgcccaatatcaataacacatccacaacggccgttgatggtcaacgaaacatgcagtttgtcctgttctacagccgtgagatccttgaggtatagacgtggtgggccatttattcttatgcccactatgaagtttctcgaaattacagcttggactttccctctgcactattcatgcgtttgccctcatcatcttcctcctcgaccgtcaaaatcgggagctgtgctggcatgatcctccttgggctcgacccaggaacaacggagtacttggaaaaatcagtgacaccagcatcgctccgtaaaaaatcttcgtcaagctctagtctaccgttgactgttgaggctagagctctcagcatagcgagtatggcgtcggagaatatattcgctttgcggaggtcttccgcctcctttgggttcttgtccgtcattgctttggtagctccagact

SEQ ID NO: 17015 - DNA, 1938 bp, Muscodor strobelii
  misc_feature: SGI cDNA ID NO. 565677
  misc_feature: Encodes the peptide sequence at SEQ ID NO 17016
atggctcctgaagaaggcgccggcgagctgccgtcgagctctgatgcgcccgcagctattccccctactttcgactccacccccaacatggccgactccaatggcaatgcacacccttctgagcgccagggtcgccgaggcagagccgacccgtggggcaagaagcgaggaagaggcggaggaagaggaagaggcgccggcaggtggaagggttctcgcagtgaagacggtaacggcagggataatcacagcctgcccgaaggcactgactggcgcgacgtccgagatgcgaagcggaggaagaaggacaacggcgacggccagggcgctgacaagcccggcgagcccagctacatgagcatcaagttcgaccaggccgagatcgacgccgaggagcgcaggcccaagcgcaaggtcgccgtgctgataggctactccggcaccggctaccacggcctgcagatcaaccaccagcacaagactatcgagggcgacctcttcgccgccttcgtcgccgccgaggccatcgccaagcgcaacgccgacgaccccaaaaagtccagcttcgtccgctgcgcccgcaccgacaagggcgtccacgccggcggcaacatggtctcgctcaagctcaccatcgaggaccccgacatcgtctccaagatcaaccaccacctgcccccgcagatccgagtctggggcatcgagcgcaccaacaaccagttcagcagctaccggtcttgcgactcgcggtggtacgagtatctcatgccgacctactgcctgctccctccccatcccgagagtttcctcggccgcaaggtcctgcagtccatcaaggagcacggccttgaggatgagtacgcacagcgcatgtctagcgtgaaagactattgggccgaggtcgacaagaacgacatccagcctatcctcgacagactggagcccaagttaagagaagctgtaaagtcccatatccatgcacaagaacggcccgaagggaacaagcaggacaggcccgtcgccaaagcaaataattccgacgaggcaccggtctcggccgaagcagccgtcgatggcctcagcacttcagaagacacgagtgatgtaccggccgttactgagggccccccggtgtcgaacgaggacgagcctaagccggatcaggagtcgggcaagggctcgaaaccgaaagagctgagtccatttgagagagctgttaaagagatcaaagctgcatacgtagctgccaagcgacgatatcgagtgacgccggatcgcttagacgagctgcagacttcgctttctcagtatgagggcaccaaaaactttcacaactacactgtccaagtgtcctacaaagactcttccgcaaagcgatcgatcaaatcgtttgttgtgaaccgcacgcccatcaactatgaggacactgagtgggtttcgatcaaggtccacggccagtccttcatgatgcatcagatccggaagatggtcgcgatggccgtgcttggtgttcggtgtgccacgcccttggagcgttttgaggagaccttctcggctgcacgtatcagcattcccaaggccccgagtttgggcctgcttttggagcgtcccgtgttcgatgcctataacaagagagcaaccgagactctgaacttgcaaccccttgatttcgccaagcatgagaaggagatcgaggcattcaaggcggagtacatttacaaccacatcttccaattagaagagaaggagaactcgttccatatattcttcaatcagatcgattgtttcagaaacgaccacttcctgtggctcaccgctgatgggctcaaagcggctacacaaagaacgggaccgcgggaggtcgagtacagggcacttgatggcgatgacagtgatgaagaggagattaacaagggcggagagggcgaggaaggctga

SEQ ID NO: 17016 - protein, 645 aa, Muscodor strobelii
  misc_feature: SGI Peptide ID NO. 565677
  misc_feature (141)..(246): Pfam Id: PF01416 Pfam Desc: tRNA pseudouridine synthase
  misc_feature (433)..(540): Pfam Id: PF01416 Pfam Desc: tRNA pseudouridine synthase
  misc_feature (1)..(633): NCBI GI: 171685180 Blast Desc: protein product [Podospora anserina] gi|170942551|emb|CAP68202.1| protein product [Podospora anserina]
  misc_feature (22)..(612): NCBI GI: 46124417 Blast Desc: FG06586.1 [Gibberella zeae PH-1]
  misc_feature (92)..(632): NCBI GI: 116208668 Blast Desc: CHGG_03627 [Chaetomium globosum CBS 148.51] gi|88184224|gb|EAQ91692.1| CHGG_03627 [Chaetomium globosum CBS 148.51]
  misc_feature (28)..(642): NCBI GI: 256726517 Blast Desc: [Nectria haematococca mpVI 77-13-4]
  misc_feature (10)..(616): NCBI GI: 85091723 Blast Desc: NCU07528 [Neurospora crassa OR74A] gi|28920438|gb|EAA29805.1| NCU07528 [Neurospora crassa OR74A]
  misc_feature (90)..(645): NCBI GI: 154300700 Blast Desc: BC1G_10938 [Botryotinia fuckeliana B05.10] gi|150856545|gb|EDN31737.1| BC1G_10938 [Botryotinia fuckeliana B05.10]
  misc_feature (57)..(642): NCBI GI: 212532769 Blast Desc: tRNA pseudouridine synthase, [Penicillium marneffei ATCC 18224] gi|210071905|gb|EEA25994.1| tRNA pseudouridine synthase, [Penicillium marneffei ATCC 18224]
  misc_feature (90)..(645): NCBI GI: 156048366 Blast Desc: SS1G_08914 [Sclerotinia sclerotiorum 1980] gi|154693311|gb|EDN93049.1| SS1G_08914 [Sclerotinia sclerotiorum 1980]
  misc_feature (96)..(612): NCBI GI: 71000998 Blast Desc: tRNA pseudouridine synthase [Aspergillus fumigatus Af293] gi|66852818|gb|EAL93142.1| tRNA pseudouridine synthase, [Aspergillus fumigatus Af293] gi|159129271|gb|EDP54385.1| tRNA
  misc_feature (2)..(622): NCBI GI: 240105901 Blast Desc: tRNA pseudouridine synthase, [Coccidioides posadasii C735 delta SOWgp]
MAPEEGAGELPSSSDAPAAIPPTFDSTPNMADSNGNAHPSERQGRRGRADPWGKKRGRGGGRGRGAGRWKGSRSEDGNGRDNHSLPEGTDWRDVRDAKRRKKDNGDGQGADKPGEPSYMSIKFDQAEIDAEERRPKRKVAVLIGYSGTGYHGLQINHQHKTIEGDLFAAFVAAEAIAKRNADDPKKSSFVRCARTDKGVHAGGNMVSLKLTIEDPDIVSKINHHLPPQIRVWGIERTNNQFSSYRSCDSRWYEYLMPTYCLLPPHPESFLGRKVLQSIKEHGLEDEYAQRMSSVKDYWAEVDKNDIQPILDRLEPKLREAVKSHIHAQERPEGNKQDRPVAKANNSDEAPVSAEAAVDGLSTSEDTSDVPAVTEGPPVSNEDEPKPDQESGKGSKPKELSPFERAVKEIKAAYVAAKRRYRVTPDRLDELQTSLSQYEGTKNFHNYTVQVSYKDSSAKRSIKSFVVNRTPINYEDTEWVSIKVHGQSFMMHQIRKMVAMAVLGVRCATPLERFEETFSAARISIPKAPSLGLLLERPVFDAYNKRATETLNLQPLDFAKHEKEIEAFKAEYIYNHIFQLEEKENSFHIFFNQIDCFRNDHFLWLTADGLKAATQRTGPREVEYRALDGDDSDEEEINKGGEGEEG

SEQ ID NO: 17017 - DNA, 8216 bp, Muscodor strobelii; identical to SEQ ID NO: 17011
  misc_feature: SGI EST ID NO. CUFF.40283.0
  misc_feature: Variant of the nucleotide sequence at SEQ ID NO 17015

SEQ ID NO: 17018 - DNA, 1062 bp, Muscodor strobelii
  misc_feature: SGI cDNA ID NO. 565678
  misc_feature: Elevated expression when VOC is produced
  misc_feature: Encodes the peptide sequence at SEQ ID NO 17019
atggcctctgcctcaggatcacctgtccctgagggatctgtcgctatacccatgcgtctcaagaagtccctgccacccatgtgggttatcgagatgcgacaggacctccgagagagtttccagaactttcggcgcaaggcgtgcactctctgggatgaactcaatgcttacgatgacgaaatcaaggatgtttgcaaccggatgttccgcgtcgccaagctgttgcctgactctcagcttggtattttcgctgacgccgttaaacatgcagatcgccacaaccgcatcgttgcgcagctcctcactcgcttccgcaacatgatcgaggctactgctgaccgcgttgcggagactgcgaccgttagcgagggcagtcagctccgtatgcgcatggatcgagagtgtgctgcattgatcaccgaaatcgagaatctgctcgctctcaatcgcgagatcaaacagctctgggtcaccggtcctctttgttcccccaaagatgcggccaatcgagctcgcgaatcgaacttggaccggggtgctcgcgcagtcatggacatgtcgcagcagcttatctccatgcagaacgcaatcactcttcgagattactatgtgccgggcagtccttcctcatctcctatcttgctgggtagctatcgccgtatctcacctgcccccgtcaacgccaacgaggaccctggtcccgctcatcgtcgccagcgtagacctacttcgcctgctgactcgtggcgaacctattcgtcaaccagcatgaacgacgcacctcctgctgaggacagtcgcatcatgtctctcggtcttgacgacggcggcaagctcaacttcaacttcaatgacatgactatcactcgcactcacacaacaaatgacgtccaccgcgaggagcagtctcagactcagcaggagggcgcggatatgcctcacaattacacagttgccgatgttcacaccgagggacaggccaagccgaacttgaagcccaagcctactttcccgacgccttgggacaacatcgacgacttgaagcgcctcccccgaatgtga

SEQ ID NO: 17019 - protein, 353 aa, Muscodor strobelii
  misc_feature: SGI Peptide ID NO. 565678
  misc_feature (72)..(190): NCBI GI: 171685184 Blast Desc: protein product [Podospora anserina] gi|170942553|emb|CAP68204.1| protein product [Podospora anserina]
  misc_feature (91)..(161): NCBI GI: 156048132 Blast Desc: [Sclerotinia sclerotiorum 1980] gi|154693194|gb|EDN92932.1| [Sclerotinia sclerotiorum 1980]
  misc_feature (91)..(183): NCBI GI: 256726520 Blast Desc: NECHADRAFT_100273 [Nectria haematococca mpVI 77-13-4]
  misc_feature (86)..(161): NCBI GI: 154300724 Blast Desc: [Botryotinia fuckeliana B05.10] gi|150856557|gb|EDN31749.1| [Botryotinia fuckeliana B05.10]
  misc_feature (91)..(210): NCBI GI: 145609511 Blast Desc: [Magnaporthe grisea 70-15] gi|145016879|gb|EDK01309.1| [Magnaporthe grisea 70-15]
  misc_feature (91)..(167): NCBI GI: 85091725 Blast Desc: NCU07529 [Neurospora crassa OR74A] gi|28920439|gb|EAA29806.1| [Neurospora crassa OR74A]
  misc_feature (93)..(183): NCBI GI: 119480725 Blast Desc: NFIA_084460 [Neosartorya fischeri NRRL 181] gi|119408545|gb|EAW18494.1| [Neosartorya fischeri NRRL 181]
  misc_feature (92)..(183): NCBI GI: 261190044 Blast Desc: conserved [Ajellomyces dermatitidis SLH14081] gi|239591260|gb|EEQ73841.1| conserved [Ajellomyces dermatitidis SLH14081] gi|239606323|gb|EEQ83310.1| conserved [Ajellomyces
  misc_feature (91)..(183): NCBI GI: 255935549 Blast Desc: Pc13g03640 [Penicillium chrysogenum Wisconsin 54-1255] gi|211583421|emb|CAP91433.1| Pc13g03640 [Penicillium chrysogenum Wisconsin 54-1255]
  misc_feature (93)..(183): NCBI GI: 67539878 Blast Desc: AN6109.2 [Aspergillus nidulans FGSC A4] gi|40738894|gb|EAA58084.1| [Aspergillus nidulans FGSC A4] gi|259479701|tpe|CBF70166.1| TPA: [Aspergillus nidulans FGSC A4]
  misc_feature: Useful for introducing or modulating the production of volatile compounds
MASASGSPVPEGSVAIPMRLKKSLPPMWVIEMRQDLRESFQNFRRKACTLWDELNAYDDEIKDVCNRMFRVAKLLPDSQLGIFADAVKHADRHNRIVAQLLTRFRNMIEATADRVAETATVSEGSQLRMRMDRECAALITEIENLLALNREIKQLWVTGPLCSPKDAANRARESNLDRGARAVMDMSQQLISMQNAITLRDYYVPGSPSSSPILLGSYRRISPAPVNANEDPGPAHRRQRRPTSPADSWRTYSSTSMNDAPPAEDSRIMSLGLDDGGKLNFNFNDMTITRTHTTNDVHREEQSQTQQEGADMPHNYTVADVHTEGQAKPNLKPKPTFPTPWDNIDDLKRLPRM

SEQ ID NO: 17020 - DNA, 7000 bp, Muscodor strobelii; identical to SEQ ID NO: 17014
  misc_feature: SGI EST ID NO. CUFF.40284.2
  misc_feature: Variant of the nucleotide sequence at SEQ ID NO 17018

SEQ ID NO: 17021 - DNA, 384 bp, Muscodor strobelii
  misc_feature: SGI cDNA ID NO. 565679
  misc_feature: Encodes the peptide sequence at SEQ ID NO 17022
atggtaatcaagaagcatggagaccaccagcgcatcctatccactctctggagcgaaaccgaaatcaaaagacacggagacttcagtcaacaacttgactggcgcaggctcggcagcatcttcagggcagcccatctcttccgcgctctgggctctgaagccgatgctagaggcgagatcgagaggggttgccaatccggtgatcttctcgcgatcgtcggtttcttcccttacctggcgaaggtttgcggtgtctacgacccgctgaaagaacaatcgccagatccgaaccagaactactgggtgagcacgtacttcgaggtgtacgttaaacgcaaatccctcaaccaatgggacacggcatgggctggattcaccgagtag

SEQ ID NO: 17022 - protein, 127 aa, Muscodor strobelii
  misc_feature: SGI Peptide ID NO. 565679
MVIKKHGDHQRILSTLWSETEIKRHGDFSQQLDWRRLGSIFRAAHLFRALGSEADARGEIERGCQSGDLLAIVGFFPYLAKVCGVYDPLKEQSPDPNQNYWVSTYFEVYVKRKSLNQWDTAWAGFTE

SEQ ID NO: 17023 - DNA, 474 bp, Muscodor strobelii
  misc_feature: SGI cDNA ID NO. 565680
  misc_feature: Encodes the peptide sequence at SEQ ID NO 17024
atgcagttcacgatcaacttcgcgctcctcctgctgaccctgagccctacgggtttcgccctgcaggagttctggcacacgagcgcgcaagagcgacgccaggaaggcggaaccatcaccaccgtttctccagactcctttttcaagtgtgatggtgacacctggaagacagtgatctggcacatctccgacgacgtctctcacgagcactatggcatgcgcgttgagccgagtaaagacgtcggtcctcccttgtaccgcgataacctgaatatcgtggagttaaacacgaatacctttgtcggtcaccaaactgtgtatgctgatcgtaactacggcctctacaccacggatggtcgtatggacgcccagtgcactgtcgatcgcagtttcaaaatggatctcaactgcaatgtcggtgacatgcatttcgagatgacggggtcttcaatgcttcactgcactcccgtttag

SEQ ID NO: 17024 - protein, 157 aa, Muscodor strobelii
  misc_feature: SGI Peptide ID NO. 565680
MQFTINFALLLLTLSPTGFALQEFWHTSAQERRQEGGTITTVSPDSFFKCDGDTWKTVIWHISDDVSHEHYGMRVEPSKDVGPPLYRDNLNIVELNTNTFVGHQTVYADRNYGLYTTDGRMDAQCTVDRSFKMDLNCNVGDMHFEMTGSSMLHCTPV

SEQ ID NO: 17025 - DNA, 465 bp, Muscodor strobelii
  misc_feature: SGI cDNA ID NO. 565681
  misc_feature: Reduced expression when VOC is produced
  misc_feature: Encodes the peptide sequence at SEQ ID NO 17026
atggtccagcttcaggaaattgttgacgagcacttccaggagggccagccgggccccgaggaggatgacgccgacttcacagacacagactcggagatctcggaagagtcagactacgaccctattgacgagaccttgttcgagcgaatctcggccctccgcgacatcatcccactgcagacccgcgtcgccatttccaatgccgcctcgtcaaccaccagcgctgtcaagactgcgctctccctcggtggcaagacactgtgggtcatcagcagctctgctctgctcatcggcatcccctacgccctggcctggaacgacgagcagcaggttatggagatggagaaggagatgaagatgcgcgagatgggcggcgacctgctcacggctggcggtaacgacggctcttcgacggcacaacaggttggcgctgccctcggccaagaggccaagcccgctctgtag

SEQ ID NO: 17026 - protein, 154 aa, Muscodor strobelii
  misc_feature: SGI Peptide ID NO. 565681
  misc_feature (2)..(139): Pfam Id: PF04281 Pfam Desc: Mitochondrial import receptor subunit Tom22
  misc_feature (1)..(154): NCBI GI: 46116546 Blast Desc: FG04115.1 [Gibberella zeae PH-1]
  misc_feature (1)..(154): NCBI GI: 156064549 Blast Desc: SS1G_00282 [Sclerotinia sclerotiorum 1980] gi|154691144|gb|EDN90882.1| SS1G_00282 [Sclerotinia sclerotiorum 1980]
  misc_feature (1)..(154): NCBI GI: 154323053 Blast Desc: mitochondrial import receptor subunit tom-22 [Botryotinia fuckeliana B05.10] gi|150848203|gb|EDN23396.1| mitochondrial import receptor subunit tom-22 [Botryotinia B05.10]
  misc_feature (1)..(143): NCBI GI: 171686126 Blast Desc: protein product [Podospora anserina] gi|170943024|emb|CAP68677.1| protein product [Podospora anserina]
  misc_feature (1)..(154): NCBI GI: 256726144 Blast Desc: [Nectria haematococca mpVI 77-13-4]
  misc_feature (1)..(154): NCBI GI: 85081308 Blast Desc: NCU00431 [Neurospora crassa OR74A] gi|730223|sp|Q07335.1|TOM22_NEUCR RecName: Full=Mitochondrial import receptor subunit tom-22; AltName: Full=Mitochondrial 22 of
  misc_feature (1)..(154): NCBI GI: 242807003 Blast Desc: mitochondrial import receptor subunit tom22 [Talaromyces stipitatus ATCC 10500] gi|218715486|gb|EED14908.1| mitochondrial import receptor subunit tom22 [Talaromyces ATCC
  misc_feature (1)..(129): NCBI GI: 212538289 Blast Desc: mitochondrial import receptor subunit tom22 [Penicillium marneffei ATCC 18224] gi|210069042|gb|EEA23133.1| mitochondrial import receptor subunit tom22 [Penicillium ATCC
  misc_feature (1)..(154): NCBI GI: 189207781 Blast Desc: mitochondrial import receptor subunit tom22 [Pyrenophora tritici-repentis Pt-1C-BFP] gi|187976317|gb|EDU42943.1| mitochondrial import receptor subunit
  misc_feature (1)..(132): NCBI GI: 255936953 Blast Desc: Pc13g10830 [Penicillium chrysogenum Wisconsin 54-1255] gi|211584123|emb|CAP92152.1| Pc13g10830 [Penicillium chrysogenum Wisconsin 54-1255]
  misc_feature: Useful for introducing or modulating the production of volatile compounds
MVQLQEIVDEHFQEGQPGPEEDDADFTDTDSEISEESDYDPIDETLFERISALRDIIPLQTRVAISNAASSTTSAVKTALSLGGKTLWVISSSALLIGIPYALAWNDEQQVMEMEKEMKMREMGGDLLTAGGNDGSSTAQQVGAALGQEAKPAL

SEQ ID NO: 17027 - DNA, 1512 bp, Muscodor strobelii
  misc_feature: SGI EST ID NO. CUFF.40218.1
  misc_feature: Variant of the nucleotide sequence at SEQ ID NO 17025
gcagccttgaaggtcgggttgttgatgaacgtgcatgggccacagtaaagcacgctaatgtccctagagcccagagatgatggagggaatcggcaggattagcgcttagagcccgataatgaatttttgacaacctcgagtctgctagacctgcatcactttttagcacctaaaagaagacctgctttttgtctcaattcatccatcaccacactatcatcaacctgcgtctctttctccgactgtccccgaaattgattttctctacatccttctagtcctacagcgagaatggtccagcttcaggaaattgttgacgagcacttccaggagggccagccgggccccgaggaggatgacgccgacttcacagacacaggtgtgcatcgcaccagcccgccgtccactgcgcgtctggcgcccgtcaactgacatgccgtgaccattgtagactcggagatctcggaagagtcagactacgaccctattgacgagaccttgttcgagcgaatctcggccctccgcgacatcatcccactgcagacccgcgtcgccatttccaatgccgcctcgtcaaccaccagcgctgtcaagactgcgctctccctcggtggcaagacactgtgggtcatcagcagctctgctctgctcatcggcatcccctacgccctggcctggaacgacgagcagcaggttatggagatggagaaggagatgaagatgcgcgagatgggcggcgacctgctcacggctggcggtaacgacggctcttcgacggcacaacaggttggcgctgccctcggccaagaggccaagcccgctctgtagagtcaacatcgctacaaagtagcaccccatcctcgacatactcgcctacctaattccatccacacaccctgtacatcacccaccaccactgccccaaccatgacgcctaccgacggtagaccattccccttgactggaccccgatcagcttcagaaagtggaatagttgggctcgttcatcctttcatgtaatcatactttgcatacgaagactcgagatcaggtctctcacctcactggctagacggagctctagttctattgtacaataatgttgaacacgcctgcgactattgatagaaaggggcacggtagcatgagcggaccggtatcgtccaaaatcacgaattgattcttccgtttaatgacaacctaaagtttggtatttcgctatgtgcatgattcagctatgactcggcgctatccgtcaaatcttagtccatgtgcgtgtgtgtttaccagatatctctatcgtagtggttagactgggaggtccattttcagcgatgtcatttcacttagcagatcacgagagggcccgaaaccagagaaacaatgtatttctgtgtgaaggtgaagttgggtttcagcccaaaggccatattttgtgccttcactgaaaaacttgtcacgaactaaagcagtccaccttcccctcgaatcaattcagccacgacatctgca

SEQ ID NO: 17028 - DNA, 2919 bp, Muscodor strobelii
  misc_feature: SGI cDNA ID NO. 565682
  misc_feature: Encodes the peptide sequence at SEQ ID NO 17029
atggcgtgggatcacttatctatcaccaagcctcatctggtgtatatcatccttggtggcttcacttcactgttcatgttatgctcttctgtgatcaaggagcgtctttacatcggtgaggctacagtggccacaatcgtgggtatcatctttgggcctcatgccgccaatctcatcgacccaaacagctggggaaatgttgatgagattactctcgaattctcacgcattgtgctcgttgtccagtgttttgccgttggtgtcgagttgcccaaatactacatggagaaacattggaaatcagtcattttcctcttgctgcctgtcatgacctttggctggcttatcacgagcattataatattctggttgttcccaaccctgaactacgtccagagtcttgctgttgctgcctgtgtgacagccacagatcccgttctggcatcatccgttgtcggtaaaggcaagtttgcaaaacgagtgccgaagcatttaagagatctgctttcagccgagtctggatgcaacgacggcatggcgtttccattcatatatctggctctctacctgatccaagacaatcttgcggcgggcgagacaatttatcattgggttgtgtataccattctgtacgaatgtgtcttcggcgctgtatatggcttccttatcgggtacattgctcgtcatggcatcaagttcgctgaaaagcgcgatcttatcgatcgtgagagctttctagttttttatttcgttctatcacttttttgcgcggggtccggtagtattcttggtgtcgatgatctcctggtcggcttcgcggctggtgttggtttctccaacgatggttggttccatgagaagaccgaggagtctcatgtctctaacgttattgacttgctgatcaatctggcttactttgtctacttgggcacgatcattccttgggaaatgtacaacgatttttctatcggcctcggagcctggaggttgacggtcatgtccattttcgtcatcttattccgccgcattccgatcatgctactgttgaaacccattattccagatgtcaagacttggcgcgaggcgctcttcgctggtcactttggccccattggcgtcggcgctattttcgtggctatacttgcgcgcgcagaactagagtcagaacatactatacctctggctgagctacccccgatcgattcggatcagtaccaggccattctgttagtatggccaattgttacgtttatggttatatcctcaatcctcgttcatggttcgtcaattgctgttttcactcttggcaaacggatcaataccctctctctcactatgtcatacactacggcccccgaagatggtcctgcttggatgagtcgtctcccgcggatatcgtcacaatcgcgatcacaagcacgaacaatgtctgatactgatgtcgacgacctcaaatcgccaacccttcctccgggaacactgccacctatcggagctcccggccagttcttacggcgacagcgtgaggaggagaacacaagcagagcaggaagtcgcgcatcgtctctcgtcagtcgccgtcgtagaaagaagtgggacgacgggattgggcccggtggcccggtcagccagtccgcgatctttccccaacggaaaagcacgagtgatccgagcgagctgatgtcacccgtcgaaggggagaaaacgggcacactttctccgcgcgaaagcacaacgcctagcccccccggagaagcccttggagatctcgagaaggtacctctgtccccggatgatgaggttggaccgaagaatgaaaatcagccggagtttgaagtgtatgatgaaggcgatcacatcattatcgaggatcaggaaggacaagtggtagccgtggaggagactgagcaccacaatgtcttacccagtgttggcgagctgaaagagaaggcacaggaagaaacatcgaagcctggatggacctatgattcgcttaagaagagcatcgttcgatggcgcgacgaagaagctcagaagcggaaggaaaaacctgcagcggagcgacagcatgcccccgcgcgagcctaccaatttggaaacacgatcattgttgaagacgaagatggtgaagtggttaagaagtacgagatcccagccgaacggggcgaaggcaaagattatgttgcttctagcttgaagtacatgggaatgggtagcttgatgaaaccagcagataaggaaagcaaagtaggtgaatcatcccaggttagaaccagacctaccagaagcggaaccttctcctctgggtggccaggcttgagtcgggctggagctggcgaggcaaagaagaccgttaaaggcgaggttgaggtcgaacaagatccagaagaagaccgtggtcttcgtttcacccttggtggccgccggatgaccaaggatgatttccttaaagaggtgcagaaactggaacggccaaatcgtgagttgccgaaaactgtcggcgagactcaaacacacaagcccgaaacaacatctggagagaccagcggttctgggcttgtgaacccacatatcaacgtaacacaggcaagtgacagcactcgagacacaagcgtaccgccctctgctcccgtcacggcctcgcgaggacgcagcaccactcatggggcaaaggatgatcaaccaagtaccgagaccgcagagacagcggcagagcgacgacgcagagtagctgcttttgctagcgtgcgagaagatgacagcaatgagacgccggcagagcggcgccgtagagaggcagcgttgggggtaacgggccagttaacagaggatagtgacagtgatgatgatgatacaccaagagtgccaccggcgagaaggggcattagatttgccgacagtccttcgcaacgggactga

SEQ ID NO: 17029 - protein, 972 aa, Muscodor strobelii
  misc_feature: SGI Peptide ID NO. 565682
  misc_feature (16)..(436): Pfam Id: PF00999 Pfam Desc: Sodium/hydrogen exchanger family
  misc_feature (458)..(951): Pfam Id: PF08619 Pfam Desc: Alkali metal cation/H+ antiporter Nha1 C terminus
  misc_feature (458)..(822): Pfam Id: PF08619 Pfam Desc: Alkali metal cation/H+ antiporter Nha1 C terminus
  misc_feature (884)..(951): Pfam Id: PF08619 Pfam Desc: Alkali metal cation/H+ antiporter Nha1 C terminus
  misc_feature (1)..(967): NCBI GI: 116207630 Blast Desc: CHGG_03108 [Chaetomium globosum CBS 148.51] gi|88183705|gb|EAQ91173.1| CHGG_03108 [Chaetomium globosum CBS 148.51]
  misc_feature (1)..(971): NCBI GI: 40882149 Blast Desc: related to Na+/H+ antiporter CNH1 [Neurospora crassa]
  misc_feature (1)..(966): NCBI GI: 39940058 Blast Desc: MGG_05211 [Magnaporthe grisea 70-15] gi|145010519|gb|EDJ95175.1| MGG_05211 [Magnaporthe grisea 70-15]
  misc_feature (1)..(971): NCBI GI: 164429097 Blast Desc: NCU00430 [Neurospora crassa OR74A] gi|157072409|gb|EAA27458.2| NCU00430 [Neurospora crassa OR74A]
  misc_feature (1)..(967): NCBI GI: 256725722 Blast Desc: [Nectria haematococca mpVI 77-13-4]
  misc_feature (1)..(968): NCBI GI: 154320023 Blast Desc: BC1G_01992 [Botryotinia fuckeliana B05.10] gi|150854731|gb|EDN29923.1| BC1G_01992 [Botryotinia fuckeliana B05.10]
  misc_feature (1)..(971): NCBI GI: 171686128 Blast Desc: protein product [Podospora anserina] gi|170943025|emb|CAP68678.1| protein product [Podospora anserina]
  misc_feature (1)..(968): NCBI GI: 156065029 Blast Desc: SS1G_00525 [Sclerotinia sclerotiorum 1980] gi|154691384|gb|EDN91122.1| SS1G_00525 [Sclerotinia sclerotiorum 1980]
  misc_feature (1)..(967): NCBI GI: 46116506 Blast Desc: FG04095.1 [Gibberella zeae PH-1]
  misc_feature (1)..(971): NCBI GI: 261359295 Blast Desc: Na(+)/H(+) antiporter [Verticillium albo-atrum VaMs.102]
MAWDHLSITKPHLVYIILGGFTSLFMLCSSVIKERLYIGEATVATIVGIIFGPHAANLIDPNSWGNVDEITLEFSRIVLVVQCFAVGVELPKYYMEKHWKSVIFLLLPVMTFGWLITSIIIFWLFPTLNYVQSLAVAACVTATDPVLASSVVGKGKFAKRVPKHLRDLLSAESGCNDGMAFPFIYLALYLIQDNLAAGETIYHWVVYTILYECVFGAVYGFLIGYIARHGIKFAEKRDLIDRESFLVFYFVLSLFCAGSGSILGVDDLLVGFAAGVGFSNDGWFHEKTEESHVSNVIDLLINLAYFVYLGTIIPWEMYNDFSIGLGAWRLTVMSIFVILFRRIPIMLLLKPIIPDVKTWREALFAGHFGPIGVGAIFVAILARAELESEHTIPLAELPPIDSDQYQAILLVWPIVTFMVISSILVHGSSIAVFTLGKRINTLSLTMSYTTAPEDGPAWMSRLPRISSQSRSQARTMSDTDVDDLKSPTLPPGTLPPIGAPGQFLRRQREEENTSRAGSRASSLVSRRRRKKWDDGIGPGGPVSQSAIFPQRKSTSDPSELMSPVEGEKTGTLSPRESTTPSPPGEALGDLEKVPLSPDDEVGPKNENQPEFEVYDEGDHIIIEDQEGQVVAVEETEHHNVLPSVGELKEKAQEETSKPGWTYDSLKKSIVRWRDEEAQKRKEKPAAERQHAPARAYQFGNTIIVEDEDGEVVKKYEIPAERGEGKDYVASSLKYMGMGSLMKPADKESKVGESSQVRTRPTRSGTFSSGWPGLSRAGAGEAKKTVKGEVEVEQDPEEDRGLRFTLGGRRMTKDDFLKEVQKLERPNRELPKTVGETQTHKPETTSGETSGSGLVNPHINVTQASDSTRDTSVPPSAPVTASRGRSTTHGAKDDQPSTETAETAAERRRRVAAFASVREDDSNETPAERRRREAALGVTGQLTEDSDSDDDDTPRVPPARRGIRFADSPSQRD

SEQ ID NO: 17030 - DNA, 4176 bp, Muscodor strobelii
  misc_feature: SGI EST ID NO. CUFF.40132.0
  misc_feature: Variant of the nucleotide sequence at SEQ ID NO 17028
ccggcctggaacgagtgacgggggttggcagcgatggatcatggactgcgataaagatggtcaagcaacagtgagatataagcgaagccaaaacgaccgactagtattggcatcatcaggaatgcccgcataggtgtcttggccgtctagcttggccgcatcatgctgtaaaattctccttctctgttcttgatctctcatatacctacctgcttttgacatttttcttcagactcagtcctcaaacaagttgtgttgagtaaaaactcgtactgatacgtcaacggtcgctgttgggctatccgtgctaaggtgcccacgctttgacaattaggtagctgttaaatgctcgcggctacttcagtagcttgaattttattattctccatttttcttttcttttcgccctctcaactcttttcgaccgcgttgacgtctgtcagatttaccaggaaaagcatctatttaccaccacaatctttgttgtgttgcttctacatcttaaatccgaggcattgaaatgcaataaagcacctcgcatctaagtgctgaacccccaattctctcttcaacaagaattctcaaggtctttctcgaccgtcgctcgcggctgaactacctagtaggcaaggctagaaccgcgagtcacgacctcttctacctactttaccagcatctagcatgctaccaatcctctgaatgcatcaatatcagcagcgttctccgggaagtgtgtctcaaaatccgagagtcgagggttttgtttggactggccatctctcacggtctgaggaagaatcatttttcctaccaaattcggaccaaaggcctccctaagtcttgggtttactgggaaagccatacttacccacagcatctaaattcgcaatcctcgctgcctgacgcaatccatcgctcgacggcaagatggcgtgggatcacttatctatcaccaagcctcatctggtgtatatcatccttggtggcttcacttcactgttcatgttatgctcttctgtgatcaaggagcgtctttacatcggtgaggctacagtggccacaatcgtgggtatcatctttgggcctcatgccgccaatctcatcgacccaaacagctggggaaatgttgatgagattactctcgaattctcacgcattgtgctcgttgtccagtgttttgccgttggtgtcgagttgcccaaatactacatggagaaacattggaaatcagtcattttcctcttgctgcctgtcatgacctttggctggcttatcacgagcattataatattctggttgttcccaaccctgaactacgtccagagtcttgctgttgctgcctgtgtgacagccacagatcccgttctggcatcatccgttgtcggtaaaggcaagtttgcaaaacgagtgccgaagcatttaagagatctgctttcagccgagtctggatgcaacgacggcatggcgtttccattcatatatctggctctctacctgatccaagacaatcttgcggcgggcgagacaatttatcattgggttgtgtataccattctgtacgaatgtgtcttcggcgctgtatatggcttccttatcgggtacattgctcgtcatggcatcaagttcgctgaaaagcgcgatcttatcgatcgtgagagctttctagttttttatttcgttctatcacttttttgcgcggggtccggtagtattcttggtgtcgatgatctcctggtcggcttcgcggctggtgttggtttctccaacgatggttggttccatgagaagaccgaggagtctcatgtctctaacgttattgacttgctgatcaatctggcttactttgtctacttgggcacgatcattccttgggaaatgtacaacgatttttctatcggcctcggagcctggaggttgacggtcatgtccattttcgtcatcttattccgccgcattccgatcatgctactgttgaaacccattattccagatgtcaagacttggcgcgaggcgctcttcgctggtcactttggccccattggcgtcggcgctattttcgtggctatacttgcgcgcgcagaactagagtcagaacatactatacctctggctgagctacccccgatcgattcggatcagtaccaggccattctgttagtatggccaattgttacgtttatggttatatcctcaatcctcgttcatggttcgtcaattgctgttttcactcttggcaaacggatcaataccctctctctcactatgtcatacactacggcccccgaagatggtcctgcttggatgagtcgtctcccgcggatatcgtcacaatcgcgatcacaagcacgaacaatgtctgatactgatgtcgacgacctcaaatcgccaacccttcctccgggaacactgccacctatcggagctcccggccagttcttacggcgacagcgtgaggaggagaacacaagcagagcaggaagtcgcgcatcgtctctcgtcagtcgccgtcgtagaaagaagtgggacgacgggattgggcccggtggcccggtcagccagtccgcgatctttccccaacggaaaagcacgagtgatccgagcgagctgatgtcacccgtcgaaggggagaaaacgggcacactttctccgcgcgaaagcacaacgcctagcccccccggagaagcccttggagatctcgagaaggtacctctgtccccggatgatgaggttggaccgaagaatgaaaatcagccggagtttgaagtgtatgatgaaggcgatcacatcattatcgaggatcaggaaggacaagtggtagccgtggaggagactgagcaccacaatgtcttacccagtgttggcgagctgaaagagaaggcacaggaagaaacatcgaagcctggatggacctatgattcgcttaagaagagcatcgttcgatggcgcgacgaagaagctcagaagcggaaggaaaaacctgcagcggagcgacagcatgcccccgcgcgagcctaccaatttggaaacacgatcattgttgaagacgaagatggtgaagtggttaagaagtacgagatcccagccgaacggggcgaaggcaaagattatgttgcttctagcttgaagtacatgggaatgggtagcttgatgaaaccagcagataaggaaagcaaagtaggtgaatcatcccaggttagaaccagacctaccagaagcggaaccttctcctctgggtggccaggcttgagtcgggctggagctggcgaggcaaagaagaccgttaaaggcgaggttgaggtcgaacaagatccagaagaagaccgtggtcttcgtttcacccttggtggccgccggatgaccaaggatgatttccttaaagaggtgcagaaactggaacggccaaatcgtgagttgccgaaaactgtcggcgagactcaaacacacaagcccgaaacaacatctggagagaccagcggttctgggcttgtgaacccacatatcaacgtaacacaggcaagtgacagcactcgagacacaagcgtaccgccctctgctcccgtcacggcctcgcgaggacgcagcaccactcatggggcaaaggatgatcaaccaagtaccgagaccgcagagacagcggcagagcgacgacgcagagtagctgcttttgctagcgtgcgagaagatgacagcaatgagacgccggcagagcggcgccgtagagaggcagcgttgggggtaacgggccagttaacagaggatagtgacagtgatgatgatgatacaccaagagtgccaccggcgagaaggggcattagatttgccgacagtccttcgcaacgggactgaggcacagcctaccagtgcattacccacaacatgaatagctgcagcgtttgatgcacttgcattagggttgggctattgtgtgcccataggcaggagttgtggttaatagttcattagattagagtatctggtttgatagcagtttccttgataccttccacagtttggggtaggttgcacgaactaactagcgataataaaactgttcttatgacacttgatttgctctagcatctcaataattgcaaggtaattggttatcgtgtctgtcgacctacgtgtacacaaggttgattgttgcatagtcgccttttcctgtgatcgtacgtg

SEQ ID NO: 17031 - DNA, 1029 bp, Muscodor strobelii
  misc_feature: SGI cDNA ID NO. 565683
  misc_feature: Reduced expression when VOC is produced
  misc_feature: Encodes the peptide sequence at SEQ ID NO 17032
atgtcggccgaggagaagccatgcgttcgtcaacatgaccagtcatcacccgtggcagccgagccaccgcgagagggtgatctcttcgagaaaaccgccatagtgacgggcgcaaatagtggcatcggtttcgagtgcgcgcgtcaattattcagtagaggattgagtaaattgatcttggctgtgcgggatgagaagaagggagccgccgctgctgagacgattgcctcgggatatcaatcatggttgaaggctatagaagtctggcatttggactattgcacgtatgactctatcctgagattcgcagcacggacaagaagcctcgagaatctcgatgtcgtggtattgaacgccgggatctatcgactatcacgacatatactaccgacgggccatgaggagggcatacaagtaaactatctatcgactgctcttctgaccatgctcttgctcccagttttagagtcaaagaaaagatcaaaaacgcaaccaggtcgtctcacttttgtttcgaccagcatcgcagcctggtccaagttccgtccacaagccggccaaccaatactttcatctcttgacgaagaagtcccaggcgaaaacttcgatcatcatcaacactattgcacaacaaagcttctggcacaactattcttggtcgagctgactcagcgtgtgccctcatcggttgctattgtgaacagcatcaatcccggcctatgttacggttctcggctgagtcgtgatggagatggcacgctacatggttggatcgcgggtttgatattccgagtcttcggccaaccttgcgctgttggcgctagggctcttgtggatggcatagtacagcatggccaggaggtgcatgggcagtacctagagaacggtaaaacagcacaatttgctcccgttatatacacacccgaaggtagctccatgagccagaagctttggacagagacaatgaatgagttcaaagctattggtatcgaagctttcgtgcaagatctatcgtatgccattgggtag

SEQ ID NO: 17032 - protein, 342 aa, Muscodor strobelii
  misc_feature: SGI Peptide ID NO. 565683
  misc_feature (31)..(187): Pfam Id: PF00106 Pfam Desc: short chain dehydrogenase
  misc_feature (31)..(76): Pfam Id: PF00106 Pfam Desc: short chain dehydrogenase
  misc_feature (20)..(337): NCBI GI: 238844730 Blast Desc: retinol dehydrogenase 12 [Microsporum canis CBS 113480]
  misc_feature (31)..(338): NCBI GI: 46138187 Blast Desc: FG10608.1 [Gibberella zeae PH-1]
  misc_feature (27)..(325): NCBI GI: 242773397 Blast Desc: short-chain dehydrogenase, [Talaromyces stipitatus ATCC 10500] gi|218721851|gb|EED21269.1| short-chain dehydrogenase, [Talaromyces stipitatus ATCC 10500]
  misc_feature (22)..(337): NCBI GI: 256728146 Blast Desc: NECHADRAFT_54058 [Nectria haematococca mpVI 77-13-4]
  misc_feature (21)..(293): NCBI GI: 85110131 Blast Desc: NCU08406 [Neurospora crassa OR74A] gi|164423984|ref|XP_001728105.1| NCU10650 [Neurospora crassa OR74A] gi|28924952|gb|EAA34042.1| conserved [Neurospora crassa
  misc_feature (22)..(337): NCBI GI: 256730051 Blast Desc: NECHADRAFT_82657 [Nectria haematococca mpVI 77-13-4]
  misc_feature (19)..(338): NCBI GI: 238505799 Blast Desc: short-chain dehydrogenase/reductase family protein, [Aspergillus flavus NRRL3357] gi|220690218|gb|EED46568.1| short-chain dehydrogenase/reductase family protein, [Aspergillus
  misc_feature (23)..(331): NCBI GI: 46103007 Blast Desc: FG00073.1 [Gibberella zeae PH-1]
  misc_feature (23)..(331): NCBI GI: 256720903 Blast Desc: NECHADRAFT_50515 [Nectria haematococca mpVI 77-13-4]
  misc_feature (10)..(325): NCBI GI: 256725584 Blast Desc: NECHADRAFT_94266 [Nectria haematococca mpVI 77-13-4]
  misc_feature (13)..(249): SWISSPROT Homolog: EC 1.3.1.33 Protochlorophyllide reductase
  misc_feature: Useful for introducing or modulating the production of volatile compounds
MSAEEKPCVRQHDQSSPVAAEPPREGDLFEKTAIVTGANSGIGFECARQLFSRGLSKLILAVRDEKKGAAAAETIASGYQSWLKAIEVWHLDYCTYDSILRFAARTRSLENLDVVVLNAGIYRLSRHILPTGHEEGIQVNYLSTALLTMLLLPVLESKKRSKTQPGRLTFVSTSIAAWSKFRPQAGQPILSSLDEEVPGENFDHHQHYCTTKLLAQLFLVELTQRVPSSVAIVNSINPGLCYGSRLSRDGDGTLHGWIAGLIFRVFGQPCAVGARALVDGIVQHGQEVHGQYLENGKTAQFAPVIYTPEGSSMSQKLWTETMNEFKAIGIEAFVQDLSYAIG

SEQ ID NO: 17033 - DNA, 3292 bp, Muscodor strobelii
  misc_feature: SGI EST ID NO. CUFF.40149.0
  misc_feature: Variant of the nucleotide sequence at SEQ ID NO 17031
atttctcagccgagggcgccattgcgtatccgcaaatcagcaaatcagaaccttaaagctcctatcaagtccacgaagtgattcacacaatgaagtgctcaccaagcctgtgaatgtcaatgagaccccgggacttacggcgagtgaaccgttgcaatgacacgccatgctgatgggcgttttgggcaattgctgcaacacgccccttgtccctttcatcgttaatatactccttacgtccgtacaatccttcgccgaaggagtagatctatattccgataaatgcagagaccatctaattacaaacctcattcgagcctcatacacactcacctatcgggaaactcttgagtcaattacatcggaacccgtatttgtttgataccaggtccctatgtcggccgaggagaagccatgcgttcgtcaacatgaccagtcatcacccgtggcagccgagccaccgcgagagggtgatctcttcgagaaaaccgccatagtgacgggcgcaaatagtggcatcggtttcgagtgcgcgcgtcaattattcagtagaggattgagtaaattgatcttggctgtgcgggatgagaagaagggagccgccgctgctgagacgattgcctcgggatatcaatcatggttgaaggctatagaagtctggcatttggactattgcacgtatgactctatcctgagattcgcagcacggacaagaagcctcgagaatctcgatgtcgtggtattgaacgccgggatctatcgactatcacgacatatactaccgacgggccatgaggagggcatacaagtaaactatctatcgactgctcttctgaccatgctcttgctcccagttttagagtcaaagaaaagatcaaaaacgcaaccaggtcgtctcacttttgtttcgaccagcatcgcagcctggtccaagttccgtccacaagccggccaaccaatactttcatctcttgacgaagaagtcccaggcgaaaacttcgatcatcatcaacactattgcacaacaaagcttctggcacaactattcttggtcgagctgactcagcgtgtgccctcatcggttgctattgtgaacagcatcaatcccggcctatgttacggttctcggctgagtcgtgatggagatggcacgctacatggttggatcgcgggtttgatattccgagtcttcggccaaccttgcgctgttggcgctagggctcttgtggatggcatagtacagcatggccaggaggtgcatgggcagtacctagagaacggtaaaacagcacaatttgctcccgttatatacacacccgaaggtagctccatgagccagaagctttggacagagacaatgaatgagttcaaagctattggtatcgaagctttcgtgcaagatctatcgtatgccattgggtagtcatactacatggtttccctttcttctcgcttccgcttatggagattgaatcgaactcatagcgatgagaccataccatgtacaagtttatgcaaacatcggctggcttgagttttgccccacgccctagatctgggattccatcattcaattcaccctgatggtccgaacacaaggaatcacatcccgtgcacgtcctacgtgtagttggttggagcagtggtaagccacaaggtggtactcaacccggcagtctggactcgtgtgtcactagctcgtacagcaatttggtgattgtgagcatgagattctggtgtattcggtttctcttacagtgctgggagagtcgaattacatggagttgttcggtaatgaaaggcagatgtggtttcacttatgttctcaggtaccagaccgtacaactcccgtgacagcttcttgtcgctgttgaagaaggaaacgccatgacttgcctcgatctaggtaaagactatacattatccactaacgtggatagcaatcataggtgcggctgagatgggttgcgagcctgggtcctcgactcgagttttaaactacaaccagattgctgctataattgatgagagttcctaaagtggtggccgttgtgccgtcttacctagtgatagtcttggcttttaacaagcttccatgtggtaccggccgtatcatgcatgatcccttgataagtttgagtccccatgcaagtacgttatgttcgtttatcaacatccgtcgccatagatggcccactatcaggggtagactaactcacaatatatgaacaatttggcttggccgtttgattctgcttacctacagccaggtagaaatcctaatatgcaggccaagtctctatacggcatgcacatagttggtctcaccgctgtagatcttcacatttaaatacctttcatatggcttcttcctgtctctcttctaattactcttcctcttatcagttaagcacctatttgcatccatacaaccttccatttaagtgcatacaacacacaaaacccgagcccaaagcccaagatcgacatcctagaaaatatgaagttcaatattgttctgttcgtgacgtgtgtctttgctagcccgacagtcctcagcttcgaagagaggcaaaattgcccaactatttgtaacggatgttgtgacgggaattcttgctgcccaagcccgtaatttgaaattggaaaaacgacaaggcggtcgctgaggagacgtgcaatgtggtcagaaatcttggatccaaatttgtcaacgtggttgctttatctcaagcttgctcgtcgaggaatagacattcaaacacacgaagagccgcgaatggtagatagcgcgtgatagtcaggtcacaatatctggggttcaatgctcctgtattcgattattaagcaatgtacgtgttcatcggatactcatgcgggaaagatgcatagtggctggcgcaagtgacagtacggacttttattctcggcaaagtcaaggatagtgccatctcctatcagctcccgtttccggctcccaaatgtgcttttcgggattagagagggaccctgtcggcgatcatcttcgcaatgctgcagaaagctgtcggcacgctggtgcacccttcggcagatatcttgcctgcggggtacccgtgcgtaaaggtttgctcagacaccacgaataaataataaaaaaccaaaagtcgtctattatttaagattgccattcagtcgaataatctagctgctcttcagtgtaaattgacggaaagcgatccgacttgcccacaatggctagttctcatcaagatgagctttatgtgccactgttgagcgagaaacactctgg

SEQ ID NO: 17034 - DNA, 276 bp, Muscodor strobelii
  misc_feature: SGI cDNA ID NO. 565684
  misc_feature: Encodes the peptide sequence at SEQ ID NO 17035
atgggcactttttgcggctatccttcgatcgagtgttcgaaaccgatgctagctggaggacattccgtcacactgatcgatgggctggcaagtgggccccagaagagaacatcagaagccgtgaaagctagtgaatcacgtcatgaggtcgaatatgacccatcatgcagccaggagacagattcacagccgcccaacgagaaggaaaagcaaccggaggaggaagaagaagaagaaggacagactatattgcagttcatgagtgccactacgtaa

SEQ ID NO: 17035 - protein, 91 aa, Muscodor strobelii
  misc_feature: SGI Peptide ID NO. 565684
MGTFCGYPSIECSKPMLAGGHSVTLIDGLASGPQKRTSEAVKASESRHEVEYDPSCSQETDSQPPNEKEKQPEEEEEEEGQTILQFMSATT

SEQ ID NO: 17036 - DNA, 729 bp, Muscodor strobelii
  misc_feature: SGI EST ID NO. CUFF.40165.1
  misc_feature: Variant of the nucleotide sequence at SEQ ID NO 17034
gaaagaaaaggtgccgcacgatgctgatggattcctcgggtacacaagttggaatttgggggccatttccttcgcttcgatatgttccgtacattcctcacaccagcacaccccgcaatcttggtgggaagagcctgttaacctgcacacggtgaaacaagtccctatcaatgagaacagctgcgtggggtttaatacatcgcactggacaaagaattacgggcagaatttaattcaccatgcctcgatccggcgaaggcaacaaatcggagccctggaagcgactcaaagcaatcttcccgccgtggcattcccacaggtgtaataccctacaataccctattattcaccacgcgtcaaatgtgacgaagatgcaagttgatactgacttatcttcagcgaaccaactatacagccagagatctgaagatcttccttcactagcatggggcaatattcgaaagaagggcagtgagatcgaaaaagtggccaataagttggtagccctcagagttcaaccagaatcagagtcagatccagtcgacgtgtcgtcgcaaccagtaaaagcgatcacgtttgaacgtcttccggaagagattctcattgacatcatgagatatctggaccaccagagtctctatcgactcacacagacaaatgggcactttttgcggctatccttcgatcgagtgttcgaaaccgatgctagctggaggacattccgtcaca

SEQ ID NO: 17037 - DNA, 378 bp, Muscodor strobelii
  misc_feature: SGI cDNA ID NO. 565685
  misc_feature: Encodes the peptide sequence at SEQ ID NO 17038
atgccagcagacgaatttattgccatgatatccagccccgcagttctcggcgacccattgctcatgacacaacacttcatcggcggcacaaagtggcagaaaatatcagacacagaggttattggcgttcaccagcttcgagtacctcaccagcgttatactgatgcatcacggtctaaagtggcggttaagggccacgctcactcaaccaacactcattggtacagaaaagttgatggcgtctggaaatttgctggactcgcacctgaaatcagatggggcgagtatgacttcgaccgcgtctttgaaggtggtcgcgatgagtacggacaacaagacagtaccaaggcctcgggcatcccagctatggttaagtaa

SEQ ID NO: 17038 - protein, 125 aa, Muscodor strobelii
  misc_feature: SGI Peptide ID NO. 565685
  misc_feature (1)..(109): Pfam Id: PF02982 Pfam Desc: Scytalone dehydratase
  misc_feature (1)..(121): NCBI GI: 189197505 Blast Desc: scytalone dehydratase [Pyrenophora tritici-repentis Pt-1C-BFP] gi|187981038|gb|EDU47664.1| scytalone dehydratase [Pyrenophora tritici-repentis Pt-1C-BFP]
  misc_feature (1)..(113): NCBI GI: 3024608 Blast Desc: SCYD_GLOLA RecName: Full=Scytalone dehydratase gi|1395160|dbj|BAA13009.1| scytalone dehydratase [Colletotrichum lagenarium]
  misc_feature (1)..(113): NCBI GI: 261357702 Blast Desc: scytalone dehydratase [Verticillium albo-atrum VaMs.102]
  misc_feature (1)..(124): NCBI GI: 12964738 Blast Desc: scytalone dehydratase [Ophiostoma floccosum]
  misc_feature (1)..(113): NCBI GI: 37787190 Blast Desc: syctalone dehydratase I [Ceratocystis resinifera]
  misc_feature (1)..(121): NCBI GI: 118140094 Blast Desc: scytalone dehydratase [Cochliobolus heterostrophus]
  misc_feature (1)..(121): NCBI GI: 32879677 Blast Desc: scytalone dehydratase [Bipolaris oryzae]
  misc_feature (1)..(112): NCBI GI: 39940362 Blast Desc: scytalone dehydratase [Magnaporthe grisea 70-15] gi|3024596|sp|P56221.1|SCYD_MAGGR RecName: Full=Scytalone dehydratase gi|157833862|pdb|1STD|A Chain A, Crystal Structure Of
  misc_feature (1)..(112): NCBI GI: 6730612 Blast Desc: scytalone dehydratase [Magnaporthe grisea 70-15] gi|3024596|sp|P56221.1|SCYD_MAGGR RecName: Full=Scytalone dehydratase gi|157833862|pdb|1STD|A Chain A, Crystal Structure Of
  misc_feature (1)..(112): NCBI GI: 6435662 Blast Desc: scytalone dehydratase [Magnaporthe grisea 70-15] gi|3024596|sp|P56221.1|SCYD_MAGGR RecName: Full=Scytalone dehydratase gi|157833862|pdb|1STD|A Chain A, Crystal Structure Of
  misc_feature (1)..(113): SWISSPROT Homolog: EC 4.2.1.94 Scytalone dehydratase
MPADEFIAMISSPAVLGDPLLMTQHFIGGTKWQKISDTEVIGVHQLRVPHQRYTDASRSKVAVKGHAHSTNTHWYRKVDGVWKFAGLAPEIRWGEYDFDRVFEGGRDEYGQQDSTKASGIPAMVK

SEQ ID NO: 17039 - DNA, 689 bp, Muscodor strobelii
  misc_feature: SGI EST ID NO. CUFF.40167.0
  misc_feature: Variant of the nucleotide sequence at SEQ ID NO 17037
cgctcactcaaccaacactcattggtacagaaaagttgatggcgtctggaaatttgctggactcgcacctgaaatcagatggggcgagtatgacttcgaccgcgtctttgaaggtggtcgcgatgagtacggacaacaagacagtaccaaggcctcgggcatcccagctatggttaagtaagctgactggcaggcttttgagaaaggaggttattcattccttttgattgttgagtatcctgatttggaaccatttgccagaatttgatactagggagttggcatctgtagaagagctcaatatacagctgatacgatggacgcagtacctcatgctcattacgcaaatattaaaattgatatatcttgtgactctagttgaaatttgcgtcagatgctgtggttcacagaattgaagaagagattcggtgtcaattgccgctccagcaaatataccgtgtgagagtaaggcaagccgaaagtcattcggacattcccagtcacctattatgcgctcaagttcaagacctaataagtaataaaacgcaacactatcttttcaaaagggcaagtgcttaaaacaagatgcgttggggaagatacatgctaatgcgccgagggatggatcttggtgtccaggataattgaaatcgatgacttgggactattagcttatcgtactaacgtct

SEQ ID NO: 17040 - DNA, 993 bp, Muscodor strobelii
  misc_feature: SGI cDNA ID NO. 565686
  misc_feature: Encodes the peptide sequence at SEQ ID NO 17041
atgggatcaattatctctcactatatagaggcctttcggcagctcttacccggcaaacccacattcacagagacagacattgcagatttgtctggcaagatatacatcgtgacgggagcaaacacaggcattggcagagaagttgcgcggatactttacagcagaaacgccacagtctggctcacagcacgaaacgacgagaaaggagccaatgctattgcagcaatcagagaggagcatccagagtctaaaggggcgctcaaattcttacacctagacctcagcgacttgtccaccatcaaagcggccgctgaggagttcttaacgaatgagaagcagttacacgtgatatttaataatgctggtgtcatgttcccaaaacctgggagtaagacagtgcaaggacacgagctacaattaggcaccaactgcctcggcccatttcttttcacacagttgctgacgccacggttgatcgaaacggcgaagatggcgccaaaagattctgtgcgcgttgtgtgggtttcttcctctgctgctgaccacctcaatcccaaggggggtatggatttgaacaacctggattataagcgtgacgtcttttgcgcttggcgatatggaataagtaaggctggtaactattaccatgctactgagtttgcgcgccggcatcgtcaatatggcatagtgagcgtatccttaaatcccggaaacctaagtacagagcttgatcgtaactgttctactgtcgagatgtggttccgatacgcaaccgtctacccggttatcaatggcgcctatacggagctctatgcgggaatatcagaggatgtgaatatcgagaagacaggatcatggattgtgccttggggccggattgcagacattcggcaagacttacttcaaggttctaagactgaagaagagggcggcacggggattgctaagaaattctggaaatggtctgaggaacagacaagggattttgcatga

SEQ ID NO: 17041 - protein, 330 aa, Muscodor strobelii
  misc_feature: SGI Peptide ID NO. 565686
  misc_feature (33)..(188): Pfam Id: PF00106 Pfam Desc: short chain dehydrogenase
  misc_feature (33)..(123): Pfam Id: PF00106 Pfam Desc: short chain dehydrogenase
  misc_feature (9)..(329): NCBI GI: 46122791 Blast Desc: FG05773.1 [Gibberella zeae PH-1]
  misc_feature (12)..(330): NCBI GI: 256719854 Blast Desc: NECHADRAFT_56763 [Nectria haematococca mpVI 77-13-4]
  misc_feature (9)..(329): NCBI GI: 256727198 Blast Desc: NECHADRAFT_32256 [Nectria haematococca mpVI 77-13-4]
  misc_feature (2)..(329): NCBI GI: 256730375 Blast Desc: NECHADRAFT_95027 [Nectria haematococca mpVI 77-13-4]
  misc_feature (14)..(329): NCBI GI: 239610907 Blast Desc: short-chain dehydrogenase [Ajellomyces dermatitidis ER-3]
  misc_feature (11)..(329): NCBI GI: 242801946 Blast Desc: estradiol 17 beta-dehydrogenase, [Talaromyces stipitatus ATCC 10500] gi|218717219|gb|EED16640.1| estradiol 17 beta-dehydrogenase, [Talaromyces stipitatus ATCC 10500]
  misc_feature (14)..(329): NCBI GI: 261206248 Blast Desc: short-chain dehydrogenase [Ajellomyces dermatitidis SLH14081] gi|239592920|gb|EEQ75501.1| short-chain dehydrogenase [Ajellomyces dermatitidis SLH14081]
  misc_feature (14)..(329): NCBI GI: 225560611 Blast Desc: short-chain dehydrogenase [Ajellomyces capsulatus G186AR]
  misc_feature (14)..(329): NCBI GI: 240280835 Blast Desc: short-chain dehydrogenase [Ajellomyces capsulatus H143]
  misc_feature (17)..(329): NCBI GI: 212545773 Blast Desc: short-chain dehydrogenase, [Penicillium marneffei ATCC 18224] gi|210064560|gb|EEA18655.1| short-chain dehydrogenase, [Penicillium marneffei ATCC 18224]
  misc_feature (36)..(323): SWISSPROT Homolog: EC 1.3.1.33 Protochlorophyllide reductase
MGSIISHYIEAFRQLLPGKPTFTETDIADLSGKIYIVTGANTGIGREVARILYSRNATVWLTARNDEKGANAIAAIREEHPESKGALKFLHLDLSDLSTIKAAAEEFLTNEKQLHVIFNNAGVMFPKPGSKTVQGHELQLGTNCLGPFLFTQLLTPRLIETAKMAPKDSVRVVWVSSSAADHLNPKGGMDLNNLDYKRDVFCAWRYGISKAGNYYHATEFARRHRQYGIVSVSLNPGNLSTELDRNCSTVEMWFRYATVYPVINGAYTELYAGISEDVNIEKTGSWIVPWGRIADIRQDLLQGSKTEEEGGTGIAKKFWKWSEEQTRDFA

SEQ ID NO: 17042 - DNA, 2036 bp, Muscodor strobelii
  misc_feature: SGI EST ID NO. CUFF.40191.0
  misc_feature: Variant of the nucleotide sequence at SEQ ID NO 17040
caaacgacttggtatgcgtgctggttacgtcatcactgagaagctttgcgtgccgaggcatcaaaatcacttggatgatgttccattctccatcctctccgtttcccgccccgggtaggtggcatattcgcgcattgatcgtgacatggcacgataaaacatcaatacgagtctaataaatccgcgattttcaaaggtacttcagtgcgctgacgtttcaacgaggaaccacggttcattgagattgaaactgtcggaatgggatcaattatctctcactatatagaggcctttcggcagctcttacccggcaaacccacattcacagagacagacattgcagatttgtctggcaagatatacatcgtgacgggagcaaacacaggcattggcagagaagttgcgcggatactttacagcagaaacgccacagtctggctcacagcacgaaacgacgagaaaggagccaatgctattgcagcaatcagagaggagcatccagagtctaaaggggcgctcaaattcttacacctagacctcagcgacttgtccaccatcaaagcggccgctgaggagttcttaacgaatgagaagcagttacacgtgatatttaataatgctggtgtcatgttcccaaaacctgggagtaagacagtgcaaggacacgagctacaattaggcaccaactgcctcggcccatttcttttcacacagttgctgacgccacggttgatcgaaacggcgaagatggcgccaaaagattctgtgcgcgttgtgtgggtttcttcctctgctgctgaccacctcaatcccaaggggggtatggatttgaacaacctggattataagcgtgacgtcttttgcgcttggcgatatggaataagtaaggctggtaactattaccatgctactgagtttgcgcgccggcatcgtcaatatggcatagtgagcgtatccttaaatcccggaaacctaagtacagagcttgatcgtaactgttctactgtcgagatgtggttccgatacgcaaccgtctacccggttatcaatggcgcctatacggagctctatgcgggaatatcagaggatgtgaatatcgagaagacaggatcatggattgtgccttggggccggattgcagacattcggcaagacttacttcaaggttctaagactgaagaagagggcggcacggggattgctaagaaattctggaaatggtctgaggaacagacaagggattttgcatgataacagttttatgcatctacacttcgccatactagcagctaattatgtcaatgagctaaataaacatctatatacccgctagttattcagataatggtaagtaagattacttcttctatacaagtctccatctataggcatgaccgcattgggaaagtggagcactgttacacatgttgcaataggctggcatgttcgatcctcagataataggagtatatttgaaaatgtcttgtatggaaaccgatctagaaagtgaatgaaatcatttaagacttggcaagaaatgtgttatgtacaaaattgtcccaaaaccgcgcttaacaattcggaccccttcttcatactactcgtgaccatggccgtgaccatggccgtgcccatgtgcgtttcgaggcactccccgtctaaaccatcttcgcatagcggctcctgtgctcatgctcatagattcagtcccagagctcgaggggagacttgtcgcgcctgttccataaccggttctgtagcccgtaccgtaaaccgtacccgattggggaaacggtggctcaacagtcttggtacttgtaatagtggtctttgcaacagtgacggtctctgttgcgtaaactgtggtcggctcacagacgcactgatcgcactgatccggctgttgctggggaatctgggaaactgtcgttggtggtggttggtaaatggttctgacattcgtgacagatgatgttattgttgtgacttcatcctgtgttggttgcgtttcggcctctgcagctgctgtggtcttg

SEQ ID NO: 17043 - DNA, 657 bp, Muscodor strobelii
  misc_feature: SGI cDNA ID NO. 565687
  misc_feature: Encodes the peptide sequence at SEQ ID NO 17044
atgcctccgtctcgccgtcggtgccagccagttcaacaactgggttctgtcacaacagagaccattgctgcctacactacggtatgcccggtggaggaccaagccacctcggagcccccgccatcaacaccagagatggatgtaccgagttatcagatgagcgaacaatccagcactatggaaatgatcccatcttctatccctactcgaaccacgaccaagaccacagcagctgcagaggccgaaacgcaaccaacacaggatgaagtcacaacaataacatcatctgtcacgaatgtcagaaccatttaccaaccaccaccaacgacagtttcccagattccccagcaacagccggatcagtgcgatcagtgcgtctgtgagccgaccacagtttacgcaacagagaccgtcactgttgcaaagaccactattacaagtaccaagactgttgagccaccgtttccccaatcgggtacggtttacggtacgggctacagaaccggttatggaacaggcgcgacaagtctcccctcgagctctgggactgaatctatgagcatgagcacaggagccgctatgcgaagatggtttagacggggagtgcctcgaaacgcacatgggcacggccatggtcacggccatggtcacgagtag

SEQ ID NO: 17044 - protein, 218 aa, Muscodor strobelii
  misc_feature: SGI Peptide ID NO. 565687
MPPSRRRCQPVQQLGSVTTETIAAYTTVCPVEDQATSEPPPSTPEMDVPSYQMSEQSSTMEMIPSSIPTRTTTKTTAAAEAETQPTQDEVTTITSSVTNVRTIYQPPPTTVSQIPQQQPDQCDQCVCEPTTVYATETVTVAKTTITSTKTVEPPFPQSGTVYGTGYRTGYGTGATSLPSSSGTESMSMSTGAAMRRWFRRGVPRNAHGHGHGHGHGHE

SEQ ID NO: 17045 - DNA, 3397 bp, Muscodor strobelii
  misc_feature: SGI EST ID NO. CUFF.40192.1
  misc_feature: Variant of the nucleotide sequence at SEQ ID NO 17043
agctgcgccccgacagttaccaactgtcccgtcggaaaagtcacgaccgagttgatttctctcacaactacactatgtccagtgactgaagtcgagaactcaacgcccggtgcaacaagcttcgttgccaactcgaccttagccacatcaacaaaggcaagctcctcgttcagtagcctcgtatctgcttcgaactccacactgccaacatctgtggcaactatagaatcaagcgaaacgatgccaacgacttacacctttagctctgagattgtcaccacaggtctctcgacagtttactcaacaaatcttgtcactatcacgtcctgtgcgcccacgattacaaattgtccagtcgggaaagtgaccacggaaatcgtgtcactttataccaccatatgtccgattacacaaaccattctggatgacaagacatacggcgggcaagtcaagcagatccctagcagcacgccaggtgtggtctctactcaaatcctgacctctagcatcccttcgtcttctcacgaatcctcgcgacctacccccgcgacttccaatccctctatgggcacttctctgccagttcctacatcaagtatcgtatatcagaattcgacgatagggacaagcgggaagttttcgtcagctggtccgtttccatcgaactcatcttctcaagtcgccgtgaaaccaacggaatacaccacctcgaccgtttattctaccaatatttataccattacgtcctgcgccccaacagtcacaaattgcccagctagtttggggcaagtcaccacagagctcgtttcattgtacactacgatctgcccggtagagcaattaggggagacgcccggtaagacgtctacgccggtcatcagcacgagctcttccatcgtcccgtcatcttctgtgcccaagtcaatcttcagatcaacgtctatcacgcctgagcactcgacaccgtcgtcgtccaagacacccgcgcagtctgcgtccacgtctgttgcacccgtttacacaacatcaacagtttacacgactagtgaatatacaatcacttcctgtgcacctggcgcagttgattgttcatccagcattggatcggtgacaacggaaacggttgctttatacaccactgtttgccctgttgaggatgcctccgtctcgccgtcggtgccagccagttcaacagtatccgatgcgatcgtcaaaccagtcagctccttgatttctagagtgtcttcatcgatgctagaatttacttcatatacatcaacgtttccttcccttacctcgacgccagcaactccactctataccacgagcacggtgtatactacaacagaatacacaatcacctcttgtgcaccaactgttactaattgccctgcaagactgggttctgtcacaacagagaccattgctgcctacactacggtatgcccggtggaggaccaagccacctcggagcccccgccatcaacaccagagatggatgtaccgagttatcagatgagcgaacaatccagcactatggaaatgatcccatcttctatccctactcgaaccacgaccaagaccacagcagctgcagaggccgaaacgcaaccaacacaggatgaagtcacaacaataacatcatctgtcacgaatgtcagaaccatttaccaaccaccaccaacgacagtttcccagattccccagcaacagccggatcagtgcgatcagtgcgtctgtgagccgaccacagtttacgcaacagagaccgtcactgttgcaaagaccactattacaagtaccaagactgttgagccaccgtttccccaatcgggtacggtttacggtacgggctacagaaccggttatggaacaggcgcgacaagtctcccctcgagctctgggactgaatctatgagcatgagcacaggagccgctatgcgaagatggtttagacggggagtgcctcgaaacgcacatgggcacggccatggtcacggccatggtcacgagtagtatgaagaaggggtccgaattgttaagcgcggttttgggacaattttgtacataacacatttcttgccaagtcttaaatgatttcattcactttctagatcggtttccatacaagacattttcaaatatactcctattatctgaggatcgaacatgccagcctattgcaacatgtgtaacagtgctccactttcccaatgcggtcatgcctatagatggagacttgtatagaagaagtaatcttacttaccattatctgaataactagcgggtatatagatgtttatttagctcattgacataattagctgctagtatggcgaagtgtagatgcataaaactgttatcatgcaaaatcccttgtctgttcctcagaccatttccagaatttcttagcaatccccgtgccgccctcttcttcagtcttagaaccttgaagtaagtcttgccgaatgtctgcaatccggccccaaggcacaactaatttagaacgtggcaagttagtggaatagaaccattctaggatctaggtcaaagggtacagagaaagatgcctactccatgatcctgtcttctcgatattcacatcctctgatattcccgcatagagctccgtataggcgccattgataaccgggtagacggttgcgtatcggaaccacatctcgacagtagaacagttacgatcaagctctgtacttaggtttccgggatttaaggactggtcgcgttcagtcgtattagctatagatctgtccaatcgtcttttgagaagcaatactcactacgctcactatgccatattgacgatgccggcgcgcaaactcagtagcatggtaatagttaccagccttacttattccatatcgccaagcgcaaaagacgtcacgcttataatccaggttgttcaaatccataccccccttgggattgaggtggtcagcagcagaggaagaaacccacacaacgcgcacagaatcttttggcgccatcttcgccgtttcgatcaaccgtggcgtcagcaactgtgtgaaaagaaatgggccgaggcagttggtgcctaattgtagctcgtgtccttgcactgtcttactcccaggttttgggaacatgacaccagcattattaaatatcacgtgtaactgcttctcattcgttaagaactcctcagcggccgctttgatggtggacaagtcgctgaggtctaggtgtaagaatttgagcgcccctttagactctggatgctcctctctgattgctgcaatagcattggctcctttctcgtcgtttcgtgctgtgagccagactgtggcgtttctgctgtaaagtatccgcgcaacttctctgccaatgcctgtgtttgctcccgtcacgatgtata

SEQ ID NO: 17046 - DNA, 840 bp, Muscodor strobelii
  misc_feature: SGI cDNA ID NO. 565688
  misc_feature: Encodes the peptide sequence at SEQ ID NO 17047
atgaattcgttgacttcacttcgaaaggtgcagagttcacctacgcgaaaaagggagatgcgcctaaacatgtggaccgacttctacatgcttggcggtcgttacgatgttgagatgcaaattgctcctggtcaaggtatcgtgagcagcgctgtcctgtggtctgatatccaagatgagatcgactgggagttctcgggcaaccagttcggcgagaagccgtttccgcccacggatggaaaattcacagtcgagactaatatctttgctcggggcaagatgtgggacggagccgcaacataccaaaaagatgcccttcggcctacatcacagttccacacttattccgtggaatgggacgagaaccacatgacttggtatgtcgacaataacgtcgtacgtagtgtcaaggcccagagcacgccttcaggattcgttttcccacagtcaccaatgaagttgcaactaggcgtctggggaggaggcgattcagataacaactattggacgatacaatgggccggaggccaaatcgacataaccggcgcaccgtacacgatgtacgtaaaaagcgtcaatattacgaacaagtacccagcatgtcagtacaagttcaaagacagattctccttcgtcgaagccaccaactgcgaccaccacgtcttccagcagctcgacacagttgacctcatcaagctcggcaccggcgtcttcctcgccgtcaagctctgtagctggatatcccgtcgccagtcaaagtacgtccacttccgggtatactttatcaacatcgagtttatcaacgccattgggcggctatcctattgcaagccagagtag

SEQ ID NO: 17047 - protein, 279 aa, Muscodor strobelii
  misc_feature: SGI Peptide ID NO. 565688
  misc_feature (2)..(175): Pfam Id: PF00722 Pfam Desc: Glycosyl hydrolases family 16
  misc_feature (26)..(175): Pfam Id: PF00722 Pfam Desc: Glycosyl hydrolases family 16
  misc_feature (26)..(208): NCBI GI: 115397543 Blast Desc: ATEG_05185 [Aspergillus terreus NIH2624] gi|114192554|gb|EAU34254.1| ATEG_05185 [Aspergillus terreus NIH2624]
  misc_feature (26)..(208): NCBI GI: 259488779 Blast Desc: TPA: extracellular cell wall glucanase Crf1/allergen Asp F9 (AFU_orthologue; AFUA_1G16190) [Aspergillus nidulans FGSC A4]
  misc_feature (26)..(208): NCBI GI: 67517318 Blast Desc: AN0933.2 [Aspergillus nidulans FGSC A4] gi|40746806|gb|EAA65962.1| AN0933.2 [Aspergillus nidulans FGSC A4]
  misc_feature (26)..(208): NCBI GI: 238484025 Blast Desc: extracellular cell wall glucanase Crf1/allergen Asp F9 [Aspergillus flavus NRRL3357] gi|220701301|gb|EED57639.1| extracellular cell wall glucanase Crf1/allergen Asp F9 flavus
  misc_feature (26)..(208): NCBI GI: 169767190 Blast Desc: [Aspergillus oryzae RIB40] gi|83765921|dbj|BAE56064.1| protein product [Aspergillus oryzae]
  misc_feature (24)..(208): NCBI GI: 50553909 Blast Desc: YALI0E24673p [Yarrowia lipolytica] gi|49650232|emb|CAG79962.1| YALI0E24673p [Yarrowia lipolytica]
  misc_feature (3)..(207): NCBI GI: 242774703 Blast Desc: conserved [Talaromyces stipitatus ATCC 10500] gi|218722113|gb|EED21531.1| conserved [Talaromyces stipitatus ATCC 10500]
  misc_feature (17)..(208): NCBI GI: 121700787 Blast Desc: extracellular cell wall glucanase Crf1/allergen Asp F9 [Aspergillus clavatus NRRL 1] gi|119396801|gb|EAW07232.1| extracellular cell wall glucanase Crf1/allergen Asp F9 clavatus
  misc_feature (3)..(229): NCBI GI: 85074591 Blast Desc: NCU09672 [Neurospora crassa OR74A] gi|28922284|gb|EAA31526.1| NCU09672 [Neurospora crassa OR74A]
  misc_feature (6)..(207): NCBI GI: 212532099 Blast Desc: conserved [Penicillium marneffei ATCC 18224] gi|210071570|gb|EEA25659.1| conserved [Penicillium marneffei ATCC 18224]
  misc_feature (31)..(249): SWISSPROT Homolog: EC 2.4.1.207 Xyloglucan:xyloglucosyl transferase
MNSLTSLRKVQSSPTRKREMRLNMWTDFYMLGGRYDVEMQIAPGQGIVSSAVLWSDIQDEIDWEFSGNQFGEKPFPPTDGKFTVETNIFARGKMWDGAATYQKDALRPTSQFHTYSVEWDENHMTWYVDNNVVRSVKAQSTPSGFVFPQSPMKLQLGVWGGGDSDNNYWTIQWAGGQIDITGAPYTMYVKSVNITNKYPACQYKFKDRFSFVEATNCDHHVFQQLDTVDLIKLGTGVFLAVKLCSWISRRQSKYVHFRVYFINIEFINAIGRLSYCKPE

SEQ ID NO: 17048 - DNA, 1455 bp, Muscodor strobelii
  misc_feature: SGI cDNA ID NO. 565689
  misc_feature: Encodes the peptide sequence at SEQ ID NO 17049
atgggtctattcggcaaatcaaagccgctggctatgcgcgaggagagcgtaaaagttgtcaagcccaaaccaagacccagctcttcgaatttgaaagcgcccagcgccgcgcacgcctcgacagcccgacggtcacccgctgctagccttgggaccagttccaactctcgcacaccaagacccaagagttcctccccgtatcccaactcgtccgacgagcgcaagatcgagcgaaagcgcaaagccgtcacaatcactccacgcgactcacctgcctttggcgacgacagcgattccgacgacgaagatggcgacccgtttaagaagcgcgtgcggcggagcgacggccgaccagtagacgtgaaccgcaagctgcggcataggaaaggctttggcgatgacatcaggaaagtcgacatcatacacgccgccgatatggcttcgcgggcagctggctgccccgccatacctggcgcaaaggacaacgaggttgcgatcgaagtgcaatacccatcgcgctgcgtgcgcgagagatacgagttggtatggcaaaaagataagatcgatgctgtcaaagacatcctcgcgattttagaagccgtggccgaaacctatgttcctccctctgactccagggcattcatcgatcacaacacaagcttcagaagacagatggaaagagctgcgagcgagaaatatcgagacgttccggcctttcgcgaggccctcagcaactataacacgaagctatcagagctagtcaagaatggcaccgtcgctaagtgcctggaccaggcccatcatcttccgccaagccttgtttcactgatcctcactcaagtttacgatcgcactgtggcccctaaggtcgagatgctcacaaaatacgatgctggaagcgacaacgtgtatggggagttgctgcatccatttgtcaccaaaattctagttgaccattgcaaaatgacatccgaccaagtgtttatcgatctcggatcgggtgttggcaatgttgtactccaagctgcactcgaaatcggctgtcgtagctacggttgcgaaatgatgaacaacgcctgtgatttggctaaggcacaacacagggagttccggcatcggtgccaactctggggtgtgcagccgggagaagttcatctttaccgggacgacttctgcaagaacgacgagatcctgaaggttttgaaagaggcagatgcgatacttgtcaacaataaggcattcacgtccacgctgaatgacatgctcatcaacatgttcctcgatctgaagaaaggctgcaagatcatatctctcaagtcttttgtgtacgacaatgggaatagcgtcaatgacgtcgccacaagtatcctcgacgttgagcagttccggtatcatgagaattgggtcagctggaccggctcagacggtgaatactacatctcgactaagaaataa

SEQ ID NO: 17049 - protein, 484 aa, Muscodor strobelii
  misc_feature: SGI Peptide ID NO. 565689
  misc_feature (282)..(483): Pfam Id: PF08123 Pfam Desc: Histone methylation protein DOT1
  misc_feature (1)..(484): NCBI GI: 46111371 Blast Desc: FG02567.1 [Gibberella zeae PH-1] gi|121816850|sp|Q4IJP1.1|DOT1_GIBZE RecName: Full=Histone-lysine N-methyltransferase, H3 lysine-79 specific; AltName: Full=Histone
  misc_feature (60)..(484): NCBI GI: 85109342 Blast Desc: NCU06266 [Neurospora crassa OR74A] gi|74617346|sp|Q7SB74.1|DOT1_NEUCR RecName: Full=Histone-lysine N-methyltransferase, H3 lysine-79 specific; AltName: Full=Histone
  misc_feature (1)..(484): NCBI GI: 39939972 Blast Desc: MGG_05254 [Magnaporthe grisea 70-15] gi|145010465|gb|EDJ95121.1| MGG_05254 [Magnaporthe grisea 70-15]
  misc_feature (16)..(484): NCBI GI: 116207600 Blast Desc: CHGG_03093 [Chaetomium globosum CBS 148.51] gi|121788175|sp|Q2H9L1.1|DOT1_CHAGB RecName: Full=Histone-lysine N-methyltransferase, H3 lysine-79 specific; AltName: Full=Histone
  misc_feature (1)..(484): NCBI GI: 171686120 Blast Desc: protein product [Podospora anserina] gi|170943021|emb|CAP68674.1| protein product [Podospora anserina]
  misc_feature (8)..(484): NCBI GI: 261361656 Blast Desc: histone-lysine N-methyltransferase [Verticillium albo-atrum VaMs.102]
  misc_feature (18)..(483): NCBI GI: 238499799 Blast Desc: histone H3 methyltransferase, [Aspergillus flavus NRRL3357] gi|220692887|gb|EED49233.1| histone H3 methyltransferase, [Aspergillus flavus NRRL3357]
  misc_feature (107)..(483): NCBI GI: 119478914 Blast Desc: histone methylation protein Dot1, [Neosartorya fischeri NRRL 181] gi|119407640|gb|EAW17589.1| histone methylation protein Dot1, [Neosartorya fischeri NRRL 181]
  misc_feature (107)..(483): NCBI GI: 159126833 Blast Desc: conserved [Aspergillus fumigatus A1163]
  misc_feature (107)..(483): NCBI GI: 70997383 Blast Desc: conserved [Aspergillus fumigatus Af293] gi|74673512|sp|Q4WVH4.1|DOT1_ASPFU RecName: Full=Histone-lysine N-methyltransferase, H3 lysine-79 specific; AltName: Full=Histone
  misc_feature (1)..(484): SWISSPROT Homolog: EC 2.1.1.43 Histone-lysine N-methyltransferase
MGLFGKSKPLAMREESVKVVKPKPRPSSSNLKAPSAAHASTARRSPAASLGTSSNSRTPRPKSSSPYPNSSDERKIERKRKAVTITPRDSPAFGDDSDSDDEDGDPFKKRVRRSDGRPVDVNRKLRHRKGFGDDIRKVDIIHAADMASRAAGCPAIPGAKDNEVAIEVQYPSRCVRERYELVWQKDKIDAVKDILAILEAVAETYVPPSDSRAFIDHNTSFRRQMERAASEKYRDVPAFREALSNYNTKLSELVKNGTVAKCLDQAHHLPPSLVSLILTQVYDRTVAPKVEMLTKYDAGSDNVYGELLHPFVTKILVDHCKMTSDQVFIDLGSGVGNVVLQAALEIGCRSYGCEMMNNACDLAKAQHREFRHRCQLWGVQPGEVHLYRDDFCKNDEILKVLKEADAILVNNKAFTSTLNDMLINMFLDLKKGCKIISLKSFVYDNGNSVNDVATSILDVEQFRYHENWVSWTGSDGEYYISTKK

SEQ ID NO: 17050 - DNA, 3726 bp, Muscodor strobelii
  misc_feature: SGI EST ID NO. CUFF.40223.0
  misc_feature: Variant of the nucleotide sequence at SEQ ID NO 17048
tcgaccgtgactcgactcctcgtgagtcctgctaaagtcctatgccaactccaaagcctcacccatacctaccacgcatggtcccgttttctctttggtgcctgtcgcccttatttttcttagttattctattgtgttcccgtacctagtagcctgtggcccttcttgttggcctccaatcatcgttgtttgccccttaccgcacaaatagatgtacgagtacaagtacggcttcgcatttgcagccaaaacccgtgatttctctttttgtctaaaatcttcgtgcatcatcccacactcctaaccaacgtctactgaacacccccggcaccaccatgcgcgcagcctcgtgactggctgatatcatactatctcccagtattttctatgttattgcaccgataaattatagtatagatctcccatcgtagcctgtgcgcctagcatattatacttcgaccactgcgcgcggccgccacgccagcttagtcatttgcgacagaagtggtgagaccgaccatgggtctattcggcaaatcaaagccgctggctatgcgcgaggagagcgtaaaagttgtcaagcccaaaccaagacccagctcttcgaatttgaaagcgcccagcgccgcgcacgcctcgacagcccgacggtcacccgctgctagccttgggaccagttccaactctcgcacaccaagacccaagagttcctccccgtatcccaactcgtccgacgagcgcaagatcgagcgaaagcgcaaagccgtcacaatcactccacgcgactcacctgcctttggcgacgacagcgattccgacgacgaagatggcgacccgtttaagaagcgcgtgcggcggagcgacggccgaccagtagacgtgaaccgcaagctgcggcataggaaaggctttggcgatgacatcaggaaagtcgacatcatacacgccgccgatatggcttcgcgggcagctggctgccccgccatacctggcgcaaaggacaacgaggttgcgatcgaagtgcaatacccatcgcgctgcgtgcgcgagagatacgagttggtatggcaaaaagataagatcgatgctgtcaaagacatcctcgcgattttagaagccgtggccgaaacctatgttcctccctctgactccagggcattcatcgatcacaacacaagcttcagaagacagatggaaagagctgcgagcgagaaatatcgagacgttccggcctttcgcgaggccctcagcaactataacacgaagctatcagagctagtcaagaatggcaccgtcgctaagtgcctggaccaggcccatcatcttccgccaagccttgtttcactgatcctcactcaagtttacgatcgcactgtggcccctaaggtcgagatgctcacaaaatacgatgctggaagcgacaacgtgtatggggagttgctgcatccatttgtcaccaaaattctagttgaccattgcaaaatgacatccgaccaagtgtttatcgatctcggatcgggtgttggcaatgttgtactccaagctgcactcgaaatcggctgtcgtagctacggttgcgaaatgatgaacaacgcctgtgatttggctaaggcacaacacagggagttccggcatcggtgccaactctggggtgtgcagccgggagaagttcatctttaccgggacgacttctgcaagaacgacgagatcctgaaggttttgaaagaggcagatgcgatacttgtcaacaataaggcattcacgtccacgctgaatgacatgctcatcaacatgttcctcgatctgaagaaaggctgcaagatcatatctctcaagtcttttgtgtacgacaatgggaatagcgtcaatgacgtcgccacaagtatcctcgacgttgagcagttccggtatcatgagaattgggtcagctggaccggctcagacggtgaatactacatctcgactaagaaataagctggtccctggtttggtggaggtatatgccagctaagacttcatgatcagcatgagttgtatatatagagtacgtggacaaagaaaggacgattagacaccagtaggatacgatgtttcagcatggattgcggaaaccaaagcatgggctggagcttggagcgaaaattttgtgttgtgtcagatacttactgtatagacgatgaactgcgaatgataccaggcatagcaatgtctatgatattacaaacccacacacagcctgtcgtcacctacgagtgataggggtttcattctgacggttcatcgcatcagcttcgtgacccatcctcttcatccaacgatcgacaagctccttattctcggtctggaccttggcgagcctttgctcaacctgattaatttctatttcaagcgtcagattcttgtcttggacgtcctgtgcgaacacgtcagcaagtcgtgatacgggcaaccccataagcatctggaaacgtcatgacacgaagtcaccagcaccttataccccccgtgctcaccgcatcttcgttatgctcaagccaaagcagtatcgacgcattctcttcatcctcctggcaaacaaaccaatgaacccacatggctcagcacgacgtaccttgactagtttactcttcccaacaagctcctcattcctatcccgcaacttcgccaacaacgcgttacgttcggcagtgagatcgctgatccgcttgccgtcgaccttagacttggaccgtaggtgcactaactcggactcagctgttttgagacgtgtctgcgcttgcccacgaccacgaagtgcctccgctagatctctgcggagctctgctgctccctctgacgtggtcgtggggtctacgggagttcctttcgtctgtggttttgctgttagattggatgagacggtgggagctgccagggccgctttctcggcctctagggcggctacgcggtcggcaagctgggaaccttgcggcgaaggatttgtgtcagcctatttgaggaatttcaagtactacctagaggcgagatatggccacggccgtggctatgagacttgttggtcgatggatagtaccacggtgaggccgatttcatggttgaggactgattcacatgaggtagacttacaagcttcgaccaaatccttgttcactggattgtttagctccgcctcatgtagagagtccagatattcctctctccaattaggcattgttgttgtgtggaggcggtctatcttccaaggtgttttctacatgttaggagtaaggcaacaaaatgttcctgagatgcctacaagagctgtttggcggggctggaatttggtggctgcagcagggagatgatgtcgctgcttttggcggggtagatgcttcaggttcggagctctccggtgggattatttgttacccattaatgatgcagcaaaggataattaacaagagatcgatcttataggaaatgaataaaacatgtcgcggatgatcaagtaagatttggcctagattcgtacgaggcccgcttgcgcaaggtaattgaaatttacgagtctagcttaaaagctcatacacaaccaagagtgttctgttcgcatgaaatcctcctttctcagctctccatcagcatcaggtaaatgcaagaattgttgaggacaaaaagaaatacaatcagtatattgatttcacaatagatagtcccgaaggcgggtcgaacgcctgaccttaggat

SEQ ID NO: 17051 - DNA, 609 bp, Muscodor strobelii
  misc_feature: SGI cDNA ID NO. 565690
  misc_feature: Encodes the peptide sequence at SEQ ID NO 17052
atgcctaattggagagaggaatatctggactctctacatgaggcggagctaaacaatccagtgaacaaggatttggtcgaagcttgttcccagcttgccgaccgcgtagccgccctagaggccgagaaagcggccctggcagctcccaccgtctcatccaatctaacagcaaaaccacagacgaaaggaactcccgtagaccccacgaccacgtcagagggagcagcagagctccgcagagatctagcggaggcacttcgtggtcgtgggcaagcgcagacacgtctcaaaacagctgagtccgagttagtgcacctacggtccaagtctaaggtcgacggcaagcggatcagcgatctcactgccgaacgtaacgcgttgttggcgaagttgcgggataggaatgaggagcttgttgggaagagtaaactagtcaaggacgtccaagacaagaatctgacgcttgaaatagaaattaatcaggttgagcaaaggctcgccaaggtccagaccgagaataaggagcttgtcgatcgttggatgaagaggatgggtcacgaagctgatgcgatgaaccgtcagaatgaaacccctatcactcgtaggtga

SEQ ID NO: 17052 - protein, 202 aa, Muscodor strobelii
  misc_feature: SGI Peptide ID NO. 565690
  misc_feature (4)..(193): Pfam Id: PF08614 Pfam Desc: Autophagy protein 16 (ATG16)
  misc_feature (1)..(202): NCBI GI: 46111369 Blast Desc: FG02566.1 [Gibberella zeae PH-1]
  misc_feature (1)..(196): NCBI GI: 261361657 Blast Desc: autophagy protein [Verticillium albo-atrum VaMs.102]
  misc_feature (1)..(202): NCBI GI: 39939970 Blast Desc: MGG_05255 [Magnaporthe grisea 70-15] gi|73622252|sp|Q520U5.1|ATG16_MAGGR RecName: Full=Autophagy protein 16 gi|145010464|gb|EDJ95120.1| MGG_05255 [Magnaporthe
  misc_feature (1)..(196): NCBI GI: 85109344 Blast Desc: NCU06267 [Neurospora crassa OR74A] gi|28924512|gb|EAA33635.1| [Neurospora crassa OR74A]
  misc_feature (3)..(202): NCBI GI: 116207598 Blast Desc: CHGG_03092 [Chaetomium globosum CBS 148.51] gi|88183689|gb|EAQ91157.1| CHGG_03092 [Chaetomium globosum CBS 148.51]
  misc_feature (1)..(193): NCBI GI: 119174484 Blast Desc: [Coccidioides immitis RS]
  misc_feature (1)..(193): NCBI GI: 240106850 Blast Desc: CPC735_016380 [Coccidioides posadasii C735 delta SOWgp]
  misc_feature (1)..(193): NCBI GI: 226284838 Blast Desc: autophagy protein [Paracoccidioides brasiliensis Pb01]
  misc_feature (1)..(193): NCBI GI: 225684457 Blast Desc: autophagy protein [Paracoccidioides brasiliensis Pb03] gi|226294110|gb|EEH49530.1| autophagy protein [Paracoccidioides brasiliensis Pb18]
  misc_feature (1)..(192): NCBI GI: 255954025 Blast Desc: Pc21g07240 [Penicillium chrysogenum Wisconsin 54-1255] gi|129715957|gb|ABO31314.1| Atg16p [Penicillium chrysogenum] gi|211589476|emb|CAP95621.1| Pc21g07240 [Penicillium chrysogenum
MPNWREEYLDSLHEAELNNPVNKDLVEACSQLADRVAALEAEKAALAAPTVSSNLTAKPQTKGTPVDPTTTSEGAAELRRDLAEALRGRGQAQTRLKTAESELVHLRSKSKVDGKRISDLTAERNALLAKLRDRNEELVGKSKLVKDVQDKNLTLEIEINQVEQRLAKVQTENKELVDRWMKRMGHEADAMNRQNETPITRR

SEQ ID NO: 17053 - DNA, 3424 bp, Muscodor strobelii
  misc_feature: SGI EST ID NO. CUFF.40224.1
  misc_feature: Variant of the nucleotide sequence at SEQ ID NO 17051
atcctaaggtcaggcgttcgacccgccttcgggactatctattgtgaaatcaatatactgattgtatttctttttgtcctcaacaattcttgcatttacctgatgctgatggagagctgagaaaggaggatttcatgcgaacagaacactcttggttgtgtatgagcttttaagctagactcgtaaatttcaattaccttgcgcaagcgggcctcgtacgaatctaggccaaatcttacttgatcatccgcgacatgttttattcatttcctataagatcgatctcttgttaattatcctttgctgcatcattaatgggtaacaaataatcccaccggagagctccgaacctgaagcatctaccccgccaaaagcagcgacatcatctccctgctgcagccaccaaattccagccccgccaaacagctcttgtaggcatctcaggaacattttgttgccttactcctaacatgtagaaaacaccttggaagatagaccgcctccacacaacaacaatgcctaattggagagaggaatatctggactctctacatgaggcggagctaaacaatccagtgaacaaggatttggtcgaagcttgttcccagcttgccgaccgcgtagccgccctagaggccgagaaagcggccctggcagctcccaccgtctcatccaatctaacagcaaaaccacagacgaaaggaactcccgtagaccccacgaccacgtcagagggagcagcagagctccgcagagatctagcggaggcacttcgtggtcgtgggcaagcgcagacacgtctcaaaacagctgagtccgagttagtgcacctacggtccaagtctaaggtcgacggcaagcggatcagcgatctcactgccgaacgtaacgcgttgttggcgaagttgcgggataggaatgaggagcttgttgggaagagtaaactagtcaaggacgtccaagacaagaatctgacgcttgaaatagaaattaatcaggttgagcaaaggctcgccaaggtccagaccgagaataaggagcttgtcgatcgttggatgaagaggatgggtcacgaagctgatgcgatgaaccgtcagaatgaaacccctatcactcgtaggtgacgacaggctgtgtgtgggtttgtaatatcatagacattgctatgcctggtatcattcgcagttcatcgtctatacagtaagtatctgacacaacacaaaattttcgctccaagctccagcccatgctttggtttccgcaatccatgctgaaacatcgtatcctactggtgtctaatcgtcctttctttgtccacgtactctatatatacaactcatgctgatcatgaagtcttagctggcatatacctccaccaaaccagggaccagcttatttcttagtcgagatgtagtattcaccgtctgagccggtccagctgacccaattctcatgataccggaactgctcaacgtcgaggatacttgtggcgacgtcattgacgctattcccattgtcgtacacaaaagacttgagagatatgatcttgcagcctttcttcagatcgaggaacatgttgatgagcatgtcattcagcgtggacgtgaatgccttattgttgacaagtatcgcatctgcctctttcaaaaccttcaggatctcgtcgttcttgcagaagtcgtcccggtaaagatgaacttctcccggctgcacaccccagagttggcaccgatgccggaactccctgtgttgtgccttagccaaatcacaggcgttgttcatcatttcgcaaccgtagctacgacagccgatttcgagtgcagcttggagtacaacattgccaacacccgatccgagatcgataaacacttggtcggatgtcattttgcaatggtcaactagaattttggtgacaaatggatgcagcaactccccatacacgttgtcgcttccagcatcgtattttgtgagcatctcgaccttaggggccacagtgcgatcgtaaacttgagtgaggatcagtgaaacaaggcttggcggaagatgatgggcctggtccaggcacttagcgacggtgccattcttgactagctctgatagcttcgtgttatagttgctgagggcctcgcgaaaggccggaacgtctcgatatttctcgctcgcagctctttccatctgtcttctgaagcttgtgttgtgatcgatgaatgccctggagtcagagggaggaacataggtttcggccacggcttctaaaatcgcgaggatgtctttgacagcatcgatcttatctttttgccataccaactcgtatctgcattcccgcatcagtacttgtgacactttgcatcttgtggcggggggttcttcacctctcgcgcacgcagcgcgatgggtattgcacttcgatcgcaacctcgttgtcctttgcgccaggtatggcggggcagccagctgcccgcgaagccatatcggcggcgtgtatgatgtcgactttcctgatgtcatcgccaaagcctttcctatgccgcagcttgcggttcacgtctactggtcggccgtcgctccgccgcacgcgcttcttaaacgggtcgccatcttcgtcgtcggaatcgctgtcgtcgccaaaggcaggtgagtcgcgtggagtgattgtgacggctttgcgctttcgctcgatcttgcgctcgtcggacgagttgggatacggggaggaactcttgggtcttggtgtgcgagagttggaactggtcccaaggctagcagcgggtgaccgtcgggctgtcgaggcgtgcgcggcgctgggcgctttcaaattcgaagagctgggtcttggtttgggcttgacaacttttacgctctcctcgcgcatagccagcggctttgatttgccgaatagacccatggtcggtctcaccacttctgtcgcaaatgactaagctggcgtggcggccgcgcgcagtggtcgaagtataatatgctaggcgcacaggctacgatgggagatctatactataatttatcggtgcaataacatagaaaatactgggagatagtatgatatcagccagtcacgaggctgcgcgcatggtggtgccgggggtgttcagtagacgttggttaggagtgtgggatgatgcacgaagattttagacaaaaagagaaatcacgggttttggctgcaaatgcgaagccgtacttgtactcgtacatctatttgtgcggtaaggggcaaacaacgatgattggaggccaacaagaagggccacaggctactaggtacgggaacacaatagaataactaagaaaaataagggcgacaggcaccaaagagaaaacgggaccatgcgtggtaggtatgggtgaggctttggagttggcataggactttagcaggactcacgaggagtcgagtcacggtcga

SEQ ID NO: 17054 - DNA, 2292 bp, Muscodor strobelii
  misc_feature: SGI cDNA ID NO. 565691
  misc_feature: Encodes the peptide sequence at SEQ ID NO 17055
atgtctaggccaccccctccgcgtggccagccaaggggcgcattgggcgcggctagcaacgaacagcttacgatattcgaggacggactcaattatgcacccggattcagtcgagctccgatgccgtccgtcagcgcgcagcatggccgcgagcgcgtattgcaagaagcaaatggaaacaggatactccatccacccaacggaagcttgaaacagtcctctccgaacaaggtcaataaacggcctagaacatctttggggcattcgcacaatagtcaactgaacaccccgcgaataccgccgccgccatcaaatggccaagtcaccgattcaatgcaaaaaggggggccggtttgggccgtcttcaagactaatggctctcatgataaagagaacgcgcagcaaccgacccaatatacgcattgcgatatccctccgtcaacgggtacaggccaatgccagcaaaaggctttggggaaacggactcttctcgaggcagcacatatcgaagcagatcaaccaccacaaaaaaagcagaagacgaaagtgatcccttacacagaatacgatgaaaatggcaaagaaataaagccgaggatgagctacgcccagatgatctcacgcgccatcctagaagcaccagacaagcgtctgaccctgaaccagatctacaactggattgacgagcattttactttctttaacaacggggagggcggatggcaaaatagtattcggcataatctgagcctaaacaagagcttcacgaagaaggaccgcgcgaaggacgatccgggcaagggaggtaattggatgattgtacctggatgcgaggagcaatttctgaatccgcccaaagacacaaggaagaaggccactgctccaggagcaaatgtgcaggtcatgtcgatggcaccaaggcccgagatcaagcaggacgcaagacagcaaatgacttactatgacagcatgcctcagttacctgcgcttccaccgcaacctgccgcgttccagcattcgaatgcagcccacataccatctgcgccaagcgtgacagctcaatgcattccggagatttcctcggacgctacgattccgttatcagataatgtctgcggagaggacgacgaggacagaaaccaagtgacgagtactcctaggcagactagatttggctctccattacctccagccatgcattcttcaccgcctgttccatcattctctggccagcataatgcaacaccctcgagacgccagtcagcggtcttgaatccgcgtatgactggtcaaaaacgcaagcattcgtctattgatgcgtcgaatacgctggtagatagtggctatctttcatcgatgagcagctccgtgccaagacaccaggaaactcgcgacctgagctcagtgttcaagcgcccgcgcctgcaccctcgaaacgttaaaggcacacgggcagaggaagcgattcaggccatccgcaactcgtcatcaccttatgaccataatcatagtccgaccagaactcgtccccgaagctacacgcaaccactgtcttcctctcctctacgtgacgcgaagcacaggcaaatggggccaccggtcactccaatgccggcgaacatcgctgttgctcctcaggttgcatcggcatcaccaaccgcaaatctcgaagctcatcgccggttcatagcgcagatgtgtgcatcgccagaatcacgccaggacagaattgcagcgacattctcgttggtgcagaacagtcctggtttcgagcctgttttgtcgtttgaccaagtttttgatgtggacctctggacccagccacagcctgacctaagttatggccctctcggcccaagtgagagcgttctagtgaactacaacggctcgccaatgaagagacggaccaaaaatttgcaggcttcccttacctcagctggatcccctgcttctgctcacaagagatcggtcacatcagctcccgccttgccatacttgagtccacacgtcggaggctaccagtcccccagcaaactactcgaaggcctgtcatcaccaagcaaagccttttcacaatctcagacgaatgacgagaatgatatcctgggctttgccacggcgatacctgaatggaatgcgcccgcttccgatatgggctttgatttccccgtacatgactattcaaatttcgacatatctggaggctttgcaaagatcggtggtgaaactaacgtgacgagcgcccctcgagccgcgagacctggcttgggacgtagtcacacaatccgatga

SEQ ID NO: 17055 - protein, 763 aa, Muscodor strobelii
  misc_feature: SGI Peptide ID NO. 565691
  misc_feature (197)..(291): Pfam Id: PF00250 Pfam Desc: Fork head domain
  misc_feature (197)..(283): Pfam Id: PF00250 Pfam Desc: Fork head domain
  misc_feature (23)..(763): NCBI GI: 46125133 Blast Desc: FG06944.1 [Gibberella zeae PH-1]
  misc_feature (17)..(761): NCBI GI: 256733151 Blast Desc: NECHADRAFT_104145 [Nectria haematococca mpVI 77-13-4]
  misc_feature (54)..(747): NCBI GI: 171686468 Blast Desc: protein product [Podospora anserina] gi|170943195|emb|CAP68848.1| protein product [Podospora anserina]
  misc_feature (54)..(740): NCBI GI: 116207980 Blast Desc: CHGG_03283 [Chaetomium globosum CBS 148.51] gi|88183880|gb|EAQ91348.1| CHGG_03283 [Chaetomium globosum CBS 148.51]
  misc_feature (15)..(763): NCBI GI: 261358338 Blast Desc: meiosis-specific transcription factor mei4 [Verticillium albo-atrum VaMs.102]
  misc_feature (23)..(757): NCBI GI: 164425282 Blast Desc: NCU06173 [Neurospora crassa OR74A] gi|157070864|gb|EAA33506.2| conserved [Neurospora crassa OR74A]
  misc_feature (23)..(763): NCBI GI: 154311475 Blast Desc: BC1G_06590 [Botryotinia fuckeliana B05.10] gi|150850987|gb|EDN26180.1| BC1G_06590 [Botryotinia fuckeliana B05.10]
  misc_feature (120)..(761): NCBI GI: 255943719 Blast Desc: Pc20g00650 [Penicillium chrysogenum Wisconsin 54-1255] gi|211587362|emb|CAP85394.1| Pc20g00650 [Penicillium chrysogenum Wisconsin 54-1255]
  misc_feature (160)..(741): NCBI GI: 121712570 Blast Desc: forkhead transcription factor (Sep1), [Aspergillus clavatus NRRL 1] gi|119402049|gb|EAW12470.1| forkhead transcription factor (Sep1), [Aspergillus clavatus NRRL 1]
  misc_feature (51)..(761): NCBI GI: 115438536 Blast Desc: forkhead box protein L2 [Aspergillus terreus NIH2624] gi|114188906|gb|EAU30606.1| forkhead box protein L2 [Aspergillus terreus NIH2624]
MSRPPPPRGQPRGALGAASNEQLTIFEDGLNYAPGFSRAPMPSVSAQHGRERVLQEANGNRILHPPNGSLKQSSPNKVNKRPRTSLGHSHNSQLNTPRIPPPPSNGQVTDSMQKGGPVWAVFKTNGSHDKENAQQPTQYTHCDIPPSTGTGQCQQKALGKRTLLEAAHIEADQPPQKKQKTKVIPYTEYDENGKEIKPRMSYAQMISRAILEAPDKRLTLNQIYNWIDEHFTFFNNGEGGWQNSIRHNLSLNKSFTKKDRAKDDPGKGGNWMIVPGCEEQFLNPPKDTRKKATAPGANVQVMSMAPRPEIKQDARQQMTYYDSMPQLPALPPQPAAFQHSNAAHIPSAPSVTAQCIPEISSDATIPLSDNVCGEDDEDRNQVTSTPRQTRFGSPLPPAMHSSPPVPSFSGQHNATPSRRQSAVLNPRMTGQKRKHSSIDASNTLVDSGYLSSMSSSVPRHQETRDLSSVFKRPRLHPRNVKGTRAEEAIQAIRNSSSPYDHNHSPTRTRPRSYTQPLSSSPLRDAKHRQMGPPVTPMPANIAVAPQVASASPTANLEAHRRFIAQMCASPESRQDRIAATFSLVQNSPGFEPVLSFDQVFDVDLWTQPQPDLSYGPLGPSESVLVNYNGSPMKRRTKNLQASLTSAGSPASAHKRSVTSAPALPYLSPHVGGYQSPSKLLEGLSSPSKAFSQSQTNDENDILGFATAIPEWNAPASDMGFDFPVHDYSNFDISGGFAKIGGETNVTSAPRAARPGLGRSHTIR

SEQ ID NO: 17056 - DNA, 5161 bp, Muscodor strobelii
  misc_feature: SGI EST ID NO. CUFF.40516.0
  misc_feature: Variant of the nucleotide sequence at SEQ ID NO 17054
ctgcttctagttcatccttccactgcaagtgttcgacttccaactctctctgtcttggactcttgcgatacgtgcccaggccgttcaggactccggttctcccttcccccatccagctcttcccatcttgtctattcatctgcctagacaccgcgctggaagtggaggccgttttgagttcgtcgttcgcgcacctgtctcgcctgtccaactgttgctggcgcttgcacagcccgtccattgaccactcgagccagatcgccttcccctcgcatttcttacctgtcacctgtctcacgtccttccactccaaacccatcccgtacaacattcacatcatcctatgtccctcctcactcaattgtcgcgccgtctttgcagtctttcgatagcatccatttaatcagcagagatatttgattttggagcaattggcgcaagtcgaacaactacacattataatatcgctgtacgagactgcactcttctctgccctactgtaccgtaccggcacccacccttgcatccgtccccacagctcattcgagtcgtcgcccggatcaatacgagcgcacgataactaggctccgttctctatacgctcttcctcgtcggggcccggacggcataagtcaccatagttgtcgcgacacacgcatcgcttggaacggagatgtctaggccaccccctccgcgtggccagccaaggggcgcattgggcgcggctagcaacgaacagcttacgatattcgaggacggactcaattatgcacccggattcagtcgagctccgatgccgtccgtcagcgcgcagcatggccgcgagcgcgtattgcaagaagcaaatggaaacaggatactccatccacccaacggaagcttgaaacagtcctctccgaacaaggtcaataaacggcctagaacatctttggggcattcgcacaatagtcaactgaacaccccgcgaataccgccgccgccatcaaatggccaagtcaccgattcaatgcaaaaaggggggccggtttgggccgtcttcaagactaatggctctcatgataaagagaacgcgcagcaaccgacccaatatacgcattgcgatatccctccgtcaacgggtacaggccaatgccagcaaaaggctttggggaaacggactcttctcgaggcagcacatatcgaagcagatcaaccaccacaaaaaaagcagaagacgaaagtgatcccttacacagaatacgatgaaaatggcaaagaaataaagccgaggatgagctacgcccagatgatctcacgcgccatcctagaagcaccagacaagcgtctgaccctgaaccagatctacaactggattgacgagcattttactttctttaacaacggggagggcggatggcaaaatagtattcggcataatctgagcctaaacaagagcttcacgaagaaggaccgcgcgaaggacgatccgggcaagggaggtaattggatgattgtacctggatgcgaggagcaatttctgaatccgcccaaagacacaaggaagaaggccactgctccaggagcaaatgtgcaggtcatgtcgatggcaccaaggcccgagatcaagcaggacgcaagacagcaaatgacttactatgacagcatgcctcagttacctgcgcttccaccgcaacctgccgcgttccagcattcgaatgcagcccacataccatctgcgccaagcgtgacagctcaatgcattccggagatttcctcggacgctacgattccgttatcagataatgtctgcggagaggacgacgaggacagaaaccaagtgacgagtactcctaggcagactagatttggctctccattacctccagccatgcattcttcaccgcctgttccatcattctctggccagcataatgcaacaccctcgagacgccagtcagcggtcttgaatccgcgtatgactggtcaaaaacgcaagcattcgtctattgatgcgtcgaatacgctggtagatagtggctatctttcatcgatgagcagctccgtgccaagacaccaggaaactcgcgacctgagctcagtgttcaagcgcccgcgcctgcaccctcgaaacgttaaaggcacacgggcagaggaagcgattcaggccatccgcaactcgtcatcaccttatgaccataatcatagtccgaccagaactcgtccccgaagctacacgcaaccactgtcttcctctcctctacgtgacgcgaagcacaggcaaatggggccaccggtcactccaatgccggcgaacatcgctgttgctcctcaggttgcatcggcatcaccaaccgcaaatctcgaagctcatcgccggttcatagcgcagatgtgtgcatcgccagaatcacgccaggacagaattgcagcgacattctcgttggtgcagaacagtcctggtttcgagcctgttttgtcgtttgaccaagtttttgatgtggacctctggacccagccacagcctgacctaagttatggccctctcggcccaagtgagagcgttctagtgaactacaacggctcgccaatgaagagacggaccaaaaatttgcaggcttcccttacctcagctggatcccctgcttctgctcacaagagatcggtcacatcagctcccgccttgccatacttgagtccacacgtcggaggctaccagtcccccagcaaactactcgaaggcctgtcatcaccaagcaaagccttttcacaatctcagacgaatgacgagaatgatatcctgggctttgccacggcgatacctgaatggaatgcgcccgcttccgatatgggctttgatttccccgtacatgactattcaaatttcgacatatctggaggctttgcaaagatcggtggtgaaactaacgtgacgagcgcccctcgagccgcgagacctggcttgggacgtagtcacacaatccgatgatgaccgtctcgcagttatacaggtggtcgaaactacaccaccctccttacgagactcacgaccttaacgactgtcaccacgagcatacacgctatagctgcgtacgaatcttttacttttgatgaatgtccgaacggcatttgaacaccaacccgatccactctgtggatttcttgcctattattaattgaggtcgcgatcacgatcagccttgctagtcctagcgacggtccgttccgttcgtttctaggatagacgtttgtatcagtggccttctctttcgaaatctgttggatgagttgcttttcgccagggagactcgcaggatactggactgcccacgtgtgtccgagatgataaaatcggcgtttggaagcgttgaaaggctgggacgctgacgcataaactctggaaagatacagagtctcgtagacatatgcaaggggataccataattacgagaatcacgaacaggggggcttgtaggagttttgtctttttttcgttcataatttgcaagggtcaggcgagaacaccgttggacgaattcactgttgggcgtttgggttaaggatgggtggaatgatacaatccactgggaataggatttgttttttttttcaatgtgtggctagacagaggctcctgcccacgatgcatgttacactcacttctgaaactagatagctcaacatcgctgtgggttttcaaaaaaagcacgtggcacaaagtgattctgtaatggggatgcaatatgtatcgggtatcttagtacttgtgtgagttaccgggttcttcggatgatgaagccgaacaggttcagagcttgtgttatgcaagcaagacaaaacagaacaagaaaagtccgtgagaaagtcccagtctatggtttccatcgtccgtccatccatccgcctcctagcaaactccgcgaaacgccgtccgtcaaaaaaaattcgccaaaaaatcgatatccatgtgcaatgtggtatttacagcatctgcgatgatagatgcactcctcgtctcgcaaagaagagtggagctagacacgatagacactcaactcaggcatgtgagtgagtcgagaggtagtggcttagtagatgcccatccgtgatgcccatcccgaatctttagggttcacgttgatctggtagggaaaggggttggtctcgctggtggtgatgggcgggatgtggtctttgtgggagttcacgcaggtgacgatcttcagggcggtggtgaggagggtctgctccattgctttgcggacttttgcacgttctgcattttgggtagcatgagttagtatagttgtagagtttgggtttgagtttgagtttgagttaacgactgaccactctcggtcttgggctcggcgacggtgaccttgacggtccaggactcccagcagacctcctcgtcgccgccgccgtaggccgcgcgcatgtaccaggtcttgcggcgcttcttctcgaagaactggaccgagatgttgccgcggccgccgttggagcccggctgggcagggccaggactgcggtggtgggagaggtggtggtgcaatggtgcgctggagagggtgtgggagtgtgtgcgttcggcgtcgagctcgcgggccagctcggcggcgcgcttctcgatcatggtgtcgagctcagcatcgcggacaaaggggagggtgatgtcgagcacttcgcgggattccggggtcagcgaggggaagaagcggtggaagaagatggtgtgtagtatggctagtgagaattatcggtcagttatcgatgcagtatgtgatcaatatccattaaagagtgaaaggctgcgtcttggattgggccaggatgccgtttcgttgatgcgagcgattgcggggcatttgggaagagcagaagagcacgagatttggggaatatggcgcagtcgcatacctcgtatgacatcgcggacagagcccgggtcggcaaaagcctctaatatgaactcttggggtctctgctgctccatccttgcgtttgggtgcttttaggccgaagtaataggtgtctttccgacctcgaggaggtcgaggtgtggcgagaagatagggatgcaagctctggcgtttctcgcagttcccgtccccagtcatcatcattggaaacaggctgagtggatcggtatggacaatgagagaatgcccgtctgctccca

SEQ ID NO: 17057 - DNA, 663 bp, Muscodor strobelii
  misc_feature: SGI cDNA ID NO. 565692
  misc_feature: Reduced expression when VOC is produced
  misc_feature: Encodes the peptide sequence at SEQ ID NO 17058
atggagcagcagagaccccaagagttcatattagaggcttttgccgacccgggctctgtccgcgatgtcatacgagccatactacacaccatcttcttccaccgcttcttcccctcgctgaccccggaatcccgcgaagtgctcgacatcaccctcccctttgtccgcgatgctgagctcgacaccatgatcgagaagcgcgccgccgagctggcccgcgagctcgacgccgaacgcacacactcccacaccctctccagcgcaccattgcaccaccacctctcccaccaccgcagtcctggccctgcccagccgggctccaacggcggccgcggcaacatctcggtccagttcttcgagaagaagcgccgcaagacctggtacatgcgcgcggcctacggcggcggcgacgaggaggtctgctgggagtcctggaccgtcaaggtcaccgtcgccgagcccaagaccgagagtgaacgtgcaaaagtccgcaaagcaatggagcagaccctcctcaccaccgccctgaagatcgtcacctgcgtgaactcccacaaagaccacatcccgcccatcaccaccagcgagaccaacccctttccctaccagatcaacgtgaaccctaaagattcgggatgggcatcacggatgggcatctactaa

SEQ ID NO: 17058 - protein, 220 aa, Muscodor strobelii
  misc_feature: SGI Peptide ID NO. 565692
  misc_feature (11)..(198): Pfam Id: PF07855 Pfam Desc: Domain of function (DUF1649)
  misc_feature (1)..(220): NCBI GI: 256732708 Blast Desc: NECHADRAFT_79167 [Nectria haematococca mpVI 77-13-4]
  misc_feature (1)..(220): NCBI GI: 258572202 Blast Desc: conserved [Uncinocarpus reesii 1704] gi|237905133|gb|EEP79534.1| conserved [Uncinocarpus reesii 1704]
  misc_feature (1)..(220): NCBI GI: 116207982 Blast Desc: CHGG_03284 [Chaetomium globosum CBS 148.51] gi|88183881|gb|EAQ91349.1| CHGG_03284 [Chaetomium globosum CBS 148.51]
  misc_feature (1)..(220): NCBI GI: 171686458 Blast Desc: protein product [Podospora anserina] gi|170943190|emb|CAP68843.1| protein product [Podospora anserina]
  misc_feature (1)..(220): NCBI GI: 119181809 Blast Desc: CIMG_05983 [Coccidioides immitis RS]
  misc_feature (1)..(220): NCBI GI: 212535668 Blast Desc: conserved [Penicillium marneffei ATCC 18224] gi|210070389|gb|EEA24479.1| conserved [Penicillium marneffei ATCC 18224]
  misc_feature (1)..(220): NCBI GI: 240109062 Blast Desc: CPC735_025670 [Coccidioides posadasii C735 delta SOWgp]
  misc_feature (3)..(220): NCBI GI: 67523649 Blast Desc: AN2280.2 [Aspergillus nidulans FGSC A4] gi|40745235|gb|EAA64391.1| AN2280.2 [Aspergillus nidulans FGSC A4] gi|259487673|tpe|CBF86523.1| TPA: conserved [Aspergillus FGSC
  misc_feature (3)..(220): NCBI GI: 169765163 Blast Desc: [Aspergillus oryzae RIB40] gi|238503538|ref|XP_002383002.1| conserved [Aspergillus flavus NRRL3357] gi|83764907|dbj|BAE55051.1| protein product oryzae]
  misc_feature (1)..(220): NCBI GI: 242793707 Blast Desc: conserved [Talaromyces stipitatus ATCC 10500] gi|218718808|gb|EED18228.1| conserved [Talaromyces stipitatus ATCC 10500]
  misc_feature: Useful for introducing or modulating the production of volatile compounds
MEQQRPQEFILEAFADPGSVRDVIRAILHTIFFHRFFPSLTPESREVLDITLPFVRDAELDTMIEKRAAELARELDAERTHSHTLSSAPLHHHLSHHRSPGPAQPGSNGGRGNISVQFFEKKRRKTWYMRAAYGGGDEEVCWESWTVKVTVAEPKTESERAKVRKAMEQTLLTTALKIVTCVNSHKDHIPPITTSETNPFPYQINVNPKDSGWASRMGIY

SEQ ID NO: 17059 - DNA, 4968 bp, Muscodor strobelii
  misc_feature: SGI EST ID NO. CUFF.40517.1
  misc_feature: Variant of the nucleotide sequence at SEQ ID NO 17057
cgggttgggagcagacgggcattctctcattgtccataccgatccactcagcctgtttccaatgatgatgactggggacgggaactgcgagaaacgccagagcttgcatccctatcttctcgccacacctcgacctcctcgaggtcggaaagacacctattacttcggcctaaaagcacccaaacgcaaggatggagcagcagagaccccaagagttcatattagaggcttttgccgacccgggctctgtccgcgatgtcatacgagccatactacacaccatcttcttccaccgcttcttcccctcgctgaccccggaatcccgcgaagtgctcgacatcaccctcccctttgtccgcgatgctgagctcgacaccatgatcgagaagcgcgccgccgagctggcccgcgagctcgacgccgaacgcacacactcccacaccctctccagcgcaccattgcaccaccacctctcccaccaccgcagtcctggccctgcccagccgggctccaacggcggccgcggcaacatctcggtccagttcttcgagaagaagcgccgcaagacctggtacatgcgcgcggcctacggcggcggcgacgaggaggtctgctgggagtcctggaccgtcaaggtcaccgtcgccgagcccaagaccgagagtgaacgtgcaaaagtccgcaaagcaatggagcagaccctcctcaccaccgccctgaagatcgtcacctgcgtgaactcccacaaagaccacatcccgcccatcaccaccagcgagaccaacccctttccctaccagatcaacgtgaaccctaaagattcgggatgggcatcacggatgggcatctactaagccactacctctcgactcactcacatgcctgagttgagtgtctatcgtgtctagctccactcttctttgcgagacgaggagtgcatctatcatcgcagatgctgtaaataccacattgcacatggatatcgattttttggcgaattttttttgacggacggcgtttcgcggagtttgctaggaggcggatggatggacggacgatggaaaccatagactgggactttctcacggacttttcttgttctgttttgtcttgcttgcataacacaagctctgaacctgttcggcttcatcatccgaagaacccggtaactcacacaagtactaagatacccgatacatattgcatccccattacagaatcactttgtgccacgtgctttttttgaaaacccacagcgatgttgagctatctagtttcagaagtgagtgtaacatgcatcgtgggcaggagcctctgtctagccacacattgaaaaaaaaaacaaatcctattcccagtggattgtatcattccacccatccttaacccaaacgcccaacagtgaattcgtccaacggtgttctcgcctgacccttgcaaattatgaacgaaaaaaagacaaaactcctacaagcccccctgttcgtgattctcgtaattatggtatccccttgcatatgtctacgagactctgtatctttccagagtttatgcgtcagcgtcccagcctttcaacgcttccaaacgccgattttatcatctcggacacacgtgggcagtccagtatcctgcgagtctccctggcgaaaagcaactcatccaacagatttcgaaagagaaggccactgatacaaacgtctatcctagaaacgaacggaacggaccgtcgctaggactagcaaggctgatcgtgatcgcgacctcaattaataataggcaagaaatccacagagtggatcgggttggtgttcaaatgccgttcggacattcatcaaaagtaaaagattcgtacgcagctatagcgtgtatgctcgtggtgacagtcgttaaggtcgtgagtctcgtaaggagggtggtgtagtttcgaccacctgtataactgcgagacggtcatcatcggattgtgtgactacgtcccaagccaggtctcgcggctcgaggggcgctcgtcacgttagtttcaccaccgatctttgcaaagcctccagatatgtcgaaatttgaatagtcatgtacggggaaatcaaagcccatatcggaagcgggcgcattccattcaggtatcgccgtggcaaagcccaggatatcattctcgtcattcgtctgagattgtgaaaaggctttgcttggtgatgacaggccttcgagtagtttgctgggggactggtagcctccgacgtgtggactcaagtatggcaaggcgggagctgatgtgaccgatctcttgtgagcagaagcaggggatccagctgaggtaagggaagcctgcaaatttttggtccgtctcttcattggcgagccgttgtagttcactagaacgctctcacttgggccgagagggccataacttaggtcaggctgtggctgggtccagaggtccacatcaaaaacttggtcaaacgacaaaacaggctcgaaaccaggactgttctgcaccaacgagaatgtcgctgcaattctgtcctggcgtgattctggcgatgcacacatctgcgctatgaaccggcgatgagcttcgagatttgcggttggtgatgccgatgcaacctgaggagcaacagcgatgttcgccggcattggagtgaccggtggccccatttgcctgtgcttcgcgtcacgtagaggagaggaagacagtggttgcgtgtagcttcggggacgagttctggtcggactatgattatggtcataaggtgatgacgagttgcggatggcctgaatcgcttcctctgcccgtgtgcctttaacgtttcgagggtgcaggcgcgggcgcttgaacactgagctcaggtcgcgagtttcctggtgtcttggcacggagctgctcatcgatgaaagatagccactatctaccagcgtattcgacgcatcaatagacgaatgcttgcgtttttgaccagtcatacgcggattcaagaccgctgactggcgtctcgagggtgttgcattatgctggccagagaatgatggaacaggcggtgaagaatgcatggctggaggtaatggagagccaaatctagtctgcctaggagtactcgtcacttggtttctgtcctcgtcgtcctctccgcagacattatctgataacggaatcgtagcgtccgaggaaatctccggaatgcattgagctgtcacgcttggcgcagatggtatgtgggctgcattcgaatgctggaacgcggcaggttgcggtggaagcgcaggtaactgaggcatgctgtcatagtaagtcatttgctgtcttgcgtcctgcttgatctcgggccttggtgccatcgacatgacctgcacatttgctcctggagcagtggccttcttccttgtgtctttgggcggattcagaaattgctcctcgcatccaggtacaatcatccaattacctcccttgcccggatcgtccttcgcgcggtccttcttcgtgaagctcttgtttaggctcagattatgccgaatactattttgccatccgccctccccgttgttaaagaaagtaaaatgctcgtcaatccagttgtagatctggttcagggtcagacgcttgtctggtgcttctaggatggcgcgtgagatcatctgggcgtagctcatcctcggctttatttctttgccattttcatcgtattctgtgtaagggatcactttcgtcttctgctttttttgtggtggttgatctgcttcgatatgtgctgcctcgagaagagtccgtttccccaaagccttttgctggcattggcctgtacccgttgacggagggatatcgcaatgcgtatattgggtcggttgctgcgcgttctctttatcatgagagccattagtcttgaagacggcccaaaccggcccccctttttgcattgaatcggtgacttggccatttgatggcggcggcggtattcgcggggtgttcagttgactattgtgcgaatgccccaaagatgttctaggccgtttattgaccttgttcggagaggactgtttcaagcttccgttgggtggatggagtatcctgtttccatttgcttcttgcaatacgcgctcgcggccatgctgcgcgctgacggacggcatcggagctcgactgaatccgggtgcataattgagtccgtcctcgaatatcgtaagctgttcgttgctagccgcgcccaatgcgccccttggctggccacgcggagggggtggcctagacatctccgttccaagcgatgcgtgtgtcgcgacaactatggtgacttatgccgtccgggccccgacgaggaagagcgtatagagaacggagcctagttatcgtgcgctcgtctgcatggcgatgagaagggttgatcctaagttagaagagggtcactcacattgatccgggcgacgactcgaatgagctgtggggacggatgcaagggtgggtgccggtacggtacagtagggcagagaagagtgcagtctcgtacagcgatattataatgtgtagttgttcgacttgcgccaattgctccaaaatcaaatatctctgctgattaaatggatgctatcgaaagactgcaaagacggcgcgacaattgagtgaggagggacataggatgatgtgaatgttgtacgggatgggtttggagtggaaggacgtgagacaggtgacaggtaagaaatgcgaggggaaggcgatctggctcgagtggtcaatggacgggctgtgcaagcgccagcaacagttggacaggcgagacaggtgcgcgaacgacgaactcaaaacggcctccacttccagcgcggtgtctaggcagatgaatagacaagatgggaagagctggatgggggaagggagaaccggagtcctgaacggcctgggcacgtatcgcaagagtccaagacagagagagttggaagtcgaacacttgcagtggaaggatgaactagaagcag

SEQ ID NO: 17060 - DNA, 1818 bp, Muscodor strobelii
  misc_feature: SGI cDNA ID NO. 565693
  misc_feature: Elevated expression when VOC is produced
  misc_feature: Encodes the peptide sequence at SEQ ID NO 17061
atgccgaagcgaaagaagaagccattttcaagtaggatttggggccccaatgatgttacggcaatgttggcatatctggattattgtcgcctttacaacattgacttcagacacaccgtcgtcgaccatctcgaaacccagatcagaaaagttgtgacatggtcgcaagtcgaaagccggctgtatagtgaatggaaatatttgggacctgacgactctaagtcctggaggattctgctctctagaggctcagaatgtctcatatcgctaacagatgctgagcgtgaggacatacgtcgcgcaatggttaagcttactccacctcgaactgctcctctatctccatccacttctacctcatctgcgttatccagcatcgcgacgcaggagactgaaggtttgacaggcaatcaagacccttcaaaggtcgacgccaatttcgaaccaggagatcaacgtctaaatgttattgacacaagacatattggcgttatgaccgaaacgactgcccaggaacttgagttagagtcttataagcaacgcctggagaatgccgaagatcgcgaacgcaaaatacaacgtgagatattcacgctaaacaaccacctcttcgctgtccgagaggagtgtaaggagcttcgcaagtgccgttccgcagcggaaaaaaccaaagatacaactagcatgattgaaaacctgttatacgaaaatagtgtattaagaaagcaggtctttgcctcggagagctcaaaacaaaactacaggaacattgcctctggtgggctaggtccaaaaaatcactacatccaagatgaactgcggaatattgaacgccttattgctgatgcttgtgcgtccgtcagcattgaaagtactgtcaaaacaaacgtgtcctttccgccagaggtcaatgaaagatcgcaccctctacacatgtgggcgcatagagcatcggccagtaaagatgtcgggtcattcttgtcctattgttctagtcatgggatatccgggttcaagttgatgagatgcctcgtcgcggcagtgacacatggatttgtatttgagccgcctatgtcagatctgttcgccatggactgtcctatcttagaccattacagggagaggatattcgatcaatgtcagtattgtggctctttctccgtggatctgctactaagtgattttttggagacagatgggaccgtggcccttcggcaattggatctcctagcatggaaatctctgaaatcggagaaacatttcgaaaaacgggtgatacgcaccaaggcccaggctttggcagagaaaacataccgtttaattaagcttattttagatttagacggggatgacccggcacagtcgaggctcgaatcccgagctatatctgttagtgatgccgagtctcttgacgtcgccgatgaagagagtcgtcctcggcacgcactgtttgtggagactttcaagcatgctctacgcctcaaatcggagctcattctatccgataattgctatcgatgggtctcctttaagccagactcgttacttgactttaatgtcatggagctagtggactcgccttatgaagtgcataagtcaaacccaaacaagttcagaaaagtctctcaaaccagcgaagagagagagaaggggatcgaagtccggctgtgcctgtttccggctctttttgtgcatcctcgtactgaacgtgatgagacaagaggcagtgatatttcccgggacagatccgagctgtttgagactgtagcggattttgcagggtcagtattggttaagaaagcagtcgtcctagtctag

SEQ ID NO: 17061 - protein, 605 aa, Muscodor strobelii
  misc_feature: SGI Peptide ID NO. 565693
  misc_feature (5)..(605): NCBI GI: 46117639 Blast Desc: FG04639.1 [Gibberella zeae PH-1]
  misc_feature (10)..(605): NCBI GI: 256723060 Blast Desc: NECHADRAFT_81189 [Nectria haematococca mpVI 77-13-4]
  misc_feature: Useful for introducing or modulating the production of volatile compounds
MPKRKKKPFSSRIWGPNDVTAMLAYLDYCRLYNIDFRHTVVDHLETQIRKVVTWSQVESRLYSEWKYLGPDDSKSWRILLSRGSECLISLTDAEREDIRRAMVKLTPPRTAPLSPSTSTSSALSSIATQETEGLTGNQDPSKVDANFEPGDQRLNVIDTRHIGVMTETTAQELELESYKQRLENAEDRERKIQREIFTLNNHLFAVREECKELRKCRSAAEKTKDTTSMIENLLYENSVLRKQVFASESSKQNYRNIASGGLGPKNHYIQDELRNIERLIADACASVSIESTVKTNVSFPPEVNERSHPLHMWAHRASASKDVGSFLSYCSSHGISGFKLMRCLVAAVTHGFVFEPPMSDLFAMDCPILDHYRERIFDQCQYCGSFSVDLLLSDFLETDGTVALRQLDLLAWKSLKSEKHFEKRVIRTKAQALAEKTYRLIKLILDLDGDDPAQSRLESRAISVSDAESLDVADEESRPRHALFVETFKHALRLKSELILSDNCYRWVSFKPDSLLDFNVMELVDSPYEVHKSNPNKFRKVSQTSEEREKGIEVRLCLFPALFVHPRTERDETRGSDISRDRSELFETVADFAGSVLVKKAVVLV

SEQ ID NO: 17062 - DNA, 2132 bp, Muscodor strobelii
  misc_feature: SGI EST ID NO. CUFF.40215.0
  misc_feature: Variant of the nucleotide sequence at SEQ ID NO 17060
caacaagttgcgatctttggctgtctctgcattgctgcgctgccgctaccaacaacatcgaaatgccgaagcgaaagaagaagccattttcaagtaggatttggggccccaatgatgttacggcaatgttggcatatctggattattgtcgcctttacaacattgacttcagacacaccgtcgtcgaccatctcgaaacccagatcagaaaagttgtgacatggtcgcaagtcgaaagccggctgtatagtgaatggaaatatttgggacctgacgactctaagtcctggaggattctgctctctagaggctcagaatgtctcatatcgctaacagatgctgagcgtgaggacatacgtcgcgcaatggttaagcttactccacctcgaactgctcctctatctccatccacttctacctcatctgcgttatccagcatcgcgacgcaggagactgaaggtttgacaggcaatcaagacccttcaaaggtcgacgccaatttcgaaccaggagatcaacgtctaaatgttattgacacaagacatattggcgttatgaccgaaacgactgcccaggaacttgagttagagtcttataagcaacgcctggagaatgccgaagatcgcgaacgcaaaatacaacgtgagatattcacgctaaacaaccacctcttcgctgtccgagaggagtgtaaggagcttcgcaagtgccgttccgcagcggaaaaaaccaaagatacaactagcatgattgaaaacctgttatacgaaaatagtgtattaagaaagcaggtctttgcctcggagagctcaaaacaaaactacaggaacattgcctctggtgggctaggtccaaaaaatcactacatccaagatgaactgcggaatattgaacgccttattgctgatgcttgtgcgtccgtcagcattgaaagtactgtcaaaacaaacgtgtcctttccgccagaggtcaatgaaagatcgcaccctctacacatgtgggcgcatagagcatcggccagtaaagatgtcgggtcattcttgtcctattgttctagtcatgggatatccgggttcaagttgatgagatgcctcgtcgcggcagtgacacatggatttgtatttgagccgcctatgtcagatctgttcgccatggactgtcctatcttagaccattacagggagaggatattcgatcaatatgggaccgtggcccttcggcaattggatctcctagcatggaaatctctgaaatcggagaaacatttcgaaaaacgggtgatacgcaccaaggcccaggctttggcagagaaaacataccgtttaattaagcttattttagatttagacggggatgacccggcacagtcgaggctcgaatcccgagctatatctgttagtgatgccgagtctcttgacgtcgccgatgaagagagtcgtcctcggcacgcactgtttgtggagactttcaagcatgctctacgcctcaaatcggagctcattctatccgataattgctatcgatgggtctcctttaagccagactcgttacttgactttaatgtcatggagctagtggactcgccttatgaagtgcataagtcaaacccaaacaagttcagaaaagtctctcaaaccagcgaagagagagagaaggggatcgaagtccggctgtgcctgtttccggctctttttgtgcatcctcgtactgaacgtgatgagacaagaggcagtgatatttcccgggacagatccgagctgtttgagactgtagcggattttgcagggtcagtattggttaagaaagcagtcgtcctagtctagatacctaggtagatagccccgtcaatttaacacccacaggaggccttggaagaggaatgtaataggcttcgggcattgctatctctcgtagttggatcatgtcagggttcacagatacatacatggttgagttgagatatgatgccgcaggtacatagtgtatcatctataagtcaaggagcagattcgaaccctaaaaggtcattatcaggaacttgaacaaatatgcaaggatgagggcagcttatttgatagcaacgtacccaaagcatgtttaccttagcttaaacacaacaaaatcttaggaat

SEQ ID NO: 17063 - DNA, 2007 bp, Muscodor strobelii
  misc_feature: SGI cDNA ID NO. 565694
  misc_feature: Elevated expression when VOC is produced
  misc_feature: Encodes the peptide sequence at SEQ ID NO 17064
atggagactagaggatcagctcggcgccaaagccaaagcgatttttctgaagcggatatggtttctttggtttggcaaggtgctgacagaggattacttgacaagcgcctcatcatttccgttgacttcggtaccacgttttccagcgtcttttatgtagcgctagagggtgaggctccagagtacctcgaacttgacaggatcaaaggcatcgataactatccttgtgataagcactggcagtcgagctcagatgagccaatgagaaggcaggtaccaacagagctcatatatcccaataaccgcaattttcgacgcgaagctttagaacagccagtgaacaacgatggcggagacgatgatgacgactacaccatgttagaatacgacacacacgcgcacttcgaagaagaattgtcagcggagtccaaaaaacttcaatggggttacactgtacacgacaaactgagactgccatttacccataagaacccgcaaaacaagccgctattacgattcaagctattactagacgaaagtcccaagacacaaaaggtgcgagatgaccttaacaatacacttgactcgctgagaaggcggaaaattatcagcaacaagttacaagtcattgcggactatctaacatacctgctccaccacgcccgatgccaattacaagagagggggtacgatgacagttggaggacggagatggtgatgtgtgttcctgctgtttggactcagaaagcatgtcgcgtgatgcaaaccgctatggccatcggcatggagaaggtaggatttcgaggggccaatgtcacgaacaatagtatcgagaacctttttatcgtatcggagcctgaagcagcagcagcatatgcattagcgcaagacccgagcattaagcccggggatacgtttgtgttgttggatgcaggcgggggcaccatcgacgccaatacatacacaattagcctcaccacaccactacggcttcaaaccgaagttgtcgagcccgacggcgggctgttcgggtccagctacctgaacgaagaaatgcgtaagctactaatggatatgttgaaagacgaacattatctagaaacagatgtgcagacaattgagggcatcgtggagcccattgtctgcggtgaatttgaatacaattacaagagaattttcgactgttacaaattcacgggaaatacgctttttccagtctctggtctccggcatgatccagctaagtcattcctcgaaggctgccttcgcatcgacgtgcgcaaaatcaaaaagatgttttttgatttgctcgcgcccattggttcgatcatgctacgtcaagtccgcgaagcgttgcagagaggctgtcgagtggagaaagtcattcttattggaggtttcggtgcatcagtttccttgcaaaagtatctgaggaagcaattaagagaattctcgcaaagcaatgactgtgatatagctctgtgcattccagagaagacagctacggctgtggctcaaggcgccgttctacgtgcattcaacaaagatcgaggcccagagaggcacgcaagatcgagttatggcattcttcgaacggaaccgttttaccagggaggccaagagaatcgtccggaatacgcaggcgtgaagcctttccgggatcgggatgatgggctatactatataaaagacactatagattgggttctgaaactgggtacgctggtgcctaccgtttggaattgcaaaccatttgcatgcagtgccgagaaaattggcgagatcgtcgctgacttcacgtttctccttgatactttgaagcctgttggaccagcgactgatggaatgacgggcaagatagttggtagacaacactacaaagtggattattggatggtcatttgcgtcctcggccgcgatctacggtgttttgcgatttatgataaaaggattattgagaactgtaggatcaacattgccccggctttcaggccaggcgtcaagtag

SEQ ID NO: 17064 - protein, 668 aa, Muscodor strobelii
  misc_feature: SGI Peptide ID NO. 565694
  misc_feature (24)..(668): NCBI GI: 46117649 Blast Desc: FG04640.1 [Gibberella zeae PH-1]
  misc_feature (11)..(667): NCBI GI: 256723140 Blast Desc: NECHADRAFT_42425 [Nectria haematococca mpVI 77-13-4]
  misc_feature (28)..(663): NCBI GI: 119490805 Blast Desc: NFIA_063630 [Neosartorya fischeri NRRL 181] gi|119411259|gb|EAW21202.1| [Neosartorya fischeri NRRL 181]
  misc_feature (34)..(668): NCBI GI: 154301433 Blast Desc: BC1G_10386 [Botryotinia fuckeliana B05.10] gi|150856126|gb|EDN31318.1| BC1G_10386 [Botryotinia fuckeliana B05.10]
  misc_feature (35)..(667): NCBI GI: 212538875 Blast Desc: HSP70 family protein [Penicillium marneffei ATCC 18224] gi|210069335|gb|EEA23426.1| HSP70 family protein [Penicillium marneffei ATCC 18224]
  misc_feature (27)..(663): NCBI GI: 70999057 Blast Desc: HSP70 family protein [Aspergillus fumigatus Af293] gi|66851887|gb|EAL92212.1| HSP70 family protein [Aspergillus fumigatus Af293]
  misc_feature (27)..(663): NCBI GI: 159127267 Blast Desc: HSP70 family protein [Aspergillus fumigatus A1163]
  misc_feature (6)..(485): NCBI GI: 240106925 Blast Desc: CPC735_017140 [Coccidioides posadasii C735 delta SOWgp]
  misc_feature (36)..(668): NCBI GI: 154293102 Blast Desc: BC1G_14504 [Botryotinia fuckeliana B05.10] gi|150845649|gb|EDN20842.1| BC1G_14504 [Botryotinia fuckeliana B05.10]
  misc_feature (36)..(667): NCBI GI: 154311877 Blast Desc: BC1G_05972 [Botryotinia fuckeliana B05.10] gi|150850622|gb|EDN25815.1| BC1G_05972 [Botryotinia fuckeliana B05.10]
  misc_feature: Useful for introducing or modulating the production of volatile compounds
METRGSARRQSQSDFSEADMVSLVWQGADRGLLDKRLIISVDFGTTFSSVFYVALEGEAPEYLELDRIKGIDNYPCDKHWQSSSDEPMRRQVPTELIYPNNRNFRREALEQPVNNDGGDDDDDYTMLEYDTHAHFEEELSAESKKLQWGYTVHDKLRLPFTHKNPQNKPLLRFKLLLDESPKTQKVRDDLNNTLDSLRRRKIISNKLQVIADYLTYLLHHARCQLQERGYDDSWRTEMVMCVPAVWTQKACRVMQTAMAIGMEKVGFRGANVTNNSIENLFIVSEPEAAAAYALAQDPSIKPGDTFVLLDAGGGTIDANTYTISLTTPLRLQTEVVEPDGGLFGSSYLNEEMRKLLMDMLKDEHYLETDVQTIEGIVEPIVCGEFEYNYKRIFDCYKFTGNTLFPVSGLRHDPAKSFLEGCLRIDVRKIKKMFFDLLAPIGSIMLRQVREALQRGCRVEKVILIGGFGASVSLQKYLRKQLREFSQSNDCDIALCIPEKTATAVAQGAVLRAFNKDRGPERHARSSYGILRTEPFYQGGQENRPEYAGVKPFRDRDDGLYYIKDTIDWVLKLGTLVPTVWNCKPFACSAEKIGEIVADFTFLLDTLKPVGPATDGMTGKIVGRQHYKVDYWMVICVLGRDLRCFAIYDKRIIENCRINIAPAFRPGVK

SEQ ID NO: 17065 - DNA, 6054 bp, Muscodor strobelii
  misc_feature: SGI EST ID NO. CUFF.40308.0
  misc_feature: Variant of the nucleotide sequence at SEQ ID NO 17063
ccaacacgaattcctgattgggctctcacaaatttctacttgtcgctgacccctgttagacaaacattatgtgtgatagcgagaagccctcggcaccagctgaagaagttgattctttcaataaaaaggcgacggggccctacacgcaatatttactcatctgtgatgcaattgagtcgtacctgtctttatctggcattcttgttcacccatctgtcttgctatcatggagactagaggatcagctcggcgccaaagccaaagcgatttttctgaagcggatatggtttctttggtttggcaaggtgctgacagaggattacttgacaagcgcctcatcatttccgttgacttcggtaccacgttttccagcgtcttttatgtagcgctagagggtgaggctccagagtacctcgaacttgacaggatcaaaggcatcgataactatccttgtgataagcactggcagtcgagctcagatgagccaatgagaaggcaggtaccaacagagctcatatatcccaataaccgcaattttcgacgcgaagctttagaacagccagtgaacaacgatggcggagacgatgatgacgactacaccatgttagaatacgacacacacgcgcacttcgaagaagaattgtcagcggagtccaaaaaacttcaatggggttacactgtacacgacaaactgagactgccatttacccataagaacccgcaaaacaagccgctattacgattcaagctattactagacgaaagtcccaagacacaaaaggtgcgagatgaccttaacaatacacttgactcgctgagaaggcggaaaattatcagcaacaagttacaagtcattgcggactatctaacatacctgctccaccacgcccgatgccaattacaagagagggggtacgatgacagttggaggacggagatggtgatgtgtgttcctgctgtttggactcagaaagcatgtcgcgtgatgcaaaccgctatggccatcggcatggagaaggtaggatttcgaggggccaatgtcacgaacaatagtatcgagaacctttttatcgtatcggagcctgaagcagcagcagcatatgcattagcgcaagacccgagcattaagcccggggatacgtttgtgttgttggatgcaggcgggggcaccatcgacgccaatacatacacaattagcctcaccacaccactacggcttcaaaccgaagttgtcgagcccgacggcgggctgttcgggtccagctacctgaacgaagaaatgcgtaagctactaatggatatgttgaaagacgaacattatctagaaacagatgtgcagacaattgagggcatcgtggagcccattgtctgcggtgaatttgaatacaattacaagagaattttcgactgttacaaattcacgggaaatacgctttttccagtctctggtctccggcatgatccagctaagtcattcctcgaaggctgccttcgcatcgacgtgcgcaaaatcaaaaagatgttttttgatttgctcgcgcccattggttcgatcatgctacgtcaagtccgcgaagcgttgcagagaggctgtcgagtggagaaagtcattcttattggaggtttcggtgcatcagtttccttgcaaaagtatctgaggaagcaattaagagaattctcgcaaagcaatgactgtgatatagctctgtgcattccagagaagacagctacggctgtggctcaaggcgccgttctacgtgcattcaacaaagatcgaggcccagagaggcacgcaagatcgagttatggcattcttcgaacggaaccgttttaccagggaggccaagagaatcgtccggaatacgcaggcgtgaagcctttccgggatcgggatgatgggctatactatataaaagacactatagattgggttctgaaactgggtacgctggtgcctaccgtttggaattgcaaaccatttgcatgcagtcacacattcagtgcttcgccaaggccacagaagctgaagtgtaaagaagtcttatatgtgtcagacagatcgacgaggtcgcattatcaactccactcagaggaaaaccaaggtgccgagaaaattggcgagatcgtcgctgacttcacgtttctccttgatactttgaagcctgttggaccagcgactgatggaatgacgggcaagatagttggtagacaacactacaaagtggattattggatggtcatttgcgtcctcggccgcgatctacggtgttttgcgatttatgataaaaggattattgagaactgtaggatcaacattgccccggctttcaggccaggcgtcaagtaggctagaacgatggtattatctgcttccgtcgatctttaggcggaacattctttgcgtcggttcttgaacaccctcaggggggtggtcaaccctcaacgcccttcgacgtatgagaaagaattgccttgattattcaagtagatgaaccgtaaaatcactcgcagcatgaagacggctcagtgaacttgtcactaacgctgaacgtcccttgtcatctttccttgaagacgattgactacatggtgaggaactacatatataaactaaggtaataacttaagcatgcaaaattagtagataggaagaatcatacctacatgttgctggggtgccggatatctactcaggtacaggactagcgctctcacattttgaagactgtacagaaggtaggaaaacggcgtggttacatgactccagagagctggcagtgacacgtgctaatcgatctcttcatcaaacaacgtccccggacccagatgctcgtctgcccgcgcggagtattttgaagtggagacatctaattgacttccatgtttcgtacgaacaataattaatgtaaccacttatgtacctccgctttatggatccggtaagactacatatgtacctctgcaaccagatacttgagaggtagttccccacaagttggctggggctgactccgttgaaccgtctagcagggggtcaaacgggggatctgtcacgccaaatctcagctaccgaggcacacgtcaacggaccagctgcgaccgaccaacccagacagctcagcaacttttcgagagctcgcgtcacggcgactcatgattagatctcgacacccaatcgacgattcattacctcgattaccccatcgtcatcaccacgtacaggtgactgataacccgctgacattctgtgttccaatttgatactctggtccattttgggttcatgtcgtcccctcgcggcccaacattcgtctcttatcccttgtaagggaccgacaacggcgcatctcgaactatttcccgtccgaaaaccacctctgcacgcatcatgatatcagcgacgcgccggtggctgcggcgcaaccgcaccccgatagccattggcgtcggcgtcgtcggcgctggctacgttgcgacccaatatgtcctgagcaagatcaacgatgcccgcgagcgcatgagcagcgatcgcatcgccaaggaaaacttgcgccgacgcttccaacagaaccaggaagactgcaccttcaccgtccttgctctgctccctacagccacaaccaacatcctcgaggccatgaacacagaaaacatcaccctagagatccagcagatgaagagcgccacgagagcagtgcgtagtggtgactcgtccgccacgcccccgagtatcgcagacaccaccatgaccgaagaggaaggcaaaagtgttgtgagccagcagagcgagagcggcgtccatgcgagccaggttgctctgcctcctataccaagccctgccgatggtgcccaagacggtggtcagacagccccccaatcgcggaagacgaagcgacagctttgggatgatctgaccataagctcaattacgcgctctttcacgctagtctataccctggcgctactgactatgctcacgagaatacagctcaaccttcttggacgacggagctatctgtccagcgttgtgtcgctggctacaggcaccgcacagtcgactatcagcctcgagaacaatgacgacgacaatcccgagcatgcttatggtagcgactttgagaccaaccgaaaatatctgactttcagctggtggctgcttaatagggggtggaccgacgtccaggagaaggtcgaagctgctgtgcgtgaagtatttggtcatctcagcccccgcgacctcctgagcttcgacaccttttcccagcttgccctcgaggtgcgcaagaaagtcgaggccaagccgaatgcagacagacccggctcccagtggctatcattcctcctgccgcctacgccactggaagactttgttttgaaggagtccggcgtgctgggcgacagcgcattagctacgacacaatccggcagttcatccactacatcaccatcgtcgactataacgccatcgcttcgccgccttcttgacgagacgtcagacctcatcgaatctccagcattttgccacgtacttgctctcctgctcgatgcaggtttctcaacattgttgaacaataagctgctcgccggcgcgtttacaaccgatgctcctaccacggcgcctacctctgcgccagctcccatccccgaagagtcgctagcgcatcccgccacgcgcgcagtcctcttacccaagatcctgtctgttctcacgcgccaggctcacgccattggcaacggcatgccaaacgagtatctccaagaaatggagcaggttcatgacttagaagccttcgctgccgtagtctactcgagtaactggcaaaatgagatccaccaagacgaggatctggcagcagccgctgcaaacctgcaggaacaagtggcacaggaaacaaaaccatcccaggcttccgccggagaggagagcgctgtgctcgttgacccatcgcagaactcatttgagagcgcttgggaaaaggctctggaggggtcttcgctgctaccgtcgcagacttcgcaatcatgaaacgtgacgaggtcttgatcaactaagtctacttcttaaccgttctggtctctcccagaggacatgagctcttgacgatgaattgccatttcccgaaggtttcgacgttgctattagaaaaatctatctagggcttgaaccttatcttgactacacttcggatcgtatgttcctaacgagacactcttgctgcctgtataggcatggtggaggatgatgtaccgcgatcgcatcaagttttccagtcgaaccagcatcgacggggcataatgtgacagtcaaatgacggtttgcgagggcatagagtccgtatagtccgccaaacaaggaacaagaatacacatgcgtatcatgggcggactcagtgtcacacctgtagaataacgcacggcatcaggaagttggagcaggcttgatatacctatgcaaaacaaactgcaccaagctcaacggattggttttattggcaaatgtgtataatattgctatcggatggatgaatctcgaaatagacaacaatgatgtcatcgtattgatatcaacacatcatttggctccatgcaccatgtatgagagaagaagatctctcaagacagacgtccttatccgcgcagccgtcctatgtttcgtagccaattacatagaagtcgtacatccagatcaatttgacgtgtgtgatgagatccgagccagcttgattcacggtctcggttgatcgccggtgctggggtggggacccgttcttcgctcacgatgataaaaccatcgctcgagctcttggacagtggcgtctactcggatatcccgctgttcatcggctcagcccgaaatcattcttcgcacctctatagtagctgatcgacaacacagcagcaagtaacacgacttctgctatgtctcacggtgacgcaatatcatgtcgatgggttcacataagacccctgatgaatttatcaagacccatctcgaacatctcgttccgtacgccttctccagctttatgttcaacgggcgagagcggatttttt

SEQ ID NO: 17066 - DNA, 1638 bp, Muscodor strobelii
  misc_feature: SGI cDNA ID NO. 565695
  misc_feature: Encodes the peptide sequence at SEQ ID NO 17067
atgatatcagcgacgcgccggtggctgcggcgcaaccgcaccccgatagccattggcgtcggcgtcgtcggcgctggctacgttgcgacccaatatgtcctgagcaagatcaacgatgcccgcgagcgcatgagcagcgatcgcatcgccaaggaaaacttgcgccgacgcttccaacagaaccaggaagactgcaccttcaccgtccttgctctgctccctacagccacaaccaacatcctcgaggccatgaacacagaaaacatcaccctagagatccagcagatgaagagcgccacgagagcagtgcgtagtggtgactcgtccgccacgcccccgagtatcgcagacaccaccatgaccgaagaggaaggcaaaagtgttgtgagccagcagagcgagagcggcgtccatgcgagccaggttgctctgcctcctataccaagccctgccgatggtgcccaagacggtggtcagacagccccccaatcgcggaagacgaagcgacagctttgggatgatctgaccataagctcaattacgcgctctttcacgctagtctataccctggcgctactgactatgctcacgagaatacagctcaaccttcttggacgacggagctatctgtccagcgttgtgtcgctggctacaggcaccgcacagtcgactatcagcctcgagaacaatgacgacgacaatcccgagcatgcttatggtagcgactttgagaccaaccgaaaatatctgactttcagctggtggctgcttaatagggggtggaccgacgtccaggagaaggtcgaagctgctgtgcgtgaagtatttggtcatctcagcccccgcgacctcctgagcttcgacaccttttcccagcttgccctcgaggtgcgcaagaaagtcgaggccaagccgaatgcagacagacccggctcccagtggctatcattcctcctgccgcctacgccactggaagactttgttttgaaggagtccggcgtgctgggcgacagcgcattagctacgacacaatccggcagttcatccactacatcaccatcgtcgactataacgccatcgcttcgccgccttcttgacgagacgtcagacctcatcgaatctccagcattttgccacgtacttgctctcctgctcgatgcaggtttctcaacattgttgaacaataagctgctcgccggcgcgtttacaaccgatgctcctaccacggcgcctacctctgcgccagctcccatccccgaagagtcgctagcgcatcccgccacgcgcgcagtcctcttacccaagatcctgtctgttctcacgcgccaggctcacgccattggcaacggcatgccaaacgagtatctccaagaaatggagcaggttcatgacttagaagccttcgctgccgtagtctactcgagtaactggcaaaatgagatccaccaagacgaggatctggcagcagccgctgcaaacctgcaggaacaagtggcacaggaaacaaaaccatcccaggcttccgccggagaggagagcgctgtgctcgttgacccatcgcagaactcatttgagagcgcttgggaaaaggctctggaggggtcttcgctgctaccgtcgcagacttcgcaatcatga

SEQ ID NO: 17067 - protein, 545 aa, Muscodor strobelii
  misc_feature: SGI Peptide ID NO. 565695
  misc_feature (2)..(476): Pfam Id: PF04882 Pfam Desc: Peroxin-3
  misc_feature (162)..(329): Pfam Id: PF04882 Pfam Desc: Peroxin-3
  misc_feature (2)..(97): Pfam Id: PF04882 Pfam Desc: Peroxin-3
  misc_feature (1)..(536): NCBI GI: 46125129 Blast Desc: FG06942.1 [Gibberella zeae PH-1]
  misc_feature (1)..(536): NCBI GI: 256733150 Blast Desc: NECHADRAFT_100129 [Nectria haematococca mpVI 77-13-4]
  misc_feature (1)..(535): NCBI GI: 85109582 Blast Desc: NCU06175 [Neurospora crassa OR74A] gi|28924634|gb|EAA33751.1| conserved [Neurospora crassa OR74A]
  misc_feature (1)..(531): NCBI GI: 116207984 Blast Desc: CHGG_03285 [Chaetomium globosum CBS 148.51] gi|88183882|gb|EAQ91350.1| CHGG_03285 [Chaetomium globosum CBS 148.51]
  misc_feature (1)..(534): NCBI GI: 145608718 Blast Desc: MGG_06424 [Magnaporthe grisea 70-15] gi|145016161|gb|EDK00651.1| MGG_06424 [Magnaporthe grisea 70-15]
  misc_feature (2)..(533): NCBI GI: 156065165 Blast Desc: SS1G_00593 [Sclerotinia sclerotiorum 1980] gi|154691452|gb|EDN91190.1| SS1G_00593 [Sclerotinia sclerotiorum 1980]
  misc_feature (2)..(496): NCBI GI: 154311445 Blast Desc: BC1G_06575 [Botryotinia fuckeliana B05.10] gi|150850972|gb|EDN26165.1| BC1G_06575 [Botryotinia fuckeliana B05.10]
  misc_feature (1)..(535): NCBI GI: 212535666 Blast Desc: peroxisomal membrane protein (Pex3), [Penicillium marneffei ATCC 18224] gi|210070388|gb|EEA24478.1| peroxisomal membrane protein (Pex3), [Penicillium marneffei ATCC 18224]
  misc_feature (1)..(532): NCBI GI: 169624208 Blast Desc: SNOG_15360 [Phaeosphaeria nodorum SN15] gi|111056173|gb|EAT77293.1| SNOG_15360 [Phaeosphaeria nodorum SN15]
  misc_feature (1)..(535): NCBI GI: 242793703 Blast Desc: peroxisomal membrane protein (Pex3), [Talaromyces stipitatus ATCC 10500] gi|218718807|gb|EED18227.1| peroxisomal membrane protein (Pex3), [Talaromyces stipitatus ATCC 10500]
MISATRRWLRRNRTPIAIGVGVVGAGYVATQYVLSKINDARERMSSDRIAKENLRRRFQQNQEDCTFTVLALLPTATTNILEAMNTENITLEIQQMKSATRAVRSGDSSATPPSIADTTMTEEEGKSVVSQQSESGVHASQVALPPIPSPADGAQDGGQTAPQSRKTKRQLWDDLTISSITRSFTLVYTLALLTMLTRIQLNLLGRRSYLSSVVSLATGTAQSTISLENNDDDNPEHAYGSDFETNRKYLTFSWWLLNRGWTDVQEKVEAAVREVFGHLSPRDLLSFDTFSQLALEVRKKVEAKPNADRPGSQWLSFLLPPTPLEDFVLKESGVLGDSALATTQSGSSSTTSPSSTITPSLRRLLDETSDLIESPAFCHVLALLLDAGFSTLLNNKLLAGAFTTDAPTTAPTSAPAPIPEESLAHPATRAVLLPKILSVLTRQAHAIGNGMPNEYLQEMEQVHDLEAFAAVVYSSNWQNEIHQDEDLAAAAANLQEQVAQETKPSQASAGEESAVLVDPSQNSFESAWEKALEGSSLLPSQTSQS

SEQ ID NO: 17068 - DNA, 6054 bp, Muscodor strobelii; identical to SEQ ID NO: 17065
  misc_feature: SGI EST ID NO. CUFF.40308.0
  misc_feature: Variant of the nucleotide sequence at SEQ ID NO 17066

SEQ ID NO: 17069 - DNA, 510 bp, Muscodor strobelii
  misc_feature: SGI cDNA ID NO. 565696
  misc_feature: Encodes the peptide sequence at SEQ ID NO 17070
atgcccgtccaagtctactccttctacatcttcgaccgccacaccgaatgcatctactccaagcaatggtaccagcaaccgccgtctctcacctcgccctcttccaccctgtcctcgccaccgcccaccgaagcgccctccacaaacggcgcgcagatcaagaaaccgagagacaagtcctcggacgacgcaaagctcatctacggcaccgtcttctcactgcgtaacatggtccgcaagctcggcggagacgacgacgccttcatatcctatcgcacttcccagtataaactacattactacgagacgccgacgaatttgcgctttgcgctgcttacggagccaggtgcgctgagtatgcgcaatgtgttgcatcagatctatatcaatctttgggttgagtacgtggtaaaaaatccgctctcgcccgttgaacataaagctggagaaggcgtacggaacgagatgttcgagatgggtcttgataaattcatcaggggtcttatgtga

SEQ ID NO: 17070 - protein, 169 aa, Muscodor strobelii
  misc_feature: SGI Peptide ID NO. 565696
  misc_feature (5)..(168): Pfam Id: PF04099 Pfam Desc: Sybindin-like family
  misc_feature (60)..(168): Pfam Id: PF04099 Pfam Desc: Sybindin-like family
  misc_feature (5)..(169): NCBI GI: 256732707 Blast Desc: NECHADRAFT_79165 [Nectria haematococca mpVI 77-13-4]
  misc_feature (5)..(169): NCBI GI: 46125127 Blast Desc: FG06941.1 [Gibberella zeae PH-1]
  misc_feature (5)..(169): NCBI GI: 171686450 Blast Desc: protein product [Podospora anserina] gi|170943186|emb|CAP68839.1| protein product [Podospora anserina]
  misc_feature (5)..(169): NCBI GI: 85109584 Blast Desc: NCU06176 [Neurospora crassa OR74A] gi|28924635|gb|EAA33752.1| conserved [Neurospora crassa OR74A]
  misc_feature (3)..(169): NCBI GI: 116207988 Blast Desc: CHGG_03287 [Chaetomium globosum CBS 148.51] gi|88183884|gb|EAQ91352.1| CHGG_03287 [Chaetomium globosum CBS 148.51]
  misc_feature (5)..(168): NCBI GI: 261358352 Blast Desc: transport protein particle subunit bet5 [Verticillium albo-atrum VaMs.102]
  misc_feature (12)..(169): NCBI GI: 145608704 Blast Desc: conserved [Magnaporthe grisea 70-15] gi|145016149|gb|EDK00639.1| conserved [Magnaporthe grisea 70-15]
  misc_feature (5)..(169): NCBI GI: 154311447 Blast Desc: BC1G_06576 [Botryotinia fuckeliana B05.10] gi|150850973|gb|EDN26166.1| BC1G_06576 [Botryotinia fuckeliana B05.10]
  misc_feature (15)..(169): NCBI GI: 260101073 Blast Desc: TRAPP Bet5 subunit [Sporothrix schenckii]
  misc_feature (5)..(165): NCBI GI: 169765225 Blast Desc: [Aspergillus oryzae RIB40] gi|238503478|ref|XP_002382972.1| TRAPP complex subunit (Bet5), [Aspergillus flavus NRRL3357] gi|83764938|dbj|BAE55082.1| protein
MPVQVYSFYIFDRHTECIYSKQWYQQPPSLTSPSSTLSSPPPTEAPSTNGAQIKKPRDKSSDDAKLIYGTVFSLRNMVRKLGGDDDAFISYRTSQYKLHYYETPTNLRFALLTEPGALSMRNVLHQIYINLWVEYVVKNPLSPVEHKAGEGVRNEMFEMGLDKFIRGLM

SEQ ID NO: 17071 - DNA, 5208 bp, Muscodor strobelii
  misc_feature: SGI EST ID NO. CUFF.40309.1
  misc_feature: Variant of the nucleotide sequence at SEQ ID NO 17069
aaacaccatcaccacaatcggaacctgacatctaccgtcacaatatcctcgccaccttcactcgcccccatctgctcacccggagctaggcacatagactgtgggcatgtgagctctacctccgcttaggggtagagaccgtcaccatgcccgtccaagtctactccttctacatcttcgaccgccacaccgaatgcatctactccaagcaatggtaccagcaaccgccgtctctcacctcgccctcttccaccctgtcctcgccaccgcccaccgaagcgccctccacaaacggcgcgcagatcaagaaaccgagagacaagtcctcggacgacgcaaagctcatctacggcaccgtcttctcactgcgtaacatggtccgcaagctcggcggagacgacgacgccttcatatcctatcgcacttcccagtataaactacattactacgagacgccgacgaatttgcgctttgcgctgcttacggagccaggtgcgctgagtatgcgcaatgtgttgcatcagatctatatcaatctttgggttgagtacgtggtaaaaaatccgctctcgcccgttgaacataaagctggagaaggcgtacggaacgagatgttcgagatgggtcttgataaattcatcaggggtcttatgtgaacccatcgacatgatattgcgtcaccgtgagacatagcagaagtcgtgttacttgctgctgtgttgtcgatcagctactatagaggtgcgaagaatgatttcgggctgagccgatgaacagcgggatatccgagtagacgccactgtccaagagctcgagcgatggttttatcatcgtgagcgaagaacgggtccccaccccagcaccggcgatcaaccgagaccgtgaatcaagctggctcggatctcatcacacacgtcaaattgatctggatgtacgacttctatgtaattggctacgaaacataggacggctgcgcggataaggacgtctgtcttgagagatcttcttctctcatacatggtgcatggagccaaatgatgtgttgatatcaatacgatgacatcattgttgtctatttcgagattcatccatccgatagcaatattatacacatttgccaataaaaccaatccgttgagcttggtgcagtttgttttgcataggtatatcaagcctgctccaacttcctgatgccgtgcgttattctacaggtgtgacactgagtccgcccatgatacgcatgtgtattcttgttccttgtttggcggactatacggactctatgccctcgcaaaccgtcatttgactgtcacattatgccccgtcgatgctggttcgactggaaaacttgatgcgatcgcggtacatcatcctccaccatgcctatacaggcagcaagagtgtctcgttaggaacatacgatccgaagtgtagtcaagataaggttcaagccctagatagatttttctaatagcaacgtcgaaaccttcgggaaatggcaattcatcgtcaagagctcatgtcctctgggagagaccagaacggttaagaagtagacttagttgatcaagacctcgtcacgtttcatgattgcgaagtctgcgacggtagcagcgaagacccctccagagccttttcccaagcgctctcaaatgagttctgcgatgggtcaacgagcacagcgctctcctctccggcggaagcctgggatggttttgtttcctgtgccacttgttcctgcaggtttgcagcggctgctgccagatcctcgtcttggtggatctcattttgccagttactcgagtagactacggcagcgaaggcttctaagtcatgaacctgctccatttcttggagatactcgtttggcatgccgttgccaatggcgtgagcctggcgcgtgagaacagacaggatcttgggtaagaggactgcgcgcgtggcgggatgcgctagcgactcttcggggatgggagctggcgcagaggtaggcgccgtggtaggagcatcggttgtaaacgcgccggcgagcagcttattgttcaacaatgttgagaaacctgcatcgagcaggagagcaagtacgtggcaaaatgctggagattcgatgaggtctgacgtctcgtcaagaaggcggcgaagcgatggcgttatagtcgacgatggtgatgtagtggatgaactgccggattgtgtcgtagctaatgcgctgtcgcccagcacgccggactccttcaaaacaaagtcttccagtggcgtaggcggcaggaggaatgatagccactgggagccgggtctgtctgcattcggcttggcctcgactttcttgcgcacctcgagggcaagctgggaaaaggtgtcgaagctcaggaggtcgcgggggctgagatgaccaaatacttcacgcacagcagcttcgaccttctcctggacgtcggtccaccccctattaagcagccaccagctgaaagtcagatattttcggttggtctcaaagtcgctaccataagcatgctcgggattgtcgtcgtcattgttctcgaggctgatagtcgactgtgcggtgcctgtagccagcgacacaacgctggacagatagctccgtcgtccaagaaggttgagctgtattctcgtgagcatagtcagtagcgccagggtatagactagcgtgaaagagcgcgtaattgcttgagaaggtggtcagccttgtacgatgatacacatttgcacgtttgggcgcggtggtcttacagcttatggtcagatcatcccaaagctgtcgcttcgtcttccgcgattggggggctgtctgaccaccgtcttgggcaccatcggcagggcttggtataggaggcagagcaacctggctcgcatggacgccgctctcgctctgctggctcacaacacttttgccttcctcttcggtcatggtggtgtctgcgatactcgggggcgtggcggacgagtcaccactacgcactgctctcgtggcgctcttcatctgctggatctctagggtgatgttttctgtgttcatggcctcgaggatgttggttgtggctgtagggagcagagcaaggacggtgaaggtgcagtcttcctggttctgttggaagcgtcggcgcaagctgcgcgacggttagtatcgtgatgatggatgaaggttacaaggtttgaggtagtgatacggacttttccttggcgatgcgatcgctgctcatgcgctcgcgggcatcgttgatcttgctcaggacatattgggtcgcaacgtagccagcgccgacgacgccgacgccaatggctatcggggtgcggttgcgccgcagccaccggcgcgtcgctgatatcatgatgcgtgcagaggtggttttcggacgggaaatagttcgagatgcgccgttgtcggtcccttacaagggataagagacgaatgttgggccgcgaggggacgacatgaacccaaaatggaccagagtatcaaattggaacacagaatgtcagcgggttatcagtcacctgtacgtggtgatgacgatggggtaatcgaggtaatgaatcgtcgattgggtgtcgagatctaatcatgagtcgccgtgacgcgagctctcgaaaagttgctgagctgtctgggttggtcggtcgcagctggtccgttgacgtgtgcctcggtagctgagatttggcgtgacagatcccccgtttgaccccctgctagacggttcaacggagtcagccccagccaacttgtggggaactacctctcaagtatctggttgcagaggtacatatgtagtcttaccggatccataaagcggaggtacataagtggttacattaattattgttcgtacgaaacatggaagtcaattagatgtctccacttcaaaatactccgcgcgggcagacgagcatctgggtccggggacgttgtttgatgaagagatcgattagcacgtgtcactgccagctctctggagtcatgtaaccacgccgttttcctaccttctgtacagtcttcaaaatgtgagagcgctagtcctgtacctgagtagatatccggcaccccagcaacatgtaggtatgattcttcctatctactaattttgcatgcttaagttattaccttagtttatatatgtagttcctcaccatgtagtcaatcgtcttcaaggaaagatgacaagggacgttcagcgttagtgacaagttcactgagccgtcttcatgctgcgagtgattttacggttcatctacttgaataatcaaggcaattctttctcatacgtcgaagggcgttgagggttgaccacccccctgagggtgttcaagaaccgacgcaaagaatgttccgcctaaagatcgacggaagcagataataccatcgttctagcctacttgacgcctggcctgaaagccggggcaatgttgatcctacagttctcaataatccttttatcataaatcgcaaaacctgtttcatggattcgaagttaatcaaagagaccggaaaccaataatagagcgaatgagagtcacatacaccgtagatcgcggccgaggacgcaaatgaccatccaataatccactttgtagtgttgtctaccaactatcttgcccgtcattccatcagtcgctggtccaacaggcttcaaagtatcaaggagaaacgtgaagtcagcgacgatctcgccaattttctcggcacctgaaggacgtattagcagtcacttgcgaaataatttggacacagggttagcgttaaaaaggggaactttgaagcgagaccttggttttcctctgagtggagttgataatgcgacctcgtcgatctgtctgacacatataagacttctttacacttcagcttctgtggccttggcgaagcactgaatgtgtgactgcatgcaaatggtttgcaattccaaacggtaggcaccagcgtaccctttgcgtgttaacaagagtttgaaccaacgaatagcttccgagtcagcacgtaccagtttcagaacccaatctatagtgtcttttatatagtatagcccatcatcccgatcccggaaaggcttcacgcctgcgtattccggacgattctcttggcctccctggtaaaacggttccgttcgaagaatgccataactcgatcttgcgtgcctctctgggcctcgatctttgttgaatgcacgtagaacggcgccttgagccaca

SEQ ID NO: 17072 - DNA, 1956 bp, Muscodor strobelii
  misc_feature: SGI cDNA ID NO. 565697
  misc_feature: Encodes the peptide sequence at SEQ ID NO 17073
atggcctctattagtacccagagcctgccgccaagttcgccacaaccacacattactatccaccagacggaggacacagaacgtccaattctcgctcctcatcaatcggctcctcccgccccgctacagttccacagtcctttgcgacaccataaacggactccctcccaacatcgtgaagtcaaagagacactcgatgcgaaagccagagacaccagcgacgatgcggagggcatactgcaacataccgtcaaccaatacactattcgggaggagatcggccgtggctcctatggcgctgtccatcttgccactgatcagttcggtcaggagtatgccatcaaagaattctctaaagcgcgactgcgaaaacgagctcagtccaatctcctgaggagaccgggccctggacggccgcatccattagcacctggtcgaggtccgcacgccttctacaagaaacaattcagtcgccaggaagatgccgaggcaaaagatgccttgtatctcattcgtgccgagattgctataatgaagaaactgacacatcccaatctcgttgcattgatcgaagtcctagatgaccccgaaggagattcgcttgccgaggagtgtcgcacgtggtttcgcgatctcatccttggcgtagaatacttgcatgcccagggaattattcatcgtgacatcaagccggataacctgttattgacagaggatgatgtactcaaaatcgccgactttggcgtgtctgagatgtttgaaaagaaagatgaaatgatgaccaacaagtccgccggctccccagccttcataccaccagagctctgccaagcaaaacacggagatgtctctggtaaagctgcagacgtatggtctatgggtatcactctctattgtctaaagtatggaaaattgccgttcaatgggagcaatccactagagatatacgccgcgattcgcaccgagccattgtctctaccggatggagaagatcctgacttggtcgatcttctaacccggatcttggacaaggacagtaccaccagaattaccatgccacaaatcagggaacatccctgggtcacgaggaacggaagtgatctactcctctcggaagaagagaattgctctgatccggttgaaacgcccaatgaacttgaagttaaccatgcgttcacccagaaaatggatcatctgatctatgtattaagagccattcaacggtttaagggtcttatctcccagagccgagtcacaacgccacggacacccaacgcgcctaaccctttagaatcacaccaggtagctgaatcagatccgaaatatggcgaacgagcttctcaggcaacagaactcacgcgtcaaaagtcggttgctgaagaagccgccgaacttgtcgaccagcggaaagctcatcttctcgcgggcttaccgaccaccggtggcggatcgacacagcatgttgacgaccaagatgactccacggagactcctttattcctcggaatcggcactggtggaggcgatgattttgccactgcagaccccgaagctaacctggtttctgactctccaactggtatcgatttcgatgtgtatgatcgagcgtttgaaacagaaatcaagcggatcaggtcggatagaaagaagaaccgagcatggacttacatgaccaagctcgtaggcgagcaggagatggacaagtatcgccaagacgaatgcatgatcatcgaggcgggcaaatccatagcgtccaatgcctacacacgtggcctcgctcacataaacgacgcccgccgagtaactcacgatgggcaatggcggaaagagagcgaggaaggagtacatagagtcatcgaaagcgcgaaagaaacgaagaacaaatttgcagatctcgttgcttcgatgacgaaggagctcaaggagaaagcgacgaataaagaaacaaaggattag

SEQ ID NO: 17073 - protein, 651 aa, Muscodor strobelii
  misc_feature: SGI Peptide ID NO. 565697
  misc_feature (87)..(361): Pfam Id: PF00069 Pfam Desc: Protein kinase domain
  misc_feature (203)..(361): Pfam Id: PF00069 Pfam Desc: Protein kinase domain
  misc_feature (87)..(196): Pfam Id: PF00069 Pfam Desc: Protein kinase domain
  misc_feature (215)..(250): Pfam Id: PF07714 Pfam Desc: Protein tyrosine kinase
  misc_feature (2)..(598): NCBI GI: 39977037 Blast Desc: MGG_06421 [Magnaporthe grisea 70-15] gi|145016165|gb|EDK00655.1| MGG_06421 [Magnaporthe grisea 70-15]
  misc_feature (2)..(598): NCBI GI: 222083601 Blast Desc: CMKK2 protein [Magnaporthe grisea]
  misc_feature (7)..(561): NCBI GI: 256733149 Blast Desc: NECHADRAFT_79164 [Nectria haematococca mpVI 77-13-4]
  misc_feature (6)..(470): NCBI GI: 164425279 Blast Desc: NCU06177 [Neurospora crassa OR74A] gi|157070863|gb|EAA33753.2| NCU06177 [Neurospora crassa OR74A]
  misc_feature (67)..(565): NCBI GI: 46125125 Blast Desc: FG06940.1 [Gibberella zeae PH-1]
  misc_feature (28)..(576): NCBI GI: 158906268 Blast Desc: calcium/calmodulin-dependent protein kinase [Botryotinia fuckeliana]
  misc_feature (21)..(551): NCBI GI: 171686452 Blast Desc: protein product [Podospora anserina] gi|170943187|emb|CAP68840.1| protein product [Podospora anserina]
  misc_feature (63)..(576): NCBI GI: 154311449 Blast Desc: BC1G_06577 [Botryotinia fuckeliana B05.10] gi|150850974|gb|EDN26167.1| BC1G_06577 [Botryotinia fuckeliana B05.10]
  misc_feature (39)..(561): NCBI GI: 119182364 Blast Desc: CIMG_06216 [Coccidioides immitis RS]
  misc_feature (46)..(458): NCBI GI: 119498561 Blast Desc: calcium/calmodulin-dependent protein kinase kinase [Neosartorya fischeri NRRL 181] gi|119414202|gb|EAW24141.1| calcium/calmodulin-dependent protein kinase kinase [Neosartorya
MASISTQSLPPSSPQPHITIHQTEDTERPILAPHQSAPPAPLQFHSPLRHHKRTPSQHREVKETLDAKARDTSDDAEGILQHTVNQYTIREEIGRGSYGAVHLATDQFGQEYAIKEFSKARLRKRAQSNLLRRPGPGRPHPLAPGRGPHAFYKKQFSRQEDAEAKDALYLIRAEIAIMKKLTHPNLVALIEVLDDPEGDSLAEECRTWFRDLILGVEYLHAQGIIHRDIKPDNLLLTEDDVLKIADFGVSEMFEKKDEMMTNKSAGSPAFIPPELCQAKHGDVSGKAADVWSMGITLYCLKYGKLPFNGSNPLEIYAAIRTEPLSLPDGEDPDLVDLLTRILDKDSTTRITMPQIREHPWVTRNGSDLLLSEEENCSDPVETPNELEVNHAFTQKMDHLIYVLRAIQRFKGLISQSRVTTPRTPNAPNPLESHQVAESDPKYGERASQATELTRQKSVAEEAAELVDQRKAHLLAGLPTTGGGSTQHVDDQDDSTETPLFLGIGTGGGDDFATADPEANLVSDSPTGIDFDVYDRAFETEIKRIRSDRKKNRAWTYMTKLVGEQEMDKYRQDECMIIEAGKSIASNAYTRGLAHINDARRVTHDGQWRKESEEGVHRVIESAKETKNKFADLVASMTKELKEKATNKETKD

SEQ ID NO: 17074 - DNA, 2631 bp, Muscodor strobelii
  misc_feature: SGI EST ID NO. CUFF.40273.0
  misc_feature: Variant of the nucleotide sequence at SEQ ID NO 17072
caaaaacgccatttcttcgttgatcgacagacttcctgtgacgctgggctcccgtcacttgtgtccctgattactcttacagagatatacttattgatacccattgataccgtaatcgcccgttcccttcctgtttgtcttgttcgtgccgtgcttgacacagacctcgagtcattgcgcagtccccgcaaatgcgccgtggacgatcctgatgcaatcctcactccaagatattgcctagtagataatttcacaaagcaaaaccaacgacatggcctctattagtacccagagcctgccgccaagttcgccacaaccacacattactatccaccagacggaggacacagaacgtccaattctcgctcctcatcaatcggctcctcccgccccgctacagttccacagtcctttgcgacaccataaacggactccctcccaacatcgtgaagtcaaagagacactcgatgcgaaagccagagacaccagcgacgatgcggagggcatactgcaacataccgtcaaccaatacactattcgggaggagatcggccgtggctcctatggcgctgtccatcttgccactgatcagttcggtcaggagtatgccatcaaagaattctctaaagcgcgactgcgaaaacgagctcagtccaatctcctgaggagaccgggccctggacggccgcatccattagcacctggtcgaggtccgcacgccttctacaagaaacaattcagtcgccaggaagatgccgaggcaaaagatgccttgtatctcattcgtgccgagattgctataatgaagaaactgacacatcccaatctcgttgcattgatcgaagtcctagatgaccccgaaggagattcgctgtatgtggtaatggaaatgtgcaaaaaaaggtgtcgtcatgaaggtcaccctggacggcgaagagacaaagtcttatagtgccgaggagtgtcgcacgtggtttcgcgatctcatccttggcgtagaatacttgcatgcccagggaattattcatcgtgacatcaagccggataacctgttattgacagaggatgatgtactcaaaatcgccgactttggcgtgtctgagatgtttgaaaagaaagatgaaatgatgaccaacaagtccgccggctccccagccttcataccaccagagctctgccaagcaaaacacggagatgtctctggtaaagctgcagacgtatggtctatgggtatcactctctattgtctaaagtatggaaaattgccgttcaatgggagcaatccactagagatatacgccgcgattcgcaccgagccattgtctctaccggatggagaagatcctgacttggtcgatcttctaacccggatcttggacaaggacagtaccaccagaattaccatgccacaaatcagggaacatccctgggtcacgaggaacggaagtgatctactcctctcggaagaagagaattgctctgatccggttgaaacgcccaatgaacttgaagttaaccatgcgttcacccagaaaatggatcatctgatctatgtattaagagccattcaacggtttaagggtcttatctcccagagccgagtcacaacgccacggacacccaacgcgcctaaccctttagaatcacaccaggtagctgaatcagatccgaaatatggcgaacgagcttctcaggcaacagaactcacgcgtcaaaagtcggttgctgaagaagccgccgaacttgtcgaccagcggaaagctcatcttctcgcgggcttaccgaccaccggtggcggatcgacacagcatgttgacgaccaagatgactccacggagactcctttattcctcggaatcggcactggtggaggcgatgattttgccactgcagaccccgaagctaacctggtttctgactctccaactggtatcgatttcgatgtgtatgatcgagcgtttgaaacagaaatcaagcggatcaggtcggatagaaagaagaaccgagcatggacttacatgaccaagctcgtaggcgagcaggagatggacaagtatcgccaagacgaatgcatgatcatcgaggcgggcaaatccatagcgtccaatgcctacacacgtggcctcgctcacataaacgacgcccgccgagtaactcacgatgggcaatggcggaaagagagcgaggaaggagtacatagagtcatcgaaagcgcgaaagaaacgaagaacaaatttgcagatctcgttgcttcgatgacgaaggagctcaaggagaaagcgacgaataaagaaacaaaggattagtaggagtaatgcagtacatcattgcgtccgcggaaattttgcacggcaacgaaggcgttggagtgggtacaatggcaggaccaagtagatatatcctgagtttttttttttggaaggggtcttctatccaagcgaatacgatgattattttgccaaagaaagttgaaatcaagcaacctgaaatgaattacgtcctcataacgcgatattgagcgatgactgtgatgatgagttcgtatgctgtaacaacgcgaccatgccttccctaatttgctggtaattacaaggccgagaggctatctcgactacggagacatccatgctt

SEQ ID NO: 17075 - DNA, 690 bp, Muscodor strobelii
  misc_feature: SGI cDNA ID NO. 565698
  misc_feature: Encodes the peptide sequence at SEQ ID NO 17076
atgtcgttagtccaaaattcggacgtaggcactgtcgacgccaatgctatgcccgcctcttccttccttgtcaagcttccctgtgagatcaaggttatgatcttcaagcaacttcccgacgcgcaatcgatctcggctttggccggcacctgtggaacttacaagtgtgtttatcaacgccatcggagctcaatccatcgttgcgttgctatgcacatcactgcacaagcgagcggatatcccgacgcaaaactcgcgcgagtttgcttggcagcggcgcgctacagagtcaaatggaaccccatggagatcgaacgacctcgcatgcttgtggatgagttctcaagtgatgacctcaatacattgaaagataccatcactaccgaacttatggtcgcacagtcggcgactcaaaaacttttccgcttcagtagcaaagctcatgagcagctcggaggccggccattggatcaagaggcaactgagaggaataaacttcgtgtcttaagaatggcgattatcatcagagcagtcttggagaacttagcgcatagacggctcgcacgctggtcatcgctccccaagagccggcggggagtaaggttattagctttccgaaatctcatgctatcgccatccatgaccggtatgtctctttcagaacatttcgaccccaagctcctacgctaa

SEQ ID NO: 17076 - protein, 229 aa, Muscodor strobelii
  misc_feature: SGI Peptide ID NO. 565698
MSLVQNSDVGTVDANAMPASSFLVKLPCEIKVMIFKQLPDAQSISALAGTCGTYKCVYQRHRSSIHRCVAMHITAQASGYPDAKLARVCLAAARYRVKWNPMEIERPRMLVDEFSSDDLNTLKDTITTELMVAQSATQKLFRFSSKAHEQLGGRPLDQEATERNKLRVLRMAIIIRAVLENLAHRRLARWSSLPKSRRGVRLLAFRNLMLSPSMTGMSLSEHFDPKLLR

SEQ ID NO: 17077 - DNA, 511 bp, Muscodor strobelii
  misc_feature: SGI EST ID NO. CUFF.40227.0
  misc_feature: Variant of the nucleotide sequence at SEQ ID NO 17075
ctaccaccacatcatagatatcatcgtgagatctcaactctaccatcctctcaactctaccatcctctcaactctaccatcctctcaactctaccatcctctcaactctaccatcctctcaactctaccatcctctcaactctaccatcctctcaactctaccatcctctcaactctacgtcatcttcagccttacacccactgcagccatgtcgttagtccaaaattcggacgtaggcactgtcgacgccaatgctatgcccgcctcttccttccttgtcaagcttccctgtgagatcaaggttatgatcttcaagcaacttcccgacgcgcaatcgatctcggctttggccggcacctgtggaacttacaagtgtgtttatcaacgccatcggagctcaatccatcgttgcgttgctatgcacatcactgcacaagcgagcggatatcccgacgcaaaactcgcgcgagtttgcttggcagcggcgcgctacagagtcaaatggaaccc

SEQ ID NO: 17078 - DNA, 1524 bp, Muscodor strobelii
  misc_feature: SGI cDNA ID NO. 565699
  misc_feature: Encodes the peptide sequence at SEQ ID NO 17079
atgtcgattagcatctctagagcgcagaaggcgctccatcttctcagttgcatcctctccgttacggccgccagtatctcgctcccagcgatccccgacgctgaagcagtggcagcagcagctaaggttcctaccaatttcaacttaagccaatgctcaacaggcaacctgtctcatgtgggcttctttcccgctgtggtcgattacgatactttcaatgggaactggagcgatacaagtcagaccttcttacagcagtaccatattatcgacaagtactacaagccaggtgggccgatcctattctggcagggtgccgagggccctctactctgtctagacacgttcggctggtatttagacctagtcaaagagcttggtgcaatgtacgtgcagatcgagcatcgatatttcggtgttagtgtgccgcatggtttgaatgcatccgatccggcgttgtgggatccagccttactcaaagacttaagccttgatttcatcctcaaagataccgttgcactacttcgatggatcaaggaggttcgataccctgacgcaaaacattccaaaatcattaataccggtggttcttattccggcgtacttgctactctctcccgtctgcgatatcctgattatttctacataacctacgcaggtggatttcctactcacttcgtcaccgaccctgaagattcgcgggctgacggctggtttgcttggatcaattccctttggtacgatttatctccagcctcggcaaagaaagtgaagagcggctttcaggagattcgtcgacgatttgcaacagctcagacggatgggttgaaagaggagctgaatctgtgcactccgatcaccagcaccaaggatttgtatgagctcatcggtagcattggacagattcatattgctacaagccagttaaatcacgctggatataatttcccactttacgccacgatcaatgccactctaaaggcagacactccacttcaagctgtcgccgagtcgattcgaatagggattaacgcccgcggacaagttccatgttttcagtggaggcagatgcctgacgcagttgacccttttcgatatctttcttgtaccctcgtaccgcagacagcaatggagacgacagccgactctatttggggggagcatcgcattgaccgttctctgaagcacatcattgaccctatctgcaaagccgccttcgggattgaatccattgacggcgggagcaaatacacaggcaaccttggattggatcgtgaccatctgcgtaacatgacacgaacggtctttacatttggaatgcaggatgcaacgtctgcgtttgtgcctgtgccatggagactgccaatggaccgtgagtcagcgcggatattctggatgtcaggtgctgctcatgggtcagaggcatatcctcctgatcctcgcgaccctgattctgttgttgagacccgagccacaatactaaacttatttcgatattggcttcaggaaaccggcgacgattga

SEQ ID NO: 17079 - protein, 507 aa, Muscodor strobelii
  misc_feature: SGI Peptide ID NO. 565699
  misc_feature (70)..(493): Pfam Id: PF05577 Pfam Desc: Serine carboxypeptidase S28
  misc_feature (80)..(212): Pfam Id: PF05577 Pfam Desc: Serine carboxypeptidase S28
  misc_feature (62)..(503): NCBI GI: 221127544 Blast Desc: : similar to prolylcarboxypeptidase [Hydra magnipapillata]
  misc_feature (82)..(356): NCBI GI: 118404640 Blast Desc: prolylcarboxypeptidase [Xenopus (Silurana) tropicalis] gi|115313632|gb|AAI23913.1| prolylcarboxypeptidase (angiotensinase C) [Xenopus (Silurana) tropicalis]
  misc_feature (59)..(501): NCBI GI: 156403949 Blast Desc: [Nematostella vectensis] gi|156227303|gb|EDO48107.1| [Nematostella vectensis]
  misc_feature (59)..(503): NCBI GI: 198425804 Blast Desc: : similar to Dipeptidyl-peptidase 2 precursor (Dipeptidyl-peptidase II) (DPP II) (Dipeptidyl aminopeptidase II) (Quiescent cell proline dipeptidase) (Dipeptidyl peptidase 7)
  misc_feature (37)..(340): NCBI GI: 194213387 Blast Desc: : prolylcarboxypeptidase (angiotensinase C) [Equus caballus]
  misc_feature (60)..(506): NCBI GI: 114639541 Blast Desc: isoform 7 [Pan troglodytes]
  misc_feature (24)..(506): NCBI GI: 109108094 Blast Desc: : prolylcarboxypeptidase isoform 7 [Macaca mulatta]
  misc_feature (60)..(506): NCBI GI: 109108096 Blast Desc: : prolylcarboxypeptidase isoform 8 [Macaca mulatta]
  misc_feature (26)..(353): NCBI GI: 73988045 Blast Desc: : similar to Lysosomal Pro-X carboxypeptidase precursor (Prolylcarboxypeptidase) (PRCP) (Proline carboxypeptidase) (Angiotensinase C) (Lysosomal carboxypeptidase
  misc_feature (82)..(503): NCBI GI: 47209068 Blast Desc: protein product [Tetraodon nigroviridis]
  misc_feature (60)..(506): SWISSPROT Homolog: EC 3.4.16.2 Lysosomal Pro-Xaa carboxypeptidase
MSISISRAQKALHLLSCILSVTAASISLPAIPDAEAVAAAAKVPTNFNLSQCSTGNLSHVGFFPAVVDYDTFNGNWSDTSQTFLQQYHIIDKYYKPGGPILFWQGAEGPLLCLDTFGWYLDLVKELGAMYVQIEHRYFGVSVPHGLNASDPALWDPALLKDLSLDFILKDTVALLRWIKEVRYPDAKHSKIINTGGSYSGVLATLSRLRYPDYFYITYAGGFPTHFVTDPEDSRADGWFAWINSLWYDLSPASAKKVKSGFQEIRRRFATAQTDGLKEELNLCTPITSTKDLYELIGSIGQIHIATSQLNHAGYNFPLYATINATLKADTPLQAVAESIRIGINARGQVPCFQWRQMPDAVDPFRYLSCTLVPQTAMETTADSIWGEHRIDRSLKHIIDPICKAAFGIESIDGGSKYTGNLGLDRDHLRNMTRTVFTFGMQDATSAFVPVPWRLPMDRESARIFWMSGAAHGSEAYPPDPRDPDSVVETRATILNLFRYWLQETGDD

SEQ ID NO: 17080 - DNA, 1461 bp, Muscodor strobelii
  misc_feature: SGI cDNA ID NO. 565700
  misc_feature: Reduced expression when VOC is produced
  misc_feature: Encodes the peptide sequence at SEQ ID NO 17081
atgtcgcactcgggggagaagtctacttcccctggtgcttctaagcagtcctcgatcaagtccgttgaacttccttcacggtcgtctagtgtcagggcgcaaaatgtgcaggctagcaacggcgtcccttcgccggacggtcacccgaagcaagccgagaaatcctcaatcaagaatcgcttgactaggatgttctccaataaggacgacatacccaaacagccgattgcagatgtgtcgcagccctcgaagcgcacagttcacagcccaggttcacctccgtctggtactaacacgcctgccaaatccgtcgccgctggtcgcacgccggccaatgacgtagctccgcagaaggcggcgcatccagtcacacgctatgcggtcaatcccaacgtcccgggtggccatgagcatcacctcaaggctagtaggaggcaggagaagctctctgatatgtggaagggcctactgggcaggaaacacgaagtacccgaggccgatttgtctcttgtttctagttgggtcgacactttgaagcaagagaaggattcgttagccaacgataagaggggcggtcccaaccacagcgccacgctggtggagaagtatggcaagtgtcaagaagtggttggacgtggtgcattcggcattgtgagaatctcccacaagaagatggagactggggagaagctcttcgctgtcaaggaattccgacgccggcccgaggagagcgagaagaaatacagcaagcgccttactgcagagttttgtatttcttcatcattgcgccatcccaatgttattcacactttggatctgctgcaagaccagaaaggagactattgcgaggtgatggaatactgctcaggtggcgatttgtataccttggtcctgactgctggcaagctggaggttctggaggcggattgctacttcaagcaaatgatgcgcggtgttgaatacatgcacgagatgggagtggcgcatcgagacctgaagcctgaaaatctacttcttacctgtcacggcgcgttgaagatcaccgattttggcaatggcgagtgcttccggatggcgtgggaaaacagcgcgcacatggtttctggcctgtgcggttccgccccttatattgcacctgaggagtatgtcgacaaagagttcgacgctcgcgccgtagacatctgggcatgtggcgtaatctacatggcaatgcgaactgggcggcacctatggcgccttgccaagaaggacgatgatgagttctatgaacgttacctcgagggtcgacgtgacgaagaagggtacggacccattgagtctctgcatcgggctcgatgccgtaatgttatctactccattttagaccctaacccaacccggcgcattacagcgtcacaggttctaaaatccgaatggggtcgagaaatcaaactctgtaaagctggcgaggaaggcctataa

SEQ ID NO: 17081 - protein, 486 aa, Muscodor strobelii
  misc_feature: SGI Peptide ID NO. 565700
  misc_feature (204)..(473): Pfam Id: PF00069 Pfam Desc: Protein kinase domain
  misc_feature (207)..(351): Pfam Id: PF07714 Pfam Desc: Protein tyrosine kinase
  misc_feature (9)..(486): NCBI GI: 85109590 Blast Desc: serine/threonine-protein kinase hal4 [Neurospora crassa OR74A] gi|28924638|gb|EAA33755.1| serine/threonine-protein kinase hal4 [Neurospora crassa OR74A]
  misc_feature (8)..(486): NCBI GI: 39977035 Blast Desc: MGG_06420 [Magnaporthe grisea 70-15] gi|145016166|gb|EDK00656.1| MGG_06420 [Magnaporthe grisea 70-15]
  misc_feature (27)..(486): NCBI GI: 256733148 Blast Desc: [Nectria haematococca mpVI 77-13-4]
  misc_feature (7)..(486): NCBI GI: 171686454 Blast Desc: protein product [Podospora anserina] gi|170943188|emb|CAP68841.1| protein product [Podospora anserina]
  misc_feature (43)..(486): NCBI GI: 261358350 Blast Desc: serine/threonine-protein kinase hal4 [Verticillium albo-atrum VaMs.102]
  misc_feature (5)..(486): NCBI GI: 156065145 Blast Desc: conserved [Sclerotinia sclerotiorum 1980] gi|154691442|gb|EDN91180.1| conserved [Sclerotinia sclerotiorum 1980]
  misc_feature (5)..(481): NCBI GI: 154311465 Blast Desc: BC1G_06585 [Botryotinia fuckeliana B05.10] gi|150850982|gb|EDN26175.1| BC1G_06585 [Botryotinia fuckeliana B05.10]
  misc_feature (7)..(485): NCBI GI: 145253817 Blast Desc: An17g01925 [Aspergillus niger] gi|134083994|emb|CAK49149.1| protein product [Aspergillus niger]
  misc_feature (18)..(486): NCBI GI: 261197588 Blast Desc: serine/threonine protein kinase [Ajellomyces dermatitidis SLH14081] gi|239595159|gb|EEQ77740.1| serine/threonine protein kinase [Ajellomyces dermatitidis
  misc_feature (49)..(485): NCBI GI: 242793872 Blast Desc: serine/threonine protein kinase, [Talaromyces stipitatus ATCC 10500] gi|218718842|gb|EED18262.1| serine/threonine protein kinase, [Talaromyces stipitatus ATCC
  misc_feature (136)..(486): SWISSPROT Homolog: EC 2.7.11.1 Non-specific serine/threonine protein kinase
  misc_feature: Useful for introducing or modulating the production of volatile compounds
MSHSGEKSTSPGASKQSSIKSVELPSRSSSVRAQNVQASNGVPSPDGHPKQAEKSSIKNRLTRMFSNKDDIPKQPIADVSQPSKRTVHSPGSPPSGTNTPAKSVAAGRTPANDVAPQKAAHPVTRYAVNPNVPGGHEHHLKASRRQEKLSDMWKGLLGRKHEVPEADLSLVSSWVDTLKQEKDSLANDKRGGPNHSATLVEKYGKCQEVVGRGAFGIVRISHKKMETGEKLFAVKEFRRRPEESEKKYSKRLTAEFCISSSLRHPNVIHTLDLLQDQKGDYCEVMEYCSGGDLYTLVLTAGKLEVLEADCYFKQMMRGVEYMHEMGVAHRDLKPENLLLTCHGALKITDFGNGECFRMAWENSAHMVSGLCGSAPYIAPEEYVDKEFDARAVDIWACGVIYMAMRTGRHLWRLAKKDDDEFYERYLEGRRDEEGYGPIESLHRARCRNVIYSILDPNPTRRITASQVLKSEWGREIKLCKAGEEGL

SEQ ID NO: 17082 - DNA, 4254 bp, Muscodor strobelii
  misc_feature: SGI EST ID NO. CUFF.40293.0
  misc_feature: Variant of the nucleotide sequence at SEQ ID NO 17080
cctagctttgccatgcatcccatgatgcattcaccattgcatatccttttttgtgtcttcctaactggggtattatttgaggtacctctgggtgtctttcatcgagaacagtacaaataggcaatctagttgcctcctactagcacacgctcccctccttccatctcatccccatcaaactgatgatctcaagtttcttcgaatcaacagattgctagtcatttgagatcctactaccattagctttgttccttagccgttgcagagatgcactcgcctgctactacgtctatacatccataagaacacccattactgctgacaatgaccaactcgattctcattctaaaaaggagtcgcgtcaacttgcacctatttgacctctaacatttgctgggaacccgctccgtggttcctattgccgtgatttagaaatcctgcttgtcacctgtcacttattcagcaaaaaaatatcgaagcatagtcatacctaccttgcaatagacaccacctcgtcagtctcgaacagctttccagcaatagtgggccagtggccacggcacattccactgatcagactgcttgttgaaccatgacaggctaagctcttctgctcgcactcagcatttactttaggagacctactcgtctacctcgtgtagaccatattagaacattgattgcctccacattaccaagcatcagaaatagcaaaggctacaacgagaaggaaacggactggcccctcatccggctcctgtactttgcaaaagcgcaggagaagatcctgcaagcacactgcatcgacagactatagtcgactcaaacgtacacagaatccccccttgaactctgcttgacatatccatcggagaaagcacccattaggagccatcgctgctggcccaccagagcccactggaacccactagagcgacgcatcattacttacacagagccctaccacttatttgcttcagggcatgtgccgagtcgcccattccgccaacttctccgcctgcgccgtctttgctgtgtcttcgcgggcatcttggcgaggagccactgcacgtacccttaccctagacggcggatctcgggcagaggccactggatttgcactgatacctacgggatctacaggccctgcacgccaccgacaataacccactgaaaggttaacctttctcctgggtattgcctgggcgttggtatattaccaatcccaccggctcggagtcttgaatcttccaggtcacagccgttagagcgctacatttagcgtgggccctcgaactgttacctactacctagcaccaaggccagctagcaccacccactatacctccctagtacgaccccctaggggccctacaaattcgccctgggtcccgccccctctgttcgcaccctcccctccagctcttgatttcccttccctttttcttctttctttctttttcttctccttctgctccgtggttacggaccagacagacccgagcgcgtccctgttttgcacatcgtctacttcgtcgccaaccccgggcctagcccaccgccaaaggcgacagcagtgtcgccgccctcgcctcgtcctctgctgcgtgctactgagtggcccaaggccccaagtctcgtcaaccccgctgcatcccctgcagctgggcgcatccatccaccatctgcgccgaggcccgtagtagccgcattccaacgacgccattgaactgttgcagacatgtcgcactcgggggagaagtctacttcccctggtgcttctaagcagtcctcgatcaagtccgttgaacttccttcacggtcgtctagtgtcagggcgcaaaatgtgcaggctagcaacggcgtcccttcgccggacggtcacccgaagcaagccgagaaatcctcaatcaagaatcgcttgactaggatgttctccaataaggacgacatacccaaacagccgattgcagatgtgtcgcagccctcgaagcgcacagttcacagcccaggttcacctccgtctggtactaacacgcctgccaaatccgtcgccgctggtcgcacgccggccaatgacgtagctccgcagaaggcggcgcatccagtcacacgctatgcggtcaatcccaacgtcccgggtggccatgagcatcacctcaaggctagtaggaggcaggagaagctctctgatatgtggaagggcctactgggcaggaaacacgaagtacccgaggccgatttgtctcttgtttctagttgggtcgacactttgaagcaagagaaggattcgttagccaacgataagaggggcggtcccaaccacagcgccacgctggtggagaagtatggcaagtgtcaagaagtggttggacgtggtgcattcggcattgtgagaatctcccacaagaagatggagactggggagaagctcttcgctgtcaaggaattccgacgccggcccgaggagagcgagaagaaatacagcaagcgccttactgcagagttttgtatttcttcatcattgcgccatcccaatgttattcacactttggatctgctgcaagaccagaaaggagactattgcgaggtgatggaatactgctcaggtggcgatttgtataccttggtcctgactgctggcaagctggaggttctggaggcggattgctacttcaagcaaatgatgcgcggtgttgaatacatgcacgagatgggagtggcgcatcgagacctgaagcctgaaaatctacttcttacctgtcacggcgcgttgaagatcaccgattttggcaatggcgagtgcttccggatggcgtgggaaaacagcgcgcacatggtttctggcctgtgcggttccgccccttatattgcacctgaggagtatgtcgacaaagagttcgacgctcgcgccgtagacatctgggcatgtggcgtaatctacatggcaatgcgaactgggcggcacctatggcgccttgccaagaaggacgatgatgagttctatgaacgttacctcgagggtcgacgtgacgaagaagggtacggacccattgagtctctgcatcgggctcgatgccgtaatgttatctactccattttagaccctaacccaacccggcgcattacagcgtcacaggttctaaaatccgaatggggtcgagaaatcaaactctgtaaagctggcgaggaaggcctataagcctgcgcatcagtagactcgagttgagtatcagtacatgcggcttcgacagcctctgagagacgcaatgggggtgatgcgcgtcggtatacagcgcctcattctgataatgaggatctatcgctgctttctggcacggagttcggcgattcatttctaacaacatggcattcattgcgaattctttccattacgcctcttttcacgaagacccacgaccaaaagaacgatgcataaatggcgcactatccagcaatttgggagctgagatgcgccccgcgccacgcgagcggacgtcaacgagatgatcctattcttgtaataataccagagacatactcgcatcaaatcgacggtaaaacagtaataggactggcacatcaattggattcagcggtgcgttaggatgggcaggttggtcatctcgatccccaatcaccagctcaaatatagatctgcgcgactgagaaaggagaattctgggcttgaccccttagcatgctagttatatgagctaagctgaagcatgtagcacgactttgacgaatcacttgtcgggtcctttacatgctctttccgacttctctgtgcgagccgtgattatgtcttgcatgtttgcacatccgtagcttagtagatcactggcaaactctcatacatggatcgtactcaagtctcctatgagctaagttataagactggcacgctttgctaagatttggactcaatccaacaccgaggcagtagggcgagtctcatcatgctagatgattaaggtgtttgaattcagatggactgtatcttcttcatttacgctcaagacgcggtctcaacaacgtcgagtagccacgggtccccgtttcgaccatttgggcaactctagttactaggtaagttttgaaattcactaacccgtgaggagatctggttcctgccagaacccgtgctctgaaggattgagggagtcaagtgtaggatgttcaaatagtcgagaaccaagtttgtttcactagaagttctatgctatagaaaaattatctcgtcaatagact

SEQ ID NO: 17083 - DNA, 1359 bp, Muscodor strobelii
  misc_feature: SGI cDNA ID NO. 565701
  misc_feature: Reduced expression when VOC is produced
  misc_feature: Encodes the peptide sequence at SEQ ID NO 17084
atgagtaccgcaatcgcgatggccccctctcctgctcctcacgacaggccggcatatactgagttggcgcctgctgtgagtgctgctcaaggagcctcgttgccagcctcgtcgccttcagctccacgcacggcagccccttcggccacaccgaacacacgcctctataccgccaccagcagcaacacaccagctcagcgctccacgagcgacagtcccacgagggccggagctcagcagcccaaatcctctccacccagcactcttcgaaatgtgtccggcccaaagataattgtgaaaaaagagccgggatcgcccgagatcccgaccaccactcgccatcggccacgaaagctagatctctccaaaaacaatcttactggctcaggcgcggctaccgcacggccagccttaggcggacgcgacgggctcggcattcaagaagtgggattggcgtgcttatcacctggttttgtcacccaggatcctatcatgaaagaacaacttcagcaaagcctgaatgtcagggagcaacagcgacgcatcatcgaagcgagactccagcaacagtctgccaaaggagacggacctgatacgggcaaagagaaagactcgctgggtcaatttgcagccaagactcccggcatatcatcgagacggaacaaggcaccaccaggcctcagcattgtcgcaccgtcgcacgagcaatttgcaaacgaacgagtaatccagtccgctccgcttgggcagacgttcacggggcggcataatgctcaccccctgaccagacaaatcgcgaaccagccttcgaatctgtcaaatacgtctcacattcaccacgtacctgctactcagactactaatcggctgcctcccatttcggacgtcttcgctaatcaaggattacaatctcatggtgaacagcccagcagccgttctctgtaccctaacccgagccacgctcctttaacgtcccctggccatccgcccccagcctttgcgcagccacctcagtctggccggccgagggagtacaagtctgcagaggaggctcagcacgagttgtccggcggccgccctgaattgctgcccaagttggtccattacaccggccatcaaccaccgacacctccatccccacgcacagcacagcatatccaggacggcagccggagtgcgagtaagcgacgcacccgggctgaatacgaagaaggtgggagtccacccctcggtcatgggcccgctacgacacggcggggtcctttcggagccggacgagacagccctgaaacacagcgacagaagcgtgaagaatttcttcgcatctgcgagagggcatgggatctgttccactcgtga

SEQ ID NO: 17084 - protein, 452 aa, Muscodor strobelii
  misc_feature: SGI Peptide ID NO. 565701
  misc_feature (95)..(452): NCBI GI: 256732706 Blast Desc: NECHADRAFT_38462 [Nectria haematococca mpVI 77-13-4]
  misc_feature (7)..(452): NCBI GI: 145608726 Blast Desc: MGG_06419 [Magnaporthe grisea 70-15] gi|145016167|gb|EDK00657.1| MGG_06419 [Magnaporthe grisea 70-15]
  misc_feature (1)..(452): NCBI GI: 154311463 Blast Desc: BC1G_06584 [Botryotinia fuckeliana B05.10] gi|150850981|gb|EDN26174.1| BC1G_06584 [Botryotinia fuckeliana B05.10]
  misc_feature (1)..(452): NCBI GI: 156065149 Blast Desc: SS1G_00585 [Sclerotinia sclerotiorum 1980] gi|154691444|gb|EDN91182.1| SS1G_00585 [Sclerotinia sclerotiorum 1980]
  misc_feature (1)..(452): NCBI GI: 46125121 Blast Desc: FG06938.1 [Gibberella zeae PH-1]
  misc_feature (1)..(452): NCBI GI: 171686470 Blast Desc: protein product [Podospora anserina] gi|170943196|emb|CAP68849.1| protein product [Podospora anserina]
  misc_feature (1)..(452): NCBI GI: 164429088 Blast Desc: NCU00420 [Neurospora crassa OR74A] gi|157072405|gb|EAA27448.2| conserved [Neurospora crassa OR74A]
  misc_feature (7)..(369): NCBI GI: 261358349 Blast Desc: conserved [Verticillium albo-atrum VaMs.102]
  misc_feature (57)..(452): NCBI GI: 119467718 Blast Desc: NFIA_051130 [Neosartorya fischeri NRRL 181] gi|119405817|gb|EAW15768.1| conserved [Neosartorya fischeri NRRL 181]
  misc_feature (82)..(452): NCBI GI: 70984200 Blast Desc: conserved [Aspergillus fumigatus Af293] gi|66845245|gb|EAL85580.1| conserved [Aspergillus fumigatus Af293]
  misc_feature: Useful for introducing or modulating the production of volatile compounds
MSTAIAMAPSPAPHDRPAYTELAPAVSAAQGASLPASSPSAPRTAAPSATPNTRLYTATSSNTPAQRSTSDSPTRAGAQQPKSSPPSTLRNVSGPKIIVKKEPGSPEIPTTTRHRPRKLDLSKNNLTGSGAATARPALGGRDGLGIQEVGLACLSPGFVTQDPIMKEQLQQSLNVREQQRRIIEARLQQQSAKGDGPDTGKEKDSLGQFAAKTPGISSRRNKAPPGLSIVAPSHEQFANERVIQSAPLGQTFTGRHNAHPLTRQIANQPSNLSNTSHIHHVPATQTTNRLPPISDVFANQGLQSHGEQPSSRSLYPNPSHAPLTSPGHPPPAFAQPPQSGRPREYKSAEEAQHELSGGRPELLPKLVHYTGHQPPTPPSPRTAQHIQDGSRSASKRRTRAEYEEGGSPPLGHGPATTRRGPFGAGRDSPETQRQKREEFLRICERAWDLFHS

SEQ ID NO: 17085 - DNA, 3460 bp, Muscodor strobelii
  misc_feature: SGI EST ID NO. CUFF.40443.1
  misc_feature: Variant of the nucleotide sequence at SEQ ID NO 17083
gaataagtgagggttgatgtcgctatgattgtgaggtgaagggcctgtaccagtaccagacgagctagagtctcgtagaatgcgtcgtgcagcgctgccgacgcacccccctggcggcccatgccaattcccaacacacaccccctgtcggcagcccaccctctcctgtccgcccacttcctcctctcgcgcccgtcttttcgagtctggttctagcccgattgctccaagccgccctctcccacctccaacccccctactcgactcctgtcgtgtactgtactgtactctagcctcccatcccccatccccgtctcccgtgccctacgtgtaatatctcgaagacgccttgcctttgccgtgcttcaccattcttttcctccctctctttctctccccaccgcctcgacaacacccctcgagtcgctctcttgctcagttcgaactaaggcctggaagaagccgagtctgcgcccgctcgcttgtcttgtcttgtcttgttcttcgttgacttgcagatggtaatcgtccgtggtcgctattaatcagccagtcgtttccgttgcctgctctgtccgcgagtctcgcgcgcctgctctgcccgtccgccgtgtcgaatcgtaatatctgcactctcgacagaacttgagacattgctgtacttatctcggcgacttgcccacctgtgtaacggcaatttcaccgccctgcagtcgcatttgcaaattccctgcagcccactcggacaggatcagggaaagagggccattcttcccattcgttcattccctcccgccacgaagacacggcgcccgagttcaccagctctcggagcaccacccgatagcataacccgtataccgccctactttgggaattactatttacgaagcgaaggaagtggtcgaaacgccaaattcgccatttggagagcaacttactggttcattttccgtcgagaaaagacgggtgtgtgtaaatcactccagggacgtgtacctcgagtgttgtcagggatcagcattgacattcactttgagcgggttcggttttcgttggtgtacgagaatcgggaatccaattcgcgctcttttgtcgtgtttctggaccgggagtcccccagtttcgcaaactgcacggtgccggctcgcacttcgtattggcacattggcccattcaaccgggtccttcgtcctccaccagcaaaggactccagacacagcgaagtctgcgaaaggagggcttgttgagagatccactacacaaccttcggggcgttctaatttcatcatgagtaccgcaatcgcgatggccccctctcctgctcctcacgacaggccggcatatactgagttggcgcctgctgtgagtgctgctcaaggagcctcgttgccagcctcgtcgccttcagctccacgcacggcagccccttcggccacaccgaacacacgcctctataccgccaccagcagcaacacaccagctcagcgctccacgagcgacagtcccacgagggccggagctcagcagcccaaatcctctccacccagcactcttcgaaatgtgtccggcccaaagataattgtgaaaaaagagccgggatcgcccgagatcccgaccaccactcgccatcggccacgaaagctagatctctccaaaaacaatcttactggctcaggcgcggctaccgcacggccagccttaggcggacgcgacgggctcggcattcaagaagtgggattggcgtgcttatcacctggttttgtcacccaggatcctatcatgaaagaacaacttcagcaaagcctgaatgtcagggagcaacagcgacgcatcatcgaagcgagactccagcaacagtctgccaaaggagacggacctgatacgggcaaagagaaagactcgctgggtcaatttgcagccaagactcccggcatatcatcgagacggaacaaggcaccaccaggcctcagcattgtcgcaccgtcgcacgagcaatttgcaaacgaacgagtaatccagtccgctccgcttgggcagacgttcacggggcggcataatgctcaccccctgaccagacaaatcgcgaaccagccttcgaatctgtcaaatacgtctcacattcaccacgtacctgctactcagactactaatcggctgcctcccatttcggacgtcttcgctaatcaaggattacaatctcatggtgaacagcccagcagccgttctctgtaccctaacccgagccacgctcctttaacgtcccctggccatccgcccccagcctttgcgcagccacctcagtctggccggccgagggagtacaagtctgcagaggaggctcagcacgagttgtccggcggccgccctgaattgctgcccaagttggtccattacaccggccatcaaccaccgacacctccatccccacgcacagcacagcatatccaggacggcagccggagtgcgagtaagcgacgcacccgggctgaatacgaagaaggtgggagtccacccctcggtcatgggcccgctacgacacggcggggtcctttcggagccggacgagacagccctgaaacacagcgacagaagcgtgaagaatttcttcgcatctgcgagagggcatgggatctgttccactcgtgatttgatgtctctcaacagcaaatttactgatttaacgatataaatgctttgtttctcatattttgagctcctctgcaaagctctcgaaagacatataccccgatgatttcgaaacaaatggcagcacatggcgcatgaggagcgctaaaagctcggcagagcttatcgagcagctggtcttggcttcactacgagtacggcccaaagccaaacaaaacctctgctgtaaacacttgatgtgctacggatataatattttctagctatgagtttcgggtagttcgaaactgcggaaaaatctgggcgggcctcgacaggcgaagtccaggaggcaacgccagcattagtattcattagggaacatatagggattattcattcgcgtgttgtcctccgacactgacagcgaattttggcatcgagaaagggtgtgccattttctgtttcagaaacgacccaggtcgatataacaagatgggagtctcatgttgtggatgaagatgatgacgacgtgattacggccgctgcagacatatgatgatagtcggctgtcagcgtcgaggcggttcaaaacctcgcagttgtcactgtattggtcgtatttccgcaagagaaatcaacgaaagacgcacatggtgaccagtgtgtgagttgaatcccaaaggatgcaacgggctgcagcctattgcattgatgtatacataatatgacacttttcggacatatttatatcattcatatcattatctgttcatcgatgacttcgtacctttgaaataagtatgaatacagtttgagtgtatacgccgtt

SEQ ID NO: 17086 - DNA, 453 bp, Muscodor strobelii
  misc_feature: SGI cDNA ID NO. 565702
  misc_feature: Reduced expression when VOC is produced
  misc_feature: Encodes the peptide sequence at SEQ ID NO 17087
atgccaagcagaaccaaagaccccgttggagaagacgcgcccatggatgacgcagctccccaggcgtctgtcgagaatggcgatgtcatggatcaagatgcgccggaaggcaatgatcagagtcccgaagtcgaggaggaagaggaacctcaacgagtcaaaattttgaccggatctacacccactgctgcttccttcgagttcactaaggagggacacacacttggtaatgcgctacgatatattatcatgaagaaccccgatgtcgagttctgcgcctacgcgatccctcacccatctgaggagaagatgaacatcaggatccagacctacgacaccacaactgctaccgccgcgttggagaagggacttcaagatctcgaggatctgtgcgatgtcgtgtccgaagagttctggacgcagagagagaagtttgttgctgctggagtttag

SEQ ID NO: 17087 - protein, 150 aa, Muscodor strobelii
  misc_feature: SGI Peptide ID NO. 565702
  misc_feature (62)..(136): Pfam Id: PF01193 Pfam Desc: RNA polymerase Rpb3/Rpb11 dimerisation domain
  misc_feature (12)..(147): NCBI GI: 116208000 Blast Desc: CHGG_03293 [Chaetomium globosum CBS 148.51] gi|88183890|gb|EAQ91358.1| CHGG_03293 [Chaetomium globosum CBS 148.51]
  misc_feature (1)..(147): NCBI GI: 256733147 Blast Desc: [Nectria haematococca mpVI 77-13-4]
  misc_feature (1)..(147): NCBI GI: 46125119 Blast Desc: FG06937.1 [Gibberella zeae PH-1]
  misc_feature (29)..(147): NCBI GI: 212546343 Blast Desc: DNA-directed RNA polymerase I and III 14 KDA polypeptide [Penicillium marneffei ATCC 18224] gi|210064845|gb|EEA18940.1| DNA-directed RNA polymerase I and III
  misc_feature (52)..(145): NCBI GI: 85084361 Blast Desc: NCU00419 [Neurospora crassa OR74A] gi|28918394|gb|EAA28069.1| NCU00419 [Neurospora crassa OR74A]
  misc_feature (52)..(145): NCBI GI: 145608868 Blast Desc: MGG_06311 [Magnaporthe grisea 70-15] gi|145016292|gb|EDK00782.1| MGG_06311 [Magnaporthe grisea 70-15]
  misc_feature (18)..(148): NCBI GI: 145250191 Blast Desc: An15g00700 [Aspergillus niger] gi|134082123|emb|CAK42239.1| protein product [Aspergillus niger]
  misc_feature (47)..(147): NCBI GI: 242823716 Blast Desc: DNA-directed RNA polymerase I and III 14 KDA polypeptide [Talaromyces stipitatus ATCC 10500] gi|218713036|gb|EED12461.1| DNA-directed RNA polymerase I and III
  misc_feature (1)..(146): NCBI GI: 261358348 Blast Desc: DNA-directed RNA polymerases I and III subunit RPAC2 [Verticillium albo-atrum VaMs.102]
  misc_feature (47)..(148): NCBI GI: 115386266 Blast Desc: ATEG_06988 [Aspergillus terreus NIH2624] gi|114190672|gb|EAU32372.1| ATEG_06988 [Aspergillus terreus NIH2624]
  misc_feature: Useful for introducing or modulating the production of volatile compounds
MPSRTKDPVGEDAPMDDAAPQASVENGDVMDQDAPEGNDQSPEVEEEEEPQRVKILTGSTPTAASFEFTKEGHTLGNALRYIIMKNPDVEFCAYAIPHPSEEKMNIRIQTYDTTTATAALEKGLQDLEDLCDVVSEEFWTQREKFVAAGV

SEQ ID NO: 17088 - DNA, 763 bp, Muscodor strobelii
  misc_feature: SGI EST ID NO. CUFF.40372.0
  misc_feature: Variant of the nucleotide sequence at SEQ ID NO 17086
cgtcacggcaataagtcaacttatatctaagtttcacatatacaacaacacacacattaccattacctgcgcatttccatcgtgtcactcacttcacgatgccaagcagaaccaaagaccccgttggagaagacgcgcccatggatgacgcagctccccaggcgtctgtcgagaatggcgatgtcatggatcaagatgcgccggaaggcaatgatcagagtcccgaagtcgaggaggaagaggaacctcaacgagtcaaaattttgaccggatctacacccactgctgcttccttcgagttcactaaggagggacacacacttggtaatgcgctacgatatattatcatgaagaaccccgatgtcgagttctgcgcctacgcgatccctcacccatctgaggagaagatgaacatcaggatccagacctacgacaccacaactgctaccgccgcgttggagaagggacttcaagatctcgaggatctgtgcgatgtcgtgtccgaagagttctggacgcagagagagaagtttgttgctgctggagtttagcagccttcaccatcatggacggcccatctggctttaagagaaccatagcatgttgatcacaagaatcatcaggaaaactgcatcgggaggcgtttggcgcatgcacaaaaaggatgtctaattgaggaagaaataaaattccttgtttcgttctttccgctatgtacaatacaaggggttcttattgatgatacccatttctaattgcgacc

SEQ ID NO: 17089 - DNA, 375 bp, Muscodor strobelii
  misc_feature: SGI cDNA ID NO. 565703
  misc_feature: Encodes the peptide sequence at SEQ ID NO 17090
atggcggtgactcccacgcaattcgcacgcgtcacgcgctcatctgccaattggaacgatgcgaagcgacgagttcttgcggcttatagagaatggattcgagctgcccccgagatccagaccatgtactccgtcccattccccgtcgctaccatccgcacacggatgcgacaagaattcgagcgtcaccgatacgtgaacaagctgggtgttgtcgatgtgctcatcgctcagaataatgccgaatatcaggagatgatgaacttctggaagcaaaccacacacgtcatgtcatatttcaacaccgagaacttccgcggcgccgatagattaccaagcaatttcatggaaggtttcctagagggtcgcaattag

SEQ ID NO: 17090 - protein, 124 aa, Muscodor strobelii
  misc_feature: SGI Peptide ID NO. 565703
  misc_feature (20)..(88): Pfam Id: PF05347 Pfam Desc: Complex 1 protein (LYR family)
  misc_feature (1)..(124): NCBI GI: 39976815 Blast Desc: NADH-ubiquinone oxidoreductase B14 subunit [Magnaporthe grisea 70-15] gi|145016293|gb|EDK00783.1| NADH-ubiquinone oxidoreductase B14 subunit [Magnaporthe grisea
  misc_feature (1)..(124): NCBI GI: 46125117 Blast Desc: FG06936.1 [Gibberella zeae PH-1]
  misc_feature (1)..(124): NCBI GI: 261358347 Blast Desc: NADH-ubiquinone oxidoreductase 14.8 kDa subunit [Verticillium albo-atrum VaMs.102]
  misc_feature (1)..(124): NCBI GI: 171686474 Blast Desc: protein product [Podospora anserina] gi|170943198|emb|CAP68851.1| protein product [Podospora anserina]
  misc_feature (1)..(124): NCBI GI: 164429084 Blast Desc: NADH:ubiquinone oxidoreductase 14.8kD subunit [Neurospora crassa OR74A] gi|1171666|sp|P42114.3|NDUA6_NEUCR RecName: Full=NADH-ubiquinone oxidoreductase 14.8 kDa subunit;
  misc_feature (1)..(124): NCBI GI: 121703646 Blast Desc: NADH-ubiquinone oxidoreductase B14 subunit, [Aspergillus clavatus NRRL 1] gi|119398231|gb|EAW08661.1| NADH-ubiquinone oxidoreductase B14 subunit, [Aspergillus clavatus
  misc_feature (1)..(124): NCBI GI: 145250189 Blast Desc: An15g00690 [Aspergillus niger] gi|134082122|emb|CAK42238.1| protein product [Aspergillus niger]
  misc_feature (1)..(124): NCBI GI: 67540774 Blast Desc: AN6557.2 [Aspergillus nidulans FGSC A4] gi|40738707|gb|EAA57897.1| AN6557.2 [Aspergillus nidulans FGSC A4] gi|259480130|tpe|CBF70981.1| TPA: NADH-ubiquinone B14 FGSC
  misc_feature (1)..(124): NCBI GI: 261191001 Blast Desc: NADH-ubiquinone oxidoreductase 14.8 kDa subunit [Ajellomyces dermatitidis SLH14081] gi|239590953|gb|EEQ73534.1| NADH-ubiquinone oxidoreductase 14.8 kDa subunit [Ajellomyces
  misc_feature (1)..(124): NCBI GI: 226285694 Blast Desc: PAAG_03546 [Paracoccidioides brasiliensis Pb01]
MAVTPTQFARVTRSSANWNDAKRRVLAAYREWIRAAPEIQTMYSVPFPVATIRTRMRQEFERHRYVNKLGVVDVLIAQNNAEYQEMMNFWKQTTHVMSYFNTENFRGADRLPSNFMEGFLEGRN

SEQ ID NO: 17091 - DNA, 3968 bp, Muscodor strobelii
  misc_feature: SGI EST ID NO. CUFF.40373.1
  misc_feature: Variant of the nucleotide sequence at SEQ ID NO 17089
catataaccatcactagaaccgatgtatagaatgcaacaaaaacttcccatccgagtatctccttaacgtccatttcgaggatatccacgacgccttcgcagcagtaaagcgagaaaaaggcgagcacactgtaagtcatcctctacccacgcctcgcaatatcatcgtacaactaattaaaaacttagtattcgtgtttcgtagaaggctgcgaaagaaaatgcagcacaccgtacaagcgaagcagacatctgattgacaagcacatgtatccccctaattacttttttgccgtcaccaagtatggtatcgacggaagacagtccctcttgttagaaggtgggcatcggcgaagaaggtcttcgacggctactattgctagtgtttctaaagcgcctcaacctaagcaggaaacaggcctagctgaggaacgcaaaggagtggatcaaaatgcgccgcagagcgtttcttcgggagagggcaagacacaggcagaagcccctgacgttgagatggagggtttgacgggagccatgtcagcattgcagtttgtgcctcattctgtgaaatttgggcgcggtaggggtaaagcaggctttgccagacgatgatacatacgtgacatgagcgatcatgtcgtaatggacaatagcgaatgaaaatcatgagatcacgagcagaacgacgagaggcagagaggacaaaaccaaatcttggggtatcagcctagacgaagaaattgatcatttctcatacatgatacagaaatgcaatactagagccattctctttccgtccttccttccttccaattgaggtatctagcgcaaacttcatctacagaatgcaaatgcgcatactcggtgatgcgtgacctctgtttgaacgcccaaacgccgtaatgctgaatgccttgccgttaaaaatatcgcaatacaagtgctcaatcactagaagcacaacctcgacaaccacaagcaacacattgtacatcctgctcatccttgagttgtgccttgggcacccgacagatgcacgtagactggaagttcgtctcctttgtctgtatacatctcaagcagcacagctagaacacacatgtcagctatctctttgcgaacagacaccaaacaagtaaagacataccttctcatagccctgcttcttccacttcgcgatgagcatagcgtcggcatacccattcttcagcagccagtcgtacagctgtttgctgatggcctccttctcgtagtacagctcgtagacatagcgactgcgctggtgggcaatctgaaatatgggccattgcgcctggtgcttggggatgttgttcgtgggcgtgttctgggcgtctttcatcttgatggcgaagacttcaaggtcgtcccggatatcgtcgaagcctgcgggaggtttcttgcctcgcgcggcgtgagaccggacggcgggcatgatgtgtgacttggagtagtttgcagtacgggagggaaacttatggttcgaagagttggtggtggaagggcgagaagatgaagattgtgaaatcttgaggtggcgttgctagaggcacacccttgatgcaatgttcctgggagcaggcgaggcttcaatggtggggcaaggctgagataatatgcgccttgcttatcgcacctcttatcagtcagcgtgccaagctcccgccacattcaccttcatagcgacttaggtaagcaaattgtggctcacgcagccggactctcaattcgagatccacgactttagctccgacctgagctgcatcgacgtcgctcctatgaacgaaccctctcccctctaacatcgccaccagacacatcccccacgatggcggtgactcccacgcaattcgcacgcgtcacgcgctcatctgccaattggaacgatgcgaagcgacgagttcttgcggcttatagagaatggattcgagctgcccccgagatccagaccatgtactccgtcccattccccgtcgctaccatccgcacacggatgcgacaagaattcgagcgtcaccgatacgtgaacaagctgggtgttgtcgatgtgctcatcgctcagaataatgccgaatatcaggagatgatgaacttctggaagcaaaccacacacgtcatgtcatatttcaacaccgagaacttccgcggcgccgatagattaccaagcaatttcatggaaggtttcctagagggtcgcaattagaaatgggtatcatcaataagaaccccttgtattgtacatagcggaaagaacgaaacaaggaattttatttcttcctcaattagacatcctttttgtgcatgcgccaaacgcctcccgatgcagttttcctgatgattcttgtgatcaacatgctatggttctcttaaagccagatgggccgtccatgatggtgaaggctgctaaactccagcagcaacaaacttctctctctgcgtccagaactcttcggacacgacatcgcacagatcctcgagatcttgaagtcccttctccaacgcggcggtagcagttgtggtgtctgcaatggctctatttagctgtattcgaccaatgaatgatatttgtgatgggaacttaccgtaggtctggatcctgatgttcatcttctcctcagatgggtgagggatcgcgtaggcgcagaactcgacatcggggctgagacgatagttagctgtctgcttgtgcgagataacaaccgtaataaccgaagccatgactataaaagcaacaataacagctatggctcgtcccagcagcggttcatgatccattcgtgtcgtggtcagataagcactataggttagtgttgaatgagctgtgttatcaaagcagctgtcattgctttcgttgtctcgacggcttgagccatagctgctgttattgtttgaagagccgtagctgtcgttatcgcgctttgacgaaccatagctgttgtcgttgtccggcagcttgagtcatagctattctcattaaaagagccatcatgaaaattatcgcacttcattgagtcacagctatcattatctgtggaccatagattatcacgccttgacgagctgtagacatcttgattcgaaggcccgtagcttgtggcattgtccctcttaggagaatattccattagccagagggattgtcccttcattgttgcgatacctcgactcaaccataagtgttgttgtctggggcaccacaaatgttcttattgtcgtctccgtgttatcaagctgtgactgggggatactctcggcgcaacaatagctgtggttcgagccatcgggatgatgacaacagctgtaattcgtttggcaacgactcatatggttcccctaggtcgataatggtactgcctaataccaaaggtccaagccgtcgagataatgacaaaagctgtgggtggtttctccaaggaccctggctgtattcccagccatagcaataataacaacaaggacaacggctcattgaggcacaatgtcgattatagccgcacctcagccataacccaaaactaaaattgaaacttacttcttcatgataatatatcgtagcgcattaccaagtgtgtgtccctccttagtgaactcgaaggaagcagcagtgggtgtagatccggtcaactaccccatccccaatcagcactcataactagacttccactcttattcacactcataactcacaattttgactcgttgaggttcctcttcctcctcgacttcgggactctgatcattgccttccggcgcatcttgatccatgacatcgccattctcgacagacgcctggggagctgcgtcatccatgggcgcgtcttctccaacggggtctttggttctgcttggcatcgtgaagtgagtgacacgatggaaatgcgcaggtaatggtaatgtgtgtgttgttgtatatgtgaaacttagatataagttgacttattgccgtgacg

SEQ ID NO: 17092 - DNA, 450 bp, Muscodor strobelii
  misc_feature: SGI cDNA ID NO. 565704
  misc_feature: Encodes the peptide sequence at SEQ ID NO 17093
atgcccgccgtccggtctcacgccgcgcgaggcaagaaacctcccgcaggcttcgacgatatccgggacgaccttgaagtcttcgccatcaagatgaaagacgcccagaacacgcccacgaacaacatccccaagcaccaggcgcaatggcccatatttcagattgcccaccagcgcagtcgctatgtctacgagctgtactacgagaaggaggccatcagcaaacagctgtacgactggctgctgaagaatgggtatgccgacgctatgctcatcgcgaagtggaagaagcagggctatgagaagctgtgctgcttgagatgtatacagacaaaggagacgaacttccagtctacgtgcatctgtcgggtgcccaaggcacaactcaaggatgagcaggatgtacaatgtgttgcttgtggttgtcgaggttgtgcttctagtgattga

SEQ ID NO: 17093 - protein, 149 aa, Muscodor strobelii
  misc_feature: SGI Peptide ID NO. 565704
  misc_feature (1)..(147): Pfam Id: PF01125 Pfam Desc: G10 protein
  misc_feature (1)..(149): NCBI GI: 39976813 Blast Desc: conserved [Magnaporthe grisea 70-15] gi|145016294|gb|EDK00784.1| conserved [Magnaporthe grisea 70-15]
  misc_feature (1)..(149): NCBI GI: 116208004 Blast Desc: conserved [Chaetomium globosum CBS 148.51] gi|88183892|gb|EAQ91360.1| conserved [Chaetomium globosum CBS 148.51]
  misc_feature (1)..(149): NCBI GI: 85084353 Blast Desc: cell cycle control protein cwf14 [Neurospora crassa OR74A] gi|28918392|gb|EAA28067.1| cell cycle control protein cwf14 [Neurospora crassa OR74A]
  misc_feature (1)..(149): NCBI GI: 256733146 Blast Desc: [Nectria haematococca mpVI 77-13-4]
  misc_feature (1)..(149): NCBI GI: 261358346 Blast Desc: cell cycle control protein cwf14 [Verticillium albo-atrum VaMs.102]
  misc_feature (1)..(149): NCBI GI: 46125115 Blast Desc: FG06935.1 [Gibberella zeae PH-1]
  misc_feature (1)..(149): NCBI GI: 212536032 Blast Desc: cell cycle control protein Cwf14/Bud31, [Penicillium marneffei ATCC 18224] gi|210070571|gb|EEA24661.1| cell cycle control protein Cwf14/Bud31, [Penicillium marneffei ATCC 18224]
  misc_feature (1)..(149): NCBI GI: 242794700 Blast Desc: cell cycle control protein Cwf14/Bud31, [Talaromyces stipitatus ATCC 10500] gi|218719016|gb|EED18436.1| cell cycle control protein Cwf14/Bud31, [Talaromyces stipitatus ATCC 10500]
  misc_feature (17)..(149): NCBI GI: 171686476 Blast Desc: protein product [Podospora anserina] gi|170943199|emb|CAP68852.1| protein product [Podospora anserina]
  misc_feature (1)..(149): NCBI GI: 238503412 Blast Desc: cell cycle control protein Cwf14/Bud31, [Aspergillus flavus NRRL3357] gi|220690410|gb|EED46759.1| cell cycle control protein Cwf14/Bud31, [Aspergillus flavus NRRL3357]
MPAVRSHAARGKKPPAGFDDIRDDLEVFAIKMKDAQNTPTNNIPKHQAQWPIFQIAHQRSRYVYELYYEKEAISKQLYDWLLKNGYADAMLIAKWKKQGYEKLCCLRCIQTKETNFQSTCICRVPKAQLKDEQDVQCVACGCRGCASSD

SEQ ID NO: 17094 - DNA, 2342 bp, Muscodor strobelii
  misc_feature: SGI EST ID NO. CUFF.40372.2
  misc_feature: Variant of the nucleotide sequence at SEQ ID NO 17092
ctaggaaaccttccatgaaattgcttggtaatctatcggcgccgcggaagttctcggtgttgaaatatgacatgacgtgtgtggtttgcttccagaagttcatcatctcctatccagcaaataattaagtcagtaaccgtattctacctagttgtccctggataaccgatttgcgcggctcctaagaatctgacggacctgatattcggcattattctgagcgatgagcacatcgacaacacccagcttgttcacgtatcggtgacgctcgaattcttgtcgcatccgtgtgcggatggtagcgacggggaatgggacggagtacatggtctggatctcgggggcctgctcgaattagccaatggctcggatatcatcccattcaaaccgtatagatcgatagaaaataggttcgggtcggaattgggaggccatacagctcgaatccattctctataagccgcaagaactcgtcgcttcgcatcgttccaattggcagctacaaaggggaattagcgcggattcgagacagagggaggaggaacggacatgagcgcgtgacgcgtgcgaattgcgtgggagtcaccgccatcgtgggggatgtgtctggtggcgatgttagaggggagagggttcgttcataggagcgacgtcgatgcagctcaggtcggagctaaagtcgtggatctcgaattgagagtccggctgcgtgagccacaatttgcttacctaagtcgctatgaaggtgaatgtggcgggagcttggcacgctgactgataagaggtgcgataagcaaggcgcatattatctcagccttgccccaccattgaagcctcgcctgctcccaggaacattgcatcaagggtgtgcctctagcaacgccacctcaagatttcacaatcttcatcttctcgcccttccaccaccaactcttcgaaccataagtttccctcccgtactgcaaactactccaagtcacacatcatgcccgccgtccggtctcacgccgcgcgaggcaagaaacctcccgcaggcttcgacgatatccgggacgaccttgaagtcttcgccatcaagatgaaagacgcccagaacacgcccacgaacaacatccccaagcaccaggcgcaatggcccatatttcagattgcccaccagcgcagtcgctatgtctacgagctgtactacgagaaggaggccatcagcaaacagctgtacgactggctgctgaagaatgggtatgccgacgctatgctcatcgcgaagtggaagaagcagggctatgagaagctgtgctgcttgagatgtatacagacaaaggagacgaacttccagtctacgtgcatctgtcgggtgcccaaggcacaactcaaggatgagcaggatgtacaatgtgttgcttgtggttgtcgaggttgtgcttctagtgattgagcacttgtattgcgatatttttaacggcaaggcattcagcattacggcgtttgggcgttcaaacagaggtcacgcatcaccgagtatgcgcatttgcattctgtagatgaagtttgcgctagatacctcaattggaaggaaggaaggacggaaagagaatggctctagtattgcatttctgtatcatgtatgagaaatgatcaatttcttcgtctaggctgataccccaagatttggttttgtcctctctgcctctcgtcgttctgctcgtgatctcatgattttcattcgctattgtccattacgacatgatcgctcatgtcacgtatgtatcatcgtctggcaaagcctgctttacccctaccgcgcccaaatttcacagaatgaggcacaaactgcaatgctgacatggctcccgtcaaaccctccatctcaacgtcaggggcttctgcctgtgtcttgccctctcccgaagaaacgctctgcggcgcattttgatccactcctttgcgttcctcagctaggcctgtttcctgcttaggttgaggcgctttagaaacactagcaatagtagccgtcgaagaccttcttcgccgatgcccaccttctaacaagagggactgtcttccgtcgataccatacttggtgacggcaaaaaagtaattagggggatacatgtgcttgtcaatcagatgtctgcttcgcttgtacggtgtgctgcattttctttcgcagccttctacgaaacacgaatactaagtttttaattagttgtacgatgatattgcgaggcgtgggtagaggatgacttacagtgtgctcgcctttttctcgctttactgctgcgaaggcgtcgtggatatcctcgaaatggacgttaaggagatactcggatgggaagtttttg

SEQ ID NO: 17095 - DNA, 744 bp, Muscodor strobelii
  misc_feature: SGI cDNA ID NO. 565705
  misc_feature: Encodes the peptide sequence at SEQ ID NO 17096
atgaagcgctcacgcgagcccgaagaagacggcgacgagtcaaacgagactcagtcggagcaaacagggagctcagccaagatcacagaactcgatacatcggccgtcgataccagctcagaaatcgtcatgagatgctcactaccgccgcatcgggaagtgctgtccttcacgacatacggcgattatgcagcccattatagcaagaaccgatgtatagaatgcaacaaaaacttcccatccgagtatctccttaacgtccatttcgaggatatccacgacgccttcgcagcagtaaagcgagaaaaaggcgagcacacttattcgtgtttcgtagaaggctgcgaaagaaaatgcagcacaccgtacaagcgaagcagacatctgattgacaagcacatgtatccccctaattacttttttgccgtcaccaagtatggtatcgacggaagacagtccctcttgttagaaggtgggcatcggcgaagaaggtcttcgacggctactattgctagtgtttctaaagcgcctcaacctaagcaggaaacaggcctagctgaggaacgcaaaggagtggatcaaaatgcgccgcagagcgtttcttcgggagagggcaagacacaggcagaagcccctgacgttgagatggagggtttgacgggagccatgtcagcattgcagtttgtgcctcattctgtgaaatttgggcgcggtaggggtaaagcaggctttgccagacgatga

SEQ ID NO: 17096 - protein, 247 aa, Muscodor strobelii
  misc_feature: SGI Peptide ID NO. 565705
  misc_feature (1)..(246): NCBI GI: 46125113 Blast Desc: FG06934.1 [Gibberella zeae PH-1]
  misc_feature (1)..(247): NCBI GI: 256732704 Blast Desc: [Nectria haematococca mpVI 77-13-4]
  misc_feature (1)..(247): NCBI GI: 261358345 Blast Desc: zinc finger protein [Verticillium albo-atrum VaMs.102]
  misc_feature (1)..(247): NCBI GI: 116208006 Blast Desc: CHGG_03296 [Chaetomium globosum CBS 148.51] gi|88183893|gb|EAQ91361.1| CHGG_03296 [Chaetomium globosum CBS 148.51]
  misc_feature (1)..(247): NCBI GI: 164429082 Blast Desc: NCU00416 [Neurospora crassa OR74A] gi|157072402|gb|EAA28066.2| conserved [Neurospora crassa OR74A]
  misc_feature (2)..(233): NCBI GI: 242818462 Blast Desc: conserved [Talaromyces stipitatus ATCC 10500] gi|218713587|gb|EED13011.1| conserved [Talaromyces stipitatus ATCC 10500]
  misc_feature (27)..(242): NCBI GI: 145253695 Blast Desc: An17g01310 [Aspergillus niger] gi|134083931|emb|CAK43027.1| protein product [Aspergillus niger]
  misc_feature (43)..(239): NCBI GI: 121712730 Blast Desc: C2H2 type zinc finger domain protein [Aspergillus clavatus NRRL 1] gi|119402129|gb|EAW12550.1| C2H2 type zinc finger domain protein [Aspergillus clavatus NRRL 1]
  misc_feature (26)..(233): NCBI GI: 115438230 Blast Desc: conserved [Aspergillus terreus NIH2624] gi|114188828|gb|EAU30528.1| conserved [Aspergillus terreus NIH2624]
  misc_feature (43)..(233): NCBI GI: 154311441 Blast Desc: BC1G_06573 [Botryotinia fuckeliana B05.10] gi|150850970|gb|EDN26163.1| BC1G_06573 [Botryotinia fuckeliana B05.10]
MKRSREPEEDGDESNETQSEQTGSSAKITELDTSAVDTSSEIVMRCSLPPHREVLSFTTYGDYAAHYSKNRCIECNKNFPSEYLLNVHFEDIHDAFAAVKREKGEHTYSCFVEGCERKCSTPYKRSRHLIDKHMYPPNYFFAVTKYGIDGRQSLLLEGGHRRRRSSTATIASVSKAPQPKQETGLAEERKGVDQNAPQSVSSGEGKTQAEAPDVEMEGLTGAMSALQFVPHSVKFGRGRGKAGFARR

SEQ ID NO: 17097 - DNA, 933 bp, Muscodor strobelii
  misc_feature: SGI cDNA ID NO. 565706
  misc_feature: Reduced expression when VOC is produced
  misc_feature: Encodes the peptide sequence at SEQ ID NO 17098
atgtcacgaagcactgcttctccatcgcacgagctgagctcatcgccctacttgagtggcctcgccgcacccttcagccaatctccgcgacctggtgctggctatatgcagaatgcaatggcgtcaggtgcaccaggcgcgcgtccttcgtccaaaagccaagaaacgggcacattggaaggctcgcgaagtgccgtgttggattctctaacatcagctctattcgcacagcacgggctcgctcgtagcaatgcaccaccggcgggcaacatccccacgcgcgcaagcctatctccaacgtgggatcaacaggcggcacatagagctccagacttggcctctgctcaagcggcacgttctcatcaagcgagaccgtcgttgagcaaaagcacgctcatccacccagaccgccaacccattggaccgcctatgaatcaaagcacggccattcgccctgagcgtcagccaattggacctcccagctcggctaagccagtcgcgagcccagctcctaggccagtctctggtgggttcgctgccgcaagaagctcaatcaatcacaactttgatgttcagcacctttggccacagcagggcacatcaagtgaccaacaggcccctcggtcaccgtgggagtacaatgcttcacctattggatcctcatttgctttttccaataccagctctcttctagccggcaccccggcagcgattcccagacccgctaacactcactctgttgcgtccaatggcaatgctttcaatgcctccactccctacggacgactcggagagggcgtcaataatcgagatgaccctacacactttcggaatcaacttaaggcagcaactggcagcgatcagctcccatacgaccaggcggtgctgcacgctgccatgatcgatagcactggcaagccgcgcccgaagtga

SEQ ID NO: 17098 - protein, 310 aa, Muscodor strobelii
  misc_feature: SGI Peptide ID NO. 565706
  misc_feature: Useful for introducing or modulating the production of volatile compounds
MSRSTASPSHELSSSPYLSGLAAPFSQSPRPGAGYMQNAMASGAPGARPSSKSQETGTLEGSRSAVLDSLTSALFAQHGLARSNAPPAGNIPTRASLSPTWDQQAAHRAPDLASAQAARSHQARPSLSKSTLIHPDRQPIGPPMNQSTAIRPERQPIGPPSSAKPVASPAPRPVSGGFAAARSSINHNFDVQHLWPQQGTSSDQQAPRSPWEYNASPIGSSFAFSNTSSLLAGTPAAIPRPANTHSVASNGNAFNASTPYGRLGEGVNNRDDPTHFRNQLKAATGSDQLPYDQAVLHAAMIDSTGKPRPK

SEQ ID NO: 17099 - DNA, 5172 bp, Muscodor strobelii
  misc_feature: SGI EST ID NO. CUFF.40940.0
  misc_feature: Variant of the nucleotide sequence at SEQ ID NO 17097
agttcagactgtccgctccgatatcttaaccaagcttaacgcccttaagaaagagcgcggcaatgttaactatactactcgcttcgaggagatcgaggcaacactggctgaattccgcctcgcctgcgtgcaactcatcttccacgattttgagtatgccgccaagaagacggttgaacaccatctgtggtgggctcatatccatctcaatggtgaatacaggaggaccctcggccgcctcaacacccaggcccagattgtgcagaagcgcaagctggacaagcagtatcgcacattcctgaagacatccgagtctttctacgtcgtctatgtccagcgactctcccaacgctacccaatccccgagatgcaacagattgctttgggaggagacgcacctgccggaagtgatgctaaagatatgccgctcgcggagcccttgcgcagaatggtcacgacggcttaccaggcaacactgctgcatctgggcgatctcgttcgatatagatgccaggccgtggacaaattctcgcagaccaccttcgacaaagcctcggactattacgccttggccaacactctagatcccaacgatggtgctgcccatcatcagctgggcgtgctgtaccagtcccagaatcaagacatcgacattgtgtaccatttctaccgtgccattgccattgccaaaccacatgagctcgctctaggcaacttggagagagcgttcaagaagagcctcgagaatacaccccagataaggagaggctcgaacaaagacccttcagaagccatggtgacatggttcgtgcgactgcatgcctatttcttccatggaaaacagttctcccagcactcggaactagaagaagaggtgctccaccgcgtcgagattgcactcaaagctgaaggcactgaagtattgttactcaaaatggtgcttacaaacattgcagcttactacgttgcgtcacaaaaggtcaagacttcatggaccatggaagggtcgcagtcgtgtcagttctccttgcggttcaacgtgcgtatgcttttggccgttgtgcgagcattcgacaaaatcttgcgcagcgaaactgcaggaatctcaaagctcgacgaggttccaaccgatggcgagagctggctcattttcgacccaagctttatgagacttgtgcctattttgcgcctttatctcgcctgggtctatgtttcgcaagctgaactcgtgcagtaccgcgagtaccttgaaccacatatcaacgaattctacaaattgctagccgatgttgtcacatgtctgaatgtttacatcgatgcggcccgctcgacaatcacatcccaatatctcttagccgaggatattgaagcccagggtcttcgacctatcgacgatgagaggctacctcattttattgatgtagcagacccacgcgatttaagctcgcctcagcgatgcaagcaacgcaagcggcagcgaagcgtgggcggtcgcgaattcaagcaagaaacagaaatggtgtggcgaattcgagatcttatctactgtggaatactccttgctggaagttcagaagtccctgtagccttgactgtgcagactcatgccgaccgcactatcgaaacatgggtttttacagaagaatttgataccccgatcacttccgatgaggctgggatgtctcagctagtcagtagactgaatttcagtgactttcaagtcaagactgataaggaaaccgaaaggccctcgactcgtggacatgcgcagagcatgtcaaatggtagccgtcccgaagtactaggagtaagaaaacagcacgtctcgaaatccagtaccgagactggtacgacaccaactcccaccagaccctccctcaatcatcaatactcaaacttcttagaacaagacagcgagatggtcaatatggttaacaagcttcttgaccctgtggacgacgagcgaccccggtcgagccaaatccacgaggaatcgagttatggcatgcattcatctacggctaacgacattttcaacaacctcgatgtcaaccatccacaatcatcaccagtggcaaaggcactcccaagtttaccgtggaactatttctacaagcctacaccgcatcaaccaaaccaacagccagaggttgggctgggattgactgcaaacaactatcacatgtcacgaagcactgcttctccatcgcacgagctgagctcatcgccctacttgagtggcctcgccgcacccttcagccaatctccgcgacctggtgctggctatatgcagaatgcaatggcgtcaggtgcaccaggcgcgcgtccttcgtccaaaagccaagaaacgggcacattggaaggctcgcgaagtgccgtgttggattctctaacatcagctctattcgcacagcacgggctcgctcgtagcaatgcaccaccggcgggcaacatccccacgcgcgcaagcctatctccaacgtgggatcaacaggcggcacatagagctccagacttggcctctgctcaagcggcacgttctcatcaagcgagaccgtcgttgagcaaaagcacgctcatccacccagaccgccaacccattggaccgcctatgaatcaaagcacggccattcgccctgagcgtcagccaattggacctcccagctcggctaagccagtcgcgagcccagctcctaggccagtctctggtgggttcgctgccgcaagaagctcaatcaatcacaactttgatgttcagcacctttggccacagcagggcacatcaagtgaccaacaggcccctcggtcaccgtgggagtacaatgcttcacctattggatcctcatttgctttttccaataccagctctcttctagccggcaccccggcagcgattcccagacccgctaacactcactctgttgcgtccaatggcaatgctttcaatgcctccactccctacggacgactcggagagggcgtcaataatcgagatgaccctacacactttcggaatcaacttaaggcagcaactggcagcgatcagctcccatacgaccaggcggtgctgcacgctgccatgatcgatagcactggcaagccgcgcccgaagtgatgtgattcgggtcttgattgcgaaaatcttcaacacaagcaatcatgtgccttgatatcttctcgatgctttgcatcagatcgtgctcgaaagatagacaggttctgtcggattatcttccgtctgtctcgcttgccaaacgactggcgcacgatgactcgagtctcttgcagctaaagtcagtcacgaggcggacaattaagcagaccctagtatctatgctgaagtctgttcttgtcgatgccttcacgatcccgactttcatttcgcaagttttggagggacatgtcccgcaacacgattcacaacgagtcaaggcgaatggactgtacagcgactaatggaatgtcgatttaactcgttggtatttcccagttgttgaaacaaaatgaaaaaagatcacactgagaagggcgtcttttttcccttgctccaccgttgcccaagccagtccccccgaatctagaacgccggccctttgcacgtaaagttgagtaacgccaaagtaccaccagaccggtactaatgctatcgtttcgcttttacttcacaaacggaacattttctcatgctacatgattctcgtctcttcgttcattgccctccttttatctatctaactccctcttttccaagagatgcagagaagattcaagcagcgggattaggaggagggtgcgtaggtctgcttggggaaagggtatctaaaggggtctaatgtcagttgttgtggatcgggttttttggaaaagagttcagactctcaaaaaaatgttcgatgagcgcaggggttaatgggagggtgagcggataatagctcttggttcctgacggaccctaccagctgacggctggtaggtgacacgaggacaaacaaagattgccgttgatattttactcctctttgcagaatgatgcgcttgcgtgatagaccatgggtgaagggagaaaagtgaactataggggtgaagcttacgaaggaccaagctcctgaatgcttagagctgcgagccactgtcccatatcgacagactcgtcgatcttcttgccctggacaagaccagcgacgaagccaccagcgaaggcatcaccagcaccgttggtgtcgttgatcttctcggaagcgatggcgtggacggggaactgcttgacgctatcctcgccctggacagcgacgatagtgggctcggtgccctgggtgatgacggcgacgcgggggcgctgggtgttctccttggggaggttggcgagggccttggcgatggcggggatgtcggaggcgatgttctcgaggccgtgggacttggcgtaggacgcggcctcggtctcgttgcagatgatgtagtcccagtacttggacgaggcgtcgaggggatccttgaagaactccgggatgaagggcgcggagaggttgacgatgaagaccttgttgttcttggatgcctcggcgccgagcgtctggatggcctccgggcagacggtgaagtggtagccgccgatgtagtagaacttggcggcctcggcgagcttccagatctcggggctcttaaggtgctcgatgtcgtagaggttcgcggcgcctaggtccgtgcagagagagcggttgtggcccgtgatgactacgccgcagcggcccgtcggcgtcttggggtcgatgcggtactcgacgcggaggccgacttgctttacggcgtcgcgcaggatggcggcgtacttgtcgtcgccgacgccgccgaggtagactacgctgttctccgggagaatgtactgggcgccacgggcggtgttctgggcagcgccgccggcgatgagcttggcgtcgtagttgttcaggagttcctcgtagagcgggatgtggctggattcggcgaggatggcgtcattcgccttgaggttgtacttggcgagaagctcatcgttgccgaaagcttgaatgtctaggaaggtgtccgtgttagtcttatgagcttcatacactgaatgagaggaagtgagcaattggcgcggaagcgattagaattctagtttcctccagaattgctaacagtataacccaa

SEQ ID NO: 17100 - DNA, 1044 bp, Muscodor strobelii
  misc_feature: SGI cDNA ID NO. 565707
  misc_feature: Encodes the peptide sequence at SEQ ID NO 17101
atggctgagttccctctcttgtgtctggagaaccctctccttgacattcaagctttcggcaacgatgagcttctcgccaagtacaacctcaaggcgaatgacgccatcctcgccgaatccagccacatcccgctctacgaggaactcctgaacaactacgacgccaagctcatcgccggcggcgctgcccagaacaccgcccgtggcgcccagtacattctcccggagaacagcgtagtctacctcggcggcgtcggcgacgacaagtacgccgccatcctgcgcgacgccgtaaagcaagtcggcctccgcgtcgagtaccgcatcgaccccaagacgccgacgggccgctgcggcgtagtcatcacgggccacaaccgctctctctgcacggacctaggcgccgcgaacctctacgacatcgagcaccttaagagccccgagatctggaagctcgccgaggccgccaagttctactacatcggcggctaccacttcaccgtctgcccggaggccatccagacgctcggcgccgaggcatccaagaacaacaaggtcttcatcgtcaacctctccgcgcccttcatcccggagttcttcaaggatcccctcgacgcctcgtccaagtactgggactacatcatctgcaacgagaccgaggccgcgtcctacgccaagtcccacggcctcgagaacatcgcctccgacatccccgccatcgccaaggccctcgccaacctccccaaggagaacacccagcgcccccgcgtcgccgtcatcacccagggcaccgagcccactatcgtcgctgtccagggcgaggatagcgtcaagcagttccccgtccacgccatcgcttccgagaagatcaacgacaccaacggtgctggtgatgccttcgctggtggcttcgtcgctggtcttgtccagggcaagaagatcgacgagtctgtcgatatgggacagtggctcgcagctctaagcattcaggagcttggtccttcataccctttccccaagcagacctacgcaccctcctcctaa

SEQ ID NO: 17101 - protein, 347 aa, Muscodor strobelii
  misc_feature: SGI Peptide ID NO. 565707
  misc_feature (22)..(341): Pfam Id: PF00294 Pfam Desc: pfkB family carbohydrate kinase
  misc_feature (4)..(343): NCBI GI: 116208010 Blast Desc: CHGG_03298 [Chaetomium globosum CBS 148.51] gi|88183895|gb|EAQ91363.1| CHGG_03298 [Chaetomium globosum CBS 148.51]
  misc_feature (3)..(343): NCBI GI: 164429080 Blast Desc: adenosine kinase [Neurospora crassa OR74A] gi|157072401|gb|EAA28064.2| adenosine kinase [Neurospora crassa OR74A]
  misc_feature (1)..(343): NCBI GI: 46125109 Blast Desc: FG06932.1 [Gibberella zeae PH-1]
  misc_feature (1)..(343): NCBI GI: 256732703 Blast Desc: NECHADRAFT_60239 [Nectria haematococca mpVI 77-13-4]
  misc_feature (3)..(347): NCBI GI: 39976735 Blast Desc: MGG_06270 [Magnaporthe grisea 70-15] gi|145016334|gb|EDK00824.1| MGG_06270 [Magnaporthe grisea 70-15]
  misc_feature (3)..(335): NCBI GI: 171686482 Blast Desc: protein product [Podospora anserina] gi|170943202|emb|CAP68855.1| protein product [Podospora anserina]
  misc_feature (1)..(347): NCBI GI: 154311437 Blast Desc: adenosine kinase [Botryotinia fuckeliana B05.10] gi|150850968|gb|EDN26161.1| adenosine kinase [Botryotinia fuckeliana B05.10]
  misc_feature (1)..(342): NCBI GI: 156065173 Blast Desc: SS1G_00597 [Sclerotinia sclerotiorum 1980] gi|154691456|gb|EDN91194.1| SS1G_00597 [Sclerotinia sclerotiorum 1980]
  misc_feature (4)..(343): NCBI GI: 67523633 Blast Desc: AN2272.2 [Aspergillus nidulans FGSC A4] gi|40744689|gb|EAA63845.1| AN2272.2 [Aspergillus nidulans FGSC A4] gi|259487665|tpe|CBF86509.1| TPA: adenosine kinase, nidulans
  misc_feature (4)..(347): NCBI GI: 115438238 Blast Desc: ATEG_09393 [Aspergillus terreus NIH2624] gi|114188830|gb|EAU30530.1| ATEG_09393 [Aspergillus terreus NIH2624]
  misc_feature (1)..(343): SWISSPROT Homolog: EC 2.7.1.20 Adenosine kinase
MAEFPLLCLENPLLDIQAFGNDELLAKYNLKANDAILAESSHIPLYEELLNNYDAKLIAGGAAQNTARGAQYILPENSVVYLGGVGDDKYAAILRDAVKQVGLRVEYRIDPKTPTGRCGVVITGHNRSLCTDLGAANLYDIEHLKSPEIWKLAEAAKFYYIGGYHFTVCPEAIQTLGAEASKNNKVFIVNLSAPFIPEFFKDPLDASSKYWDYIICNETEAASYAKSHGLENIASDIPAIAKALANLPKENTQRPRVAVITQGTEPTIVAVQGEDSVKQFPVHAIASEKINDTNGAGDAFAGGFVAGLVQGKKIDESVDMGQWLAALSIQELGPSYPFPKQTYAPSS

SEQ ID NO: 17102 - DNA, 5665 bp, Muscodor strobelii
  misc_feature: SGI EST ID NO. CUFF.40941.1
  misc_feature: Variant of the nucleotide sequence at SEQ ID NO 17100
ccggcagccacccacacaaaccatagcaggtagggggaaaattgtcgccttgtgaatttcgggcctctcaatcttgaaaacctcaattcaaccatccacctctgcctctctcaccacctcggattacgcacagcagaccgtcaccatgggtcgcgttatccgtaaccagagaaagggtaacggcggtatcttcagtacgtactacccatccacagccacatcgacgacaacacgtcactcaaaacttacatttcccttcctctagccgccaacacccgcctgcgaaaggcccccgccaagttccgatccctcgacttcgccgagcgccatggatacatgcgcggagtgatcaaggagatcatccacgaccccggccgtggtgctcccctcgcccgcgtcaccttccgcagcccctacaagttcaagaccgtccaggagaccttcatcgccaacgagggcatgtacaccggccagttcatctacgccggcaagaacgccgccctcaccgtcggcaacgtcctcccccctctcctccatgcctgagggtaccgtcgtctccaacgtcgaggagaaggtcggcgaccgtggcactctcggccgcacctctggcaactacgtcaccatcatcggccacaaccccgacgagggcaagacccgcatcaagctcccctccggcgccaagaaggtcgtcagcagcagctcccgtggcatgatcggcatcgtcgctggcggtggccgtaccgacaagcccctcctcaaggcctcgcgcgccaagcacaagttcgccgtcaagcgcaactcctggcccaagactcgtggtgttgccatgaaccccgtcgaccatcctcacggtggtggtaaccatcaacatatcggtaaggcttcgaccatctcgcggtacgcagcccagggtcaaaaggcgggtctcattgctgccagaagaacgggtctgctccgtggtacgcagaagacgaaggactagagcgtttctccgggtcaatggtttatgtcaaggcggatggagttacatttgctgctctttgcatcttcaggttcaggcgagtcgatatgagataggctcaatgggaaagtaccccggcatcagtttcacattctacgctacaccacgaagtgacgccacacgtgaatggatacgacgagatgtcaaacatgtgaaccaaaacggcgttgtggctacgggcatcgcagaggccacactgcgaaacccggcaccaggggcaagattctctggccggtagagataggacagtaatggactatacaatgtgtaaaagcaaaaaaaacatatgaagctcattctgttccagctctcttgctgtatatggctaagctttcacggcaactgccagaagccagagccagaagctagaagcttggaagtggcttaaaaggcttcaatatgcccctaatgttctggtgcatttcagagtgcctgatatcatatctctgttcgatctgatctctgctcgatgatgaatctcaccatgtgccggtccccaccccatactgataaaggggccggtatgtaaaaggcaaatccactcacctcggagcatccagggcgacggcaggcaagtgatgacaagagatggtgaatggtccaattcgacgtcaaagagagcacggatccctgttgcgacatgcagattactgtattcgcaaaactcgttgccgggctcgctcccccaccatgcaaccccaccgtcgcagctgaatttctacgcaagtccatataataaattcccgacctgcccctccatgccaccgctcatcaaggtcctcttctcacgtctcaacctcgatctcacaccaattgtcttctctttaccttagcctcccataagcataccttctactagacataccaaaccccattatggctgagttccctctcttgtgtctggagaaccctctccttgacattcaagctttcggcaacgatgagcttctcgccaagtacaacctcaaggcgaatgacgccatcctcgccgaatccagccacatcccgctctacgaggaactcctgaacaactacgacgccaagctcatcgccggcggcgctgcccagaacaccgcccgtggcgcccagtacattctcccggagaacagcgtagtctacctcggcggcgtcggcgacgacaagtacgccgccatcctgcgcgacgccgtaaagcaagtcggcctccgcgtcgagtaccgcatcgaccccaagacgccgacgggccgctgcggcgtagtcatcacgggccacaaccgctctctctgcacggacctaggcgccgcgaacctctacgacatcgagcaccttaagagccccgagatctggaagctcgccgaggccgccaagttctactacatcggcggctaccacttcaccgtctgcccggaggccatccagacgctcggcgccgaggcatccaagaacaacaaggtcttcatcgtcaacctctccgcgcccttcatcccggagttcttcaaggatcccctcgacgcctcgtccaagtactgggactacatcatctgcaacgagaccgaggccgcgtcctacgccaagtcccacggcctcgagaacatcgcctccgacatccccgccatcgccaaggccctcgccaacctccccaaggagaacacccagcgcccccgcgtcgccgtcatcacccagggcaccgagcccactatcgtcgctgtccagggcgaggatagcgtcaagcagttccccgtccacgccatcgcttccgagaagatcaacgacaccaacggtgctggtgatgccttcgctggtggcttcgtcgctggtcttgtccagggcaagaagatcgacgagtctgtcgatatgggacagtggctcgcagctctaagcattcaggagcttggtccttcataccctttccccaagcagacctacgcaccctcctcctaatcccgctgcttgaatcttctctgcatctcttggaaaagagggagttagatagataaaaggagggcaatgaacgaagagacgagaatcatgtagcatgagaaaatgttccgtttgtgaagtaaaagcgaaacgatagcattagtaccggtctggtggtactttggcgttactcaactttacgtgcaaagggccggcgttctagattcggggggactggcttgggcaacggtggagcaagggaaaaaagacgcccttctcagtgtgatcttttttcattttgtttcaacaactgggaaataccaacgagttaaatcgacattccattagtcgctgtacagtccattcgccttgactcgttgtgaatcgtgttgcgggacatgtccctccaaaacttgcgaaatgaaagtcgggatcgtgaaggcatcgacaagaacagacttcagcatagatactagggtctgcttaattgtccgcctcgtgactgactttagctgcaagagactcgagtcatcgtgcgccagtcgtttggcaagcgagacagacggaagataatccgacagaacctgtctatctttcgagcacgatctgatgcaaagcatcgagaagatatcaaggcacatgattgcttgtgttgaagattttcgcaatcaagacccgaatcacatcacttcgggcgcggcttgccagtgctatcgatcatggcagcgtgcagcaccgcctggtcgtatgggagctgatcgctgccagttgctgccttaagttgattccgaaagtgtgtagggtcatctcgattattgacgccctctccgagtcgtccgtagggagtggaggcattgaaagcattgccattggacgcaacagagtgagtgttagcgggtctgggaatcgctgccggggtgccggctagaagagagctggtattggaaaaagcaaatgaggatccaataggtgaagcattgtactcccacggtgaccgaggggcctgttggtcacttgatgtgccctgctgtggccaaaggtgctgaacatcaaagttgtgattgattgagcttcttgcggcagcgaacccaccagagactggcctaggagctgggctcgcgactggcttagccgagctgggaggtccaattggctgacgctcagggcgaatggccgtgctttgattcataggcggtccaatgggttggcggtctgggtggatgagcgtgcttttgctcaacgacggtctcgcttgatgagaacgtgccgcttgagcagaggccaagtctggagctctatgtgccgcctgttgatcccacgttggagataggcttgcgcgcgtggggatgttgcccgccggtggtgcattgctacgagcgagcccgtgctgtgcgaatagagctgatgttagagaatccaacacggcacttcgcgagccttccaatgtgcccgtttcttggcttttggacgaaggacgcgcgcctggtgcacctgacgccattgcattctgcatatagccagcaccaggtcgcggagattggctgaagggtgcggcgaggccactcaagtagggcgatgagctcagctcgtgcgatggagaagcagtgcttcgtgacatgtgatagttgtttgcagtcaatcccagcccaacctctggctgttggtttggttgatgcggtgtaggcttgtagaaatagttccacggtaaacttgggagtgcctttgccactggtgatgattgtggatggttgacatcgaggttgttgaaaatgtcgttagccgtagatgaatgcatgccataactcgattcctcgtggatttggctcgaccggggtcgctcgtcgtccacagggtcaagaagcttgttaaccatattgaccatctcgctgtcttgttctaagaagtttgagtattgatgattgagggagggtctggtgggagttggtgtcgtaccagtctcggtactggatttcgagacgtgctgttttcttactcctagtacttcgggacggctaccatttgacatgctctgcgcatgtccacgagtcgagggcctttcggtttccttatcagtcttgacttgaaagtcactgaaattcagtctactgactagctgagacatcccagcctcatcggaagtgatcggggtatcaaattcttctgtaaaaacccatgtttcgatagtgcggtcggcatgagtctgcacagtcaaggctacagggacttctgaacttccagcaaggagtattccacagtagataagatctcgaattcgccacaccatttctgtttcttgcttgaattcgcgaccgcccacgcttcgctgccgcttgcgttgcttgcatcgctgaggcgagcttaaatcgcgtgggtctgctacatcaataaaatgaggtagcctctcatcgtcgataggtcgaagaccctgggcttcaatatcctcggctaagagatattgggatgtgattgtcgagcgggccgcatcgatgtaaacattcagacatgtgacaacatcggctagcaatttgtagaattcgttgatatgtggttcaaggtactcgcggtactgcacgagttcagcttgcgaaacatagacccaggcgagataaaggcgcaaaataggcacaagtctcataaagcttgggtcgaaaatgagccagctctcgccatcggttggaacctcgtcgagctttgagattcctgcagtttcgctgcgcaagattttgtcgaatgctcgcacaacgg

SEQ ID NO: 17103 - DNA, 714 bp, Muscodor strobelii
  misc_feature: SGI cDNA ID NO. 565708
  misc_feature: Reduced expression when VOC is produced
  misc_feature: Encodes the peptide sequence at SEQ ID NO 17104
atgggtcgcgttatccgtaaccagagaaagggtaacggcggtatcttcaccgccaacacccgcctgcgaaaggcccccgccaagttccgatccctcgacttcgccgagcgccatggatacatgcgcggagtgatcaaggagatcatccacgaccccggccgtggtgctcccctcgcccgcgtcaccttccgcagcccctacaagttcaagaccgtccaggagaccttcatcgccaacgagggcatgtacaccggccagttcatctacgccggcaagaacgccgccctcaccgtcggcaacgagaaggtcggcgaccgtggcactctcggccgcacctctggcaactacgtcaccatcatcggccacaaccccgacgagggcaagacccgcatcaagctcccctccggcgccaagaaggtcgtcagcagcagctcccgtggcatgatcggcatcgtcgctggcggtggccgtaccgacaagcccctcctcaaggcctcgcgcgccaagcacaagttcgccgtcaagcgcaactcctggcccaagactcgtggtgttgccatgaaccccgtcgaccatcctcacggtggtggtaaccatcaacatatcggtaaggcttcgaccatctcgcggtacgcagcccagggtcaaaaggcgggtctcattgctgccagaagaacgggtctgctccgtggtacgcagaagacgaaggactag

SEQ ID NO: 17104 - protein, 237 aa, Muscodor strobelii
  misc_feature: SGI Peptide ID NO. 565708
  misc_feature (11)..(90): Pfam Id: PF00181 Pfam Desc: Ribosomal Proteins L2, RNA binding domain
  misc_feature (96)..(214): Pfam Id: PF03947 Pfam Desc: Ribosomal Proteins L2, C-terminal domain
  misc_feature (104)..(214): Pfam Id: PF03947 Pfam Desc: Ribosomal Proteins L2, C-terminal domain
  misc_feature (1)..(237): NCBI GI: 171686484 Blast Desc: protein product [Podospora anserina] gi|170943203|emb|CAP68856.1| protein product [Podospora anserina]
  misc_feature (1)..(237): NCBI GI: 164429078 Blast Desc: 60S ribosomal protein L2 [Neurospora crassa OR74A] gi|157072400|gb|EAA28063.2| 60S ribosomal protein L2 [Neurospora crassa OR74A]
  misc_feature (1)..(237): NCBI GI: 121712720 Blast Desc: 60S ribosomal protein L8, [Aspergillus clavatus NRRL 1] gi|119402124|gb|EAW12545.1| 60S ribosomal protein L8, [Aspergillus clavatus NRRL 1]
  misc_feature (1)..(237): NCBI GI: 238503550 Blast Desc: 60S ribosomal protein L8, [Aspergillus flavus NRRL3357] gi|220690479|gb|EED46828.1| 60S ribosomal protein L8, [Aspergillus flavus NRRL3357]
  misc_feature (1)..(237): NCBI GI: 145253705 Blast Desc: An17g01360 [Aspergillus niger] gi|134083936|emb|CAK43032.1| protein product [Aspergillus niger]
  misc_feature (1)..(237): NCBI GI: 213512216 Blast Desc: 60S ribosomal protein L2 [Salmo salar] gi|209737480|gb|ACI69609.1| 60S ribosomal protein L2 [Salmo salar]
  misc_feature (1)..(237): NCBI GI: 256732702 Blast Desc: [Nectria haematococca mpVI 77-13-4]
  misc_feature (1)..(237): NCBI GI: 242793462 Blast Desc: 60S ribosomal protein L8, [Talaromyces stipitatus ATCC 10500] gi|242793467|ref|XP_002482167.1| 60S ribosomal protein L8, [Talaromyces stipitatus ATCC 10500] gi|218718754|gb|EED18174.1|
  misc_feature (1)..(237): NCBI GI: 115438248 Blast Desc: 60S ribosomal protein L2 [Aspergillus terreus NIH2624] gi|114188833|gb|EAU30533.1| 60S ribosomal protein L2 [Aspergillus terreus NIH2624]
  misc_feature (1)..(237): NCBI GI: 119181946 Blast Desc: CIMG_06034 [Coccidioides immitis RS] gi|240109105|gb|EER27274.1| 60S ribosomal protein L2, [Coccidioides posadasii C735 delta SOWgp]
  misc_feature: Useful for introducing or modulating the production of volatile compounds
MGRVIRNQRKGNGGIFTANTRLRKAPAKFRSLDFAERHGYMRGVIKEIIHDPGRGAPLARVTFRSPYKFKTVQETFIANEGMYTGQFIYAGKNAALTVGNEKVGDRGTLGRTSGNYVTIIGHNPDEGKTRIKLPSGAKKVVSSSSRGMIGIVAGGGRTDKPLLKASRAKHKFAVKRNSWPKTRGVAMNPVDHPHGGGNHQHIGKASTISRYAAQGQKAGLIAARRTGLLRGTQKTKD

SEQ ID NO: 17105 - DNA, 5665 bp, Muscodor strobelii; identical to SEQ ID NO: 17102
  misc_feature: SGI EST ID NO. CUFF.40941.1
  misc_feature: Variant of the nucleotide sequence at SEQ ID NO 17103

SEQ ID NO: 17106 - DNA, 897 bp, Muscodor strobelii
  misc_feature: SGI cDNA ID NO. 565709
  misc_feature: Reduced expression when VOC is produced
  misc_feature: Encodes the peptide sequence at SEQ ID NO 17107
atgcctcctaagcaggccgaacacgccgtcgagttcgaacgcattatccatgctggtcgtgagcgcaagcgcaacgaggcattggctgctaagatctttggccgcggcgacaagaatgatcagcgacggtccagcgcacccatcaagcccggtgcgggtggctccctcgccagcagagtcggcgtcaagaagcagcgagtatcaactggcggccgcgtccccgctggcaacatcaatggcgactggacccatgatcttcacaaccaaaacgaagcacgacagccctcgctcgcttcccgcgtcaacgctgtctccggccctgctcctggcaagtctcaacctggcaagggcaatcgcgcagcaaagcttgccaacgcctttcagcgcaccgcagcatccaatacccaacaactcaatatccgaagtcagatgccaaccatgtccatcaagggcttggcaggcccctttgcggtcctcgcacagaactttgcccctggcaccacggccgcagacatcgagagcgcaatgacacctgttggcggtattgttagcagctgtcgcttggtcaagacacaccccatcgttattgccgaggtggtgttcgagagcaaggagggagccgaaaatgtcatccagacgtttgacaagcagaacgccgatggtcgtactctgagtgtctacatgaaaccaggcggcttttccgcggcaccgcccaagggacctcgtgcccagcaaagcaacgagactagactcggcgataacagcatcctcgtagatggctcacacggtttctcggatcccatggacaccgacaacaacagcaacacaaagggacgtctctacagcgataaactggctaatggtcagaattccaggggctcccggcgcgggcgatag

SEQ ID NO: 17107 - protein, 298 aa, Muscodor strobelii
  misc_feature: SGI Peptide ID NO. 565709
  misc_feature (6)..(298): NCBI GI: 261358469 Blast Desc: conserved [Verticillium albo-atrum VaMs.102]
  misc_feature (6)..(285): NCBI GI: 256729751 Blast Desc: NECHADRAFT_95622 [Nectria haematococca mpVI 77-13-4]
  misc_feature (9)..(271): NCBI GI: 116191707 Blast Desc: CHGG_05571 [Chaetomium globosum CBS 148.51] gi|88181484|gb|EAQ88952.1| CHGG_05571 [Chaetomium globosum CBS 148.51]
  misc_feature (7)..(285): NCBI GI: 145608754 Blast Desc: MGG_12843 [Magnaporthe grisea 70-15] gi|145016191|gb|EDK00681.1| MGG_12843 [Magnaporthe grisea 70-15]
  misc_feature (4)..(285): NCBI GI: 85109219 Blast Desc: NCU07878 [Neurospora crassa OR74A] gi|28924447|gb|EAA33575.1| [Neurospora crassa OR74A]
  misc_feature (4)..(288): NCBI GI: 46122083 Blast Desc: FG05419.1 [Gibberella zeae PH-1]
  misc_feature (20)..(296): NCBI GI: 171687050 Blast Desc: protein product [Podospora anserina] gi|170943486|emb|CAP69139.1| protein product [Podospora anserina]
  misc_feature (11)..(289): NCBI GI: 156048088 Blast Desc: SS1G_08775 [Sclerotinia sclerotiorum 1980] gi|154693172|gb|EDN92910.1| SS1G_08775 [Sclerotinia sclerotiorum 1980]
  misc_feature (11)..(289): NCBI GI: 154305864 Blast Desc: BC1G_08163 [Botryotinia fuckeliana B05.10] gi|150853048|gb|EDN28240.1| BC1G_08163 [Botryotinia fuckeliana B05.10]
  misc_feature (9)..(283): NCBI GI: 169599472 Blast Desc: SNOG_02555 [Phaeosphaeria nodorum SN15] gi|111069647|gb|EAT90767.1| SNOG_02555 [Phaeosphaeria nodorum SN15]
  misc_feature: Useful for introducing or modulating the production of volatile compounds
MPPKQAEHAVEFERIIHAGRERKRNEALAAKIFGRGDKNDQRRSSAPIKPGAGGSLASRVGVKKQRVSTGGRVPAGNINGDWTHDLHNQNEARQPSLASRVNAVSGPAPGKSQPGKGNRAAKLANAFQRTAASNTQQLNIRSQMPTMSIKGLAGPFAVLAQNFAPGTTAADIESAMTPVGGIVSSCRLVKTHPIVIAEVVFESKEGAENVIQTFDKQNADGRTLSVYMKPGGFSAAPPKGPRAQQSNETRLGDNSILVDGSHGFSDPMDTDNNSNTKGRLYSDKLANGQNSRGSRRGR

SEQ ID NO: 17108 - DNA, 1738 bp, Muscodor strobelii
  misc_feature: SGI EST ID NO. CUFF.40342.1
  misc_feature: Variant of the nucleotide sequence at SEQ ID NO 17106
cccagtctcgccagtccccctgtcattgcggcgtccagaccccagaatcccttcaacttcgcgccgtgtttctcaacggtaataaatccggaccctgtcgtccgctgttcccttcgttccacagcaacacacagtttcttactcgcacactcattcatcagactgttcggtcactgttgatcttagcctgcattactttccgccaatatcaactacctgcatccccataccgtcaacagtcgccatcatgcctcctaagcaggccgaacacgccgtcgagttcgaacgcattatccatgctggtcgtgagcgcaagcgcaacgaggcattggctgctaagatctttggccgcggcgacaagaatgatcagcgacggtccagcgcacccatcaagcccggtgcgggtggctccctcgccagcagagtcggcgtcaagaagcagcgagtatcaactggcggccgcgtccccgctggcaacatcaatggcgactggacccatgatcttcacaaccaaaacgaagcacgacagccctcgctcgcttcccgcgtcaacgctgtctccggccctgctcctggcaagtctcaacctggcaagggcaatcgcgcagcaaagcttgccaacgcctttcagcgcaccgcagcatccaatacccaacaactcaatatccgaagtcagatgccaaccatgtccatcaagggcttggcaggcccctttgcggtcctcgcacagaactttgcccctggcaccacggccgcagacatcgagagcgcaatgacacctgttggcggtattgttagcagctgtcgcttggtcaagacacaccccatcgttattgccgaggtggtgttcgagagcaaggagggagccgaaaatgtcatccagacgtttgacaagcagaacgccgatggtcgtactctgagtgtctacatgaaaccaggcggcttttccgcggcaccgcccaagggacctcgtgcccagcaaagcaacgagactagactcggcgataacagcatcctcgtagatggctcacacggtttctcggatcccatggacaccgacaacaacagcaacacaaagggacgtctctacagcgataaactggctaatggtcagaattccaggggctcccggcgcgggcgataggacgcctcccgagactattctagatctaatgaccatgactcctatcgccctcacagcggccgttacgaggataacaatgacggatacgacgatggccaaggagaagactacgacgggagcgggtatttcatcgatacctccggtggataccatgaccccaacgaccaggagagctggcatcagcgctagtatctttgatcttcgcgagagtcgcggaggagctgctgtgtaaggcaagacttcaaagtagatcgcagggccacatttcagataccaccccattgctctcatgatttggctacagcgcacgagcttcctagtaccctatgtacgataggtatagacgcccaagagccgtcttctagttgcagagccgtcttctgattgcacacagacaggaggcaggagcagactacaacacgcaaaacgaggcgtcattgtttttctcgataccatttaaggattgatgctgatatgttaactgctgcgggtgagtgcgctatcaaagacggtgtactaaaaaatgggcggttcacttcggctgggttgataattctatcgagatagacagaatgaatacgaaagcaaccgaat

SEQ ID NO: 17109 - DNA, 2712 bp, Muscodor strobelii
  misc_feature: SGI cDNA ID NO. 565710
  misc_feature: Encodes the peptide sequence at SEQ ID NO 17110
atggatccatggcagggctaccaggacgccgccggcggtgcgaggcgctacaacggcaccagcgctgctcccggccagatgccgcctgctcgtgaatactcgcagcagcagcagcaacaacaggcacctgcacaaggccaagcgcctgcgggcttcaaatacgatcagtatcagccgacgctcaactcgcaccccgcgcagtccagcgcaacgtcacccctcgctaccccacagtctcgcgacggcaacggcgacgtccccatgcaagacgcccacgaccagtacggcggcttgaagtaccctatgcgcccgcaccaccagtcgcgcctctccggcagccgtcagggcagcctgcactcgccctctgagccttccgccgctgcccaacgctactcgcccatggaggttctctcgcccacctcgccctacggcggcaagccagtgccgagccaggcccagtacgcatccggcacaccgcacagccagcgccattcacccaccagatccgactatcctcccacgagcccttactacggccgccaaggctcccagctgccgcccatctcgccctataccaccacacaagacggctacccctcgtctgccgtcgccgccctcgatggtgccttttctaacgacccaaagtctccaaggcggccgctccaaccttccaccaacgtgcctgccgagaaacggcctgttcctcacttcaagaaggtgggaacgccatctgacttgcgcccgagagtcaatgctcagcctccattccgacgcgccaacccagagggaggcttcataagtcctctgcaagctctaacggtccatctgcccgcaacttaccggatatgcaatcctaacttcaaatatgaatcatcgaggaatcctcgccgggtattgacaaagcctagcaaaggaaccaagaatgatgggtacgacaacgaggacagtgattacatcctttatgtcaatgatattcttgggtctgaggaagctggccacaaaaatcgttatctcatcctggatgttcttggacagggaacatttggacaggtcgtcaaatgccagaacctgaaaacacaggaggtggtagcagtcaaagttatcaaaaaccggacggcatactttaaccagagcatgatggaagtatcagtactagacttactgaacaccaaattggacaagaacgatgatcatcaccttctgcgactcaaggacactttcatccaccggcagcatctttgcttggtcttcgagctactgagtgtcaatctttacgagttgatcaaacagaatcaattccgagggctgagtacaacgctagtacgagtattcgcccaacagctcttgaacggcctcacccttttgaacaaggctcgcttgatacactgcgacttgaagccagagaacatcttgttgaagaaccttgagagccccatcatcaaaattatcgattttggttcggcctgtgatgaacgccagaccgtttatacctacatacaatctcggttttatcgatccccggaagtcttgttgggtcttccgtactcatcggccatcgatatgtggtctctcggatgtatcgtggtcgagctattcctaggactcccgctcttccctggctcatcagagtataaccaggtgtcgcgaattaccgaaatgcttggcaacccaccaaactggatggtggaggtcggaaaacaatccggtgatttcttcgagaagcgacaggatgaattcggccggaagatgtattctctcaagagcatggaacagtactcgagagagcgcggatcgaaagaacagcccagtaagaagtactttcaagcgaatactctgccggagattatcaagtcatatcccatgccccggaagaatatgaagcagagcgaaattgaccgagaaatgaacaatcgtattgctttcattgatttcgttcggggattgttgacgataagccctctcgaaagatggtcacctcagcaagccaagcttcatccttttattacccagcaaaagttcactggtgctttcgtacccccgatgaacttgaagacgagctctcttaatcggtcgccagcgcctggtactctacagcagcagcaagcggctgagctcagcaagcagagagctcaggcagcgcagaatcaggctcaggcggcgcaaggcaattacggaatgcagaatcccaatcaatacccaacttctccgcacagtcagggcccaatgtatggcagcaatgggatgtacacaccaggtgggagccacgctaatcctccgcctccgtatgccgctcagcaatctccctatggttccatggttacgaatcaagcaccagcacaaatgccacccgccaattacggtaacgtccaacaaccgaacctgtaccagcaggcaacggtccgagctgggcggcagcgagcatccaccatggatcagcagcagaatggaattccagcagcgatccagagagtggccagtcaccttgacccgaatcaaccaatccgactacaaccgagtcccgcctattacccgcctcccgccgatggcatgggcctgacagatccgggttcaggacgtgttgccggccgccgagatagccgagcgcaaaggggcggcggcagaagcgggaaccgcgacttcattcgcaaccttgaggaacgcaccctagaggaagggttcatgggcggtagcggacaacctggatggcattga

SEQ ID NO: 17110 - protein, 903 aa, Muscodor strobelii
  misc_feature: SGI Peptide ID NO. 565710
  misc_feature (337)..(668): Pfam Id: PF00069 Pfam Desc: Protein kinase domain
  misc_feature (337)..(370): Pfam Id: PF07714 Pfam Desc: Protein tyrosine kinase
  misc_feature (1)..(903): NCBI GI: 171687052 Blast Desc: protein product [Podospora anserina] gi|170943487|emb|CAP69140.1| protein product [Podospora anserina]
  misc_feature (88)..(903): NCBI GI: 46122081 Blast Desc: FG05418.1 [Gibberella zeae PH-1]
  misc_feature (45)..(903): NCBI GI: 154312350 Blast Desc: BC1G_06208 [Botryotinia fuckeliana B05.10] gi|150850171|gb|EDN25364.1| BC1G_06208 [Botryotinia fuckeliana B05.10]
  misc_feature (1)..(903): NCBI GI: 116191709 Blast Desc: CHGG_05572 [Chaetomium globosum CBS 148.51] gi|88181485|gb|EAQ88953.1| CHGG_05572 [Chaetomium globosum CBS 148.51]
  misc_feature (4)..(891): NCBI GI: 85109879 Blast Desc: NCU07872 [Neurospora crassa OR74A] gi|28924785|gb|EAA33897.1| NCU07872 [Neurospora crassa OR74A]
  misc_feature (45)..(897): NCBI GI: 156064181 Blast Desc: SS1G_00098 [Sclerotinia sclerotiorum 1980] gi|154690960|gb|EDN90698.1| SS1G_00098 [Sclerotinia sclerotiorum 1980]
  misc_feature (1)..(895): NCBI GI: 240107513 Blast Desc: kinase domain containing protein [Coccidioides posadasii C735 delta SOWgp]
  misc_feature (1)..(903): NCBI GI: 239615023 Blast Desc: protein kinase Yak1 [Ajellomyces dermatitidis ER-3]
  misc_feature (4)..(903): NCBI GI: 238492799 Blast Desc: protein kinase Yak1, [Aspergillus flavus NRRL3357] gi|220696130|gb|EED52472.1| protein kinase Yak1, [Aspergillus flavus NRRL3357]
  misc_feature (1)..(903): NCBI GI: 261188016 Blast Desc: protein kinase Yak1 [Ajellomyces dermatitidis SLH14081] gi|239593436|gb|EEQ76017.1| protein kinase Yak1 [Ajellomyces dermatitidis SLH14081]
  misc_feature (214)..(680): SWISSPROT Homolog: EC 2.7.12.1 Dual-specificity kinase
MDPWQGYQDAAGGARRYNGTSAAPGQMPPAREYSQQQQQQQAPAQGQAPAGFKYDQYQPTLNSHPAQSSATSPLATPQSRDGNGDVPMQDAHDQYGGLKYPMRPHHQSRLSGSRQGSLHSPSEPSAAAQRYSPMEVLSPTSPYGGKPVPSQAQYASGTPHSQRHSPTRSDYPPTSPYYGRQGSQLPPISPYTTTQDGYPSSAVAALDGAFSNDPKSPRRPLQPSTNVPAEKRPVPHFKKVGTPSDLRPRVNAQPPFRRANPEGGFISPLQALTVHLPATYRICNPNFKYESSRNPRRVLTKPSKGTKNDGYDNEDSDYILYVNDILGSEEAGHKNRYLILDVLGQGTFGQVVKCQNLKTQEVVAVKVIKNRTAYFNQSMMEVSVLDLLNTKLDKNDDHHLLRLKDTFIHRQHLCLVFELLSVNLYELIKQNQFRGLSTTLVRVFAQQLLNGLTLLNKARLIHCDLKPENILLKNLESPIIKIIDFGSACDERQTVYTYIQSRFYRSPEVLLGLPYSSAIDMWSLGCIVVELFLGLPLFPGSSEYNQVSRITEMLGNPPNWMVEVGKQSGDFFEKRQDEFGRKMYSLKSMEQYSRERGSKEQPSKKYFQANTLPEIIKSYPMPRKNMKQSEIDREMNNRIAFIDFVRGLLTISPLERWSPQQAKLHPFITQQKFTGAFVPPMNLKTSSLNRSPAPGTLQQQQAAELSKQRAQAAQNQAQAAQGNYGMQNPNQYPTSPHSQGPMYGSNGMYTPGGSHANPPPPYAAQQSPYGSMVTNQAPAQMPPANYGNVQQPNLYQQATVRAGRQRASTMDQQQNGIPAAIQRVASHLDPNQPIRLQPSPAYYPPPADGMGLTDPGSGRVAGRRDSRAQRGGGRSGNRDFIRNLEERTLEEGFMGGSGQPGWH

SEQ ID NO: 17111 - DNA, 4649 bp, Muscodor strobelii
  misc_feature: SGI EST ID NO. CUFF.40300.0
  misc_feature: Variant of the nucleotide sequence at SEQ ID NO 17109
aaaggcgccccctcctagatagcggcatcccctcgagttaactcccgccccttcccgctctcacaggctctctgtgcaggcggctttctttcttgtcgtttgaaaggttggcatgtcacactttgaacgtcatctcactctcccgtccccgattatagtcgggaacagctgcccgtagcctgtccatctcaccgtgcccgcgaccgtgccctgaaggcgtaagtcgagacaggtacatctgagaatacttagatagccgaccgtggacatatcgtcaagttgacctctcatcatccctttcactcgcgtctgcaacagctgcttgtctcgttccgagttgcaacgctcgacacgaagtacctcttaggaagttgggacggcactgaatagctcattgcggccgtctctgggcagtcagtgctggtcgtccggctcgggcatttacatacggtacctacatccattccatcctccattcctctcaagcatgaatcctccctaaggaaaacccgccgcgctgctgtcctctgcatcaaacaatttacctgtccaacctgtatcccattacaaccaagtcatccccatatcgcccggctggtgttgtctgcactgcaattcctcggcgacccaacgtcatccacagtcgcccagcccccgtcaacagaacaagtcatagccaaagtcagttgagagtgctactcgcgctacctgcgagtaacttacccaagggggctcagcctgtcgtgtccacgtagccgcccacttggtcaccgcaagcacctacaatcagacggctccatgcgcgtctgactgggtaccggtgccgtcaataatccatactcatcagcccgattacctctggcccctctccaaacgacactctcaaccggcgccatcttctcttcttccaccatcaccaccacacgctctcccgcccgaccctcaatccacgtcgtcgctccctggacgcagctcttgcacgctgcccaccgccatggatccatggcagggctaccaggacgccgccggcggtgcgaggcgctacaacggcaccagcgctgctcccggccagatgccgcctgctcgtgaatactcgcagcagcagcagcaacaacaggcacctgcacaaggccaagcgcctgcgggcttcaaatacgatcagtatcagccgacgctcaactcgcaccccgcgcagtccagcgcaacgtcacccctcgctaccccacagtctcgcgacggcaacggcgacgtccccatgcaagacgcccacgaccagtacggcggcttgaagtaccctatgcgcccgcaccaccagtcgcgcctctccggcagccgtcagggcagcctgcactcgccctctgagccttccgccgctgcccaacgctactcgcccatggaggttctctcgcccacctcgccctacggcggcaagccagtgccgagccaggcccagtacgcatccggcacaccgcacagccagcgccattcacccaccagatccgactatcctcccacgagcccttactacggccgccaaggctcccagctgccgcccatctcgccctataccaccacacaagacggctacccctcgtctgccgtcgccgccctcgatggtgccttttctaacgacccaaagtctccaaggcggccgctccaaccttccaccaacgtgcctgccgagaaacggcctgttcctcacttcaagaaggtgggaacgccatctgacttgcgcccgagagtcaatgctcagcctccattccgacgcgccaacccagagggaggcttcataagtcctctgcaagctctaacggtccatctgcccgcaacttaccggatatgcaatcctaacttcaaatatgaatcatcgaggaatcctcgccgggtattgacaaagcctagcaaaggaaccaagaatgatgggtacgacaacgaggacagtgattacatcctttatgtcaatgatattcttgggtctgaggaagctggccacaaaaatcgttatctcatcctggatgttcttggacagggaacatttggacaggtcgtcaaatgccagaacctgaaaacacaggaggtggtagcagtcaaagttatcaaaaaccggacggcatactttaaccagagcatgatggaagtatcagtactagacttactgaacaccaaattggacaagaacgatgatcatcaccttctgcgactcaaggacactttcatccaccggcagcatctttgcttggtcttcgagctactgagtgtcaatctttacgagttgatcaaacagaatcaattccgagggctgagtacaacgctagtacgagtattcgcccaacagctcttgaacggcctcacccttttgaacaaggctcgcttgatacactgcgacttgaagccagagaacatcttgttgaagaaccttgagagccccatcatcaaaattatcgattttggttcggcctgtgatgaacgccagaccgtttatacctacatacaatctcggttttatcgatccccggaagtcttgttgggtcttccgtactcatcggccatcgatatgtggtctctcggatgtatcgtggtcgagctattcctaggactcccgctcttccctggctcatcagagtataaccaggtgtcgcgaattaccgaaatgcttggcaacccaccaaactggatggtggaggtcggaaaacaatccggtgatttcttcgagaagcgacaggatgaattcggccggaagatgtattctctcaagagcatggaacagtactcgagagagcgcggatcgaaagaacagcccagtaagaagtactttcaagcgaatactctgccggagattatcaagtcatatcccatgccccggaagaatatgaagcagagcgaaattgaccgagaaatgaacaatcgtattgctttcattgatttcgttcggggattgttgacgataagccctctcgaaagatggtcacctcagcaagccaagcttcatccttttattacccagcaaaagttcactggtgctttcgtacccccgatgaacttgaagacgagctctcttaatcggtcgccagcgcctggtactctacagcagcagcaagcggctgagctcagcaagcagagagctcaggcagcgcagaatcaggctcaggcggcgcaaggcaattacggaatgcagaatcccaatcaatacccaacttctccgcacagtcagggcccaatgtatggcagcaatgggatgtacacaccaggtgggagccacgctaatcctccgcctccgtatgccgctcagcaatctccctatggttccatggttacgaatcaagcaccagcacaaatgccacccgccaattacggtaacgtccaacaaccgaacctgtaccagcaggcaacggtccgagctgggcggcagcgagcatccaccatggatcagcagcagaatggaattccagcagcgatccagagagtggccagtcaccttgacccgaatcaaccaatccgactacaaccgagtcccgcctattacccgcctcccgccgatggcatgggcctgacagatccgggttcaggacgtgttgccggccgccgagatagccgagcgcaaaggggcggcggcagaagcgggaaccgcgacttcattcgcaaccttgaggaacgcaccctagaggaagggttcatgggcggtagcggacaacctggatggcattgaaactctccccaaggtacatcttgaaagatattggataagtccgcatgaaggcgctcgtgcattcatgaattccatggcatacttaatgtcttcttttatgagattgaggatgcgaggcttgttcttctccaagctcaccggtcggaagatctcgcatcgagagtcgaaccttaaaagggactgaaccatgcgcatacgcaacgcgcaacaacgtatcaagcatgcgagcgatggtcctaattcgccttttgccacccgtgcaagccagcatagcagcatcagtcaagtctgcaatactacacggctgcaaactgaggtctgagagctcctcagcgcacggtgacagcgaaggccttctgtcataagggagcggatcaatcatcgacgatggattcaagttctcctcggatttgcacacattagcaaacttttttatctttttcatgaggaagtggggaatatggtatttcaacggtcttcatggcgcatcattgtgtcttcgcaggtcatgcgggagctttgtgtgctacgagtcgctgggctagtgggaatggcttgggcaggagactgatcaattggcttgatgtatcggtatctgggagaaagcatcggagagggaacgagttttatcggtcatgacactagctgtcaacgagccaccgtattgtattaaaagcggtaggcgattgcatcaaataggccggggcagatcatcggaatgcgctcagtgttagcacgaggcaatgcatggttgcagtgagttctctactggcctgctaggggctgatgagttcttttcctttggtctatcgtatatacctattctgtacaccaacgcaaatactctttggccgtgagccaaatagatttgaacatcgatccagccatcgcgaatgtgatgttctgtgatggtcagtgtaacactctactcgactagctcccg

SEQ ID NO: 17112 - DNA, 1458 bp, Muscodor strobelii
  misc_feature: SGI cDNA ID NO. 565711
  misc_feature: Encodes the peptide sequence at SEQ ID NO 17113
atggctgactcgggtgttccttctgctggtgcccagctccccccgccgccgcagcccaatgccggtgcgcctggcttcgacgccaaccagaatggccagggcaatccggcgcatatgccgcctcccccattgcacatccctcccaacacgaaccccatccctaccgccattacctcgcccctctcggctgtcgatggcaacaatgtcatgtcaccttccagcggtggtcccttcccgcgtcgtgctgcacccgagcctaacaagcgtgcactctacgtcggcggcctcgatccccgcgtcaccgaagatgtgctgcgacagatctttgagaccacgggccacgttcagaatgtgaagatcatcccggacaagaatgctaagggctacaactatggcttcgtagaatatgatgaccccggtgccgctgagcgtgctatgcagacgctgaacggccgccgagtgcatcaggctgagatccgagtgaactgggcttaccagtccaacacaacaaacaaagaggatacttcatctcacttccacattttcgtgggtgatctatccaacgaagtcaatgatgaggttctcatgcaggcattttctgcctttggaaccatttccgaggctcgcgtcatgtgggatatgaagacaggtcgctcccgcgggtatggattcgttgctttcagagaccgaggggatgcggagaaggccctgacttcgatggatggagagtggctgggatctcgggccattcgatgcaactgggccaaccagaaaggccagccgtctattgcccagcaagcagctatgtcgtcgatgggcatgacacccactacgccattcggtcaccaccatttccccactcatggtatccagagttacgatatgatcgtgaaccagacacccggctggcagacaacttgctacgtgggcaatctgaccccttacaccacgcagaacgacctcgttcccttgttccagaattttggatacgtgaccgagtctcgcttccaggctgaccgaggattcgctttcatcaagatggacacccatgagaacgctgccatggcaatctgccagcttaatggctacaatgtcaatggcaggcctctgaagtgcagctggggcaaggacaagtccccgaccaacccgcagggtggttttgacccttcgcaacagcaggctttcagtccccagagcgctcagccttcggcataccctggcacgccatcgacctattacccgcagtatggaagcccgagccaatatggcgggcagcagcaaggctatggtggccctccagctcagtctcccgctggctacggagctcagcccatgggctatgccggacctccgagtgcgggaggatacggccgtggccaacagccccccaaccagcagtggacgcaacctcctgcggcccagaatttcaacagcccctatcccggctatcaaggctag

SEQ ID NO: 17113 - protein, 485 aa, Muscodor strobelii
  misc_feature: SGI Peptide ID NO. 565711
  misc_feature (181)..(252): Pfam Id: PF00076 Pfam Desc: RNA recognition motif. (a.k.a. RRM, RBD, or RNP domain)
  misc_feature (91)..(161): Pfam Id: PF00076 Pfam Desc: RNA recognition motif. (a.k.a. RRM, RBD, or RNP domain)
  misc_feature (307)..(372): Pfam Id: PF00076 Pfam Desc: RNA recognition motif. (a.k.a. RRM, RBD, or RNP domain)
  misc_feature (1)..(485): NCBI GI: 164424152 Blast Desc: NCU07874 [Neurospora crassa OR74A] gi|157070397|gb|EAA33487.2| NCU07874 [Neurospora crassa OR74A]
  misc_feature (1)..(485): NCBI GI: 171687054 Blast Desc: protein product [Podospora anserina] gi|170943488|emb|CAP69141.1| protein product [Podospora anserina]
  misc_feature (1)..(484): NCBI GI: 256729940 Blast Desc: [Nectria haematococca mpVI 77-13-4]
  misc_feature (1)..(485): NCBI GI: 39976995 Blast Desc: MGG_06400 [Magnaporthe grisea 70-15] gi|145016189|gb|EDK00679.1| MGG_06400 [Magnaporthe grisea 70-15]
  misc_feature (1)..(484): NCBI GI: 46122079 Blast Desc: FG05417.1 [Gibberella zeae PH-1]
  misc_feature (1)..(485): NCBI GI: 156058654 Blast Desc: SS1G_03339 [Sclerotinia sclerotiorum 1980] gi|154701126|gb|EDO00865.1| SS1G_03339 [Sclerotinia sclerotiorum 1980]
  misc_feature (37)..(485): NCBI GI: 261358466 Blast Desc: nucleolysin TIA-1 [Verticillium albo-atrum VaMs.102]
  misc_feature (1)..(420): NCBI GI: 225682885 Blast Desc: nucleolysin TIA-1 [Paracoccidioides brasiliensis Pb03]
  misc_feature (1)..(484): NCBI GI: 145239797 Blast Desc: An08g04280 [Aspergillus niger] gi|134077058|emb|CAK39931.1| protein product [Aspergillus niger]
  misc_feature (1)..(484): NCBI GI: 115491713 Blast Desc: ATEG_00398 [Aspergillus terreus NIH2624] gi|114197344|gb|EAU39044.1| ATEG_00398 [Aspergillus terreus NIH2624]
MADSGVPSAGAQLPPPPQPNAGAPGFDANQNGQGNPAHMPPPPLHIPPNTNPIPTAITSPLSAVDGNNVMSPSSGGPFPRRAAPEPNKRALYVGGLDPRVTEDVLRQIFETTGHVQNVKIIPDKNAKGYNYGFVEYDDPGAAERAMQTLNGRRVHQAEIRVNWAYQSNTTNKEDTSSHFHIFVGDLSNEVNDEVLMQAFSAFGTISEARVMWDMKTGRSRGYGFVAFRDRGDAEKALTSMDGEWLGSRAIRCNWANQKGQPSIAQQAAMSSMGMTPTTPFGHHHFPTHGIQSYDMIVNQTPGWQTTCYVGNLTPYTTQNDLVPLFQNFGYVTESRFQADRGFAFIKMDTHENAAMAICQLNGYNVNGRPLKCSWGKDKSPTNPQGGFDPSQQQAFSPQSAQPSAYPGTPSTYYPQYGSPSQYGGQQQGYGGPPAQSPAGYGAQPMGYAGPPSAGGYGRGQQPPNQQWTQPPAAQNFNSPYPGYQG

SEQ ID NO: 17114 - DNA, 3351 bp, Muscodor strobelii
  misc_feature: SGI EST ID NO. CUFF.40355.0
  misc_feature: Variant of the nucleotide sequence at SEQ ID NO 17112
gcgcccgcgagagagcccgctaggcctgctctccaccctgggccaaaagtcggtgctaccacgactcctcagtcgtccactctgtcactttactttggacccccgttttctgtttgcttcgctcctctcctcccctccccatcctcagatcgtgttgcgaaaatcctctgaacgtctcgtcgcggtgtgttgtgttgagatcccggggcacttcctgtcaggcagtttccttttctctttgcccgtctcgttcgtcgttccatcttccgtctcccgcatcttcctcttgttgctgcgaagtctcgtttcttctctgattcgctttccctttttatcaccatcccattattcccacctgctgcgtccaccagcgcaccagcgcagctcgttggcaccacctatcacggcaactcatcttgagtctcggtgtggaccagcagcagctcctggcccgccttttgctcgacgccggccgcgcttgtcttcttgacattcgacctcaatctccccctccgattccccctccacctcgcaacatctcaacttgcgccgtcgccgtgccttggccgcatttgagaggtatccaatcagtacacatttatttcgaccatcgagttgctctaggattatctgcattttagctggcgctacttatcatccacgcggcaagccgatcccacagctctgtgagatttgttgggcccaaacacctatcgcggccaatcgtcattcccaccacgctgcgcaactatcaggctgagggaacacgagcaaacatctagccaataccccaccttgtctacgtgccaaccgctcgtcacatccagagcccacgagatcccgcgccggtcaaagagaagctcgatcgcaacaccccgccatcgcttccccgccctccgcgcctgacgactctcttctcgtcctcccccaaacaccaacaccgccgataaacttcccctgcatccgcaatggctgactcgggtgttccttctgctggtgcccagctccccccgccgccgcagcccaatgccggtgcgcctggcttcgacgccaaccagaatggccagggcaatccggcgcatatgccgcctcccccattgcacatccctcccaacacgaaccccatccctaccgccattacctcgcccctctcggctgtcgatggcaacaatgtcatgtcaccttccagcggtggtcccttcccgcgtcgtgctgcacccgagcctaacaagcgtgcactctacgtcggcggcctcgatccccgcgtcaccgaagatgtgctgcgacagatctttgagaccacgggccacgttcagaatgtgaagatcatcccggacaagaatgctaagggctacaactatggcttcgtagaatatgatgaccccggtgccgctgagcgtgctatgcagacgctgaacggccgccgagtgcatcaggctgagatccgagtgaactgggcttaccagtccaacacaacaaacaaagaggatacttcatctcacttccacattttcgtgggtgatctatccaacgaagtcaatgatgaggttctcatgcaggcattttctgcctttggaaccatttccgaggctcgcgtcatgtgggatatgaagacaggtcgctcccgcgggtatggattcgttgctttcagagaccgaggggatgcggagaaggccctgacttcgatggatggagagtggctgggatctcgggccattcgatgcaactgggccaaccagaaaggccagccgtctattgcccagcaagcagctatgtcgtcgatgggcatgacacccactacgccattcggtcaccaccatttccccactcatggtatccagagttacgatatgatcgtgaaccagacacccggctggcagacaacttgctacgtgggcaatctgaccccttacaccacgcagaacgacctcgttcccttgttccagaattttggatacgtgaccgagtctcgcttccaggctgaccgaggattcgctttcatcaagatggacacccatgagaacgctgccatggcaatctgccagcttaatggctacaatgtcaatggcaggcctctgaagtgcagctggggcaaggacaagtccccgaccaacccgcagggtggttttgacccttcgcaacagcaggctttcagtccccagagcgctcagccttcggcataccctggcacgccatcgacctattacccgcagtatggaagcccgagccaatatggcgggcagcagcaaggctatggtggccctccagctcagtctcccgctggctacggagctcagcccatgggctatgccggacctccgagtgcgggaggatacggccgtggccaacagccccccaaccagcagtggacgcaacctcctgcggcccagaatttcaacagcccctatcccggctatcaaggctagcgtcctgagagtcgtctatcgggcagcaaagtgtaggaagattacgctcgagggctgaatgctccacttcgagaacgaaaggggttatgggaggcggacctcataaacattaccaggtgccgttttcgattgcagaggtggattagccagcatgctcggcaccgtgcttcaccacgtagcgaggtggaaagcaggtcatgtttttttccaggtccaggtccaggttcaggttgtttatgtaaacatcatttctcttttcccgacgatgtttctcattcattcttgattgctatttcttttgatcgttgtgtgattatttgattcgctaccagaatcatctgaagccctgtctttgtcgcctcccgattgcattctaaaagttattggcttctccttggagtactcctttgatacctcacgggctgtcacaagccttgacgaagttacggccgctgttcttgccatttttctctttcacaaggtagcgagagcaggcggtgtgttgaccgacgacctgacttttgaagtggtttggtccaagtcaataggcaagacgagaggctcggaggccaaattcgtgtattaaatgcaagcatcgaagactatgctgggtttcgtatcatacgatgagatctttgatagacgtctctacaggtattattggaagcgattgggacgctccaggagggtgggttcattacactcgtatcgcaaccactggtggaagaggctgatatgcaaacctggtggtagacttgagggtgaagaggaaaaagttccttggatgatgatccatctctaggaggtgttgtcgatgccgtaaaatttgtgtatgcatgaaaaatcaagatcaaataaggaatgtctggacaagattggattggcatcaaaaaactcacaatactcacaatctatcagaaaactc

SEQ ID NO: 17115 - DNA, 1515 bp, Muscodor strobelii
  misc_feature: SGI cDNA ID NO. 565712
  misc_feature: Reduced expression when VOC is produced
  misc_feature: Encodes the peptide sequence at SEQ ID NO 17116
atggctgactcgggtgttccttctgctggtgcccagctccccccgccgccgcagcccaatgccggtgcgcctggcttcgacgccaaccagaatggccagggcaatccggcgcatatgccgcctcccccattgcacatccctcccaacacgaaccccatccctaccgccattacctcgcccctctcggctgtcgatggcaacaatgtcatgtcaccttccagcggtggtcccttcccgcgtcgtgctgcacccgagcctaacaagcgtgcactctacgtcggcggcctcgatccccgcgtcaccgaagatgtgctgcgacagatctttgagaccacgggccacgttcagaatgtgaagatcatcccggacaagaatgctaagggctacaactatggcttcgtagaatatgatgaccccggtgccgctgagcgtgctatgcagacgctgaacggccgccgagtgcatcaggctgagatccgagtgaactgggcttaccagtccaacacaacaaacaaagaggatacttcatctcacttccacattttcgtgggtgatctatccaacgaagtcaatgatgaggttctcatgcaggcattttctgcctttggaaccatttccgaggctcgcgtcatgtgggatatgaagacaggtcgctcccgcgggtatggattcgttgctttcagagaccgaggggatgcggagaaggccctgacttcgatggatggagagtggctgggatctcgggccattcgatgcaactgggccaaccagaaaggccagccgtctattgcccagcaagcagctatgtcgtcgatgggcatgacacccactacgccattcggtcaccaccatttccccactcatggtatccagagttacgatatgatcgtgaaccagacacccggctggcagacaacttgctacgtgggcaatctgaccccttacaccacgcagaacgacctcgttcccttgttccagaattttggatacgtgaccgagtctcgcttccaggctgaccgaggattcgctttcatcaagatggacacccatgagaacgctgccatggcaatctgccagcttaatggctacaatgtcaatggcaggcctctgaagtgcagctggggcaaggacaagtccccgaccaacccgcagggtggttttgacccttcgcaacagcaggctttcagtccccagagcgctcagccttcggcataccctggcacgccatcgacctattacccgcagtatggaagtaagttctcaactgaagcactcttcttgtctggcgagagcaagactgatcctgtaggcccgagccaatatggcgggcagcagcaaggctatggtggccctccagctcagtctcccgctggctacggagctcagcccatgggctatgccggacctccgagtgcgggaggatacggccgtggccaacagccccccaaccagcagtggacgcaacctcctgcggcccagaatttcaacagcccctatcccggctatcaaggctag

SEQ ID NO: 17116 - protein, 504 aa, Muscodor strobelii
  misc_feature: SGI Peptide ID NO. 565712
  misc_feature (181)..(252): Pfam Id: PF00076 Pfam Desc: RNA recognition motif. (a.k.a. RRM, RBD, or RNP domain)
  misc_feature (91)..(161): Pfam Id: PF00076 Pfam Desc: RNA recognition motif. (a.k.a. RRM, RBD, or RNP domain)
  misc_feature (307)..(372): Pfam Id: PF00076 Pfam Desc: RNA recognition motif. (a.k.a. RRM, RBD, or RNP domain)
  misc_feature (1)..(504): NCBI GI: 171687054 Blast Desc: protein product [Podospora anserina] gi|170943488|emb|CAP69141.1| protein product [Podospora anserina]
  misc_feature (1)..(504): NCBI GI: 164424152 Blast Desc: NCU07874 [Neurospora crassa OR74A] gi|157070397|gb|EAA33487.2| NCU07874 [Neurospora crassa OR74A]
  misc_feature (1)..(503): NCBI GI: 256729940 Blast Desc: [Nectria haematococca mpVI 77-13-4]
  misc_feature (1)..(504): NCBI GI: 39976995 Blast Desc: MGG_06400 [Magnaporthe grisea 70-15] gi|145016189|gb|EDK00679.1| MGG_06400 [Magnaporthe grisea 70-15]
  misc_feature (1)..(503): NCBI GI: 46122079 Blast Desc: FG05417.1 [Gibberella zeae PH-1]
  misc_feature (1)..(504): NCBI GI: 156058654 Blast Desc: SS1G_03339 [Sclerotinia sclerotiorum 1980] gi|154701126|gb|EDO00865.1| SS1G_03339 [Sclerotinia sclerotiorum 1980]
  misc_feature (37)..(504): NCBI GI: 261358466 Blast Desc: nucleolysin TIA-1 [Verticillium albo-atrum VaMs.102]
  misc_feature (1)..(503): NCBI GI: 145239797 Blast Desc: An08g04280 [Aspergillus niger] gi|134077058|emb|CAK39931.1| protein product [Aspergillus niger]
  misc_feature (1)..(416): NCBI GI: 225682885 Blast Desc: nucleolysin TIA-1 [Paracoccidioides brasiliensis Pb03]
  misc_feature (26)..(491): NCBI GI: 240106689 Blast Desc: oligouridylate binding protein , [Coccidioides posadasii C735 delta SOWgp]
  misc_feature: Useful for introducing or modulating the production of volatile compounds
MADSGVPSAGAQLPPPPQPNAGAPGFDANQNGQGNPAHMPPPPLHIPPNTNPIPTAITSPLSAVDGNNVMSPSSGGPFPRRAAPEPNKRALYVGGLDPRVTEDVLRQIFETTGHVQNVKIIPDKNAKGYNYGFVEYDDPGAAERAMQTLNGRRVHQAEIRVNWAYQSNTTNKEDTSSHFHIFVGDLSNEVNDEVLMQAFSAFGTISEARVMWDMKTGRSRGYGFVAFRDRGDAEKALTSMDGEWLGSRAIRCNWANQKGQPSIAQQAAMSSMGMTPTTPFGHHHFPTHGIQSYDMIVNQTPGWQTTCYVGNLTPYTTQNDLVPLFQNFGYVTESRFQADRGFAFIKMDTHENAAMAICQLNGYNVNGRPLKCSWGKDKSPTNPQGGFDPSQQQAFSPQSAQPSAYPGTPSTYYPQYGSKFSTEALFLSGESKTDPVGPSQYGGQQQGYGGPPAQSPAGYGAQPMGYAGPPSAGGYGRGQQPPNQQWTQPPAAQNFNSPYPGYQG

SEQ ID NO: 17117 - DNA, 3351 bp, Muscodor strobelii; identical to SEQ ID NO: 17114
  misc_feature: SGI EST ID NO. CUFF.40355.0
  misc_feature: Variant of the nucleotide sequence at SEQ ID NO 17115

SEQ ID NO: 17118 - DNA, 2037 bp, Muscodor strobelii
  misc_feature: SGI cDNA ID NO. 565713
  misc_feature: Encodes the peptide sequence at SEQ ID NO 17119
atggctgctcctgtggatgaccccttgaagatcatcaagcagacatacaatgaaatacttgttcaaactggaaagcatttcagagcagtggacgggtccagtggtctcgccggcgctcactctgccatacgagccaagacggaagactcgctgactcagtatcacttcgctttgcacgaaatcgagaatgagattataagagcaaaatctgtcttacttcgagacttggagaaactacgtgctgcccgtgttccagcccctcagccggttgttactccagctccggctccggctccagtcccaacttctattccggctcctacacagtctaatgctccaacggctccaatgttagagctaccgtccgctgctgcccacacactgaaggggccctcctacgctgagactgtcgagacgaagacggcagcaccattcccagacatgggtatgggtatgagtatgactgctgatattgatctatcggcacctgtgaaaaacaatccttccccgcgtattcaatctggatctgtcaagccagttacctcacgtgcaactccaccgatcaagactgaagcaaaaccatccccaaaacctgcccctatgccaaaacctacgccacccacaaaagttactccaatcccaccacctcaaatcccacgactaccggctacgcagcaagcttcgaatatgaccagtccaaatcaacagaaggctgtgccggcaagtcaacctaccaaaactaccgctccagtccggccacctcagcctgctcaaactattaagtcggtccctgataatccactggatagcacacttgggccactgccagcaagcattggcgagggaacgagtacgggcaatggcaatggcaatggcgagttgacctttacagatatggagttctccctagcacctccgccaaacgaaccacagggtggagcaccacctgcacctatgccagaattcgacttggcgaatttcgtaccacctcctgggcccagcgaagttccaacaacgactatggacactaacagcaatgacgttaccatgactaatacccaggatccatcgaactcgaacatagatgacttgttcaaccttggcaacggtgccaatgacaacatgtttgatctcggaggcggtgggacaggcgatagcacgttcgatgacatgatgtactttggtaacgataattcagacatggaccagttcgatgatgcttactttgttcatcccatcgtgtctgacaccaaacttcccgacgacaacgttgtcggcaacgagtcgtctctcgaggagtttaccagctttttgagtggccgtgggttccgcctgggctgtggcagcaaggttcacgctgatggcgaaaccaagaacacgcacaaggaagtcacttcgattggactcgatgaattcactatcaatttcaacaatgctgtacacaaataccgattccttctcaagatcctccgccgttttcatcttgtcaagttcaagccctccatcgtctacgggtccaaatttgaggacactcacggcttcatcgagcttgatgacttcaacctcgacaaaaccatcgtgtaccactgcgaggttcagatgctcaactacgattgcgacgactgtggcaaggtcggctacggactcgtagagtaccgcgaagaacctaagatatccaccatccctatccgctatggcgaccccaaagtcaccctccgggcggttctcgtgcacaccaccgaggagaacgagatgtatggccaacccgccatcttgcgtggccgcatgcagtgtgttgacgctgagacctctggggaagttgctgtctttcagggcaacctctactgcgagaagaagattaagaacgaacgcatgacgctccgtggacacactggctacagcagcagcaccgttaaggatgaacgagtcagagtcaacggcttccttcgtcttcgtgaggataagaagatctggagtgagctgaaggacaagctttcgttgcctttctgccacgagaacaaggacaagaaggactaa

SEQ ID NO: 17119 - protein, 678 aa, Muscodor strobelii
  misc_feature: SGI Peptide ID NO. 565713
  misc_feature (9)..(411): NCBI GI: 85109055 Blast Desc: NCU07875 [Neurospora crassa OR74A] gi|28924344|gb|EAA33488.1| [Neurospora crassa OR74A]
  misc_feature (7)..(152): NCBI GI: 256729752 Blast Desc: [Nectria haematococca mpVI 77-13-4]
  misc_feature (8)..(409): NCBI GI: 116191713 Blast Desc: [Chaetomium globosum CBS 148.51] gi|88181487|gb|EAQ88955.1| [Chaetomium globosum CBS 148.51]
  misc_feature (9)..(171): NCBI GI: 171687056 Blast Desc: protein product [Podospora anserina] gi|170943489|emb|CAP69142.1| protein product [Podospora anserina]
MAAPVDDPLKIIKQTYNEILVQTGKHFRAVDGSSGLAGAHSAIRAKTEDSLTQYHFALHEIENEIIRAKSVLLRDLEKLRAARVPAPQPVVTPAPAPAPVPTSIPAPTQSNAPTAPMLELPSAAAHTLKGPSYAETVETKTAAPFPDMGMGMSMTADIDLSAPVKNNPSPRIQSGSVKPVTSRATPPIKTEAKPSPKPAPMPKPTPPTKVTPIPPPQIPRLPATQQASNMTSPNQQKAVPASQPTKTTAPVRPPQPAQTIKSVPDNPLDSTLGPLPASIGEGTSTGNGNGNGELTFTDMEFSLAPPPNEPQGGAPPAPMPEFDLANFVPPPGPSEVPTTTMDTNSNDVTMTNTQDPSNSNIDDLFNLGNGANDNMFDLGGGGTGDSTFDDMMYFGNDNSDMDQFDDAYFVHPIVSDTKLPDDNVVGNESSLEEFTSFLSGRGFRLGCGSKVHADGETKNTHKEVTSIGLDEFTINFNNAVHKYRFLLKILRRFHLVKFKPSIVYGSKFEDTHGFIELDDFNLDKTIVYHCEVQMLNYDCDDCGKVGYGLVEYREEPKISTIPIRYGDPKVTLRAVLVHTTEENEMYGQPAILRGRMQCVDAETSGEVAVFQGNLYCEKKIKNERMTLRGHTGYSSSTVKDERVRVNGFLRLREDKKIWSELKDKLSLPFCHENKDKKD

SEQ ID NO: 17120 - DNA, 1733 bp, Muscodor strobelii
  misc_feature: SGI EST ID NO. CUFF.40315.0
  misc_feature: Variant of the nucleotide sequence at SEQ ID NO 17118
attgtgccctcagtgatgcgcgcagttccatcgaggaatcaatcgactataatgccaattctcattgctaataaatagtgctccatgaagctaagtattccgtctacaagttaggtgagaaggaacgaagggacagtcgacaaggaaccaaaaaggcaaacagtttcgtgacctctattcgggaacagacaaacgtcaagaactacagcttggtcggcatatctacagcaccatctcactgaacgccttgatatcaacctgctatcccaacaaattgcggtgtcctgtcttaatcgggatgagccacgcataagaaagcttacatctcctgacataatttaccggcgttcagcatttcttggataccgcattaaaccctcctacgatctttgcacgatggctgctcctgtggatgaccccttgaagatcatcaagcagacatacaatgaaatacttgttcaaactggaaagcatttcagagcagtggacgggtccagtggtctcgccggcgctcactctgccatacgagccaagacggaagactcgctgactcagtatcacttcgctttgcacgaaatcgagaatgagattataagagcaaaatctgtcttacttcgagacttggagaaactacgtgctgcccgtgttccagcccctcagccggttgttactccagctccggctccggctccagtcccaacttctattccggctcctacacagtctaatgctccaacggctccaatgttagagctaccgtccgctgctgcccacacactgaaggggccctcctacgctgagactgtcgagacgaagacggcagcaccattcccagacatgggtatgggtatgagtatgactgctgatattgatctatcggcacctgtgaaaaacaatccttccccgcgtattcaatctggatctgtcaagccagttacctcacgtgcaactccaccgatcaagactgaagcaaaaccatccccaaaacctgcccctatgccaaaacctacgccacccacaaaagttactccaatcccaccacctcaaatcccacgactaccggctacgcagcaagcttcgaatatgaccagtccaaatcaacagaaggctgtgccggcaagtcaacctaccaaaactaccgctccagtccggccacctcagcctgctcaaactattaagtcggtccctgataatccactggatagcacacttgggccactgccagcaagcattggcgagggaacgagtacgggcaatggcaatggcaatggcgagttgacctttacagatatggagttctccctagcacctccgccaaacgaaccacagggtggagcaccacctgcacctatgccagaattcgacttggcgaatttcgtaccacctcctgggcccagcgaagttccaacaacgactatggacactaacagcaatgacgttaccatgactaatacccaggatccatcgaactcgaacatagatgacttgttcaaccttggcaacggtgccaatgacaacatgtttgatctcggaggcggtgggacaggcgatagcacgttcgatgacatgatgtactttggtaacgataattcagacatggaccagttcgatgatgcttactttggtctatgatagtttaacctcggaagataccccttttcgtatctgtcagctgagaacacttagcaagagacatacatgagaatccagaactaggttatcatcgacagagt

SEQ ID NO: 17121 - DNA, 1248 bp, Muscodor strobelii
  misc_feature: SGI cDNA ID NO. 565714
  misc_feature: Elevated expression when VOC is produced
  misc_feature: Encodes the peptide sequence at SEQ ID NO 17122
atgaaaatcacgtctattcttgcggcggctaccgtcgtcgtaccggctctggcagtcaacctgcctctgtcgagttcttctcgatggatccttgacgcggacggtgcccgggttaagcttacatgtatcaactgggctggacatcttgagtcaaatctcccagagggtctgaataagcagtcagtagatagcatcgctagtttcgtcgcggaccaggggtataactgtgttcgcttgacttactcgatcgactatgcactgaaccctacgatgaagatctctgatgcgatcgccaacgccgctacggctacgggtatcgacagcgcgacgtgggatggcatctataatgatattaagacgcacaactctttcgctgccgacggtactctacaggatgctttttcagcggtcatcgcttcgctctggtcgaagggtgtcatgactattctcgacaaccacgttagcaaggcgagctggtgttgcgacctcgatgatggcaatggatggtgggacgaggcgcatgggtatattgcgttgaacagcagatacttcaacacacagaactggtacaacggattgaccaatatggctacatggtccaaatcgcaggtcggcgtcatcggcatgtcacttcgcaacgaaatccgggagttcccaatacttcaaaatacggggtcaggagccggggattggtctaagtacgtgaccgaagccgcaaaccgcgtccacgcagcaaactccgatcttctcatcgtcatcggcggcacagcgtccgcaactgtcctcacgcagatcgaaaccggtgaaatgatcgactggagcgggtgggcgggcaaacatgtctgggagtggcattcttacgagttcacggttactttcgcggctacaaagggtgattgtggatctcagaagggtgcttacggtctctttgacggattcgttctcaagcaggacgaggactataccgcgcctctgatcctctctgagtttggatttggtcaaacgggaggaaacaatagtggtttaagtgatgatgattcgaagtactttacgtgtttgaaggaatacatgctggacaacgactcggaatgggctatttgggcgctgcagggttcttattacgttcgtgaggggacggttgaccatgatgagggatttggtgtgctgaatcatgattggagtgggttgaggaattctgagttgccgactatcctaggagatatgtttaaggctacgcagggcccgtga

SEQ ID NO: 17122 - protein, 415 aa, Muscodor strobelii
  misc_feature: SGI Peptide ID NO. 565714
  misc_feature (29)..(374): Pfam Id: PF00150 Pfam Desc: Cellulase (glycosyl hydrolase family 5)
  misc_feature (25)..(415): NCBI GI: 212530076 Blast Desc: cellulase family protein [Penicillium marneffei ATCC 18224] gi|210074593|gb|EEA28680.1| cellulase family protein [Penicillium marneffei ATCC 18224]
  misc_feature (10)..(398): NCBI GI: 242761487 Blast Desc: cellulase family protein [Talaromyces stipitatus ATCC 10500] gi|218723385|gb|EED22802.1| cellulase family protein [Talaromyces stipitatus ATCC 10500]
  misc_feature (6)..(415): NCBI GI: 39976999 Blast Desc: MGG_06402 [Magnaporthe grisea 70-15] gi|145016186|gb|EDK00676.1| MGG_06402 [Magnaporthe grisea 70-15]
  misc_feature (12)..(415): NCBI GI: 171687058 Blast Desc: protein product [Podospora anserina] gi|170943490|emb|CAP69143.1| protein product [Podospora anserina]
  misc_feature (25)..(415): NCBI GI: 116191715 Blast Desc: CHGG_05575 [Chaetomium globosum CBS 148.51] gi|88181488|gb|EAQ88956.1| CHGG_05575 [Chaetomium globosum CBS 148.51]
  misc_feature (23)..(415): NCBI GI: 169860222 Blast Desc: CC1G_04059 [Coprinopsis cinerea okayama7#130] gi|116502068|gb|EAU84963.1| CC1G_04059 [Coprinopsis cinerea okayama7#130]
  misc_feature (22)..(415): NCBI GI: 42562033 Blast Desc: glycosyl hydrolase family 5 protein / cellulase family protein [Arabidopsis thaliana] gi|51536480|gb|AAU05478.1| At1g13130 [Arabidopsis thaliana]
  misc_feature (22)..(415): NCBI GI: 4850396 Blast Desc: AC007357_15 F3F19.15 [Arabidopsis thaliana]
  misc_feature (22)..(415): NCBI GI: 15231514 Blast Desc: glycosyl hydrolase family 5 protein / cellulase family protein [Arabidopsis thaliana] gi|11994432|dbj|BAB02434.1| protein product [Arabidopsis thaliana]
  misc_feature (3)..(415): NCBI GI: 255547996 Blast Desc: hydrolase, hydrolyzing O-glycosyl compounds, [Ricinus communis] gi|223546106|gb|EEF47609.1| hydrolase, hydrolyzing O-glycosyl compounds, [Ricinus communis]
  misc_feature: Useful for introducing or modulating the production of volatile compounds
MKITSILAAATVVVPALAVNLPLSSSSRWILDADGARVKLTCINWAGHLESNLPEGLNKQSVDSIASFVADQGYNCVRLTYSIDYALNPTMKISDAIANAATATGIDSATWDGIYNDIKTHNSFAADGTLQDAFSAVIASLWSKGVMTILDNHVSKASWCCDLDDGNGWWDEAHGYIALNSRYFNTQNWYNGLTNMATWSKSQVGVIGMSLRNEIREFPILQNTGSGAGDWSKYVTEAANRVHAANSDLLIVIGGTASATVLTQIETGEMIDWSGWAGKHVWEWHSYEFTVTFAATKGDCGSQKGAYGLFDGFVLKQDEDYTAPLILSEFGFGQTGGNNSGLSDDDSKYFTCLKEYMLDNDSEWAIWALQGSYYVREGTVDHDEGFGVLNHDWSGLRNSELPTILGDMFKATQGP

SEQ ID NO: 17123 - DNA, 2972 bp, Muscodor strobelii
  misc_feature: SGI EST ID NO. CUFF.40325.0
  misc_feature: Variant of the nucleotide sequence at SEQ ID NO 17121
ccgaagtccagtgttgcctcgtttgtgtgcacagtgatattagatttaattcaagtctttaatactagcttcatcgtatctatccgcaaggttcatatcatctaattgccaaatctgaataggaccgcccggatcgacagctcgccaatctacggtgtttatgatgtgcatcgcaaaccaccctatcagctttcgagaaaagcctcgacggaaggtgggaactttgtagtcatcacccgacgacccgcaaggttacgaccgttttgtcgagatgtggaagcaggatcaccatttccacaaaaggtgccaaatagtgcctcatagccaatcaaggaggtcggacgcgaacatgtgtgaaactcgcgaaaactgggcttttcacttttcgacttttggagcaacaacagacgcatgattgatcgactgcgtggccaacgtcatgcctcgctggcaaaacaccagctgagggttgcaaggcacgcgcttctgcacccgtccgcgttggagacgcattgctcgtcgtgtggccgcatcccggttttgggccaggtaccgtgcaagccagtcaacgccattcgttctccccgcatttcttgagcaacgacctaccgcattcgcgcaacagggtccgatgaggatgggacgctacatcctgagttggccgcccgcgccgaagcattggcttccaagacgaaggctcaccttcgttgctcttggcagcttgcattatggttgttgatcagtggtctgatgccgttatctacgttgccaggagagcgcaatttgcttagtatcttccaggaattttaggtaggagtcttcttcttcttccccatctgctcgtaaaaagagcgccgggatggtcttctttccggacacggcaggtctcggcctcggtggaataggtgttgttgcttttccttttcctctcttcgggccaccagtctggaggctatgttccccgcgcccattcatagcattggcgttgcatcaggaaggtgtgtgtctttgccctacgggtaaaaacgatatgtggtgggttacatgtgcaccgatgtatttctatcggcgtgcatgtggccatccgccttggggattcccgttcccttgcaggtgcgcagcatgacatcaaggggctatataatgtctaataacacatcacaaccgcataaagtcttgtttttgccatcttcgtcatgacattggtcagcctcaagcagcccattcatcttgagttcgaacacgtttgtctctcttataagacgttcatctagacgtttgtgctcagttttggggtccagtgtgagtttttggatgtttatccgatcgaggtcttgaccttcactggcacacttgacctggtcaccataccatcgcaagtacctacacaggtcatcacagtttcttcgatcttaaacacgctgatctttagtcactttttggtaaattacttgcagcgtggtgtcttacttggctgggcatttctttcttatattaatgttcacctcctgctaataagttactcgtaaactctattgcgtcacgatctataagcaaatctataagccatctactattataccacataatgaaaatcacgtctattcttgcggcggctaccgtcgtcgtaccggctctggcagtcaacctgcctctgtcgagttcttctcgatggatccttgacgcggacggtgcccgggttaagcttacatgtatcaactgggctggacatcttgagtcaaatctcccagagggtctgaataagcagtcagtagatagcatcgctagtttcgtcgcggaccaggggtataactgtgttcgcttgacttactcgatcgactatgcactgaaccctacgatgaagatctctgatgcgatcgccaacgccgctacggctacgggtatcgacagcgcgacgtgggatggcatctataatgatattaagacgcacaactctttcgctgccgacggtactctacaggatgctttttcagcggtcatcgcttcgctctggtcgaagggtgtcatgactattctcgacaaccacgttagcaaggcgagctggtgttgcgacctcgatgatggcaatggatggtgggacgaggcgcatgggtatattgcgttgaacagcagatacttcaacacacagaactggtacaacggattgaccaatatggctacatggtccaaatcgcaggtcggcgtcatcggcatgtcacttcgcaacgaaatccgggagttcccaatacttcaaaatacggggtcaggagccggggattggtctaagtacgtgaccgaagccgcaaaccgcgtccacgcagcaaactccgatcttctcatcgtcatcggcggcacagcgtccgcaactgtcctcacgcagatcgaaaccggtgaaatgatcgactggagcgggtgggcgggcaaacatgtctgggagtggcattcttacgagttcacggttactttcgcggctacaaagggtgattgtggatctcagaagggtgcttacggtctctttgacggattcgttctcaagcaggacgaggactataccgcgcctctgatcctctctgagtttggatttggtcaaacgggaggaaacaatagtggtttaagtgatgatgattcgaagtactttacgtgtttgaaggaatacatgctggacaacgactcggaatgggctatttgggcgctgcagggttcttattacgttcgtgaggggacggttgaccatgatgagggatttggtgtgctgaatcatgattggagtgggttgaggaattctgagttgccgactatcctaggagatatgtttaaggctacgcagggcccgtgaaggacggatacatcaggttcggaatgaaatgcatgggtactatggagcttatgaggtaatgggtgccatgatttcggtatatatctacttaatgcgttttacaggcaaatacaccgttgctcgatcaatcacgtaa

SEQ ID NO: 17124 - DNA, 1254 bp, Muscodor strobelii
  misc_feature: SGI cDNA ID NO. 565715
  misc_feature: Reduced expression when VOC is produced
  misc_feature: Encodes the peptide sequence at SEQ ID NO 17125
atggccgacacgacgacacagtgtatatcccaaccaacaggcgcgactccaaatacccttaccgctctcgcgattccgcctacctcaatatcccttcctcccaactcagtagcgaacaggcttaaagcgcatcttgggctatccacgttgagccccgtcactcaacatggcagctttgaattcgatcgcgtcattaagtcgggctacgtacataaacggacccagaagacgaagacatggaaatctgtctatctggtcctcagaccaaacacaatctcgatgtataaatcggacaaagaaagcaagctccgacataagatatatctctccgacttgtccgccgtggctcctctaaaagacccgaagcaaaagcggcagcatctctttggcctcttctccccagccaagaactaccacttcgaagctccgacagataaagatgcgcaggagtggatcgatcttataaggaaggatgcccgaattgaagaggaagaggaagagatgttcttggcaagccccatcgtccggcgccagtccttcgcgccagccgccatgttgaaaggctccgacggaacgcgcgaccagcctgcagaccctgagagattattatcgagttcaccagaggccgagcgtccgaggtcaaaatctgttcgttcgaccaacacgaggcggctatcccacaacgactactcgggtatgtctgggaacgagctcgcgtcgcaatcggactgctcggatacagaaggccagagaggtaatgggccgtcgatcgagggagtaacttctgcgtcacagcatgatgcgaatcataagcggcccatgattggggatcgcaatattagccaattaagcgggctgaacctcgagcgtgaccccgatcgagttgtctggcaaggctggctctggtatctaaaaggcaagcgcggcatgagacaatggaaaaattgctgggccgtgctccggccgagaaatttcatcctatataaggacgaatcggagtattctgcccagttcatacttgcactcgcctcggtcgtcaatgttgttgatatcgatccgattagcaggacaaagatacattgtctgcagatcatcactgatgagaagagctatcgattctgcgcaccggatgaggaggcgctagttcaatgtctcggagcattcaagagtctcttctccaagagaaaagaattagaggcccgagcctcggtctcgggaccaggaccaggacagacaaaaatgtctacatcgtga

SEQ ID NO: 17125 - protein, 417 aa, Muscodor strobelii
  misc_feature: SGI Peptide ID NO. 565715
  misc_feature (64)..(160): Pfam Id: PF00169 Pfam Desc: PH domain
  misc_feature (295)..(393): Pfam Id: PF00169 Pfam Desc: PH domain
  misc_feature (295)..(379): Pfam Id: PF00169 Pfam Desc: PH domain
  misc_feature (40)..(401): NCBI GI: 85109215 Blast Desc: NCU07876 [Neurospora crassa OR74A] gi|28924445|gb|EAA33573.1| conserved [Neurospora crassa OR74A]
  misc_feature (17)..(399): NCBI GI: 261358463 Blast Desc: PH domain-containing protein [Verticillium albo-atrum VaMs.102]
  misc_feature (48)..(404): NCBI GI: 256729941 Blast Desc: NECHADRAFT_71197 [Nectria haematococca mpVI 77-13-4]
  misc_feature (2)..(401): NCBI GI: 171687060 Blast Desc: protein product [Podospora anserina] gi|170943491|emb|CAP69144.1| protein product [Podospora anserina]
  misc_feature (66)..(390): NCBI GI: 145608746 Blast Desc: MGG_06403 [Magnaporthe grisea 70-15] gi|145016185|gb|EDK00675.1| MGG_06403 [Magnaporthe grisea 70-15]
  misc_feature (59)..(380): NCBI GI: 116191717 Blast Desc: CHGG_05576 [Chaetomium globosum CBS 148.51] gi|88181489|gb|EAQ88957.1| CHGG_05576 [Chaetomium globosum CBS 148.51]
  misc_feature (1)..(396): NCBI GI: 154303066 Blast Desc: BC1G_09553 [Botryotinia fuckeliana B05.10] gi|150855016|gb|EDN30208.1| BC1G_09553 [Botryotinia fuckeliana B05.10]
  misc_feature (10)..(396): NCBI GI: 156058708 Blast Desc: SS1G_03366 [Sclerotinia sclerotiorum 1980] gi|154701153|gb|EDO00892.1| SS1G_03366 [Sclerotinia sclerotiorum 1980]
  misc_feature (4)..(412): NCBI GI: 169613655 Blast Desc: SNOG_09960 [Phaeosphaeria nodorum SN15] gi|160707204|gb|EAT82295.2| SNOG_09960 [Phaeosphaeria nodorum SN15]
  misc_feature (11)..(401): NCBI GI: 189199076 Blast Desc: conserved [Pyrenophora tritici-repentis Pt-1C-BFP] gi|187982974|gb|EDU48462.1| conserved [Pyrenophora tritici-repentis Pt-1C-BFP]
  misc_feature: Useful for introducing or modulating the production of volatile compounds
MADTTTQCISQPTGATPNTLTALAIPPTSISLPPNSVANRLKAHLGLSTLSPVTQHGSFEFDRVIKSGYVHKRTQKTKTWKSVYLVLRPNTISMYKSDKESKLRHKIYLSDLSAVAPLKDPKQKRQHLFGLFSPAKNYHFEAPTDKDAQEWIDLIRKDARIEEEEEEMFLASPIVRRQSFAPAAMLKGSDGTRDQPADPERLLSSSPEAERPRSKSVRSTNTRRLSHNDYSGMSGNELASQSDCSDTEGQRGNGPSIEGVTSASQHDANHKRPMIGDRNISQLSGLNLERDPDRVVWQGWLWYLKGKRGMRQWKNCWAVLRPRNFILYKDESEYSAQFILALASVVNVVDIDPISRTKIHCLQIITDEKSYRFCAPDEEALVQCLGAFKSLFSKRKELEARASVSGPGPGQTKMSTS

SEQ ID NO: 17126 - DNA, 2215 bp, Muscodor strobelii
  misc_feature: SGI EST ID NO. CUFF.40328.0
  misc_feature: Variant of the nucleotide sequence at SEQ ID NO 17124
cgtttgaattgtctcctttctcatctctccaaccctacctagataatgtaatgactcttctcttcttttctgtctatgcgactatctagtactgtcccgtagcaacgtttgcggcattggcatcgacgccaccaccagcgtgaggtcatcggtgataggtctgtgttttgtgtatagccacttctgcggctcatttcgcgctgcctttgcctccctgccgatcaatcgagaggggcaactaatccgtcttgtacatatttgcccacctgcattccaccaccctcttctgcttcatctgcacccctgatccacacgcgcccttttgcctatcgtcttctcagcgatagctacttgctactcctttctcgccagtcattcaattctttccttgtccgcctgtttgcttccactgcatactgaagtctttgtaccgatcgggcacttaattcgcattcacttcgtggacgcatcgttgcgcatcctgtcgcctggacctgtcgcccattcacggagctcctcatcctcattgacctcaccttgttttcattccctgttggatccaacctctgcgcgcataacaccactgccacaagcattgattcctgctggtcatttgtagctccagaccgacccgttcatgagacccgggcgccaaactttcgtctccagcagacatcttgtcaggcgccttcgactgggtacccatagctagcaatatctcaactctatccgctgtattgcagctggctccggacacccgatgacatctctctggccttttgtttcccgccgtctttgtaattctaaacatataccggagtgtttatagataacccactataccgcatatcacaatggccgacacgacgacacagtgtatatcccaaccaacaggcgcgactccaaatacccttaccgctctcgcgattccgcctacctcaatatcccttcctcccaactcagtagcgaacaggcttaaagcgcatcttgggctatccacgttgagccccgtcactcaacatggcagctttgaattcgatcgcgtcattaagtcgggctacgtacataaacggacccagaagacgaagacatggaaatctgtctatctggtcctcagaccaaacacaatctcgatgtataaatcggacaaagaaagcaagctccgacataagatatatctctccgacttgtccgccgtggctcctctaaaagacccgaagcaaaagcggcagcatctctttggcctcttctccccagccaagaactaccacttcgaagctccgacagataaagatgcgcaggagtggatcgatcttataaggaaggatgcccgaattgaagaggaagaggaagagatgttcttggcaagccccatcgtccggcgccagtccttcgcgccagccgccatgttgaaaggctccgacggaacgcgcgaccagcctgcagaccctgagagattattatcgagttcaccagaggccgagcgtccgaggtcaaaatctgttcgttcgaccaacacgaggcggctatcccacaacgactactcgggtatgtctgggaacgagctcgcgtcgcaatcggactgctcggatacagaaggccagagaggtaatgggccgtcgatcgagggagtaacttctgcgtcacagcatgatgcgaatcataagcggcccatgattggggatcgcaatattagccaattaagcgggctgaacctcgagcgtgaccccgatcgagttgtctggcaaggctggctctggtatctaaaaggcaagcgcggcatgagacaatggaaaaattgctgggccgtgctccggccgagaaatttcatcctatataaggacgaatcggagtattctgcccagttcatacttgcactcgcctcggtcgtcaatgttgttgatatcgatccgattagcaggacaaagatacattgtctgcagatcatcactgatgagaagagctatcgattctgcgcaccggatgaggaggcgctagttcaatgtctcggagcattcaagagtctcttctccaagagaaaagaattagaggcccgagcctcggtctcgggaccaggaccaggacagacaaaaatgtctacatcgtgacggcgaccactttgcatattccaactttctttatttgatacccgggctcagatgagccttacactagactatacaaactcaatacatattctaatacacgaaagtta

SEQ ID NO: 17127 - DNA, 945 bp, Muscodor strobelii
  misc_feature: SGI cDNA ID NO. 565716
  misc_feature: Encodes the peptide sequence at SEQ ID NO 17128
atggcatcaccaagtggctgggatttcatcattgttggcggtggcatagctggcactggaattaccagtcgcattacgcaacatagctcttccgctcgggttctcgtcctggaagctggaccggatgttagccagcgcaaggacatactttattttgagtcattcaattccattggcggtgagtttgactggaaatacaagtcagtgccccagaaagaatggaatggtaggaaaatcgatcttgtctcgggccgtgttcttggaggaggctctgttgtggatggctatgcctggatgcgcgtatcacgagctgactacgacgactgggcgaacctagttggcgacccacgctggcacagtggccgcttccacatcgaatcactcatctcgacgggccgccgatatcctctagcgaatgcggctgaggaatcatgggcagctttaggtgtcatggccctaccagactacgatatgaacgctggtcagaacattgggattggagagcttaataagaacccacatcaaggcgttcatcagatattcaccacggcgtattctctggaaggcgtcacgtacgcaaacagcgatggtgtgcgcttgtccaatggtgatgagtatcatggagctcaagttgtcttgtcagccggtgcacatcagacaccgcaactgctaatgctttctgggatcggaccaagtgacattctggatcttcatggtatcgagagaaaggtagagctacctgcagtcgggaagaacttcaacgaccatgtgttgctgttcctaaactggcgactgaagaaggatactctcaatggcaacgctattggtactggccatccccgatggaaggagccacagttcgcaatgggcatgccgtctagttttgtcgtctctacttctgttccgcaaggcgatctcgacaaaagcaatacgcgaggatggtga

SEQ ID NO: 17128 - protein, 314 aa, Muscodor strobelii
  misc_feature: SGI Peptide ID NO. 565716
  misc_feature (7)..(271): Pfam Id: PF00732 Pfam Desc: GMC oxidoreductase
  misc_feature (7)..(114): Pfam Id: PF00732 Pfam Desc: GMC oxidoreductase
  misc_feature (210)..(271): Pfam Id: PF00732 Pfam Desc: GMC oxidoreductase
  misc_feature (7)..(309): NCBI GI: 256724344 Blast Desc: NECHADRAFT_87530 [Nectria haematococca mpVI 77-13-4]
  misc_feature (8)..(309): NCBI GI: 46115062 Blast Desc: FG03373.1 [Gibberella zeae PH-1]
  misc_feature (1)..(302): NCBI GI: 145259027 Blast Desc: An04g08890 [Aspergillus niger] gi|134074864|emb|CAK38976.1| protein product [Aspergillus niger]
  misc_feature (8)..(302): NCBI GI: 169769302 Blast Desc: [Aspergillus oryzae RIB40] gi|83766979|dbj|BAE57119.1| protein product [Aspergillus oryzae]
  misc_feature (8)..(302): NCBI GI: 238501768 Blast Desc: glucose dehydrogenase, [Aspergillus flavus NRRL3357] gi|220692355|gb|EED48702.1| glucose dehydrogenase, [Aspergillus flavus NRRL3357]
  misc_feature (4)..(309): NCBI GI: 145244078 Blast Desc: An11g05600 [Aspergillus niger] gi|134079234|emb|CAK40717.1| protein product [Aspergillus niger]
  misc_feature (6)..(301): NCBI GI: 242779381 Blast Desc: glucose dehydrogenase, [Talaromyces stipitatus ATCC 10500] gi|218723050|gb|EED22468.1| glucose dehydrogenase, [Talaromyces stipitatus ATCC 10500]
  misc_feature (7)..(312): NCBI GI: 212535270 Blast Desc: glucose-methanol-choline (gmc) oxidoreductase, [Penicillium marneffei ATCC 18224] gi|210070190|gb|EEA24280.1| glucose-methanol-choline (gmc) oxidoreductase, [Penicillium ATCC
  misc_feature (1)..(312): NCBI GI: 154308157 Blast Desc: BC1G_07824 [Botryotinia fuckeliana B05.10] gi|150852909|gb|EDN28101.1| BC1G_07824 [Botryotinia fuckeliana B05.10]
  misc_feature (7)..(309): NCBI GI: 67900560 Blast Desc: AN7267.2 [Aspergillus nidulans FGSC A4] gi|40741948|gb|EAA61138.1| AN7267.2 [Aspergillus nidulans FGSC A4] gi|259483387|tpe|CBF78736.1| TPA: conserved [Aspergillus FGSC
  misc_feature (31)..(267): SWISSPROT Homolog: EC 1.1.99.1 Choline dehydrogenase
MASPSGWDFIIVGGGIAGTGITSRITQHSSSARVLVLEAGPDVSQRKDILYFESFNSIGGEFDWKYKSVPQKEWNGRKIDLVSGRVLGGGSVVDGYAWMRVSRADYDDWANLVGDPRWHSGRFHIESLISTGRRYPLANAAEESWAALGVMALPDYDMNAGQNIGIGELNKNPHQGVHQIFTTAYSLEGVTYANSDGVRLSNGDEYHGAQVVLSAGAHQTPQLLMLSGIGPSDILDLHGIERKVELPAVGKNFNDHVLLFLNWRLKKDTLNGNAIGTGHPRWKEPQFAMGMPSSFVVSTSVPQGDLDKSNTRGW

SEQ ID NO: 17129 - DNA, 206 bp, Muscodor strobelii
  misc_feature: SGI EST ID NO. CUFF.40337.0
  misc_feature: Variant of the nucleotide sequence at SEQ ID NO 17127
cgacgactgggcgaacctagttggcgacccacgctgtggccgcttccacatcgaatcactcatctcgacgggccgccgatatcctctagcgaatgcggctgaggaatcatgggcagctttaggtgtcatggccctaccagactacgatatgaacgctggtcagaacattgggattggagagcttaataagaacccacatcaaggcg

SEQ ID NO: 17130 - DNA, 1902 bp, Muscodor strobelii
  misc_feature: SGI cDNA ID NO. 565717
  misc_feature: Elevated expression when VOC is produced
  misc_feature: Encodes the peptide sequence at SEQ ID NO 17131
atgtggctacttcgaattgacgacttcgagaatttcagactcgaagcggtgcccgaagacgttgctccatcctatgccatcttgtctcacacgtggacggatgaagaagtcacgtttcaagaaatccaggcgttgggcgcaccagacgcatcgttcattcgccaaagaagaggttttgctaaaatacgaaacgcgtcaataacggccgcacgaggtggtttcaaatacatctggatcgacacctgctgcatagataagtctagcagcgccgaattgtctgaagcaattaactccatgtttcgatggtaccgaaaagcttctatttgctacgcgtatctggaagatgtcacgatcgacaatctttactatcaattcaatcaatttcatgagtattgctaccagtctcgttggtttacaagaggatggactttacaagagctaattgctcccgcccagatatcattctacgatcgagattggtggtatctgggtgacaaggcttccgatctttctgtacaggattcattagctactatcacggggattgacattagagtccttcaaggcatcctcgaacctcgcgatgtgagcgttgccgcacgtatgaaatgggcagctcggcgaaaaacaagtcgaactgaggatgttgcctactgcctgatgggcttgtttgatgtgcatatgccgatgttgtacggtgaaggaaataatgcgttcctccgattacaagagcagattctgaaagcttccaacgaccattctattttcatgtgggtggtcaaggaatgggcgtcagcagacagtcaaaccctttccgggctcctagccgaatcgcccagccaatttttgcacgtcaagaactacaagcctatgcctccctcggtatttagaggtagtacaacctgggctatgacaaatgagggcttacagctacccctattcttaattcctataaggcagacatgggagggtcacctcgttgagcatgaatacgacgctgtgcttgaatgcgctctccgaaatggtggggagacatattaccgaagtcctacggtccgactaagacgcctttatggtgaccaattcgctcgagtaaatccagtatttattggcgatgtgataaccccaacttttgatggcgaccacgacgacaccgcagaccaacggagaaattttggcgcatacgaaactctcttcgtaaagcagaagcccctatatccagttcctcagctcagggtatcattcgataacgtcccctggtcttccctggctgcgtcgaatatttcttgcaatcttgtttccgtctggccgccagaaaattgggaccctgaagctggtatacttcgaacagctgctgcttcttcgaaccaggtcattggtgtattcagattcgctgctattgcaatcgaaaccactgtcgatgtagcggttggtctcgagagaaagacagagggtggctggaagatctggcacctacagcgtgggacaactgatagaggcatttcgaagagcgtggcatcagtgcacagcctattgaacctgcaagctcctggcgggatagcgggaaacgcagaggaagagatacaatttgcgaggttgcaatggaaagcgagaggtgctgatcctaggttgaacattactgtagaggaaagcatcttacatgggcgtctatactatctcgtacgggccagagtggccgttgagctggaaaacgttcacaaataccaatatctttctattcctaatgtggaatacgccgctttagaagagagcaatattgcgaccgaatcgagtgcggccttagaaggtcaaggtagatatgttcatatatgcttgtcacataatcttgttagcaccaagactgacaaaccgcagacacattggcgactccacgcacgctga

SEQ ID NO: 17131 - protein, 633 aa, Muscodor strobelii
  misc_feature: SGI Peptide ID NO. 565717
  misc_feature (25)..(146): Pfam Id: PF06985 Pfam Desc: Heterokaryon incompatibility protein (HET)
  misc_feature (4)..(490): NCBI GI: 171683732 Blast Desc: protein product [Podospora anserina] gi|170941826|emb|CAP67479.1| protein product [Podospora anserina]
  misc_feature (19)..(517): NCBI GI: 145602171 Blast Desc: MGG_12935 [Magnaporthe grisea 70-15] gi|145010601|gb|EDJ95257.1| MGG_12935 [Magnaporthe grisea 70-15]
  misc_feature (1)..(364): NCBI GI: 238493477 Blast Desc: conserved [Aspergillus flavus NRRL3357] gi|220696469|gb|EED52811.1| conserved [Aspergillus flavus NRRL3357]
  misc_feature (4)..(317): NCBI GI: 239611724 Blast Desc: HET domain-containing protein [Ajellomyces dermatitidis ER-3]
  misc_feature (4)..(317): NCBI GI: 261201308 Blast Desc: HET domain-containing protein [Ajellomyces dermatitidis SLH14081] gi|239592113|gb|EEQ74694.1| HET domain-containing protein [Ajellomyces dermatitidis SLH14081]
  misc_feature (4)..(284): NCBI GI: 145235123 Blast Desc: An03g03270 [Aspergillus niger] gi|134057890|emb|CAK38231.1| protein product [Aspergillus niger]
  misc_feature (11)..(366): NCBI GI: 238492441 Blast Desc: ankyrin repeat-containing protein, [Aspergillus flavus NRRL3357] gi|220695951|gb|EED52293.1| ankyrin repeat-containing protein, [Aspergillus flavus NRRL3357]
  misc_feature (4)..(327): NCBI GI: 46139867 Blast Desc: FG11448.1 [Gibberella zeae PH-1]
  misc_feature (1)..(344): NCBI GI: 256720984 Blast Desc: NECHADRAFT_82249 [Nectria haematococca mpVI 77-13-4]
  misc_feature (1)..(282): NCBI GI: 256726184 Blast Desc: NECHADRAFT_94537 [Nectria haematococca mpVI 77-13-4]
  misc_feature: Useful for introducing or modulating the production of volatile compounds
MWLLRIDDFENFRLEAVPEDVAPSYAILSHTWTDEEVTFQEIQALGAPDASFIRQRRGFAKIRNASITAARGGFKYIWIDTCCIDKSSSAELSEAINSMFRWYRKASICYAYLEDVTIDNLYYQFNQFHEYCYQSRWFTRGWTLQELIAPAQISFYDRDWWYLGDKASDLSVQDSLATITGIDIRVLQGILEPRDVSVAARMKWAARRKTSRTEDVAYCLMGLFDVHMPMLYGEGNNAFLRLQEQILKASNDHSIFMWVVKEWASADSQTLSGLLAESPSQFLHVKNYKPMPPSVFRGSTTWAMTNEGLQLPLFLIPIRQTWEGHLVEHEYDAVLECALRNGGETYYRSPTVRLRRLYGDQFARVNPVFIGDVITPTFDGDHDDTADQRRNFGAYETLFVKQKPLYPVPQLRVSFDNVPWSSLAASNISCNLVSVWPPENWDPEAGILRTAAASSNQVIGVFRFAAIAIETTVDVAVGLERKTEGGWKIWHLQRGTTDRGISKSVASVHSLLNLQAPGGIAGNAEEEIQFARLQWKARGADPRLNITVEESILHGRLYYLVRARVAVELENVHKYQYLSIPNVEYAALEESNIATESSAALEGQGRYVHICLSHNLVSTKTDKPQTHWRLHAR

SEQ ID NO: 17132 - DNA, 2795 bp, Muscodor strobelii
  misc_feature: SGI EST ID NO. CUFF.40346.0
  misc_feature: Variant of the nucleotide sequence at SEQ ID NO 17130
gccaggtacgcggagtatttggggtttctgcttgaatgttttgtatttatttctgtttctcgttttgcaagtcaatttgcatgcgacgttggttgctgctcttgtagacaagaactatgcactataggaatgttacgcaaaacgagatccaagagcgccatacatactttttggcatagggaaaagggggcagcatggtcgtgaaaagggggccagtccttacctctacatgatgcatgtacgaagaggtaggtgcgagaagcctaaacaggaccacccccctcgacgttagagttgtatcttcgtcctcaacaccgccatcaataatatcatctagtcaaatccaagatatccgttcagatccatttatcatttgtcacccctagaggcctactagttctaatagataagtatctcattgtcaaccttgtcgtcagccttgcgcgttcacggtgcattgccccatttgcggctgagaacatcagcgccagccgacatcttcaaataccaagtgatggcacatagaaattaactcagtccagaaatctctgcagacggaattatatgctcttgtatctcaaaggggctcggtattctactgcgcgatatattgcgttaacccaatcaagaacgtcagcttgcgaatgaccaacagattcactgctgtctagatatggaatgacaacttcgtgattactacagggctctagatcaatgcaattaatgctgtcgtaatgtggctacttcgaattgacgacttcgagaatttcagactcgaagcggtgcccgaagacgttgctccatcctatgccatcttgtctcacacgtggacggatgaagaagtcacgtttcaagaaatccaggcgttgggcgcaccagacgcatcgttcattcgccaaagaagaggttttgctaaaatacgaaacgcgtcaataacggccgcacgaggtggtttcaaatacatctggatcgacacctgctgcatagataagtctagcagcgccgaattgtctgaagcaattaactccatgtttcgatggtaccgaaaagcttctatttgctacgcgtatctggaagatgtcacgatcgacaatctttactatcaattcaatcaatttcatgagtattgctaccagtctcgttggtttacaagaggatggactttacaagagctaattgctcccgcccagatatcattctacgatcgagattggtggtatctgggtgacaaggcttccgatctttctgtacaggattcattagctactatcacggggattgacattagagtccttcaaggcatcctcgaacctcgcgatgtgagcgttgccgcacgtatgaaatgggcagctcggcgaaaaacaagtcgaactgaggatgttgcctactgcctgatgggcttgtttgatgtgcatatgccgatgttgtacggtgaaggaaataatgcgttcctccgattacaagagcagattctgaaagcttccaacgaccattctattttcatgtgggtggtcaaggaatgggcgtcagcagacagtcaaaccctttccgggctcctagccgaatcgcccagccaatttttgcacgtcaagaactacaagcctatgcctccctcggtatttagaggtagtacaacctgggctatgacaaatgagggcttacagctacccctattcttaattcctataaggcagacatgggagggtcacctcgttgagcatgaatacgacgctgtgcttgaatgcgctctccgaaatggtggggagacatattaccgaagtcctacggtccgactaagacgcctttatggtgaccaattcgctcgagtaaatccagtatttattggcgatgtgataaccccaacttttgatggcgaccacgacgacaccgcagaccaacggagaaattttggcgcatacgaaactctcttcgtaaagcagaagcccctatatccagttcctcagctcagggtatcattcgataacgtcccctggtcttccctggctgcgtcgaatatttcttgcaatcttgtttccgtctggccgccagaaaattgggaccctgaagctggtatacttcgaacagctgctgcttcttcgaaccaggtcattggtgtattcagattcgctgctattgcaatcgaaaccactgtcgatgtagcggttggtctcgagagaaagacagagggtggctggaagatctggcacctacagcgtgggacaactgatagaggcatttcgaagagcgtggcatcagtgcacagcctattgaacctgcaagctcctggcgggatagcgggaaacgcagaggaagagatacaatttgcgaggttgcaatggaaagcgagaggtgctgatcctaggttgaacattactgtagaggaaagcatcttacatgggcgtctatactatctcgtacgggccagagtggccgttgagctggaaaacgttcacaaataccaatatctttctattcctaatgtggaatacgccgctttagaagagagcaatattgcgaccgaatcgagtgcggccttagaaggtcaagacacattggcgactccacgcacgctgactcccctggaatcatcggaagcacacatcagcccatcggtagccagcgagcacgaagaacaacattggatgacatcattgcgagaagttttagagaatattacggtaccaaattctctcgcttactatttttgtcaagagaacttggtgatggatagtttacgagggaaaatccgtgttgcctgggtccagcacccagctagagacatcgaaagggtggaa

SEQ ID NO: 17133 - DNA, 1758 bp, Muscodor strobelii
  misc_feature: SGI cDNA ID NO. 565718
  misc_feature: Encodes the peptide sequence at SEQ ID NO 17134
atgaatagtagctgggataccgcagaccacaaccgagcatcccggacatctcccactagtgcggccctgagaggtgcgtctctcgccttccagaagacgacaaccccgacgactaccttgacgcctattcgcaatggcggcaatggtgctctcattgccgctacttcggcctcccgtgaccacagcctctcccgctcgccctcctttctgcagcaacagcagcaggcatctataagccggcagacgacgggcaacagtgtcctgagtgtcgaccagaaccattccagccagcgacagaatgtatatcccacgcagcagagccagtttctgacgcccacgcggccgactgcgcctgacgcaagatctccttctttcattgcggcgacgttggctgctagtagatctgcgagtcctaatccccatgccgtcgcttcgacgcatccctatgctcaacaggcggccaggatacaatcgaagggaggcgccagcagcatgagtgccgctagttccgtcacagatctcgatcttgccacagatacgacttcgattccgcctacaaatgcgcttatatccatgttcgagcatcatggcaacgagggcgagccagtcaagaagagtacacctgcgtctagcgccaagaagcagttgaagaagccgccactgcgacctctgacaccgccacgagccttgtcgcccacgcctagcatcgacttgtccccatcgagattggctgctgcgcgagctcgccagagagaagcaccctcgtcacccgtctcggcccggcctgtggtaacggctcgaccggttgatcagattgataagtctgagagggtcaagacgcagccccctacacctccacccacgcgaaggagaacagaggccgttagacaagaaccggtctctattccgactccgaaagcaaagccacgggctgttacaccacctccaagagccattggtcgagcagcgacggtagtgctctcaccacagccaagacgtacaccgtctcagaagataataacggattcgcttgatcaagatgcgccctcacaagtgcccctgtcagataattttctccgccgatcctcaacattgaagacagtaaaaccctcagttttaccaggcatatccgaccaaggacacccgagtcttgattctttgactgacgccattatggcgggctctctggcttctgctcgcgcaagccctgtgcgccgaactcctccgacacctcctcccaggaaacagacaccacatatgcggaagacactcagagtcccaaagtctaaatcagacgacgaagaccctgatagcaagtcgcagcataggaaaaagcccctaggtaaactcagctcccggaaaaagcactctcaccatgaaggagcaagaaaacgctggcgcgaggaaatcacagcaagggaaagaaagcgatatgaaggcgtgtgggcaagtaatcgcgggctcctactagagtattgtcccgaactatcaggtctggataagagccagctggtcgtgaacgtcgtcgtacgagacctgtggtctcggagccgactgccgtttgacgagctggctgaggtttggcacctcgtcgatagtcagggaaagggatatttgaataaggcggaattcgtggtgggcatgtggctcattgatcagagacttaggggaaggaaattgccccataaagtcagtgagagtgtttgggggagtgttaggggcatgagtgtcatgagtcctactagtaagaagcgatga

SEQ ID NO: 17134 - protein, 585 aa, Muscodor strobelii
  misc_feature: SGI Peptide ID NO. 565718
  misc_feature (384)..(583): NCBI GI: 256726182 Blast Desc: NECHADRAFT_43078 [Nectria haematococca mpVI 77-13-4]
  misc_feature (383)..(580): NCBI GI: 39939934 Blast Desc: MGG_05273 [Magnaporthe grisea 70-15] gi|160011509|sp|A4QST9.1|IRS4_MAGGR RecName: Full=Increased rDNA silencing protein 4 gi|145010445|gb|EDJ95101.1| MGG_05273 grisea
  misc_feature (413)..(584): NCBI GI: 85109362 Blast Desc: NCU06276 [Neurospora crassa OR74A] gi|74696575|sp|Q7SB65.1|IRS4_NEUCR RecName: Full=Increased rDNA silencing protein 4 gi|28924521|gb|EAA33644.1| NCU06276 crassa
  misc_feature (381)..(577): NCBI GI: 169614758 Blast Desc: SNOG_10527 [Phaeosphaeria nodorum SN15] gi|160702816|gb|EAT81921.2| SNOG_10527 [Phaeosphaeria nodorum SN15]
  misc_feature (381)..(577): NCBI GI: 189207963 Blast Desc: conserved [Pyrenophora tritici-repentis Pt-1C-BFP] gi|187976408|gb|EDU43034.1| conserved [Pyrenophora tritici-repentis Pt-1C-BFP]
  misc_feature (376)..(573): NCBI GI: 238499789 Blast Desc: conserved [Aspergillus flavus NRRL3357] gi|220692882|gb|EED49228.1| conserved [Aspergillus flavus NRRL3357]
  misc_feature (381)..(574): NCBI GI: 116207580 Blast Desc: CHGG_03083 [Chaetomium globosum CBS 148.51] gi|121927736|sp|Q2H9M1.1|IRS4_CHAGB RecName: Full=Increased rDNA silencing protein 4 gi|88183680|gb|EAQ91148.1| CHGG_03083 CBS
  misc_feature (420)..(572): NCBI GI: 67515627 Blast Desc: AN0095.2 [Aspergillus nidulans FGSC A4] gi|74599224|sp|Q5BH85.1|IRS4_EMENI RecName: Full=Increased rDNA silencing protein 4 gi|40746117|gb|EAA65273.1| AN0095.2 nidulans
  misc_feature (385)..(576): NCBI GI: 121713772 Blast Desc: conserved [Aspergillus clavatus NRRL 1] gi|160011402|sp|A1CBF3.1|IRS4_ASPCL RecName: Full=Increased rDNA silencing protein 4 gi|119402650|gb|EAW13071.1| conserved NRRL 1]
  misc_feature (383)..(578): NCBI GI: 171686416 Blast Desc: protein product [Podospora anserina] gi|170943169|emb|CAP68822.1| protein product [Podospora anserina]
MNSSWDTADHNRASRTSPTSAALRGASLAFQKTTTPTTTLTPIRNGGNGALIAATSASRDHSLSRSPSFLQQQQQASISRQTTGNSVLSVDQNHSSQRQNVYPTQQSQFLTPTRPTAPDARSPSFIAATLAASRSASPNPHAVASTHPYAQQAARIQSKGGASSMSAASSVTDLDLATDTTSIPPTNALISMFEHHGNEGEPVKKSTPASSAKKQLKKPPLRPLTPPRALSPTPSIDLSPSRLAAARARQREAPSSPVSARPVVTARPVDQIDKSERVKTQPPTPPPTRRRTEAVRQEPVSIPTPKAKPRAVTPPPRAIGRAATVVLSPQPRRTPSQKIITDSLDQDAPSQVPLSDNFLRRSSTLKTVKPSVLPGISDQGHPSLDSLTDAIMAGSLASARASPVRRTPPTPPPRKQTPHMRKTLRVPKSKSDDEDPDSKSQHRKKPLGKLSSRKKHSHHEGARKRWREEITARERKRYEGVWASNRGLLLEYCPELSGLDKSQLVVNVVVRDLWSRSRLPFDELAEVWHLVDSQGKGYLNKAEFVVGMWLIDQRLRGRKLPHKVSESVWGSVRGMSVMSPTSKKR

SEQ ID NO: 17135 - DNA, 2975 bp, Muscodor strobelii
  misc_feature: SGI EST ID NO. CUFF.40380.2
  misc_feature: Variant of the nucleotide sequence at SEQ ID NO 17133
ctgcgtagctctatgcatgctattacaggcatatttacatgcatatggagctgaccttattgtcctttgcccaggtctaagctcgggtctaaggtacatagatgtagacatgacgtgcttgggccactgagttctccaatcctccaattccaaaaaccccatcagtcggtcactcgagttccagcgttgttgagtttcaagctctttgtttgatcttgattttcggtagtttggggtttctacttgtctagaaagtctagactcaactttgtctggattagaggagattagcgttgcttgtttcgccctgttgctagcgtttctacgtttcatgttttacattgcggcggccgccccattcattcattcgcgttgaagcttcccgagtgccgggctcgtgttccccaggctggcgtttcgatatcgtactcgtaatccaagctctcccaatgccatcctctttagttattactcaaccacctctgtcagatggattgtgatgtgacggtatcagaagcgactggttctgttctatctagtgattcctcttctcctcgcatgcgacaccaccgctcgtcagcctcatgaatagtagctgggataccgcagaccacaaccgagcatcccggacatctcccactagtgcggccctgagaggtgcgtctctcgccttccagaagacgacaaccccgacgactaccttgacgcctattcgcaatggcggcaatggtgctctcattgccgctacttcggcctcccgtgaccacagcctctcccgctcgccctcctttctgcagcaacagcagcaggcatctataagccggcagacgacgggcaacagtgtcctgagtgtcgaccagaaccattccagccagcgacagaatgtatatcccacgcagcagagccagtttctgacgcccacgcggccgactgcgcctgacgcaagatctccttctttcattgcggcgacgttggctgctagtagatctgcgagtcctaatccccatgccgtcgcttcgacgcatccctatgctcaacaggcggccaggatacaatcgaagggaggcgccagcagcatgagtgccgctagttccgtcacagatctcgatcttgccacagatacgacttcgattccgcctacaaatgcgcttatatccatgttcgagcatcatggcaacgagggcgagccagtcaagaagagtacacctgcgtctagcgccaagaagcagttgaagaagccgccactgcgacctctgacaccgccacgagccttgtcgcccacgcctagcatcgacttgtccccatcgagattggctgctgcgcgagctcgccagagagaagcaccctcgtcacccgtctcggcccggcctgtggtaacggctcgaccggttgatcagattgataagtctgagagggtcaagacgcagccccctacacctccacccacgcgaaggagaacagaggccgttagacaagaaccggtctctattccgactccgaaagcaaagccacgggctgttacaccacctccaagagccattggtcgagcagcgacggtagtgctctcaccacagccaagacgtacaccgtctcagaagataataacggattcgcttgatcaagatgcgccctcacaagtgcccctgtcagataattttctccgccgatcctcaacattgaagacagtaaaaccctcagttttaccaggcatatccgaccaaggacacccgagtcttgtgagacgatcttcaagttcaatatcgaacgatacctttgtgtctgcgtcttcatctccttctccgtctccgccaccccctgcgcctcgtagaaaatcactttcacctacccctgaaccgacacggcctctgaggccacagtctgcgccaagaccacgacctcttcccgcgcggccggttatatcaacaaggcaaaatacgtcacagattccattagattctttgactgacgccattatggcgggctctctggcttctgctcgcgcaagccctgtgcgccgaactcctccgacacctcctcccaggaaacagacaccacatatgcggaagacactcagagtcccaaagtctaaatcagacgacgaagaccctgatagcaagtcgcagcataggaaaaagcccctaggtaaactcagctcccggaaaaagcactctcaccatgaaggagcaagaaaacgctggcgcgaggaaatcacagcaagggaaagaaagcgatatgaaggcgtgtgggcaagtaatcgcgggctcctactagagtattgtcccgaactatcaggtctggataagagccagctggtcgtgaacgtcgtcgtacgagacctgtggtctcggagccgactgccgtttgacgagctggctgaggtttggcacctcgtcgatagtcagggaaagggatatttgaataaggcggaattcgtggtgggcatgtggctcattgatcagagacttaggggaaggaaattgccccataaagtcagtgagagtgtttgggggagtgttaggggcatgagtgtcatgagtcctactagtaagaagcgatgaggcgggctttgtaggtttgttagttttgatacccaatagagattatgatgatacttgtttgaagctgattacgtttgcgagtagtgaggtcacgtgctattcattacagccccttttgtaaatcatttttaaggcggtgcatcgtgttttgatgtgtttcagatttctaggactattagctaggggagggcatggttgcattgtatgcgttacgctgtgctcggtttgcataactgacgtgtcaggcgcacctcacagcgataaggtgcagtttgatatatctagcataggcagatgtcgattgattacgactacgcactatctcagacgatggcaatgacggtatatcgcctgaaggggatgtacggtctctttgcataattggtagatattagtatcatgtctattcccttgtct

SEQ ID NO: 17136 - DNA, 2256 bp, Muscodor strobelii
  misc_feature: SGI cDNA ID NO. 565719
  misc_feature: Encodes the peptide sequence at SEQ ID NO 17137
atggacgcgagttacctctctcagcaggtcaacaccatcatcggtcaactccacggcctatttgacgagatcggtgtcgccacccatgaccgcgatagtagagaggcagagctcttcgcagcactgtccgagacacttaataaccaggtcaagatcgtgaccgccgagaagaaggatatggtcgatgaggctgggcgcatcatcacgcttatccgccagatggagatatctctcgacgataccagagcccaacacagccacgatgacgacgatctcaaagttacatttcctctcacgcggtgtctggtcggcctgaaggagaagcacttgcagataagcaagctgcatcgtgagcggttcgagcaagtcaagaagctcgtacaagccttagaatcctactcttcccatctggagcccacattcgtcaagatcgcgttaccgccttcaggtccaaaacaatctttaccacccacattcgatctttcgccttcgtatgttgataagctagacgatgaattcactcgagtctatgaagaatatacgcgacgcgtgtcgaccgtgcagaccttgtctgagaatatcattcagctatgggcagagctaggaacgccccaagctcaaaccgacccggccattgtaaaatactaccgtgatgcacctgagcagctgggcttacatgaagaggatctgtcgagattgcgagccaggagagacaaattgtctgatgagaagaagaatcgagagagacgcctcaaggatcttaagatgtccgttgatgcgctctgggagaaacttggagttgatgagtcagaacgtaaggcatttttgaacgcgaatcgcggctgcggagtccgacagatcaatgagttcgaggacgagcttgcccgattgaacgaattgaagcgacaaaatctccatctctttgtggaagatgcgcgcttcaagctacaagagctctgggatgcactttatttatccgaggatgagatgttggaattcactccagcattttcggatgtttatagtgatgcattgctcgaagcccatgagcgcgaaatagcgcgtcttgagactctcagagagcaacgagccccaacgctggcgttggtcgagaaacatagaacccttgttcatgaccgagacgaacttgctgcatcgagtcaagacgcctctcgactgatgatgcgaggccagaagggagaaaaacgggaccccggcaagctactccgcgaggaaaagctgcggaagcgaattgccaaggagttaccgaagatcgccgcagacctgacaaagttacttgtcaaatgggaggacgattatgggcgccccttccttgttcatggcgaacgatatctggaccttctggagcctaacgaggccaagcctacgccaggaccacgggcaaagacgccggcgggacctcctgcctcaacgatcagaggcacagggagcaaaatggcgccgccaccgagtcgcgccaacagcaatgctagcaaagcttctacaatcaccaggtcaaaaacacccacggccaatcccacaggaactattcggagggctgctcctgccagccaagcagcaaaggaccctaaggccagcccttcgagaatcccggcccgagcgccgttgtcaaatctcaagaacgggaataactcgccggagaggcctcggccagagtctcgagctcagggagcactgcgcccaggacatcctctggcaagggcaccgcctcctaagatgagagagcttgtgccggcacccgagttggaaactcccatgaatccctatcgaggtatgggcataggctcttctagctctcatgtgcgtgccattgagccagaggatgtgtatgatgaccgcaactcacagcagagccatgcgcgatcttatatgcagcacgaagcgcacacatccatgcgcagtgagcggctggcacaatctgcttatccgcatgcgccgcctcctcgacagacgtcaaacacatcgtcggtggtcacaggctcggagaactgggagacgtatgacgacaactcggagcctgagcaagatgcatccgacacgtactacgccaaagtacgagcggcgagaggcaagcgattcacacccgaagacggctatgcacgtcctcaggcgagccaggctaagcgcctgcggggaatcccgccgcatgctatgcaagtcggacacgtgacggtagatgctgagggcaaccggatcatctctgggagcgagtggaccgatgaagatgccttttaa

SEQ ID NO: 17137 - protein, 751 aa, Muscodor strobelii
  misc_feature: SGI Peptide ID NO. 565719
  misc_feature (15)..(642): Pfam Id: PF03999 Pfam Desc: Microtubule associated protein (MAP65/ASE1 family)
  misc_feature (178)..(450): Pfam Id: PF03999 Pfam Desc: Microtubule associated protein (MAP65/ASE1 family)
  misc_feature (1)..(748): NCBI GI: 115387985 Blast Desc: conserved [Aspergillus terreus NIH2624] gi|114195582|gb|EAU37282.1| conserved [Aspergillus terreus NIH2624]
  misc_feature (1)..(748): NCBI GI: 67523343 Blast Desc: AN2128.2 [Aspergillus nidulans FGSC A4] gi|40745804|gb|EAA64960.1| AN2128.2 [Aspergillus nidulans FGSC A4] gi|259487506|tpe|CBF86236.1| TPA: MAP65/ase1 homolog nidulans
  misc_feature (1)..(748): NCBI GI: 119482123 Blast Desc: microtubule associated protein (Ase1), [Neosartorya fischeri NRRL 181] gi|119409244|gb|EAW19193.1| microtubule associated protein (Ase1), [Neosartorya fischeri NRRL 181]
  misc_feature (1)..(748): NCBI GI: 240278482 Blast Desc: microtubule-associated protein [Ajellomyces capsulatus H143]
  misc_feature (1)..(748): NCBI GI: 159130018 Blast Desc: microtubule associated protein (Ase1), [Aspergillus fumigatus A1163]
  misc_feature (1)..(748): NCBI GI: 225556031 Blast Desc: conserved [Ajellomyces capsulatus G186AR]
  misc_feature (1)..(748): NCBI GI: 71002562 Blast Desc: microtubule associated protein (Ase1) [Aspergillus fumigatus Af293] gi|66853600|gb|EAL93924.1| microtubule associated protein (Ase1), [Aspergillus fumigatus Af293]
  misc_feature (1)..(748): NCBI GI: 145251363 Blast Desc: An15g06670 [Aspergillus niger] gi|134082727|emb|CAK42619.1| protein product [Aspergillus niger]
  misc_feature (1)..(748): NCBI GI: 119175241 Blast Desc: CIMG_09507 [Coccidioides immitis RS]
  misc_feature (1)..(748): NCBI GI: 240107076 Blast Desc: Microtubule associated protein, [Coccidioides posadasii C735 delta SOWgp]
MDASYLSQQVNTIIGQLHGLFDEIGVATHDRDSREAELFAALSETLNNQVKIVTAEKKDMVDEAGRIITLIRQMEISLDDTRAQHSHDDDDLKVTFPLTRCLVGLKEKHLQISKLHRERFEQVKKLVQALESYSSHLEPTFVKIALPPSGPKQSLPPTFDLSPSYVDKLDDEFTRVYEEYTRRVSTVQTLSENIIQLWAELGTPQAQTDPAIVKYYRDAPEQLGLHEEDLSRLRARRDKLSDEKKNRERRLKDLKMSVDALWEKLGVDESERKAFLNANRGCGVRQINEFEDELARLNELKRQNLHLFVEDARFKLQELWDALYLSEDEMLEFTPAFSDVYSDALLEAHEREIARLETLREQRAPTLALVEKHRTLVHDRDELAASSQDASRLMMRGQKGEKRDPGKLLREEKLRKRIAKELPKIAADLTKLLVKWEDDYGRPFLVHGERYLDLLEPNEAKPTPGPRAKTPAGPPASTIRGTGSKMAPPPSRANSNASKASTITRSKTPTANPTGTIRRAAPASQAAKDPKASPSRIPARAPLSNLKNGNNSPERPRPESRAQGALRPGHPLARAPPPKMRELVPAPELETPMNPYRGMGIGSSSSHVRAIEPEDVYDDRNSQQSHARSYMQHEAHTSMRSERLAQSAYPHAPPPRQTSNTSSVVTGSENWETYDDNSEPEQDASDTYYAKVRAARGKRFTPEDGYARPQASQAKRLRGIPPHAMQVGHVTVDAEGNRIISGSEWTDEDAF

SEQ ID NO: 17138 - DNA, 3557 bp, Muscodor strobelii
  misc_feature: SGI EST ID NO. CUFF.40370.1
  misc_feature: Variant of the nucleotide sequence at SEQ ID NO 17136
ttccaagttgccatggcgaccatgttctacaggataccgttgcaccgtttggtgaagtggggctgaatggtgcctgctggagtgcctgtgggagcggctgccgggtgctaaacatgctaaatgtgatgctaacaaataacgtgtctcgaagtgtcgatttggctcaccttgcatctcattgttgatctaagatctcgtacaaggtctctgattgactggtttgactggctcaactccccctctatttggtatccctttagatcaattggttcggcctggctatttcaattgccatctccaatcccattcccagacatttgctctttaaagtggtttcattgcagctgtccgtgcatgcgtcagtgttgttttccaagtcgcctctcagcacttgcgatgcctcattcgtcgcatcactctcgtaacctctagtcttgtacataccctactccgggtgcatacggttgcagctacggccctgatccaaacaacacactcgctcgctcgcgcatggggtctgacgctttcaacgagaaagctgccgcatgacgattcttcgcatataatctgcacgacataccgcccacgcaacccgcccacctactccaacacatacacacatataatcgctcaacatggacgcgagttacctctctcagcaggtcaacaccatcatcggtcaactccacggcctatttgacgagatcggtgtcgccacccatgaccgcgatagtagagaggcagagctcttcgcagcactgtccgagacacttaataaccaggtcaagatcgtgaccgccgagaagaaggatatggtcgatgaggctgggcgcatcatcacgcttatccgccagatggagatatctctcgacgataccagagcccaacacagccacgatgacgacgatctcaaagttacatttcctctcacgcggtgtctggtcggcctgaaggagaagcacttgcagataagcaagctgcatcgtgagcggttcgagcaagtcaagagtaagttgtcgcatgcagttaccaggtccaacactagtactaattcgcttcccattagagctcgtacaagccttagaatcctactcttcccatctggagcccacattcgtcaagatcgcgttaccgccttcaggtccaaaacaatctttaccacccacattcgatctttcgccttcgtatgttgataagctagacgatgaattcactcgagtctatgaagaatatacgcgacgcgtgtcgaccgtgcagaccttgtctgagaatatcattcagctatgggcagagctaggaacgccccaagctcaaaccgacccggccattgtaaaatactaccgtgatgcacctgagcagctgggcttacatgaagaggatctgtcgagattgcgagccaggagagacaaattgtctgatgagaagaagaatcgagagagacgcctcaaggatcttaagatgtccgttgatgcgctctgggagaaacttggagttgatgagtcagaacgtaaggcatttttgaacgcgaatcgcggctgcggagtccgacagatcaatgagttcgaggacgagcttgcccgattgaacgaattgaagcgacaaaatctccatctctttgtggaagatgcgcgcttcaagctacaagagctctgggatgcactttatttatccgaggatgagatgttggaattcactccagcattttcggatgtttatagtgatgcattgctcgaagcccatgagcgcgaaatagcgcgtcttgagactctcagagagcaacgagccccaacgctggcgttggtcgagaaacatagaacccttgttcatgaccgagacgaacttgctgcatcgagtcaagacgcctctcgactgatgatgcgaggccagaagggagaaaaacgggaccccggcaagctactccgcgaggaaaagctgcggaagcgaattgccaaggagttaccgaagatcgccgcagacctgacaaagttacttgtcaaatgggaggacgattatgggcgccccttccttgttcatggcgaacgatatctggaccttctggagcctaacgaggccaagcctacgccaggaccacgggcaaagacgccggcgggacctcctgcctcaacgatcagaggcacagggagcaaaatggcgccgccaccgagtcgcgccaacagcaatgctagcaaagcttctacaatcaccaggtcaaaaacacccacggccaatcccacaggaactattcggagggctgctcctgccagccaagcagcaaaggaccctaaggccagcccttcgagaatcccggcccgagcgccgttgtcaaatctcaagaacgggaataactcgccggagaggcctcggccagagtctcgagctcagggagcactgcgcccaggacatcctctggcaagggcaccgcctcctaagatgagagagcttgtgccggcacccgagttggaaactcccatgaatccctatcgaggtatgggcataggctcttctagctctcatgtgcgtgccattgagccagaggatgtgtatgatgaccgcaactcacagcagagccatgcgcgatcttatatgcagcacgaagcgcacacatccatgcgcagtgagcggctggcacaatctgcttatccgcatgcgccgcctcctcgacagacgtcaaacacatcgtcggtggtcacaggctcggagaactgggagacgtatgacgacaactcggagcctgagcaagatgcatccgacacgtactacgccaaagtacgagcggcgagaggcaagcgattcacacccgaagacggctatgcacgtcctcaggcgagccaggctaagcgcctgcggggaatcccgccgcatgctatgcaagtcggacacgtgacggtagatgctgagggcaaccggatcatctctgggagcgagtggaccgatgaagatgccttttaaagaccatgatgcacttttgtcttgcttttctcctgctagatgatcacggaccatgaatctctacgcgatacgcagcccacgacgatgatacatgaatctgtcacgaaatgatgcttacgatcaatacggtatcctctgagcaagcatgtactctctcgtcgattatggtcctttcttttcgtaaacgaggcgacgattgctgtgcaagacttgtgtcgacccctttctcattcttgtacttgattaatcacaggcggtggggctagccgcgaggcttggaggcagaatggccatagaataagggccagatttccaaacactttgaggggcttaagaccccgctatggatactgtcgttgtaaattctcctttctggaactctgttggtatacggtgggatgggtagggctgatggaccatgggcgtggtgggtggttgataagtccaaatccggttggcataggcgttcgtggtgtctgtgtgtgcataggcgtttctggtttcttgctgcgatcagtgtcacgctgagaaacggttgattgctgaataataaaagcctgattgtatgaaaatggcaattttagctgtatacttaaagtgatgatgag

SEQ ID NO: 17139 - DNA, 366 bp, Muscodor strobelii
  misc_feature: SGI cDNA ID NO. 565720
  misc_feature: Encodes the peptide sequence at SEQ ID NO 17140
atgcagcacgaagcgcacacatccatgcgcagtgagcggctggcacaatctgcttatccgcatgcgccgcctcctcgacagacgtcaaacacatcgtcggtggtcacaggctcggagaactgggagacgtatgacgacaactcggagcctgagcaagatgcatccgacacgtactacgccaaagtacgagcggcgagaggcaagcgattcacacccgaagacggctatgcacgtcctcaggcgagccaggctaagcgcctgcggggaatcccgccgcatgctatgcaagtcggacacgtgacggtagatgctgagggcaaccggatcatctctgggagcgagtggaccgatgaagatgccttttaa

SEQ ID NO: 17140 - protein, 121 aa, Muscodor strobelii
  misc_feature: SGI Peptide ID NO. 565720
  misc_feature (3)..(121): NCBI GI: 39939936 Blast Desc: MGG_05272 [Magnaporthe grisea 70-15] gi|145010446|gb|EDJ95102.1| MGG_05272 [Magnaporthe grisea 70-15]
  misc_feature (24)..(121): NCBI GI: 256725785 Blast Desc: NECHADRAFT_43873 [Nectria haematococca mpVI 77-13-4]
  misc_feature (15)..(121): NCBI GI: 261358386 Blast Desc: conserved [Verticillium albo-atrum VaMs.102]
  misc_feature (15)..(121): NCBI GI: 46111343 Blast Desc: FG02553.1 [Gibberella zeae PH-1]
  misc_feature (11)..(121): NCBI GI: 116207582 Blast Desc: CHGG_03084 [Chaetomium globosum CBS 148.51] gi|88183681|gb|EAQ91149.1| CHGG_03084 [Chaetomium globosum CBS 148.51]
  misc_feature (26)..(121): NCBI GI: 171686418 Blast Desc: protein product [Podospora anserina] gi|170943170|emb|CAP68823.1| protein product [Podospora anserina]
  misc_feature (3)..(121): NCBI GI: 156058670 Blast Desc: SS1G_03347 [Sclerotinia sclerotiorum 1980] gi|154701134|gb|EDO00873.1| SS1G_03347 [Sclerotinia sclerotiorum 1980]
  misc_feature (3)..(121): NCBI GI: 154303116 Blast Desc: BC1G_09578 [Botryotinia fuckeliana B05.10] gi|150855041|gb|EDN30233.1| BC1G_09578 [Botryotinia fuckeliana B05.10]
  misc_feature (21)..(118): NCBI GI: 159130018 Blast Desc: microtubule associated protein (Ase1), [Aspergillus fumigatus A1163]
  misc_feature (21)..(118): NCBI GI: 119482123 Blast Desc: microtubule associated protein (Ase1), [Neosartorya fischeri NRRL 181] gi|119409244|gb|EAW19193.1| microtubule associated protein (Ase1), [Neosartorya fischeri NRRL 181]
MQHEAHTSMRSERLAQSAYPHAPPPRQTSNTSSVVTGSENWETYDDNSEPEQDASDTYYAKVRAARGKRFTPEDGYARPQASQAKRLRGIPPHAMQVGHVTVDAEGNRIISGSEWTDEDAF

SEQ ID NO: 17141 - DNA, 3557 bp, Muscodor strobelii; identical to SEQ ID NO: 17138
  misc_feature: SGI EST ID NO. CUFF.40370.1
  misc_feature: Variant of the nucleotide sequence at SEQ ID NO 17139

SEQ ID NO: 17142 - DNA, 918 bp, Muscodor strobelii
  misc_feature: SGI cDNA ID NO. 565721
  misc_feature: Encodes the peptide sequence at SEQ ID NO 17143
atggcaactcaccgcatcctcctaataggcgccggcgagctcggcacagcaatggtccacggtctaacgcgccatccctgcttctcctcctcctcactcaccatcctgctccgtcctagcagcaaaccctcaaagcaatccacaatcaccgcccttcgttctcaaggcgccgagataatctacggtgatatcgtcctcgactccgaagacacccttgccaacatcttcgtaaacttcgataccatcataggatgtacgggttatggctgtccaccaggcacacaacttagactcgcgagggctgtgttgaaagccggtgcggggagaaagaaagagatcagatatttcccctggcagtggggaatagactacgacgttttgggtgagggaagtgcacaggatttgtttgatgagcagcttgagattaggaagttgttgagggggcagaaggaggtggattgggttattgttagtgttgggttgttcttaagtttcctcttcgtaccagaattcggaccagttgatctcaaggcgcgaaaacttcgcgcgctaggtagctgggagacacgtgtcagtctcacgtctccaaaggacatcggtcgagtgactgcggaaatcatattcgatccacgggagatcaacagacaagttgtccacgtcgctggcgacaccgttagctatggcgatgtggcgaacttggtggagcagaggtttgggggcgagtgggagagagagttgtgggatctagacacgctgagtaacaagctgaaagacaatcctgacgatggaatggtgaaatatcaaaatgttttcgccgccgggaagggtgtggcttggaatatggatggcacagttaataaggaacggggcttgagtatgcaaacagtcaaggactacttaggtgagatggagatttga

SEQ ID NO: 17143 - protein, 305 aa, Muscodor strobelii
  misc_feature: SGI Peptide ID NO. 565721
  misc_feature (6)..(244): Pfam Id: PF05368 Pfam Desc: NmrA-like family
  misc_feature (6)..(305): NCBI GI: 256726438 Blast Desc: NECHADRAFT_68858 [Nectria haematococca mpVI 77-13-4]
  misc_feature (4)..(304): NCBI GI: 46124245 Blast Desc: FG06500.1 [Gibberella zeae PH-1]
  misc_feature (2)..(299): NCBI GI: 121712072 Blast Desc: isoflavone reductase family protein [Aspergillus clavatus NRRL 1] gi|119401803|gb|EAW12225.1| isoflavone reductase family protein [Aspergillus clavatus NRRL 1]
  misc_feature (3)..(302): NCBI GI: 91779295 Blast Desc: isoflavone oxidoreductase [Burkholderia xenovorans LB400] gi|91691955|gb|ABE35153.1| isoflavone oxidoreductase [Burkholderia xenovorans LB400]
  misc_feature (4)..(302): NCBI GI: 254499156 Blast Desc: LDG_3115 [Legionella drancourtii LLAP12] gi|254351622|gb|EET10472.1| LDG_3115 [Legionella drancourtii LLAP12]
  misc_feature (1)..(300): NCBI GI: 190574488 Blast Desc: oxidoreductase [Stenotrophomonas maltophilia K279a] gi|190012410|emb|CAQ46038.1| oxidoreductase [Stenotrophomonas maltophilia K279a]
  misc_feature (6)..(299): NCBI GI: 118470671 Blast Desc: isoflavone reductase [Mycobacterium smegmatis str. MC2 155] gi|118171958|gb|ABK72854.1| isoflavone reductase [Mycobacterium smegmatis str. MC2 155]
  misc_feature (4)..(299): NCBI GI: 118470396 Blast Desc: isoflavone reductase [Mycobacterium smegmatis str. MC2 155] gi|118171683|gb|ABK72579.1| isoflavone reductase [Mycobacterium smegmatis str. MC2 155]
  misc_feature (5)..(299): NCBI GI: 119466999 Blast Desc: isoflavone reductase family protein [Neosartorya fischeri NRRL 181] gi|119405458|gb|EAW15409.1| isoflavone reductase family protein [Neosartorya fischeri NRRL 181]
  misc_feature (3)..(300): NCBI GI: 116688208 Blast Desc: NmrA family protein [Burkholderia cenocepacia HI2424] gi|116646297|gb|ABK06938.1| NmrA family protein [Burkholderia cenocepacia HI2424]
  misc_feature (36)..(244): SWISSPROT Homolog: EC 1.3.1.45 2'-hydroxyisoflavone reductase
MATHRILLIGAGELGTAMVHGLTRHPCFSSSSLTILLRPSSKPSKQSTITALRSQGAEIIYGDIVLDSEDTLANIFVNFDTIIGCTGYGCPPGTQLRLARAVLKAGAGRKKEIRYFPWQWGIDYDVLGEGSAQDLFDEQLEIRKLLRGQKEVDWVIVSVGLFLSFLFVPEFGPVDLKARKLRALGSWETRVSLTSPKDIGRVTAEIIFDPREINRQVVHVAGDTVSYGDVANLVEQRFGGEWERELWDLDTLSNKLKDNPDDGMVKYQNVFAAGKGVAWNMDGTVNKERGLSMQTVKDYLGEMEI

SEQ ID NO: 17144 - DNA, 1155 bp, Muscodor strobelii
  misc_feature: SGI EST ID NO. CUFF.40363.0
  misc_feature: Variant of the nucleotide sequence at SEQ ID NO 17142
cccagcttcaagctatttgtttcccttaaccatttcaaagttaaggtatataaaggtgtaatccgatatatactacgtcttctgagatagatacatctcaagcaataactagcacttacaagaagctacaagcactcataaccaactaacccaacacccttttcaaaatggcaactcaccgcatcctcctaataggcgccggcgagctcggcacagcaatggtccacggtctaacgcgccatccctgcttctcctcctcctcactcaccatcctgctccgtcctagcagcaaaccctcaaagcaatccacaatcaccgcccttcgttctcaaggcgccgagataatctacggtgatatcgtcctcgactccgaagacacccttgccaacatcttcgtaaacttcgataccatcataggatgtacgggttatggctgtccaccaggcacacaacttagactcgcgagggctgtgttgaaagccggtgcggggagaaagaaagagatcagatatttcccctggcagtggggaatagactacgacgttttgggtgagggaagtgcacaggatttgtttgatgagcagcttgagattaggaagttgttgagggggcagaaggaggtggattgggttattgttagtgttgggttgttcttaagtttcctcttcgtaccagaattcggaccagttgatctcaaggcgcgaaaacttcgcgcgctaggtagctgggagacacgtgtcagtctcacgtctccaaaggacatcggtcgagtgactgcggaaatcatattcgatccacgggagatcaacagacaagttgtccacgtcgctggcgacaccgttagctatggcgatgtggcgaacttggtggagcagaggtttgggggcgagtgggagagagagttgtgggatctagacacgctgagtaacaagctgaaagacaatcctgacgatggaatggtgaaatatcaaaatgttttcgccgccgggaagggtgtggcttggaatatggatggcacagttaataaggaacggggcttgagtatgcaaacagtcaaggactacttaggtgagatggagatttgaaggacaagctttggataataatacagaggaaatcctaccacacctgaactactattccgaagaatctaaa

SEQ ID NO: 17145 - DNA, 1416 bp, Muscodor strobelii
  misc_feature: SGI cDNA ID NO. 565722
  misc_feature: Reduced expression when VOC is produced
  misc_feature: Encodes the peptide sequence at SEQ ID NO 17146
aaccgcaacggcgtcgccctcgccctgaccctggcccgctacttccgccgctggtcgctgtggtccaaggacatcatcctcgtcgtgccccccgacagcagggccggcattcaggcctgggtcgacgcctaccacgacgcccacgacccctcccgcgtcgcccctctccccatcaagtccggtcttctccagggcgccgtcgccatcgactacccccacgaccagcgcttcgagggcgtgcacgttgtctacgacggcgtcaacggccagctgcccaacctcgacctcatcaactcggtcaacaacatcgccaacggccagatgggcatgcactccttcatccaggagacctacaaccgcgacgacaagtaccagcaccgcctcaagaccatgctgcgcggcatgctgaaccagggcctcggccatgctgccggcgtgcacagcagcttcatcccgtaccacgtggacgccgtgaccatccaacccgtaggtcagggctggcatgatgagatgggcctggggagactcgtcgagggcacgttcagaagtctgaacaacttgcttgagcatctccatcagagcttcttcttctacctactcatcaacaaggagcgcttcgtgagtatcggcacctatttgccgagtgccatgttagtggccatcaacttcaccatcatggccatcttgttgtgggtcaagagtggtggcaaggacgccgcccccattgcgcaggactcgtcggccagcaaggagcaagacggaaccaagacgcccgccgcctctgcagctgtcgagcgagagttgtatctgcctctgggatttgtcgttgcctgtcattttctcggcgctgtaccattattcgtgtttacacatacgccttcccatctcctcgctcccttcttcatcgtcttcggcgtcatcaacacggctctgccgccactgctctctaccctctggagcgtggcctcgacgcgggcgcccgcgctccagcacttctatctcctcaagtccttctcccttcttctcctcggcatgttcctcagctcgctcgcgacgctcaacttcagcctggctttcctcatcggcctgttctccaccccactctcgttcgcgcggccttggcccaggaatgccggtgtccgttacgggtacacgttactgcttaacctcgtcagccccgcggctgtggtcctcgctggggcggcggcatatggtctgcgctccggaggcgccaccggggtgatgggtgcgctagaagaggtgctgaaggaggcggcgtttgggtgggacgtgtggggactgtatacgccgctcgtggtgtggtgtgtgtggtggccggcatggatcgtcggaagtgtggtcacgctgggccagcctgtcgtcgtcgatgggggcagggagaaaaaggtgcagtag

SEQ ID NO: 17146 - protein, 471 aa, Muscodor strobelii
  misc_feature: SGI Peptide ID NO. 565722
  misc_feature (1)..(458): Pfam Id: PF04114 Pfam Desc: Gaa1-like, GPI transamidase component
  misc_feature (1)..(232): Pfam Id: PF04114 Pfam Desc: Gaa1-like, GPI transamidase component
  misc_feature (1)..(457): NCBI GI: 261358898 Blast Desc: GPI transamidase component GAA1 [Verticillium albo-atrum VaMs.102]
  misc_feature (1)..(458): NCBI GI: 256721613 Blast Desc: [Nectria haematococca mpVI 77-13-4]
  misc_feature (1)..(458): NCBI GI: 46127155 Blast Desc: FG07955.1 [Gibberella zeae PH-1]
  misc_feature (1)..(459): NCBI GI: 156042504 Blast Desc: SS1G_11049 [Sclerotinia sclerotiorum 1980] gi|154695436|gb|EDN95174.1| SS1G_11049 [Sclerotinia sclerotiorum 1980]
  misc_feature (1)..(459): NCBI GI: 145616164 Blast Desc: MGG_03523 [Magnaporthe grisea 70-15] gi|145009916|gb|EDJ94572.1| MGG_03523 [Magnaporthe grisea 70-15]
  misc_feature (1)..(455): NCBI GI: 238840742 Blast Desc: rhomboid protein 2 [Microsporum canis CBS 113480]
  misc_feature (1)..(461): NCBI GI: 242789907 Blast Desc: GPI transamidase component (GAA1), [Talaromyces stipitatus ATCC 10500] gi|218718046|gb|EED17466.1| GPI transamidase component (GAA1), [Talaromyces stipitatus ATCC
  misc_feature (1)..(461): NCBI GI: 258567978 Blast Desc: conserved [Uncinocarpus reesii 1704] gi|237906179|gb|EEP80580.1| conserved [Uncinocarpus reesii 1704]
  misc_feature (1)..(449): NCBI GI: 240105212 Blast Desc: Gaa1-like, GPI transamidase component family protein [Coccidioides posadasii C735 delta SOWgp]
  misc_feature (1)..(449): NCBI GI: 119194667 Blast Desc: CIMG_01708 [Coccidioides immitis RS]
  misc_feature: Useful for introducing or modulating the production of volatile compounds
NRNGVALALTLARYFRRWSLWSKDIILVVPPDSRAGIQAWVDAYHDAHDPSRVAPLPIKSGLLQGAVAIDYPHDQRFEGVHVVYDGVNGQLPNLDLINSVNNIANGQMGMHSFIQETYNRDDKYQHRLKTMLRGMLNQGLGHAAGVHSSFIPYHVDAVTIQPVGQGWHDEMGLGRLVEGTFRSLNNLLEHLHQSFFFYLLINKERFVSIGTYLPSAMLVAINFTIMAILLWVKSGGKDAAPIAQDSSASKEQDGTKTPAASAAVERELYLPLGFVVACHFLGAVPLFVFTHTPSHLLAPFFIVFGVINTALPPLLSTLWSVASTRAPALQHFYLLKSFSLLLLGMFLSSLATLNFSLAFLIGLFSTPLSFARPWPRNAGVRYGYTLLLNLVSPAAVVLAGAAAYGLRSGGATGVMGALEEVLKEAAFGWDVWGLYTPLVVWCVWWPAWIVGSVVTLGQPVVVDGGREKKVQ

SEQ ID NO: 17147 - DNA, 2507 bp, Muscodor strobelii
  misc_feature: SGI EST ID NO. CUFF.40513.1
  misc_feature: Variant of the nucleotide sequence at SEQ ID NO 17145
ccgcaacggcgtcgccctcgccctgaccctggcccgctacttccgccgctggtcgctgtggtccaaggacatcatcctcgtcgtgccccccgacagcagggccggcattcaggcctgggtcgacgcctaccacgacgcccacgacccctcccgcgtcgcccctctccccatcaagtccggtcttctccagggcgccgtcgccatcgactacccccacgaccagcgcttcgagggcgtgcacgttgtctacgacggcgtcaacggccagctgcccaacctcgacctcatcaactcggtcaacaacatcgccaacggccagatgggcatgcactccttcatccaggagacctacaaccgcgacgacaagtaccagcaccgcctcaagaccatgctgcgcggcatgctgaaccagggcctcggccatgctgccggcgtgcacagcagcttcatcccgtaccacgtggacgccgtgaccatccaacccgtaggtcagggctggcatgatgagatgggcctggggagactcgtcgagggcacgttcagaagtctgaacaacttgcttgagcatctccatcagagcttcttcttctacctactcatcaacaaggagcgcttcgtgagtatcggcacctatttgccgagtgccatgttagtggccatcaacttcaccatcatggccatcttgttgtgggtcaagagtggtggcaaggacgccgcccccattgcgcaggactcgtcggccagcaaggagcaagacggaaccaagacgcccgccgcctctgcagctgtcgagcgagagttgtatctgcctctgggatttgtcgttgcctgtcattttctcggcgctgtaccattattcgtgtttacacatacgccttcccatctcctcgctcccttcttcatcgtcttcggcgtcatcaacacggctctgccgccactgctctctaccctctggagcgtggcctcgacgcgggcgcccgcgctccagcacttctatctcctcaagtccttctcccttcttctcctcggcatgttcctcagctcgctcgcgacgctcaacttcagcctggctttcctcatcggcctgttctccaccccactctcgttcgcgcggccttggcccaggaatgccggtgtccgttacgggtacacgttactgcttaacctcgtcagccccgcggctgtggtcctcgctggggcggcggcatatggtctgcgctccggaggcgccaccggggtgatgggtgcgctagaagaggtgctgaaggaggcggcgtttgggtgggacgtgtggggactgtatacgccgctcgtggtgtggtgtgtgtggtggccggcatggatcgtcggaagtgtggtcacgctgggccagcctgtcgtcgtcgatgggggcagggagaaaaaggtgcagtagaagatggcgaggggtggagcattaagatcaggtgtgaggatgaaagagctgcaggacggcgagggctcaatttcgtagtagtagtcgttgacatgcagctagcatatataataagaatactatgactacaaacacatcgggacactatatgaggattccaatcaccatcttcgcatacttggatatacatcatccgatatgttgcgtttcgttctctcatcatccgttgtaataagtatcagctacaagcatgactatgtgtacacatttgtgtagcatgagtgtactatatccgaattcgtggacatagcggacgacacatacgtgtagatggcaatggttgagggctttcattcttttttttctttcatagaaacacctcgcgcccagaaaggtgtgcctctattcttcatttgactttatcatacagaccagggctcattgatctggtcggcggtagtactctctcattacgcttctcgtctcatttttaagactacgccgccacgagccgggcgtagaccacccagcccgtgacgccttctctattcccgttctttcccatttccgtttttttcttcgtcttctagcatacaccgagtagaaacgagccactcagggggcccagatgtcctggccggtggtctcgatccagttgccgagcttgttgacgttctggccccactcgccgaggcgctggctcatgctggcgatctggcccatgtcgaggacgcggggctggacccaggtgaagttgacgagctcgtcgacctggtcgatggtgccgcggacgaggccgagcgagagggccttcatgacgaggtgctcgatctggttggtggggaccttggtgtcgtgggagatggtggcgaaggacatggcgcgctcgtgggggggccggcggaagacggactcggtgagggcggcgaggtagatcttctggcggatctcgtcggcgtggtcctcgagcatgcggttgctgtcgatgtggtcggacagctggtcgtaggcgcgcaggtcgccgcggttgaaggccagcagcaggtcgcgcagccaggcggtggggccggtgagggcgtcgaggatggggtca

SEQ ID NO: 17148 - DNA, 984 bp, Muscodor strobelii
  misc_feature: SGI cDNA ID NO. 565723
  misc_feature: Elevated expression when VOC is produced
  misc_feature: Encodes the peptide sequence at SEQ ID NO 17149
atgagcgacgccaccgccgagttcctggccgagcagcgggacgcggcgcccgccagcctgcagccgaccatcatccagttcgaggactactgggagcgcaagctgtggcaccagctgacggacctgctggtcgacttcttcgccgcccccgacagcgagccgctgcggctgcccttctacaacaccttcatcctccgcttcgccgacaagatcaaccagctcaagctcgtcgacctcgggctcaaggccgccgccacctgtagcgacgaccgcgagcgcctcgccttcctggccgccctggcccagcgcgtcgacacggacggctcgcaggacgccttcgtctacgccaccgtcgccgtcgcccgcgccgagaagatcctcgacgccttcgacgccgtcgagaccaaggtccacgccgccttctaccagcgccgcgcccgcgcctacgacctcggcatcctccgccctcgtctccgactccatctacaacttcggcgagctgctgctgaccccatcctcgacgccctcaccggccccaccgcctggctgcgcgacctgctgctggccttcaaccgcggcgacctgcgcgcctacgaccagctgtccgaccacatcgacagcaaccgcatgctcgaggaccacgccgacgagatccgccagaagatctacctcgccgccctcaccgagtccgtcttccgccggcccccccacgagcgcgccatgtccttcgccaccatctcccacgacaccaaggtccccaccaaccagatcgagcacctcgtcatgaaggccctctcgctcggcctcgtccgcggcaccatcgaccaggtcgacgagctcgtcaacttcacctgggtccagccccgcgtcctcgacatgggccagatcgccagcatgagccagcgcctcggcgagtggggccagaacgtcaacaagctcggcaactggatcgagaccaccggccaggacatctgggccccctga

SEQ ID NO: 17149 - protein, 327 aa, Muscodor strobelii
  misc_feature: SGI Peptide ID NO. 565723
  misc_feature (181)..(285): Pfam Id: PF01399 Pfam Desc: PCI domain
  misc_feature (3)..(326): NCBI GI: 154289496 Blast Desc: BC1G_16155 [Botryotinia fuckeliana B05.10] gi|150849194|gb|EDN24387.1| BC1G_16155 [Botryotinia fuckeliana B05.10]
  misc_feature (2)..(326): NCBI GI: 46127157 Blast Desc: FG07956.1 [Gibberella zeae PH-1]
  misc_feature (2)..(326): NCBI GI: 256721642 Blast Desc: [Nectria haematococca mpVI 77-13-4]
  misc_feature (3)..(326): NCBI GI: 116179564 Blast Desc: conserved [Chaetomium globosum CBS 148.51] gi|88184707|gb|EAQ92175.1| conserved [Chaetomium globosum CBS 148.51]
  misc_feature (3)..(326): NCBI GI: 85093952 Blast Desc: NCU02374 [Neurospora crassa OR74A] gi|28921249|gb|EAA30559.1| NCU02374 [Neurospora crassa OR74A]
  misc_feature (2)..(326): NCBI GI: 39942888 Blast Desc: MGG_03524 [Magnaporthe grisea 70-15] gi|145009915|gb|EDJ94571.1| MGG_03524 [Magnaporthe grisea 70-15]
  misc_feature (2)..(326): NCBI GI: 242789912 Blast Desc: proteasome regulatory particle subunit (RpnI), [Talaromyces stipitatus ATCC 10500] gi|218718047|gb|EED17467.1| proteasome regulatory particle subunit (RpnI), [Talaromyces ATCC
  misc_feature (2)..(326): NCBI GI: 261358899 Blast Desc: 26S proteasome regulatory subunit RPN9 [Verticillium albo-atrum VaMs.102]
  misc_feature (2)..(326): NCBI GI: 225683992 Blast Desc: 26S proteasome non-ATPase regulatory subunit 13 [Paracoccidioides brasiliensis Pb03]
  misc_feature (3)..(326): NCBI GI: 189091882 Blast Desc: [Podospora anserina] gi|27803051|emb|CAD60754.1| protein product [Podospora anserina] gi|188219294|emb|CAP49274.1| protein product [Podospora anserina]
  misc_feature: Useful for introducing or modulating the production of volatile compounds
MSDATAEFLAEQRDAAPASLQPTIIQFEDYWERKLWHQLTDLLVDFFAAPDSEPLRLPFYNTFILRFADKINQLKLVDLGLKAAATCSDDRERLAFLAALAQRVDTDGSQDAFVYATVAVARAEKILDAFDAVETKVHAAFYQRRARAYDLGILRPRLRLHLQLRRAAADPILDALTGPTAWLRDLLLAFNRGDLRAYDQLSDHIDSNRMLEDHADEIRQKIYLAALTESVFRRPPHERAMSFATISHDTKVPTNQIEHLVMKALSLGLVRGTIDQVDELVNFTWVQPRVLDMGQIASMSQRLGEWGQNVNKLGNWIETTGQDIWAP

SEQ ID NO: 17150 - DNA, 894 bp, Muscodor strobelii
  misc_feature: SGI cDNA ID NO. 565724
  misc_feature: Reduced expression when VOC is produced
  misc_feature: Encodes the peptide sequence at SEQ ID NO 17151
tgggagcgcaagctgtggcaccagctgacggacctgctggtcgacttcttcgccgcccccgacagcgagccgctgcggctgcccttctacaacaccttcatcctccgcttcgccgacaagatcaaccagctcaagctcgtcgacctcgggctcaaggccgccgccacctgtagcgacgaccgcgagcgcctcgccttcctggccgccctggcccagcgcgtcgacacggacggctcgcaggacgccttcgtctacgccaccgtcgccgtcgcccgcgccgagaagatcctcgacgccttcgacgccgtcgagaccaaggtccacgccgccttctaccagcgccgcgcccgcgcctacgacctcggcatcctccgccctcgtctccgactccatctacaacttcggcgagctgctgctgaccccatcctcgacgccctcaccggccccaccgcctggctgcgcgacctgctgctggccttcaaccgcggcgacctgcgcgcctacgaccagctgtccgaccacatcgacagcaaccgcatgctcgaggaccacgccgacgagatccgccagaagatctacctcgccgccctcaccgagtccgtcttccgccggcccccccacgagcgcgccatgtccttcgccaccatctcccacgacaccaaggtccccaccaaccagatcgagcacctcgtcatgaaggccctctcgctcggcctcgtccgcggcaccatcgaccaggtcgacgagctcgtcaacttcacctgggtccagccccgcgtcctcgacatgggccagatcgccagcatgagccagcgcctcggcgagtggggccagaacgtcaacaagctcggcaactggatcgagaccaccggccaggacatctgggccccctga

SEQ ID NO: 17151 - protein, 297 aa, Muscodor strobelii
  misc_feature: SGI Peptide ID NO. 565724
  misc_feature (151)..(255): Pfam Id: PF01399 Pfam Desc: PCI domain
  misc_feature (1)..(296): NCBI GI: 154289496 Blast Desc: BC1G_16155 [Botryotinia fuckeliana B05.10] gi|150849194|gb|EDN24387.1| BC1G_16155 [Botryotinia fuckeliana B05.10]
  misc_feature (1)..(296): NCBI GI: 116179564 Blast Desc: conserved [Chaetomium globosum CBS 148.51] gi|88184707|gb|EAQ92175.1| conserved [Chaetomium globosum CBS 148.51]
  misc_feature (1)..(296): NCBI GI: 46127157 Blast Desc: FG07956.1 [Gibberella zeae PH-1]
  misc_feature (1)..(296): NCBI GI: 256721642 Blast Desc: [Nectria haematococca mpVI 77-13-4]
  misc_feature (1)..(296): NCBI GI: 85093952 Blast Desc: NCU02374 [Neurospora crassa OR74A] gi|28921249|gb|EAA30559.1| NCU02374 [Neurospora crassa OR74A]
  misc_feature (1)..(296): NCBI GI: 39942888 Blast Desc: MGG_03524 [Magnaporthe grisea 70-15] gi|145009915|gb|EDJ94571.1| MGG_03524 [Magnaporthe grisea 70-15]
  misc_feature (1)..(296): NCBI GI: 242789912 Blast Desc: proteasome regulatory particle subunit (RpnI), [Talaromyces stipitatus ATCC 10500] gi|218718047|gb|EED17467.1| proteasome regulatory particle subunit (RpnI), [Talaromyces ATCC
  misc_feature (1)..(296): NCBI GI: 189091882 Blast Desc: [Podospora anserina] gi|27803051|emb|CAD60754.1| protein product [Podospora anserina] gi|188219294|emb|CAP49274.1| protein product [Podospora anserina]
  misc_feature (1)..(296): NCBI GI: 154277896 Blast Desc: conserved [Ajellomyces capsulatus NAm1] gi|150413365|gb|EDN08748.1| conserved [Ajellomyces capsulatus NAm1] gi|225560884|gb|EEH09165.1| 26S proteasome regulatory 26S
  misc_feature (1)..(296): NCBI GI: 225683992 Blast Desc: 26S proteasome non-ATPase regulatory subunit 13 [Paracoccidioides brasiliensis Pb03]
  misc_feature: Useful for introducing or modulating the production of volatile compounds
WERKLWHQLTDLLVDFFAAPDSEPLRLPFYNTFILRFADKINQLKLVDLGLKAAATCSDDRERLAFLAALAQRVDTDGSQDAFVYATVAVARAEKILDAFDAVETKVHAAFYQRRARAYDLGILRPRLRLHLQLRRAAADPILDALTGPTAWLRDLLLAFNRGDLRAYDQLSDHIDSNRMLEDHADEIRQKIYLAALTESVFRRPPHERAMSFATISHDTKVPTNQIEHLVMKALSLGLVRGTIDQVDELVNFTWVQPRVLDMGQIASMSQRLGEWGQNVNKLGNWIETTGQDIWAP

SEQ ID NO: 17152 - DNA, 1143 bp, Muscodor strobelii
  misc_feature: SGI cDNA ID NO. 565725
  misc_feature: Encodes the peptide sequence at SEQ ID NO 17153
atggccccctttcctgccgccgtgcgcgccgcccggccgctggcgacgcacgccaaaagcctgtcgcaggcccgccacgtctccgacatcaccatcacccgcaccggcaagcccatcctgcgcacccagggcggacgtgcgctcgctgaccagccccctacctcccgtccagcgcgccagggatgctccgtcgtcgtcccctaccgtgaggagatggccaagcgccacctcaaggtcaccggcgacctcggccgcgtcaccttcatcgagtacgacctgcacaacaccgagtccatcgaggccagcgtccgccactccgacgtcgtctacaacctcgtcggccgcaactaccccaccaagaacttcacactcgacgacgtccacgtcgaggccaccgagcgcatcgccgaggccgtcgccaagtacgacgttgaccgctacatccacgtctcctcctacaacgccgacccggcctccgacgcccgcttcttcgccaccaagggccgcggcgaggaggtcgcccgcgccatcttccccgagaccaccatcgtccgccccgcccccatgttcggcttcgaggacaacctgctgatccgcctcgccggcgtcaccaacgtcttcacctccaacaacatgcaggagcgctactggcccgtccacgtaagcaccccccgcggcacccgtcgtgcaccaactaacccgccgcagtcgatcgacgtcggccacgccctcgagaagatgctctacgacgacaccaccgccggccagaccttcgagctctacggccccaagaactactccaccgccgagattgccgagatggtcgaccgcgagatcttcaagaagcgcagacacatcaacgtccccaaggccatcctagagcccgttgccggcctgctcaaccgcctgctgtggtggccgctcctctcggccgaggacgtgcagagggagttcatcgaccagaagatcgacgagacggccaagacattcgccgacttgggcatcacccccggtgagatcagcaactacacataccactacttgcaaggataccgcagctcgtcttactatgacctgccacctgcgacggagaaggagaagagggaggacaggaaatacatccacgtcacggatgagttatag

SEQ ID NO: 17153 - protein, 380 aa, Muscodor strobelii
  misc_feature: SGI Peptide ID NO. 565725
  misc_feature (1)..(380): NCBI GI: 39942890 Blast Desc: conserved [Magnaporthe grisea 70-15] gi|145009914|gb|EDJ94570.1| conserved [Magnaporthe grisea 70-15]
  misc_feature (1)..(380): NCBI GI: 58257457 Blast Desc: NADH-ubiquinone oxidoreductase 40 kDa subunit-like protein [Magnaporthe grisea]
  misc_feature (1)..(379): NCBI GI: 116179562 Blast Desc: CHGG_00409 [Chaetomium globosum CBS 148.51] gi|88184706|gb|EAQ92174.1| CHGG_00409 [Chaetomium globosum CBS 148.51]
  misc_feature (1)..(380): NCBI GI: 261358900 Blast Desc: NADH-ubiquinone oxidoreductase 40 kDa subunit [Verticillium albo-atrum VaMs.102]
  misc_feature (23)..(379): NCBI GI: 119472804 Blast Desc: NADH-ubiquinone oxidoreductase 39 kDa subunit, [Neosartorya fischeri NRRL 181] gi|119406573|gb|EAW16524.1| NADH-ubiquinone oxidoreductase 39 kDa subunit, [Neosartorya NRRL
  misc_feature (1)..(379): NCBI GI: 189091884 Blast Desc: [Podospora anserina] gi|27803052|emb|CAD60755.1| protein product [Podospora anserina] gi|188219295|emb|CAP49275.1| protein product [Podospora anserina]
  misc_feature (23)..(379): NCBI GI: 70992617 Blast Desc: NADH-ubiquinone oxidoreductase 39 kDa subunit [Aspergillus fumigatus Af293] gi|66848790|gb|EAL89119.1| NADH-ubiquinone oxidoreductase 39 kDa subunit, [Aspergillus 39
  misc_feature (1)..(376): NCBI GI: 46397823 Blast Desc: NADH-ubiquinone oxidoreductase 39 kDa subunit [Aspergillus fumigatus Af293] gi|66848790|gb|EAL89119.1| NADH-ubiquinone oxidoreductase 39 kDa subunit, [Aspergillus 39
  misc_feature (9)..(379): NCBI GI: 225683993 Blast Desc: 40 kD subunit of NADH dehydrogenase [Paracoccidioides brasiliensis Pb03]
  misc_feature (15)..(379): NCBI GI: 121700136 Blast Desc: NADH-ubiquinone oxidoreductase 39 kDa subunit, [Aspergillus clavatus NRRL 1] gi|119396475|gb|EAW06907.1| NADH-ubiquinone oxidoreductase 39 kDa subunit, [Aspergillus NRRL
MAPFPAAVRAARPLATHAKSLSQARHVSDITITRTGKPILRTQGGRALADQPPTSRPARQGCSVVVPYREEMAKRHLKVTGDLGRVTFIEYDLHNTESIEASVRHSDVVYNLVGRNYPTKNFTLDDVHVEATERIAEAVAKYDVDRYIHVSSYNADPASDARFFATKGRGEEVARAIFPETTIVRPAPMFGFEDNLLIRLAGVTNVFTSNNMQERYWPVHVSTPRGTRRAPTNPPQSIDVGHALEKMLYDDTTAGQTFELYGPKNYSTAEIAEMVDREIFKKRRHINVPKAILEPVAGLLNRLLWWPLLSAEDVQREFIDQKIDETAKTFADLGITPGEISNYTYHYLQGYRSSSYYDLPPATEKEKREDRKYIHVTDEL

SEQ ID NO: 17154 - DNA, 4550 bp, Muscodor strobelii
  misc_feature: SGI EST ID NO. CUFF.40535.0
  misc_feature: Variant of the nucleotide sequence at SEQ ID NO 17152
cacgacgtcttgatcaaggagacctttgtatgtctaagacttgagtgttcaacattgattgctaaggctactgaaacctattgtaacgacttagactcagacttattaccaggcctcacatgaacacaccttagtaagttaagcaacatgccagcaggcagttgagctccttcagctgccacagagctactcgccagctgcgctccacgtcgaaggacgttggagctcccagaactcgggattggatacggccgcgctccaattcgtcaatcgggaaagcttcaatactgacagcttcgacgaccatccgcaaccgagagggccaccgtcattcttgccgaccaccacgcaagaatcatggccccctttcctgccgccgtgcgcgccgcccggccgctggcgacgcacgccaaaagcctgtcgcaggcccgccacgtctccgacatcaccatcacccgcaccggcaagcccatcctgcgcacccagggcggacgatcatcactcggcggtatgctcacactcacccttacgctcacgctcccacacggccctgctactgcttcttctactcgtgtccgctcaacacgtcgctgaccactcgtgtgcacgctgtccaggccacaccgccaccgtcttcggcgccaccggccaattgggggagatatatcgtcaaccgactagcgcgccagggatgctccgtcgtcgtcccctaccgtgaggagatggccaagcgccacctcaaggtcaccggcgacctcggccgcgtcaccttcatcgagtacgacctgcacaacaccgagtccatcgaggccagcgtccgccactccgacgtcgtctacaacctcgtcggccgcaactaccccaccaagaacttcacactcgacgacgtccacgtcgaggccaccgagcgcatcgccgaggccgtcgccaagtacgacgttgaccgctacatccacgtctcctcctacaacgccgacccggcctccgacgcccgcttcttcgccaccaagggccgcggcgaggaggtcgcccgcgccatcttccccgagaccaccatcgtccgccccgcccccatgttcggcttcgaggacaacctgctgatccgcctcgccggcgtcaccaacgtcttcacctccaacaacatgcaggagcgctactggcccgtccactcgatcgacgtcggccacgccctcgagaagatgctctacgacgacaccaccgccggccagaccttcgagctctacggccccaagaactactccaccgccgagattgccgagatggtcgaccgcgagatcttcaagaagcgcagacacatcaacgtccccaaggccatcctagagcccgttgccggcctgctcaaccgcctgctgtggtggccgctcctctcggccgaggacgtgcagagggagttcatcgaccagaagatcgacgagacggccaagacattcgccgacttgggcatcacccccggtgagatcagcaactacacataccactacttgcaaggataccgcagctcgtcttactatgacctgccacctgcgacggagaaggagaagagggaggacaggaaatacatccacgtcacggatgagttatagatagagcactggtcgcaagacgcgataatgtacataatcactctagacaatagtttcctttgcctccaagattccaaaattgtaagaatggtcgaaaacatgacctatgagacccctctgaagcatcttcatcatgcctatgtactgtattcagaagtccttttttttcccactaattggcgcgagctttaccgttctgcccactgaccaacattttaaccctagccaattggctaatcagtacgagttcttcatgcgcagctttccatcctaaagtctagtcttccaaatatttatattccatctgtcatctgcgagcgtgatggcggaagaggcggaagaatcaatcacgctgtcggcagactcaatagccgcgctccaagagttctataccgagcgcgatgagcacgccaataagtttgtgaaactcaaagcgcaggttgaagcggatcaccaggaccgcgaggcgcagaagctgtctattcacaccttcaccgaggactggaacgagtctcagttttggtactcggatgagaccgccaacttgctcgccaaccaactacttgacggcgtagatgaggactcggtcatcgccgtcgtgtcgacgcccagcgtcttcgtggcgttgaagaacatcttgtcttcgtccgaacacactggcccgaaacccaaaacctatctgctcgagcatgatcaacgattcggcgtatttcccgagttcgtcttctacgattttgccgaaccattcaagctcccatctcgtctgaaggggagcgtagaccgcatgatctgcgacggccccttcctcaatgagaattgccaaactaaaatggccatgacgatgcgctggttgagtcgtaacaccacacctccacgcatcataatctgcacgggcgagcgcatggagacgctggtgaaccgcctgtataagcccttgggggttcggacgacgacttacttgccccttcaccgcggcgggttgagcaacgagttttattgctacgctaactttgagtgtgaggcgtggcaatggaaacaagacacataagcaggcaggcaggcggcggacatcagtgtcatattacgatgcgcaatacaacgaatgactcaacatatcgtcccctgaaacgatcaacggaatcaattagactagctctcgaataatcttcggtactgcccccgtattgatggcgtttcctttagccaaatatgccgttagtggtttcagtcatacataaatgcaccgttcatctcatccgcgacctggcagctatggcaaaatttcgtaaatatggacacatccatacgcacgtctaccagagcatgaaacaagtcgaagcacttcgcctggttcctttggttgagtcgcccacgagggggatgtcgtttagagagctgaggttgcactttgcggacaaatgtggttatgcagattaaactaaaacagatgcaaatgcgacagacagagagacaggccggcgttttgcagcctcttagcacatgcccggcccggcccgatacgccatacgccattgcaaaaacattaccaaggacttttcactttctccgccatgcgttcctctatcccatgggatgtacaccgtcatacttgaacctgaccccgggcgccgtgtaaatgcctcgacagggcgtaccgaacctcgccggcagacctaggctagagatctaatgatgtagaaaagcaggtaggcttggctggccaagacgtcggatttcttggccagctcaactctgtggtcattgaaggagaaccactgaaggggatcgtttagctaaatgccgatcatgtttcaaggagacggaacgaggcttacctggtcattaactctgcagtacgatacgtaatggcctgtcttttatcagatctgatcaatgtcgcagctgtgtcgaatagtctagtctcacctgtgtcgagctcaccaacgtgctccactacgctcaggaggtcgtatgtgcacgatcggtgaagttcttgactgtctctcgaatcttcgctttgccctcgcgtcgtataaggaagcatattcagttggagagggaattggactttggtgcgaattttggaagcaacgcggtcgcggctgccttgcttgaactcgaaccgcttgagctggatagatagcacattgggcagcagcttgatgctgtgatctctccgcgcctgctgtgaagaattgcaactccgacatcggtattcacatttgtccgatttaatgtactcttcgtccaggcagtcctgtaatgtaagcgattgctcacccttggtggtcttcttgcctttcttctgggccaagttctccagccccaagctcagatcgagaaatgactcagttgcgttcgtaacgccgccacagtgttggcacgtcgtctggttctgaagcttgccgtaaaatgtctgatggatgatgcagttgcagctatgctcacttcccgtctccggcggcttgccatcgccgttcctttcgtgcagctcctcagcgaggaattggaaaaactcgtgggcatcttgctccttggtcgtgaccagattctcaaatgccttcttctcggatatccagaatccagatagaatattagccgccgtgtagccgttagtgttttctaaagcatagaagtcttggaacatgtcatccatagcgcaactgaggcagtgcgggacctgacagtcggtgctctggtgtccatcaccaaggtaaaaattacgtaaaagaggattatgaagaaagctctggagcacaacgttctggtagcaagtggcgccggcattgtagatgccacggaggccatcggcacgacatgacgctgccgtagtattggtggctatgtaccgggcgtcctccttggccgtttctcttacggggtcggaaaacatgtcctcgtgcttcctcttgcgaccttgagcgatgcgtgttagtctgaaactgc

SEQ ID NO: 17155 - DNA, 1095 bp, Muscodor strobelii
  misc_feature: SGI cDNA ID NO. 565726
  misc_feature: Encodes the peptide sequence at SEQ ID NO 17156
atggccccctttcctgccgccgtgcgcgccgcccggccgctggcgacgcacgccaaaagcctgtcgcaggcccgccacgtctccgacatcaccatcacccgcaccggcaagcccatcctgcgcacccagggcggacgtgcgctcgctgaccagccccctacctcccgtccagcgcgccagggatgctccgtcgtcgtcccctaccgtgaggagatggccaagcgccacctcaaggtcaccggcgacctcggccgcgtcaccttcatcgagtacgacctgcacaacaccgagtccatcgaggccagcgtccgccactccgacgtcgtctacaacctcgtcggccgcaactaccccaccaagaacttcacactcgacgacgtccacgtcgaggccaccgagcgcatcgccgaggccgtcgccaagtacgacgttgaccgctacatccacgtctcctcctacaacgccgacccggcctccgacgcccgcttcttcgccaccaagggccgcggcgaggaggtcgcccgcgccatcttccccgagaccaccatcgtccgccccgcccccatgttcggcttcgaggacaacctgctgatccgcctcgccggcgtcaccaacgtcttcacctccaacaacatgcaggagcgctactggcccgtccactcgatcgacgtcggccacgccctcgagaagatgctctacgacgacaccaccgccggccagaccttcgagctctacggccccaagaactactccaccgccgagattgccgagatggtcgaccgcgagatcttcaagaagcgcagacacatcaacgtccccaaggccatcctagagcccgttgccggcctgctcaaccgcctgctgtggtggccgctcctctcggccgaggacgtgcagagggagttcatcgaccagaagatcgacgagacggccaagacattcgccgacttgggcatcacccccggtgagatcagcaactacacataccactacttgcaaggataccgcagctcgtcttactatgacctgccacctgcgacggagaaggagaagagggaggacaggaaatacatccacgtcacggatgagttatag

SEQ ID NO: 17156 - protein, 364 aa, Muscodor strobelii
  misc_feature: SGI Peptide ID NO. 565726
  misc_feature (1)..(364): NCBI GI: 39942890 Blast Desc: conserved [Magnaporthe grisea 70-15] gi|145009914|gb|EDJ94570.1| conserved [Magnaporthe grisea 70-15]
  misc_feature (1)..(364): NCBI GI: 58257457 Blast Desc: NADH-ubiquinone oxidoreductase 40 kDa subunit-like protein [Magnaporthe grisea]
  misc_feature (1)..(363): NCBI GI: 116179562 Blast Desc: CHGG_00409 [Chaetomium globosum CBS 148.51] gi|88184706|gb|EAQ92174.1| CHGG_00409 [Chaetomium globosum CBS 148.51]
  misc_feature (1)..(364): NCBI GI: 261358900 Blast Desc: NADH-ubiquinone oxidoreductase 40 kDa subunit [Verticillium albo-atrum VaMs.102]
  misc_feature (23)..(363): NCBI GI: 119472804 Blast Desc: NADH-ubiquinone oxidoreductase 39 kDa subunit, [Neosartorya fischeri NRRL 181] gi|119406573|gb|EAW16524.1| NADH-ubiquinone oxidoreductase 39 kDa subunit, [Neosartorya NRRL
  misc_feature (1)..(363): NCBI GI: 189091884 Blast Desc: [Podospora anserina] gi|27803052|emb|CAD60755.1| protein product [Podospora anserina] gi|188219295|emb|CAP49275.1| protein product [Podospora anserina]
  misc_feature (23)..(363): NCBI GI: 70992617 Blast Desc: NADH-ubiquinone oxidoreductase 39 kDa subunit [Aspergillus fumigatus Af293] gi|66848790|gb|EAL89119.1| NADH-ubiquinone oxidoreductase 39 kDa subunit, [Aspergillus 39
  misc_feature (1)..(360): NCBI GI: 46397823 Blast Desc: NADH-ubiquinone oxidoreductase 39 kDa subunit [Aspergillus fumigatus Af293] gi|66848790|gb|EAL89119.1| NADH-ubiquinone oxidoreductase 39 kDa subunit, [Aspergillus 39
  misc_feature (15)..(363): NCBI GI: 121700136 Blast Desc: NADH-ubiquinone oxidoreductase 39 kDa subunit, [Aspergillus clavatus NRRL 1] gi|119396475|gb|EAW06907.1| NADH-ubiquinone oxidoreductase 39 kDa subunit, [Aspergillus NRRL
  misc_feature (9)..(363): NCBI GI: 225683993 Blast Desc: 40 kD subunit of NADH dehydrogenase [Paracoccidioides brasiliensis Pb03]
MAPFPAAVRAARPLATHAKSLSQARHVSDITITRTGKPILRTQGGRALADQPPTSRPARQGCSVVVPYREEMAKRHLKVTGDLGRVTFIEYDLHNTESIEASVRHSDVVYNLVGRNYPTKNFTLDDVHVEATERIAEAVAKYDVDRYIHVSSYNADPASDARFFATKGRGEEVARAIFPETTIVRPAPMFGFEDNLLIRLAGVTNVFTSNNMQERYWPVHSIDVGHALEKMLYDDTTAGQTFELYGPKNYSTAEIAEMVDREIFKKRRHINVPKAILEPVAGLLNRLLWWPLLSAEDVQREFIDQKIDETAKTFADLGITPGEISNYTYHYLQGYRSSSYYDLPPATEKEKREDRKYIHVTDEL

SEQ ID NO: 17157 - DNA, 4550 bp, Muscodor strobelii; identical to SEQ ID NO: 17154
  misc_feature: SGI EST ID NO. CUFF.40535.0
  misc_feature: Variant of the nucleotide sequence at SEQ ID NO 17155

SEQ ID NO: 17158 - DNA, 726 bp, Muscodor strobelii
  misc_feature: SGI cDNA ID NO. 565727
  misc_feature: Encodes the peptide sequence at SEQ ID NO 17159
atggcggaagaggcggaagaatcaatcacgctgtcggcagactcaatagccgcgctccaagagttctataccgagcgcgatgagcacgccaataagtttgtgaaactcaaagcgcaggttgaagcggatcaccaggaccgcgaggcgcagaagctgtctattcacaccttcaccgaggactggaacgagtctcagttttggtactcggatgagaccgccaacttgctcgccaaccaactacttgacggcgtagatgaggactcggtcatcgccgtcgtgtcgacgcccagcgtcttcgtggcgttgaagaacatcttgtcttcgtccgaacacactggcccgaaacccaaaacctatctgctcgagcatgatcaacgattcggcgtatttcccgagttcgtcttctacgattttgccgaaccattcaagctcccatctcgtctgaaggggagcgtagaccgcatgatctgcgacggccccttcctcaatgagaattgccaaactaaaatggccatgacgatgcgctggttgagtcgtaacaccacacctccacgcatcataatctgcacgggcgagcgcatggagacgctggtgaaccgcctgtataagcccttgggggttcggacgacgacttacttgccccttcaccgcggcgggttgagcaacgagttttattgctacgctaactttgagtgtgaggcgtggcaatggaaacaagacacataa

SEQ ID NO: 17159 - protein, 241 aa, Muscodor strobelii
  misc_feature: SGI Peptide ID NO. 565727
  misc_feature (2)..(240): NCBI GI: 189091886 Blast Desc: [Podospora anserina] gi|188219296|emb|CAP49276.1| protein product [Podospora anserina]
  misc_feature (2)..(240): NCBI GI: 27803053 Blast Desc: protein product [Podospora anserina]
  misc_feature (3)..(239): NCBI GI: 116179560 Blast Desc: CHGG_00408 [Chaetomium globosum CBS 148.51] gi|88184705|gb|EAQ92173.1| CHGG_00408 [Chaetomium globosum CBS 148.51]
  misc_feature (1)..(239): NCBI GI: 261358901 Blast Desc: N(6)-adenine-specific DNA methyltransferase [Verticillium albo-atrum VaMs.102]
  misc_feature (3)..(239): NCBI GI: 169618036 Blast Desc: SNOG_12206 [Phaeosphaeria nodorum SN15] gi|111059498|gb|EAT80618.1| SNOG_12206 [Phaeosphaeria nodorum SN15]
  misc_feature (5)..(239): NCBI GI: 39942892 Blast Desc: MGG_03526 [Magnaporthe grisea 70-15] gi|145009913|gb|EDJ94569.1| MGG_03526 [Magnaporthe grisea 70-15]
  misc_feature (6)..(233): NCBI GI: 85093943 Blast Desc: NCU02372 [Neurospora crassa OR74A] gi|28921247|gb|EAA30557.1| conserved [Neurospora crassa OR74A]
  misc_feature (7)..(240): NCBI GI: 46127159 Blast Desc: FG07957.1 [Gibberella zeae PH-1]
  misc_feature (1)..(237): NCBI GI: 189200461 Blast Desc: conserved [Pyrenophora tritici-repentis Pt-1C-BFP] gi|187983666|gb|EDU49154.1| conserved [Pyrenophora tritici-repentis Pt-1C-BFP]
  misc_feature (10)..(240): NCBI GI: 256721645 Blast Desc: NECHADRAFT_37472 [Nectria haematococca mpVI 77-13-4]
MAEEAEESITLSADSIAALQEFYTERDEHANKFVKLKAQVEADHQDREAQKLSIHTFTEDWNESQFWYSDETANLLANQLLDGVDEDSVIAVVSTPSVFVALKNILSSSEHTGPKPKTYLLEHDQRFGVFPEFVFYDFAEPFKLPSRLKGSVDRMICDGPFLNENCQTKMAMTMRWLSRNTTPPRIIICTGERMETLVNRLYKPLGVRTTTYLPLHRGGLSNEFYCYANFECEAWQWKQDT

SEQ ID NO: 17160 - DNA, 4550 bp, Muscodor strobelii; identical to SEQ ID NO: 17154
  misc_feature: SGI EST ID NO. CUFF.40535.0
  misc_feature: Variant of the nucleotide sequence at SEQ ID NO 17158

SEQ ID NO: 17161 - DNA, 1560 bp, Muscodor strobelii
  misc_feature: SGI cDNA ID NO. 565728
  misc_feature: Encodes the peptide sequence at SEQ ID NO 17162
atggccgcccgcccaaccacgcccgcctcgcccaagaacgtcaaggtcaattcccctgtgccaggcacccctctatatggttgcgagcacatacagctactcttgtcaaatagtcaggatgtgaccaaaagctccatccagtactataagatgctcctgagggttatcttcgataaggaccccatcatcgcccagacctccaagaccccggacggcgctgtcaacacctctctcacctccaactacttgtgtcttcaatgctccgctatcttacccgaggaggaacgcgcaaagcacggcaacaaaaagagccaccgcttctacgtcgactcgagaagtggtgtattgttttgtcagttttgtgaagatttcgtgtgggatcccacactagaagatttgagaattagaaagatgggcactggctcattctctagtcgcaagaggaagcacgaggacatgttttccgaccccgtaagagaaacggccaaggaggacgcccggtacatagccaccaatactacggcagcgtcatgtcgtgccgatggcctccgtggcatctacaatgccggcgccacttgctaccagaacgttgtgctccagagctttcttcataatcctcttttacgtaatttttaccttggtgatggacaccagagcaccgactgtcaggtcccgcactgcctcagttgcgctatggatgacatgttccaagacttctatgctttagaaaacactaacggctacacggcggctaatattctatctggattctggatatccgagaagaaggcatttgagaatctggtcacgaccaaggagcaagatgcccacgagtttttccaattcctcgctgaggagctgcacgaaaggaacggcgatggcaagccgccggagacgggaagtgagcatagctgcaactgcatcatccatcagacattttacggcaagcttcagaaccagacgacgtgccaacactgtggcggcgttacgaacgcaactgagtcatttctcgatctgagcttggggctggagaacttggcccagaagaaaggcaagaagaccaccaagggtgagcaatcgcttacattacaggactgcctggacgaagagtacattaaatcggacaaatgtgaataccgatgtcggagttgcaattcttcacagcaggcgcggagagatcacagcatcaagctgctgcccaatgtgctatctatccagctcaagcggttcgagttcaagcaaggcagccgcgaccgcgttgcttccaaaattcgcaccaaagtccaattccctctccaactgaatatgcttccttatacgacgcgagggcaaagcgaagattcgagagacagtcaagaacttcaccgatcgtgcacatacgacctcctgagcgtagtggagcacgttggtgagctcgacacaggccattacgtatcgtactgcagagttaatgaccagtggttctccttcaatgaccacagagttgagctggccaagaaatccgacgtcttggccagccaagcctacctgcttttctacatcattagatctctagcctag

SEQ ID NO: 17162 - protein, 519 aa, Muscodor strobelii
  misc_feature: SGI Peptide ID NO. 565728
  misc_feature (181)..(513): Pfam Id: PF00443 Pfam Desc: Ubiquitin carboxyl-terminal hydrolase
  misc_feature (1)..(519): NCBI GI: 261358902 Blast Desc: ubiquitin carboxyl-terminal hydrolase [Verticillium albo-atrum VaMs.102]
  misc_feature (9)..(519): NCBI GI: 164427066 Blast Desc: NCU02375 [Neurospora crassa OR74A] gi|157071591|gb|EAA30560.2| conserved [Neurospora crassa OR74A]
  misc_feature (1)..(486): NCBI GI: 116179558 Blast Desc: CHGG_00407 [Chaetomium globosum CBS 148.51] gi|88184704|gb|EAQ92172.1| CHGG_00407 [Chaetomium globosum CBS 148.51]
  misc_feature (2)..(490): NCBI GI: 189091888 Blast Desc: [Podospora anserina] gi|27803054|emb|CAD60757.1| protein product [Podospora anserina] gi|188219297|emb|CAP49277.1| protein product [Podospora anserina]
  misc_feature (109)..(519): NCBI GI: 256721616 Blast Desc: [Nectria haematococca mpVI 77-13-4]
  misc_feature (109)..(519): NCBI GI: 46127161 Blast Desc: FG07958.1 [Gibberella zeae PH-1]
  misc_feature (3)..(519): NCBI GI: 156042514 Blast Desc: SS1G_11054 [Sclerotinia sclerotiorum 1980] gi|154695441|gb|EDN95179.1| SS1G_11054 [Sclerotinia sclerotiorum 1980]
  misc_feature (109)..(519): NCBI GI: 145616162 Blast Desc: MGG_03527 [Magnaporthe grisea 70-15] gi|145009912|gb|EDJ94568.1| MGG_03527 [Magnaporthe grisea 70-15]
  misc_feature (1)..(518): NCBI GI: 189194593 Blast Desc: ubiquitin carboxyl-terminal hydrolase 2 [Pyrenophora tritici-repentis Pt-1C-BFP] gi|187979199|gb|EDU45825.1| ubiquitin carboxyl-terminal hydrolase 2 [Pyrenophora tritici-repentis
  misc_feature (1)..(518): NCBI GI: 169622653 Blast Desc: SNOG_14553 [Phaeosphaeria nodorum SN15] gi|160704821|gb|EAT78093.2| SNOG_14553 [Phaeosphaeria nodorum SN15]
  misc_feature (84)..(518): SWISSPROT Homolog: EC 3.1.2.15 Ubiquitin thiolesterase
MAARPTTPASPKNVKVNSPVPGTPLYGCEHIQLLLSNSQDVTKSSIQYYKMLLRVIFDKDPIIAQTSKTPDGAVNTSLTSNYLCLQCSAILPEEERAKHGNKKSHRFYVDSRSGVLFCQFCEDFVWDPTLEDLRIRKMGTGSFSSRKRKHEDMFSDPVRETAKEDARYIATNTTAASCRADGLRGIYNAGATCYQNVVLQSFLHNPLLRNFYLGDGHQSTDCQVPHCLSCAMDDMFQDFYALENTNGYTAANILSGFWISEKKAFENLVTTKEQDAHEFFQFLAEELHERNGDGKPPETGSEHSCNCIIHQTFYGKLQNQTTCQHCGGVTNATESFLDLSLGLENLAQKKGKKTTKGEQSLTLQDCLDEEYIKSDKCEYRCRSCNSSQQARRDHSIKLLPNVLSIQLKRFEFKQGSRDRVASKIRTKVQFPLQLNMLPYTTRGQSEDSRDSQELHRSCTYDLLSVVEHVGELDTGHYVSYCRVNDQWFSFNDHRVELAKKSDVLASQAYLLFYIIRSLA

SEQ ID NO: 17163 - DNA, 2906 bp, Muscodor strobelii
  misc_feature: SGI EST ID NO. CUFF.40536.2
  misc_feature: Variant of the nucleotide sequence at SEQ ID NO 17161
cggccatacttttcgattactttagttttcgattagtcggtgatggcatctgaatgctggacaaagctactgcttgggaagctgcatccacccgctaccacacctactgatcgttgtatcaacaatcccgtgcacttctcgtaggcattactcgactctcttcctggatagcgtatctagttcgacattggctcaatacaagtcactgcaattgcctccgcccatcgctgtaggcatctggctttggtcgtcgtgaactctgctcgcccggtctatccatccgtccatccatcccatctgcgtcttcctccaagttcggtgggaactttcgacagtcgcatacgctgagctccgacaaccgccgccaggcccgtcccgcagccctacagacgccctgacgcatcgtgcttcctcgcagactcaacccgttgtcatggccgcccgcccaaccacgcccgcctcgcccaagaacgtcaaggtcaattcccctgtgccaggcacccctctatatggttgcgagcacatacagctactcttgtcaaatagtcaggatgtgaccaaaagctccatccagtactataagatgctcctgagggttatcttcgataaggaccccatcatcgcccagacctccaagaccccggacggcgctgtcaacacctctctcacctccaactacttgtgtcttcaatgctccgctatcttacccgaggaggaacgcgcaaagcacggcaacaaaaagagccaccgcttctacgtcgactcgagaagtggtgtattgttttgtcagttttgtgaagatttcgtgtgggatcccacactagaagatttgagaattagaaagatgggcactggctcattctctagtcgcaagaggaagcacgaggacatgttttccgaccccgtaagagaaacggccaaggaggacgcccggtacatagccaccaatactacggcagcgtcatgtcgtgccgatggcctccgtggcatctacaatgccggcgccacttgctaccagaacgttgtgctccagagctttcttcataatcctcttttacgtaatttttaccttggtgatggacaccagagcaccgactgtcaggtcccgcactgcctcagttgcgctatggatgacatgttccaagacttctatgctttagaaaacactaacggctacacggcggctaatattctatctggattctggatatccgagaagaaggcatttgagaatctggtcacgaccaaggagcaagatgcccacgagtttttccaattcctcgctgaggagctgcacgaaaggaacggcgatggcaagccgccggagacgggaagtgagcatagctgcaactgcatcatccatcagacattttacggcaagcttcagaaccagacgacgtgccaacactgtggcggcgttacgaacgcaactgagtcatttctcgatctgagcttggggctggagaacttggcccagaagaaaggcaagaagaccaccaagggtgagcaatcgcttacattacaggactgcctggacgaagagtacattaaatcggacaaatgtgaataccgatgtcggagttgcaattcttcacagcaggcgcggagagatcacagcatcaagctgctgcccaatgtgctatctatccagctcaagcggttcgagttcaagcaaggcagccgcgaccgcgttgcttccaaaattcgcaccaaagtccaattccctctccaactgaatatgcttccttatacgacgcgagggcaaagcgaagattcgagagacagtcaagaacttcaccgatcgtgcacatacgacctcctgagcgtagtggagcacgttggtgagctcgacacaggccattacgtatcgtactgcagagttaatgaccagtggttctccttcaatgaccacagagttgagctggccaagaaatccgacgtcttggccagccaagcctacctgcttttctacatcattagatctctagcctaggtctgccggcgaggttcggtacgccctgtcgaggcatttacacggcgcccggggtcaggttcaagtatgacggtgtacatcccatgggatagaggaacgcatggcggagaaagtgaaaagtccttggtaatgtttttgcaatggcgtatggcgtatcgggccgggccgggcatgtgctaagaggctgcaaaacgccggcctgtctctctgtctgtcgcatttgcatctgttttagtttaatctgcataaccacatttgtccgcaaagtgcaacctcagctctctaaacgacatccccctcgtgggcgactcaaccaaaggaaccaggcgaagtgcttcgacttgtttcatgctctggtagacgtgcgtatggatgtgtccatatttacgaaattttgccatagctgccaggtcgcggatgagatgaacggtgcatttatgtatgactgaaaccactaacggcatatttggctaaaggaaacgccatcaatacgggggcagtaccgaagattattcgagagctagtctaattgattccgttgatcgtttcaggggacgatatgttgagtcattcgttgtattgcgcatcgtaatatgacactgatgtccgccgcctgcctgcctgcttatgtgtcttgtttccattgccacgcctcacactcaaagttagcgtagcaataaaactcgttgctcaacccgccgcggtgaaggggcaagtaagtcgtcgtccgaacccccaagggcttatacaggcggttcaccagcgtctccatgcgctcgcccgtgcagattatgatgcgtggaggtgtggtgttacgactcaaccagcgcatcgtcatggccactaggatggtcagtggatatgacgatagtaagtgaaaggagagtgcataggatatcaaagtaagtatgtg

SEQ ID NO: 17164 - DNA, 885 bp, Muscodor strobelii
  misc_feature: SGI cDNA ID NO. 565729
  misc_feature: Encodes the peptide sequence at SEQ ID NO 17165
atggcttcgcaaatcccccagctccccgaggtcgagcgcttgagccccgcttgcatccggattctcggaggcaaccccagcaagttcactctccagggcaccaacacctaccttgtcggtaccggcccgtcccgtctgctcgtcgacacaggtgaaggtaagccttcgtggctggccgccctcaagcgcgtcttggatgaagaaagggccacagtctcgacggccttgcttactcattggcatcacgatcacacacagggcgtgacccagttgcgtcaactggttcccgatgcgactgtatacaagtacgatcctgatcataatgaagaaaatataactgatggtcagacttttaccgttgacggcgccactctgattgcggttcacaccccgggtcatactactgatcatatggcgtttatttttcgcgaagaggatgccctctttactggcgacaacgtccttgggcacggcacggccgtctttgaagatctgcacatctacctccagagtctagccaagatggaaactctcgtttccggtcgtgtctatcctggacatggcccagtactacctgaggcgcgtggcaagatagtcgagtatattgctcacaggcaacagagggagcagcaggtcttgcaaacattaagctccgtcaatcacgcttcacctcgctcggatgactctgcgcaggcctacagctggacgccaatggagttagtcaaggtcatatatgcagatgttccggagactcttcacttacccgcctcgcatggtgtctcgcaaatcctgaagaaacttttccgtgaagacaaagtgatggtagtggatagaggcgccaccgccggagattcgtggcgtcttaaaagaaaaccaagtctgtag

SEQ ID NO: 17165 - protein, 294 aa, Muscodor strobelii
  misc_feature: SGI Peptide ID NO. 565729
  misc_feature (33)..(187): Pfam Id: PF00753 Pfam Desc: Metallo-beta-lactamase superfamily
  misc_feature (1)..(289): NCBI GI: 238487352 Blast Desc: metallo-beta-lactamase domain protein, [Aspergillus flavus NRRL3357] gi|220699793|gb|EED56132.1| metallo-beta-lactamase domain protein, [Aspergillus flavus
  misc_feature (1)..(273): NCBI GI: 261358903 Blast Desc: conserved [Verticillium albo-atrum VaMs.102]
  misc_feature (1)..(288): NCBI GI: 240105194 Blast Desc: metallo-beta-lactamase superfamily protein [Coccidioides posadasii C735 delta SOWgp]
  misc_feature (1)..(294): NCBI GI: 212534466 Blast Desc: metallo-beta-lactamase domain protein, [Penicillium marneffei ATCC 18224] gi|210069788|gb|EEA23878.1| metallo-beta-lactamase domain protein, [Penicillium marneffei
  misc_feature (1)..(274): NCBI GI: 119472877 Blast Desc: metallo-beta-lactamase domain protein, [Neosartorya fischeri NRRL 181] gi|119406586|gb|EAW16537.1| metallo-beta-lactamase domain protein, [Neosartorya fischeri NRRL
  misc_feature (1)..(274): NCBI GI: 70992647 Blast Desc: metallo-beta-lactamase domain protein [Aspergillus fumigatus Af293] gi|66848805|gb|EAL89134.1| metallo-beta-lactamase domain protein, [Aspergillus fumigatus
  misc_feature (1)..(293): NCBI GI: 259485024 Blast Desc: TPA: metallo-beta-lactamase domain protein, (AFU_orthologue; AFUA_6G12940) [Aspergillus nidulans FGSC A4]
  misc_feature (1)..(294): NCBI GI: 256721644 Blast Desc: [Nectria haematococca mpVI 77-13-4]
  misc_feature (1)..(272): NCBI GI: 145241019 Blast Desc: An08g10520 [Aspergillus niger] gi|134077685|emb|CAK45725.1| protein product [Aspergillus niger]
  misc_feature (3)..(288): NCBI GI: 116179556 Blast Desc: CHGG_00406 [Chaetomium globosum CBS 148.51] gi|88184703|gb|EAQ92171.1| CHGG_00406 [Chaetomium globosum CBS 148.51]
MASQIPQLPEVERLSPACIRILGGNPSKFTLQGTNTYLVGTGPSRLLVDTGEGKPSWLAALKRVLDEERATVSTALLTHWHHDHTQGVTQLRQLVPDATVYKYDPDHNEENITDGQTFTVDGATLIAVHTPGHTTDHMAFIFREEDALFTGDNVLGHGTAVFEDLHIYLQSLAKMETLVSGRVYPGHGPVLPEARGKIVEYIAHRQQREQQVLQTLSSVNHASPRSDDSAQAYSWTPMELVKVIYADVPETLHLPASHGVSQILKKLFREDKVMVVDRGATAGDSWRLKRKPSL

SEQ ID NO: 17166 - DNA, 2742 bp, Muscodor strobelii
  misc_feature: SGI EST ID NO. CUFF.40486.0
  misc_feature: Variant of the nucleotide sequence at SEQ ID NO 17164
aaaacctaggtacaatgacctcgaggcctcgtgagtctactgatctataatatacccaacaatcgcccacatactcctatatgtcaagttacagtagctagagacattatcgagactgtatgtaaagagatccagccgagtcagcttcgttcgaatccttgagtctaacgaacctcggtaactttctgcccataacttctttatcatcgtctcttgcccttcgcgaacaattcaggatgtacctaggtagttgtgtagtgccacatcgaaatgtgcatctgtgtattgaattgcaattgttaacgacaagacatccccgctctacgtcttatcgcatcatcctttaacatctcattccggcatacgcgatttttagacagaagtagccttagtacaagtttgcgctcaactgagcggctaatagtaacatttcaccttcttagttttggtatgagactcttgtctgtaccaactctttgccgccaatacagtagcatcgtcagagtcaaaatggcttcgcaaatcccccagctccccgaggtcgagcgcttgagccccgcttgcatccggattctcggaggcaaccccagcaagttcactctccagggcaccaacacctaccttgtcggtaccggcccgtcccgtctgctcgtcgacacaggtgaaggtaagccttcgtggctggccgccctcaagcgcgtcttggatgaagaaagggccacagtctcgacggccttgcttactcattggcatcacgatcacacacagggcgtgacccagttgcgtcaactggttcccgatgcgactgtatacaagtacgatcctgatcataatgaagaaaatataactgatggtcagacttttaccgttgacggcgccactctgattgcggttcacaccccgggtcatactactgatcatatggcgtttatttttcgcgaagaggatgccctctttactggcgacaacgtccttgggcacggcacggccgtctttgaagatctgcacatctacctccagagtctagccaagatggaaactctcgtttccggtcgtgtctatcctggacatggcccagtactacctgaggcgcgtggcaagatagtcgagtatattgctcacaggcaacagagggagcagcaggtcttgcaaacattaagctccgtcaatcacgcttcacctcgctcggatgactctgcgcaggcctacagctggacgccaatggagttagtcaaggtcatatatgcagatgttccggagactcttcacttacccgcctcgcatggtgtctcgcaaatcctgaagaaacttttccgtgaagacaaagtgatggtagtggatagaggcgccaccgccggagattcgtggcgtcttaaaagaaaaccaagtctgtagcgcaacttacattgtctggaggcctagcgctactaactctcaaatcgaagtgcgaagtcaattggtcaatgaaacgcaaggaaatgtcagcctggcttctcccactccttgaacaaacacaggcatattaattgcttgcgtgccggatggggctgtctacaaacgacagacgtctacgcgaccggtgggttgcctgtactaggcatcgtaatcagctttaacaacagaagcgcgttaaatgtcaaacaagtagatacatcctgtcgtttacgggtctcttctgagccaactctcaattcgaaaacggcacccatccttcatctacgtggtagcagagtccccaaccccctttacagttccgggtggactttgataaataaaatgtatttatttcaccaatgtacagtcatagagacaaggtcattgctggcctctggctctcatatctagggtcgaattcggtagaaagatacagctgcggcaatgcctgtacattccaagcgttttctaattacatacatttcatcactcttggcagtccacgaccgggatgaacagtagcagcgtcgtagagcgttcgacaaatcaatcccaatttctcggatgtctgcgtcaaacttactaagagattgtccgggcaagaaaaaagagggcgacaaagccgagacagagttcatatgatcatgatgactactccgccgaggtcgccaagttgacccaagaggcgccaaggaaatgagaagtggaagacagaaagaaaaatctgtgcatcgactaagagggaccagtaagagtcattaaaaatgtgattgtgcgagcggcagaataagtcctcacaatcggcattcggcagccgcagacaaacggagccgctgccttggctaggatgggtagcaatgcagtgatagcgacttattagcgatgccaacattgaactggtagataatatagacacagcagaatttggagcatcgttccggtgaaacaaacgccatgttaatgatgatacctctgtgccggcgagctacacggacttcgggtttcgtctttttctgcagtgggccgactttgaggttttatcatccgcacttcacggagcccaccgtcgccccaccagggactaccttcttcgtactgcctaagtaggtgcaaccacataggtggccaagcaaccgcacacctgtcaggtgttagttgggctaaaaggttagatttcgttcggaatcgtcggctattccacttgtatctcctccacgggagaaaaaagaagagggaaatagcacgtaaatagataatataggtgtcgtcatgtttctatcttgcaatcggacttgactctcggtcaaa

SEQ ID NO: 17167 - DNA, 1818 bp, Muscodor strobelii
  misc_feature: SGI cDNA ID NO. 565730
  misc_feature: Encodes the peptide sequence at SEQ ID NO 17168
atgtggtcggctgatgcgaaagctttaaggctgctagctctgttgactatcgcgggagtcctgcccacgatcctcgctcacggagacgatggaggtgtgacgaacataggagacatgggaatggatatgatagcagaggatcccaagccagatcccgctggatatgcgccaacatatttttcgctttccgagcatgtagctattatttatgcgcatattgcgctgatgtgcctcgcatggattttcatgctaccaatagctgtcatgctttcgatcgctcgatcacgatatacccttgccgtccagttcctatttcttctgacgaatgcgatcggtgtttttgtcgggatcagttacaacaccaacacaccagatctctacccgaacaacgcccaccacaagttcggatggattgtcacttggatcgtgagcgcccaggtttttataggcctcgtaagccgagtttctggtaccatgaacaaatcatttgtccggtcgcctaccgaggaagaggagcaagcgttcattcccatttcaactgaagcaatggctgagcatcatcgcgttcaccgaaacatgttctccccttatcggcaatcgaatgatagtggccaaggcacagaacgcaatacagagtctctgcgtagtaactcggtatcgacaatggtcggacaggaatcgccattagagccggataacagacggatacggtatcatgatgaagacgaggaaaacatgatgttcaaagtctttaagaggaccgaatcatggtcctcaatcgcgccgcagtcgctacttgctaaaatatctggtaaagtatcgggcagtatatggaaactagtcatgctcttttacaacatagtcgacagagccatactcatactgggttatgttgctctttgcacgggcctcataacctacgcgcgcttcttcgaggcccatgaaatctttagtggattggcacattggataaaaggcggtatttttttctggctgggaatcttaaccctgggtagatggtctggcagcttcggagagcttggatgggcatggaacgttcgcccaaaacagacgtcacacaaatggcggcccagtgcagagtttgttgagggtgcccttattttcacatacggagctaccaatatcttcctcgaacatctgggcagcaccgaggatagtttcagctcagaagatctcgaacacatgtcgattacggtgctgttcatcggaggcggtctgctggctatgcttatcgagtctactcgcattcgagagctattaaatacaaccattacggacgcaacgttgtcgtcacctgagtacacgtacagcgaggaagagcgtgcggcacttcaagcaccggaaacttacgagttttccatcaatccgataccagcactcgtaatcctcttgctaggaatcatgatgagttctcatacacagcagtccatgatctcaagcatgatccataagcagtggggcaacttgctcacaggcgcttcctttgcgcgaggttttacctacgtgctcttgtacctaaaaccaccgcgttccgttttaccctctcgaccaccaacggagctgttggcatcatttggtttgatttctggaggcactatcttcatggcaagcagctcggacaccgtgactggcatgattcactacaatctcgatgccatgtttttttacactgtgaccatgggcatggtcggccttctaatggcatggattgtcgtagtccttgctctcaaaggatgggccgtccgcaaagaatcgcatatgaatcggaacgccggatctttgggaccaggaaactaa

SEQ ID NO: 17168 - protein, 605 aa, Muscodor strobelii
  misc_feature: SGI Peptide ID NO. 565730
  misc_feature (11)..(597): NCBI GI: 85093967 Blast Desc: NCU02378 [Neurospora crassa OR74A] gi|28921253|gb|EAA30563.1| conserved [Neurospora crassa OR74A]
  misc_feature (6)..(598): NCBI GI: 256721643 Blast Desc: NECHADRAFT_67931 [Nectria haematococca mpVI 77-13-4]
  misc_feature (9)..(592): NCBI GI: 116179552 Blast Desc: CHGG_00404 [Chaetomium globosum CBS 148.51] gi|88184701|gb|EAQ92169.1| CHGG_00404 [Chaetomium globosum CBS 148.51]
  misc_feature (8)..(591): NCBI GI: 46127165 Blast Desc: FG07960.1 [Gibberella zeae PH-1]
  misc_feature (41)..(592): NCBI GI: 189091892 Blast Desc: [Podospora anserina] gi|27803056|emb|CAD60759.1| protein product [Podospora anserina] gi|188219299|emb|CAP49279.1| protein product [Podospora anserina]
  misc_feature (57)..(598): NCBI GI: 261358904 Blast Desc: integral membrane protein [Verticillium albo-atrum VaMs.102]
  misc_feature (10)..(593): NCBI GI: 145616160 Blast Desc: MGG_03529 [Magnaporthe grisea 70-15] gi|145009910|gb|EDJ94566.1| MGG_03529 [Magnaporthe grisea 70-15]
  misc_feature (57)..(591): NCBI GI: 256728525 Blast Desc: NECHADRAFT_2244 [Nectria haematococca mpVI 77-13-4]
  misc_feature (26)..(596): NCBI GI: 156042516 Blast Desc: SS1G_11055 [Sclerotinia sclerotiorum 1980] gi|154695442|gb|EDN95180.1| SS1G_11055 [Sclerotinia sclerotiorum 1980]
  misc_feature (14)..(591): NCBI GI: 121700124 Blast Desc: integral membrane protein [Aspergillus clavatus NRRL 1] gi|119396469|gb|EAW06901.1| integral membrane protein [Aspergillus clavatus NRRL 1]
MWSADAKALRLLALLTIAGVLPTILAHGDDGGVTNIGDMGMDMIAEDPKPDPAGYAPTYFSLSEHVAIIYAHIALMCLAWIFMLPIAVMLSIARSRYTLAVQFLFLLTNAIGVFVGISYNTNTPDLYPNNAHHKFGWIVTWIVSAQVFIGLVSRVSGTMNKSFVRSPTEEEEQAFIPISTEAMAEHHRVHRNMFSPYRQSNDSGQGTERNTESLRSNSVSTMVGQESPLEPDNRRIRYHDEDEENMMFKVFKRTESWSSIAPQSLLAKISGKVSGSIWKLVMLFYNIVDRAILILGYVALCTGLITYARFFEAHEIFSGLAHWIKGGIFFWLGILTLGRWSGSFGELGWAWNVRPKQTSHKWRPSAEFVEGALIFTYGATNIFLEHLGSTEDSFSSEDLEHMSITVLFIGGGLLAMLIESTRIRELLNTTITDATLSSPEYTYSEEERAALQAPETYEFSINPIPALVILLLGIMMSSHTQQSMISSMIHKQWGNLLTGASFARGFTYVLLYLKPPRSVLPSRPPTELLASFGLISGGTIFMASSSDTVTGMIHYNLDAMFFYTVTMGMVGLLMAWIVVVLALKGWAVRKESHMNRNAGSLGPGN

SEQ ID NO: 17169 - DNA, 4549 bp, Muscodor strobelii
  misc_feature: SGI EST ID NO. CUFF.40686.0
  misc_feature: Variant of the nucleotide sequence at SEQ ID NO 17167
cggtgaaccaatatgatcctagttaagtgacattacttacataatgtatgtaggtatgcagtctttccctttagtaagtactccttggagacttatcagacgtgtcacatttgttaacccatgtgtcgattatttaggaagacacagttgtcgatcctggatctcgaaaaaatcacctacccaaattgatgatgcactatgatggatcaagtgatggtgtgattaattgactgcgggacgcaacgaacccacaggccgaaatatagatttgccggcatgtgctgatccccacggcgaggtagagtgcgagggttgtgcaattccggatgatccgacatcgacgccctgcatcaacaacatccttccaccatcaagggatatttgaagggctccgggaatagaaacgcgcgccgcctggtgtaacatatgcggcgattcggctctgatctgctgcacgcgacaccgacactgtatgtaagtaatttaaacaatatcattgttgctataatttacaatctaaggttggcagacggtcgtatgtatcgtcaagattgagaaaatatcacaacacactaggtatgtaagtacagtccatctggcggtgactaaggtagcttctatggactcctttgactcatcacccagccgcccgccatggtaccttggtcctcctgcaatgcaacctcacaccgttcgatacgctgtggttgtatatgctcaatgcttgctgttcgatgcaggtaggtagctagctatctgtatgcgtggcggtcgatgtgagtatagtatgattgacaaagcccttgcaacgatatgctgaatggcggaaggaagactttgacagcgatgtcgcccgctgtacaatcgtactccacggccagtattcgagttcgatcattaataatctggccaaatataaccacgagcgtgcctattgcatgtgcaatgtacatcgagtcgtagtactttggtcgaccgtgcacgtagcgacatgtcgggatgcagaagctacccgaagtcccttcataacccttgctcgcgttcttgatcgtcattggcgtctagctcctctccaacggacgggagtggcgccaagcaccgaccttgcgacggatcgaacgcagcgatgctgtcatcgtccaatcctcaagagctcgagctgtcggctctctagtcgctattatactttgcgagctggtctggtgacagcactgtgaccgctttcgctgcacactcgcatacccctcctgcgatagcgagcatcgccgcagatggttccagtgtgacccaagcagagccataaagatttcctcgaggccacgggcagacttgccggaactctcggggcactgcttccctgcgctctaatggtagatgaagccgtcgttgcttggcccccctcctacgccctaccatttccaacgtttggaaaaactaccccccttgctcctgtgggtactgagcttacaacagctcactccaagcacaagtatggcttcatagcgcgtcaggctattcctccatcgtcatggagccttgcccacgcgacccatggccccatgagcctccaagtcccgacttcccagacggtgcgaacatcggtacccgacgccgagtgttgtacctccgtctatctcccgcctgcctctatcatgtgtgggaaaacgcaagaagccatggccgggaaaagtgacaagagcaaagacgttgcatctctactgtactgtattattcatcaacatgtgtatatctatccgtcgcatccgccctcgcataccctccacttcgcttggtcttatttgcgattgctgatacttatatgtacgatcgttcttaattacataaatctaatagacatcctcttaactatctgcatgcgatcttgcattgttgctcttcgccaacccggtgtacatgctctgccctaatttcaactagacacctcgagggggctcacagttgagcgtaagcaacgttgtgacataccttagcccaaggcacgcgatcgcaaacaagattctccactgtgtcgaccgagatattgtcgcccagtgaggtattgtaggattttggtgtcactgctgttgctgggtagggtctcgaggtggagggagaatacgaagtcctcaacaaaccgttaacaagaagcattgcgcacaacccattcggcaatatgtggtcggctgatgcgaaagctttaaggctgctagctctgttgactatcgcgggagtcctgcccacgatcctcgctcacggagacgatggaggtgtgacgaacataggagacatgggaatggatatgatagcagaggatcccaagccagatcccgctggatatgcgccaacatatttttcgctttccgagcatgtagctattatttatgcgcatattgcgctgatgtgcctcgcatggattttcatgctaccaataggttcgcggctcgctgcacatacactggtcgaagtaactcgctgacaagaattctctagctgtcatgctttcgatcgctcgatcacgatatacccttgccgtccagttcctatttcttctgacgaatgcgatcggtgtttttgtcgggatcagttacaacaccaacacaccagatctctacccgaacaacgcccaccacaagttcggatggattgtcacttggatcgtgagcgcccaggtttttataggcctcgtaagccgagtttctggtaccatgaacaaatcatttgtccggtcgcctaccgaggaagaggagcaagcgttcattcccatttcaactgaagcaatggctgagcatcatcgcgttcaccgaaacatgttctccccttatcggcaatcgaatgatagtggccaaggcacagaacgcaatacagagtctctgcgtagtaactcggtatcgacaatggtcggacaggaatcgccattagagccggataacagacggatacggtatcatgatgaagacgaggaaaacatgatgttcaaagtctttaagaggaccgaatcatggtcctcaatcgcgccgcagtcgctacttgctaaaatatctggtaaagtatcgggcagtatatggaaactagtcatgctcttttacaacatagtcgacagagccatactcatactgggttatgttgctctttgcacgggcctcataacctacgcgcgcttcttcgaggcccatgaaatctttagtggattggcacattggataaaaggcggtatttttttctggctgggaatcttaaccctgggtagatggtctggcagcttcggagagcttggatgggcatggaacgttcgcccaaaacagacgtcacacaaatggcggcccagtgcagagtttgttgagggtgcccttattttcacatacggagctaccaatatcttcctcgaacatctgggcagcaccgaggatagtttcagctcagaagatctcgaacacatgtcgattacggtgctgttcatcggaggcggtctgctggctatgcttatcgagtctactcgcattcgagagctattaaatacaaccattacggacgcaacgttgtcgtcacctgagtacacgtacagcgaggaagagcgtgcggcacttcaagcaccggaaacttacgagttttccatcaatccgataccagcactcgtaatcctcttgctaggaatcatgatgagttctcatacacagcagtccatgatctcaagcatgatccataagcagtggggcaacttgctcacaggcgcttcctttgcgcgaggttttacctacgtgctcttgtacctaaaaccaccgcgttccgttttaccctctcgaccaccaacggagctgttggcatcatttggtttgatttctggaggcactatcttcatggcaagcagctcggacaccgtgactggcatgattcactacaatctcgatgccatgtttttttacactgtgaccatgggcatggtcggccttctaatggcatggattgtcgtagtccttgctctcaaaggatgggccgtccgcaaagaatcgcatatgaatcggaacgccggatctttgggaccaggaaactaaactcccagcgtgatttttgatggtctcactggactcattcgggaaaagtgaatgtcatcggaatatcaaaaggggggaaaaattaagcatgcgcatagcagactcgggttggtgttaacaggaagtcgaacattgccttagtttgctctgccctttggtgcatctgtcatggtgttgcatttaccgaaccaggttgcaaagtctgcaaggtcttagaatttcatactctcgttatacccatgatacccctgcgagaaaggctttttgactatttaatggcatgggaagtattggagtacttggaatcgttgcgaagagccgagtgtgagatatgagcatgctggacgctattgctgaggattatcccatacattctcatgggaagaggcatggacttggttatggattatacccattacgattatagatataatgagaatatggaccactcttaatatgaccctgctatagggtataatcgcaacaattctcaacccatc

SEQ ID NO: 17170 - DNA, 882 bp, Muscodor strobelii
  misc_feature: SGI cDNA ID NO. 565731
  misc_feature: Encodes the peptide sequence at SEQ ID NO 17171
atgggtcaacagtcaccagcacagaacgaacgtcttcatttatcaaaaccacaggtcttcgtccacttgtcctggggtctctcatggtccgaccgccatgtaccacggagccacaccctaacatacaccacaaagaacctaaagaatgcgagagacaccggcggcaggactcttcacggcggcatcatcattaccatcaccatcatcaacatcatcaacatcatcaccatcattatcacaacgagcggcatcagcgagaatccgagcgtcctcgaggccgcccgcgggtactcgataatggggccagtgaacgacagcccgtgggacgaagaggccgcaccttcggctactatctttccacggcgagagcagaggacgggaaatccgagtcagtatcggttgggcgaggacggactaccttggactgccgatgcatggccttctgaatttggccaagacgacgacgaagaggaacatcactggacttcaagccaccccattactgtgccgctctcaccgcccgccaggcgccgcggagtggatgacccacagaggactcgagaactagagactctgtcgatggctttgatgacagtggacaatggcttcgagaaccagtggtggaatcaaggtgctagggaatctactacttgggtaccgcctaagaccgatgaggatgattccaggcctctcagcccagcagatgcggttctactttctgctgccgacccttcgggcattgaacctcagagtcccaattctgatagcattgccgccatcgtgtcgccattatctgaattcagcgttccgagcttgaccttcccgagtaatctacaaagatctttctcaacgagatcagatgaattatggatctacaaataa

SEQ ID NO: 17171 - protein, 293 aa, Muscodor strobelii
  misc_feature: SGI Peptide ID NO. 565731
  misc_feature (9)..(291): NCBI GI: 189091906 Blast Desc: [Podospora anserina] gi|27803063|emb|CAD60766.1| protein product [Podospora anserina] gi|188219306|emb|CAP49286.1| protein product [Podospora anserina]
  misc_feature (95)..(289): NCBI GI: 256721621 Blast Desc: NECHADRAFT_92385 [Nectria haematococca mpVI 77-13-4]
  misc_feature (95)..(291): NCBI GI: 116179532 Blast Desc: CHGG_00394 [Chaetomium globosum CBS 148.51] gi|88184691|gb|EAQ92159.1| CHGG_00394 [Chaetomium globosum CBS 148.51]
  misc_feature (94)..(215): NCBI GI: 39942918 Blast Desc: MGG_03539 [Magnaporthe grisea 70-15] gi|145009899|gb|EDJ94555.1| MGG_03539 [Magnaporthe grisea 70-15]
  misc_feature (95)..(225): NCBI GI: 85093903 Blast Desc: NCU02362 [Neurospora crassa OR74A] gi|28921237|gb|EAA30547.1| [Neurospora crassa OR74A]
  misc_feature (129)..(291): NCBI GI: 261358915 Blast Desc: conserved [Verticillium albo-atrum VaMs.102]
  misc_feature (95)..(213): NCBI GI: 46127183 Blast Desc: FG07969.1 [Gibberella zeae PH-1]
MGQQSPAQNERLHLSKPQVFVHLSWGLSWSDRHVPRSHTLTYTTKNLKNARDTGGRTLHGGIIITITIINIINIITIIITTSGISENPSVLEAARGYSIMGPVNDSPWDEEAAPSATIFPRREQRTGNPSQYRLGEDGLPWTADAWPSEFGQDDDEEEHHWTSSHPITVPLSPPARRRGVDDPQRTRELETLSMALMTVDNGFENQWWNQGARESTTWVPPKTDEDDSRPLSPADAVLLSAADPSGIEPQSPNSDSIAAIVSPLSEFSVPSLTFPSNLQRSFSTRSDELWIYK

SEQ ID NO: 17172 - DNA, 1014 bp, Muscodor strobelii
  misc_feature: SGI cDNA ID NO. 565732
  misc_feature: Encodes the peptide sequence at SEQ ID NO 17173
atggagaacggccaatacgttgacggtagcatctggttctatgcaccgaacaaaggtgctccgatctttttcgctgtcgcattcttggctaccggagccgttcacttctaccaggccgtacattaccaagcctggaggctggtatcactctatgtattctgctctttactatttgtcggtggtttcatcgcccgagaactaggttcctgggacaacgatgatatcataaaatatatcgtcagcattgtcttagtatatgcagctccccctctatacgagcttggcaactactatattctcggccgagttctatacttcgtcccatactactcgcctatccatcccggccgagtcctcacgacatttaccgctatctctacaatcatcgaagcactgaacggtaccggcgctgcctacgttgccaatgtatcgctgccagaagaaaaacaagaattaggccgtaccctgttcaaggtagccttagtcctgcaactggtggttgtgagcctcttcgtcacactcgcagctacctttgaccatcgctgtcggaagaacgggattcgcaacgataaagtgcatcagcccttactcacgctatatatcagtagcgggatcatcgcggttcgctgtatataccgaacagttgagtatttcgaagccgagactcttaacttctattccggagacgtcactgcatcggacatcagtcctgttatacgatacgaatggttcttctatgttttcgaggcaaccctcatgtttgtgaatagcgtcctattgaatgttcggcatccccgccgctggctacctaagagcacaaagctttatctggccaaagatggcagcgaggtgttgggaccaggctacaaggaagacagaaactttgttgtgacgctcctcgatcctttcgacgtctacgggatgatcaagggcaaagacaaggagacgagattctgggatcagcaaaacgaggccgtcggtaaagcagcagcgactccggtggctcaagtatga

SEQ ID NO: 17173 - protein, 337 aa, Muscodor strobelii
  misc_feature: SGI Peptide ID NO. 565732
  misc_feature (1)..(323): NCBI GI: 164427054 Blast Desc: NCU02363 [Neurospora crassa OR74A] gi|157071586|gb|EAA30548.2| conserved [Neurospora crassa OR74A]
  misc_feature (1)..(320): NCBI GI: 116179534 Blast Desc: CHGG_00395 [Chaetomium globosum CBS 148.51] gi|88184692|gb|EAQ92160.1| CHGG_00395 [Chaetomium globosum CBS 148.51]
  misc_feature (1)..(337): NCBI GI: 256721620 Blast Desc: NECHADRAFT_78598 [Nectria haematococca mpVI 77-13-4]
  misc_feature (1)..(332): NCBI GI: 261358914 Blast Desc: conserved [Verticillium albo-atrum VaMs.102]
  misc_feature (1)..(324): NCBI GI: 46127181 Blast Desc: FG07968.1 [Gibberella zeae PH-1]
  misc_feature (8)..(323): NCBI GI: 121706030 Blast Desc: RTA1 domain protein, [Aspergillus clavatus NRRL 1] gi|119399424|gb|EAW09852.1| RTA1 domain protein, [Aspergillus clavatus NRRL 1]
  misc_feature (2)..(324): NCBI GI: 169763784 Blast Desc: [Aspergillus oryzae RIB40] gi|83770820|dbj|BAE60953.1| protein product [Aspergillus oryzae]
  misc_feature (6)..(337): NCBI GI: 146323456 Blast Desc: RTA1 domain protein [Aspergillus fumigatus Af293] gi|129558281|gb|EAL92300.2| RTA1 domain protein, [Aspergillus fumigatus Af293]
  misc_feature (6)..(337): NCBI GI: 159127353 Blast Desc: RTA1 domain protein, [Aspergillus fumigatus A1163]
  misc_feature (6)..(320): NCBI GI: 119491116 Blast Desc: RTA1 domain protein, [Neosartorya fischeri NRRL 181] gi|119411340|gb|EAW21283.1| RTA1 domain protein, [Neosartorya fischeri NRRL 181]
MENGQYVDGSIWFYAPNKGAPIFFAVAFLATGAVHFYQAVHYQAWRLVSLYVFCSLLFVGGFIARELGSWDNDDIIKYIVSIVLVYAAPPLYELGNYYILGRVLYFVPYYSPIHPGRVLTTFTAISTIIEALNGTGAAYVANVSLPEEKQELGRTLFKVALVLQLVVVSLFVTLAATFDHRCRKNGIRNDKVHQPLLTLYISSGIIAVRCIYRTVEYFEAETLNFYSGDVTASDISPVIRYEWFFYVFEATLMFVNSVLLNVRHPRRWLPKSTKLYLAKDGSEVLGPGYKEDRNFVVTLLDPFDVYGMIKGKDKETRFWDQQNEAVGKAAATPVAQV

SEQ ID NO: 17174 - DNA, 1481 bp, Muscodor strobelii
  misc_feature: SGI EST ID NO. CUFF.40413.0
  misc_feature: Variant of the nucleotide sequence at SEQ ID NO 17172
cgcgcaagtgctcaatggcgcatcctagccgtaccacgatgcctagtacgcctattacatcaatcgcatccattaattttcagctatgggaaataaggccttggagactatggactgtcttggttataaagatgcccatgatggctcgcaaccaacctcgaagctgtcgtgggcattcgattcgacttgtcaaagtcctatcctcgacaaaaacgcgacaggaactctttgttaggccagcattgtatgggatctgctcgatcgacttcatacctacctttcaactgataacgccaacaaccatcacctaataactaggtgcccagatactctgacattatggagaacggccaatacgttgacggtagcatctggttctatgcaccgaacaaaggtgctccgatctttttcgctgtcgcattcttggctaccggagccgttcacttctaccaggccgtacattaccaagcctggaggctggtatcactctatgtattctgctctttactatttgtcggtggtttcatcgcccgagaactaggttcctgggacaacgatgatatcataaaatatatcgtcagcattgtcttagtatatgcagctccccctctatacgagcttggcaactactatattctcggccgagttctatacttcgtcccatactactcgcctatccatcccggccgagtcctcacgacatttaccgctatctctacaatcatcgaagcactgaacggtaccggcgctgcctacgttgccaatgtatcgctgccagaagaaaaacaagaattaggccgtaccctgttcaaggtagccttagtcctgcaactggtggttgtgagcctcttcgtcacactcgcagctacctttgaccatcgctgtcggaagaacgggattcgcaacgataaagtgcatcagcccttactcacgctatatatcagtagcgggatcatcgcggttcgctgtatataccgaacagttgagtatttcgaagccgagactcttaacttctattccggagacgtcactgcatcggacatcagtcctgttatacgatacgaatggttcttctatgttttcgaggcaaccctcatgtttgtgaatagcgtcctattgaatgttcggcatccccgccgctggctacctaagagcacaaagctttatctggccaaagatggcagcgaggtgttgggaccaggctacaaggaagacagaaactttgttgtgacgctcctcgatcctttcgacgtctacgggatgatcaagggcaaagacaaggagacgagattctgggatcagcaaaacgaggccgtcggtaaagcagcagcgactccggtggctcaagtatgatatccagaagcgcagagatgatttgagtaaagatataaactatttcccacagcattgccgatttactagatggcggatctcacttttcgttagggataacatatttaatagaattcatttgattgact

SEQ ID NO: 17175 - DNA, 219 bp, Muscodor strobelii
  misc_feature: SGI cDNA ID NO. 565733
  misc_feature: Encodes the peptide sequence at SEQ ID NO 17176
atggcggggaaaagcgatacgacagcacctgaatttgcgtcaactaaagaattcgccgaagacttagagaagattcgcaaggctggtgacttcaaaggcgatgcggtccctatgtcactgcagcaaggtacatccatgttttctccggccgagcagaagagggcagtggacgcccgtaaagctgctgatgccgatgacaagagcacgcagtctacatga

SEQ ID NO: 17176 - protein, 72 aa, Muscodor strobelii
  misc_feature: SGI Peptide ID NO. 565733
  misc_feature (14)..(58): NCBI GI: 164427062 Blast Desc: NCU02370 [Neurospora crassa OR74A] gi|157071589|gb|EAA30555.2| conserved [Neurospora crassa OR74A]
  misc_feature (14)..(65): NCBI GI: 256721615 Blast Desc: [Nectria haematococca mpVI 77-13-4]
  misc_feature (14)..(56): NCBI GI: 116179536 Blast Desc: CHGG_00396 [Chaetomium globosum CBS 148.51] gi|88184693|gb|EAQ92161.1| CHGG_00396 [Chaetomium globosum CBS 148.51]
  misc_feature (1)..(56): NCBI GI: 46127167 Blast Desc: FG07961.1 [Gibberella zeae PH-1]
  misc_feature (14)..(69): NCBI GI: 261358905 Blast Desc: sds23/moc1 [Verticillium albo-atrum VaMs.102]
  misc_feature (17)..(58): NCBI GI: 169625077 Blast Desc: SNOG_15805 [Phaeosphaeria nodorum SN15] gi|160705599|gb|EAT76900.2| SNOG_15805 [Phaeosphaeria nodorum SN15]
MAGKSDTTAPEFASTKEFAEDLEKIRKAGDFKGDAVPMSLQQGTSMFSPAEQKRAVDARKAADADDKSTQST

SEQ ID NO: 17177 - DNA, 262 bp, Muscodor strobelii
  misc_feature: SGI EST ID NO. CUFF.40422.0
  misc_feature: Variant of the nucleotide sequence at SEQ ID NO 17175
atttcagagacgcaacgttaaattcgagtacaccacacaacagtcgctgccactcgcactgttggtcatacttagctcttatttctcacctgaaaacgaggcgcattgcgcaattcaaattcgacaggatggcggggaaaagcgatacgacagcacctgaatttgcgatcttattatttgcaacagtcaactaaagaattcgccgaagacttagagaagattcgcaaggctggtgacttcaaaggcgatgcggtccctatgg

SEQ ID NO: 17178 - DNA, 2958 bp, Muscodor strobelii
  misc_feature: SGI cDNA ID NO. 565734
  misc_feature: Reduced expression when VOC is produced
  misc_feature: Encodes the peptide sequence at SEQ ID NO 17179
atgcagaacttcttcggcaacaaaccctcccaggaggacctgcaacgccgccactcgcagcagcgccagcagagacggaaccacatccacgctctcaacacccagcagcatcaccaacaccaccagcaacagcaacaacagcagcagcagcagccgcactacggccagatcaactcggccgccaccgacacgccgatgatgggcgccgactcgctcgacgacatcatccagaacaactcggccgagctgcaccggcgcaggagcctgcccccgcagcattcggcctgcccgccatcggtgcccaactcgcccaccgccttctcccccatcgccacctccgccttctccccgcagcccatgagcgccgacgacttctccaacctgcccgacatgatgggcaacatggtcgccttctccaacatgaacatggaccccatggccgtcgacccggcctccatggccatgttccccccctccgccatggccggcagcttctcccccatggccgacatgggcatggccctgcagaacccccccggcgccatgtcctccctgcccctcggcaacggccccatggcctccgtctccagcgacccgaccatgctgcagccgccctcgcagctcgcccagccgggccagccccaccagcagcagcccagcgtcggcctcgacaccgccctgaacagcagctatccgtccagcatgtccccccagtcgtcgagccaggcccagcagacgctagcctcgtcgacctcggccttccaatccccgcagaccgccacgtcgaggaccacacccgagagcatgcccaggccttccatcggcccacaggcgcccccggagaaggccatctactccaagagcggcttcgacatgctgagggccctctggctggtcgccacgagaaagaacgcccaggtcaacttgggtgctgtcgacatgtcttgcgcctttgtcgtctgcgacgtgaccatgaacgactgccccatcatctatgtctcggacaacttccagaacctcaccggctacaacaaacacgagatcaccggccagaactgtcgcttcctccaggcacccgacgccaaagtcgaagctggaaccaagcgggagtttgtggacaacggcgccgtctacaatctgaaatgcaagatcgccgagggcaaggaggtccaacagagcctgatcaactatcgcaagggcgggaagcccttcttgaacttgctgaccatgatccccatcccgtgggatacccccgagatccgatatatcattggtttccagatcgacctcgtcgagtgtcccgatgccatcgcctcctcccacggccccggcactatgaaagtgaactacaagcacagtgacatcggccaatacatctggaccccgccggcatcgagccagtgggagcccgagaatggccagacactcggcgtcgacgatgtgtcggccctgctgcagcagtacaatcccgtcggcgccgtctcggactggcaccggcagtcgtgggacaagatgctacttgagaatgctgacgacgtcgtccacgtcttatccctcaaaggccttttcctctacctctcaccgtcctgcaagcgtgttctggaatacgactcggccgagcttggaggcacgcccatcgcggagatctgccatccttccgacatcgtcccggtgacccgagagctaaaagatacgaccacgggcaactccgtcaatatcgtattccgaatccgaaggaaacagagcggctacacttggttcgagagccacggctcactttacgtggagcagggcaaagggcgcaaatgcattgtgttggtaggtcgcaagcgacccgtctttgccctcggtcggcgacaactcgaagcacacggcgggatcggggacggcgagctctggacaaagctgtcgacttcaggcatgttcctcttcgtgtctgccaatatccggtcgttgttagacctgcaaccggaaagtcttgttggaacgagtattcaggaattgatgcggaaagaatcacgcccggagttcggtcgatccatcgagaaggcacgcagagggcgcaccgtcgtctgcaagcatgaggtgcagaaccgtcgcgggcaggttctccaggcccagactgcgctgtacccaggcgatgcttctgaggggcagaagccgacgttcctactagcgcagacaaaactgttgaaagcctcgtctcgatcgatgacgcccgccttaacgggaagatccgggtccagcgaacagaacggtccctctggcttcaacatgatgcagggcagccatatcgcgagcgaatctagccctggtgtcgtttcgagcgccgctggaggtggcttggctccggggaaccaggacaaagctctcgcttctgatgacaacatctttgacgagcttaaaacaacacggtgcacgagttggcaatacgaactccgccaaatggagaaggtcaaccgtcttctcgccgacgagctacacgggcttctatctaacaagaagaagcgtaagcgcaggaagggcgtcggcaacgttgttcgagactgcgccaactgccatacccgtaatacaccggagtggagaaggggcccaagtggtcagagggatctatgtaacagctgcggccttaggtgggcaaagcagacgggcagggtctcaccgcgaaactcttcccgcggaggtggtgattcaacgagtaagaagtccaactcacccgtccatgcatcgccgctacacagagaggtgtccacgggcgaggtcagcgaggctagtaccaacactaccatgaaccggtcatctaccggctcgagcgtaccgccgagtatgggtagtgcaggaacgactcctaccggcaagggattgtcttccatgccgcccccaagtaaaccgttactagcaggtggtgccagttgtaatgacatgactgctatcgaagaagaaagagaaacgatttaa

SEQ ID NO: 17179 - protein, 985 aa, Muscodor strobelii
  misc_feature: SGI Peptide ID NO. 565734
  misc_feature (850)..(885): Pfam Id: PF00320 Pfam Desc: GATA zinc finger
  misc_feature (523)..(611): Pfam Id: PF08447 Pfam Desc: PAS fold
  misc_feature (523)..(599): Pfam Id: PF08447 Pfam Desc: PAS fold
  misc_feature (129)..(983): NCBI GI: 261358907 Blast Desc: conserved [Verticillium albo-atrum VaMs.102]
  misc_feature (72)..(984): NCBI GI: 56130904 Blast Desc: white collar 1 [Hypocrea jecorina]
  misc_feature (68)..(984): NCBI GI: 163866879 Blast Desc: white collar 1 [Fusarium oxysporum f. sp. lycopersici]
  misc_feature (27)..(969): NCBI GI: 189091908 Blast Desc: [Podospora anserina] gi|27803064|emb|CAD60767.1| protein product [Podospora anserina] gi|188219307|emb|CAP49287.1| protein product [Podospora anserina]
  misc_feature (130)..(984): NCBI GI: 51944886 Blast Desc: blue light regulator 1 [Trichoderma atroviride]
  misc_feature (3)..(978): NCBI GI: 14917059 Blast Desc: WC1_NEUCR RecName: Full=White collar 1 protein; Short=WC1 gi|5441498|emb|CAA63964.2| wc-1 [Neurospora crassa]
  misc_feature (3)..(978): NCBI GI: 7493974 Blast Desc: WC1_NEUCR RecName: Full=White collar 1 protein; Short=WC1 gi|5441498|emb|CAA63964.2| wc-1 [Neurospora crassa]
  misc_feature (3)..(881): NCBI GI: 164427047 Blast Desc: NCU02356 [Neurospora crassa OR74A] gi|157071583|gb|EAA30541.2| NCU02356 [Neurospora crassa OR74A]
  misc_feature (331)..(984): NCBI GI: 157310199 Blast Desc: white collar 1-like protein [Gibberella fujikuroi]
  misc_feature (123)..(984): NCBI GI: 46127127 Blast Desc: FG07941.1 [Gibberella zeae PH-1]
  misc_feature: Useful for introducing or modulating the production of volatile compounds
MQNFFGNKPSQEDLQRRHSQQRQQRRNHIHALNTQQHHQHHQQQQQQQQQQPHYGQINSAATDTPMMGADSLDDIIQNNSAELHRRRSLPPQHSACPPSVPNSPTAFSPIATSAFSPQPMSADDFSNLPDMMGNMVAFSNMNMDPMAVDPASMAMFPPSAMAGSFSPMADMGMALQNPPGAMSSLPLGNGPMASVSSDPTMLQPPSQLAQPGQPHQQQPSVGLDTALNSSYPSSMSPQSSSQAQQTLASSTSAFQSPQTATSRTTPESMPRPSIGPQAPPEKAIYSKSGFDMLRALWLVATRKNAQVNLGAVDMSCAFVVCDVTMNDCPIIYVSDNFQNLTGYNKHEITGQNCRFLQAPDAKVEAGTKREFVDNGAVYNLKCKIAEGKEVQQSLINYRKGGKPFLNLLTMIPIPWDTPEIRYIIGFQIDLVECPDAIASSHGPGTMKVNYKHSDIGQYIWTPPASSQWEPENGQTLGVDDVSALLQQYNPVGAVSDWHRQSWDKMLLENADDVVHVLSLKGLFLYLSPSCKRVLEYDSAELGGTPIAEICHPSDIVPVTRELKDTTTGNSVNIVFRIRRKQSGYTWFESHGSLYVEQGKGRKCIVLVGRKRPVFALGRRQLEAHGGIGDGELWTKLSTSGMFLFVSANIRSLLDLQPESLVGTSIQELMRKESRPEFGRSIEKARRGRTVVCKHEVQNRRGQVLQAQTALYPGDASEGQKPTFLLAQTKLLKASSRSMTPALTGRSGSSEQNGPSGFNMMQGSHIASESSPGVVSSAAGGGLAPGNQDKALASDDNIFDELKTTRCTSWQYELRQMEKVNRLLADELHGLLSNKKKRKRRKGVGNVVRDCANCHTRNTPEWRRGPSGQRDLCNSCGLRWAKQTGRVSPRNSSRGGGDSTSKKSNSPVHASPLHREVSTGEVSEASTNTTMNRSSTGSSVPPSMGSAGTTPTGKGLSSMPPPSKPLLAGGASCNDMTAIEEERETI

SEQ ID NO: 17180 - DNA, 4235 bp, Muscodor strobelii
  misc_feature: SGI EST ID NO. CUFF.40431.0
  misc_feature: Variant of the nucleotide sequence at SEQ ID NO 17178
tccgagtctgccctccaccacccgtccgtctcgccttcacattacctagattatattccattacataacccaacgtcccaccattgacgacttcttcacgagccaccgtccccgacgctgccgccagccacgacaacgacaacagcaacgacaacgacgacacgccttgactcccgtgcctacggccgccggctccacggcagcgacgcacaagactcgccgcgtgcgcagtattcggcccatctcgacagctatggactcacacatgtaaccgctcgctccatctcggtccgcctcacaacccctcgcaagcgccatccattacatcgtccacagtacctcgtcggcgccgcatccaccctccagcatctggctgctgtcatcccgcctcgtcaccgtctcttccatctccagcgacaccctccgtcgacccttgcctgtctttcgccacatctgcagggccactcatccatcccttatcccgcatcccgctgtttcccatcacatgcacggcccggccttcgtcttatcgcgcgtcgccagccacccgagcatcaacctagcaccacttggaccacaacacccggcgcccgagccatagggatatcggcccctcccatgccgccaggatgcagaacttcttcggcaacaaaccctcccaggaggacctgcaacgccgccactcgcagcagcgccagcagagacggaaccacatccacgctctcaacacccagcagcatcaccaacaccaccagcaacagcaacaacagcagcagcagcagccgcactacggccagatcaactcggccgccaccgacacgccgatgatgggcgccgactcgctcgacgacatcatccagaacaactcggccgagctgcaccggcgcaggagcctgcccccgcagcagtacgcagtcccgacgtcccaggccgacgccgaccgccggctgtccatgatggagtttggcgactcggacgccgccctgcgcgacttccagttcggcctgcccgccatcggtgcccaactcgcccaccgccttctcccccatcgccacctccgccttctccccgcagcccatgagcgccgacgacttctccaacctgcccgacatgatgggcaacatggtcgccttctccaacatgaacatggaccccatggccgtcgacccggcctccatggccatgttccccccctccgccatggccggcagcttctcccccatggccgacatgggcatggccctgcagaacccccccggcgccatgtcctccctgcccctcggcaacggccccatggcctccgtctccagcgacccgaccatgctgcagccgccctcgcagctcgcccagccgggccagccccaccagcagcagcccagcgtcggcctcgacaccgccctgaacagcagctatccgtccagcatgtccccccagtcgtcgagccaggcccagcagacgctagcctcgtcgacctcggccttccaatccccgcagaccgccacgtcgaggaccacacccgagagcatgcccaggccttccatcggcccacaggcgcccccggagaaggccatctactccaagagcggcttcgacatgctgagggccctctggctggtcgccacgagaaagaacgcccaggtcaacttgggtgctgtcgacatgtcttgcgcctttgtcgtctgcgacgtgaccatgaacgactgccccatcatctatgtctcggacaacttccagaacctcaccggctacaacaaacacgagatcaccggccagaactgtcgcttcctccaggcacccgacgccaaagtcgaagctggaaccaagcgggagtttgtggacaacggcgccgtctacaatctgaaatgcaagatcgccgagggcaaggaggtccaacagagcctgatcaactatcgcaagggcgggaagcccttcttgaacttgctgaccatgatccccatcccgtgggatacccccgagatccgatatatcattggtttccagatcgacctcgtcgagtgtcccgatgccatcgcctcctcccacggccccggcactatgaaagtgaactacaagcacagtgacatcggccaatacatctggaccccgccggcatcgagccagtgggagcccgagaatggccagacactcggcgtcgacgatgtgtcggccctgctgcagcagtacaatcccgtcggcgccgtctcggactggcaccggcagtcgtgggacaagatgctacttgagaatgctgacgacgtcgtccacgtcttatccctcaaaggccttttcctctacctctcaccgtcctgcaagcgtgttctggaatacgactcggccgagcttggaggcacgcccatcgcggagatctgccatccttccgacatcgtcccggtgacccgagagctaaaagatacgaccacgggcaactccgtcaatatcgtattccgaatccgaaggaaacagagcggctacacttggttcgagagccacggctcactttacgtggagcagggcaaagggcgcaaatgcattgtgttggtaggtcgcaagcgacccgtctttgccctcggtcggcgacaactcgaagcacacggcgggatcggggacggcgagctctggacaaagctgtcgacttcaggcatgttcctcttcgtgtctgccaatatccggtcgttgttagacctgcaaccggaaagtcttgttggaacgagtattcaggaattgatgcggaaagaatcacgcccggagttcggtcgatccatcgagaaggcacgcagagggcgcaccgtcgtctgcaagcatgaggtgcagaaccgtcgcgggcaggttctccaggcccagactgcgctgtacccaggcgatgcttctgaggggcagaagccgacgttcctactagcgcagacaaaactgttgaaagcctcgtctcgatcgatgacgcccgccttaacgggaagatccgggtccagcgaacagaacggtccctctggcttcaacatgatgcagggcagccatatcgcgagcgaatctagccctggtgtcgtttcgagcgccgctggaggtggcttggctccggggaaccaggacaaagctctcgcttctgatgacaacatctttgacgagcttaaaacaacacggtgcacgagttggcaatacgaactccgccaaatggagaaggtcaaccgtcttctcgccgacgagctacacgggcttctatctaacaagaagaagcgtaagcgcaggaagggcgtcggcaacgttgttcgagactgcgccaactgccatacccgtaatacaccggagtggagaaggggcccaagtggtcagagggatctatgtaacagctgcggccttaggtgggcaaagcagacgggcagggtctcaccgcgaaactcttcccgcggaggtggtgattcaacgagtaagaagtccaactcacccgtccatgcatcgccgctacacagagaggtgtccacgggcgaggtcagcgaggctagtaccaacactaccatgaaccggtcatctaccggctcgagcgtaccgccgagtatgggtagtgcaggaacgactcctaccggcaagggattgtcttccatgccgcccccaagtaaaccgttactagcaggtggtgccagttgtaatgacatgactgctatcgaagaagaaagagaaacgatttaatccgaggcaacgcgagccagaagctaactccacatattagctgaaactcgcgtgtggtagaaaaccgatttgtagcgccgtatctgctatacgaagagagaattaccacaacgttgtctctcataatcgagatttggatctagtctgctacatgtactgaatgacgacactgggttcgggttttttctgttatttatagagtggcatattagggcacttgttcgagataccaatttcctaaccggtcattcaaaagaggtggcctgggaatgatatacgaggcgcacttggttctgtgtttttcttggttgtctatctccaccgtccattccagcctattgggaaacttgtgattcggcttggtagataggcaggcgacgaacgacgtataccgggattctaagagcgggcggagctgcataaaacacgcagcgatattgctaatttaccaatgtgttgctacacttagactaaaatacacaaacgcaagacgagtaaacatgctcactccgatgcttgaaaaggtgccgtctcgtagaaaaatctctcgtgtttgc

SEQ ID NO: 17181 - DNA, 1416 bp, Muscodor strobelii
  misc_feature: SGI cDNA ID NO. 565735
  misc_feature: Elevated expression when VOC is produced
  misc_feature: Encodes the peptide sequence at SEQ ID NO 17182
atggggaaatctggtattagaaccgccggaaaagtgaacctggaccagcccgctactgagcagttgaacattcacaaccgatggcatccagatattccatctgttggcatcatacaaaacaatgagacagtcaagatcgagtgtcttgactggaccggtggacagatcggtaataacgacagtgcagacgatgtgcgtgatgccgatttgacacgagtgcattatctcactgggccatttgagatcgagaccgcacaacctggtgatatcttactcgtcgaaatcatggatgttcagccttttcaggagcagccgtggggatttacaggcgtcttcgacaagtctaatggcggcggatttctcgatgagatctatccatccgccgccaaggccatatggtatgtagaaaacaatcctgttccctttcgtggggacttcgaaggcattttctgtacctcacgccacatccctcacgtcaaattcgccggcttaattcatcctggaatcctgggctgcgcgccatcggcggaggtcttggagacctggaataagcgtgaagccgaactcatagcggcaaacaagctagatcgtcaggtggcgctgccccctgagccatccaatggtatgtatagagagatgtcacccgagctattttttactctatcattaagatctcgtgctgactcttttgtagtccatgccggagccgcgaacgccgacacgaaacggaaagtcgggatggaaggtgcgaggaccgttccgggacggcccgagcacgggggcaattgcgacattaagaacctcagccgtggcagcaaggtgtatcttccggttcatgtgcccggtgctaagtttagtgtcggagacctgcatttctcccagggcgatggtgagatatcattctgcggtgccatcgagatggccgggattattacatgtaattttaaggtgatcaagaatggaatggcggatttaggtctaaaatcaccaatctacatcccgggacctgtagagccgcagtttggagccggacgccacatttatttcgaaggattctctgtcgatcagcatgggaaacagcactatatggatgttaccgtggcctacagacaaaccagtctccgttgcatcgagtatcttcgtcggttcgggtatagtgactaccaatcgtatttgttgctatcgtgcgcacccatccaggggcacatcgcgggaatcgtcgatattcccaacgcctgcacgacgttgggactgccaatggatatattcgacttcgatatctcgccatcgggcactgcgcagtcgctcgacatgggtagctgtgcgttcgagacaggtctggaaaagggaaaggtgacggcgggtggtgagaatagcgagcatagtttcggtggaggcatgacctacaaggcatga

SEQ ID NO: 17182 - protein, 471 aa, Muscodor strobelii
  misc_feature: SGI Peptide ID NO. 565735
  misc_feature (8)..(426): Pfam Id: PF03069 Pfam Desc: Acetamidase/Formamidase family
  misc_feature (236)..(426): Pfam Id: PF03069 Pfam Desc: Acetamidase/Formamidase family
  misc_feature (8)..(193): Pfam Id: PF03069 Pfam Desc: Acetamidase/Formamidase family
  misc_feature (6)..(471): NCBI GI: 145616150 Blast Desc: MGG_03533 [Magnaporthe grisea 70-15] gi|145009905|gb|EDJ94561.1| MGG_03533 [Magnaporthe grisea 70-15]
  misc_feature (1)..(470): NCBI GI: 261358911 Blast Desc: formamidase [Verticillium albo-atrum VaMs.102]
  misc_feature (1)..(470): NCBI GI: 189091914 Blast Desc: [Podospora anserina] gi|188219310|emb|CAP49290.1| protein product [Podospora anserina]
  misc_feature (1)..(470): NCBI GI: 27803067 Blast Desc: protein product [Podospora anserina]
  misc_feature (1)..(452): NCBI GI: 116179518 Blast Desc: conserved [Chaetomium globosum CBS 148.51] gi|88184684|gb|EAQ92152.1| conserved [Chaetomium globosum CBS 148.51]
  misc_feature (14)..(470): NCBI GI: 164427052 Blast Desc: formamidase [Neurospora crassa OR74A] gi|157071585|gb|EAA30546.2| formamidase [Neurospora crassa OR74A]
  misc_feature (1)..(445): NCBI GI: 115398606 Blast Desc: formamidase [Aspergillus terreus NIH2624] gi|114191775|gb|EAU33475.1| formamidase [Aspergillus terreus NIH2624]
  misc_feature (1)..(445): NCBI GI: 70988974 Blast Desc: formamidase FmdS [Aspergillus fumigatus Af293] gi|66846968|gb|EAL87299.1| formamidase FmdS [Aspergillus fumigatus Af293] gi|159128750|gb|EDP53864.1| formamidase FmdS
  misc_feature (1)..(445): NCBI GI: 67536814 Blast Desc: AN4577.2 [Aspergillus nidulans FGSC A4] gi|12620135|gb|AAG60585.1|AF274009_2 formamidase [Emericella nidulans] gi|40741730|gb|EAA60920.1| AN4577.2 [Aspergillus FGSC
  misc_feature (1)..(445): NCBI GI: 119498021 Blast Desc: formamidase FmdS [Neosartorya fischeri NRRL 181] gi|119413932|gb|EAW23871.1| formamidase FmdS [Neosartorya fischeri NRRL 181]
  misc_feature (7)..(443): SWISSPROT Homolog: EC 3.5.1.49 Formamidase
  misc_feature: Useful for introducing or modulating the production of volatile compounds
MGKSGIRTAGKVNLDQPATEQLNIHNRWHPDIPSVGIIQNNETVKIECLDWTGGQIGNNDSADDVRDADLTRVHYLTGPFEIETAQPGDILLVEIMDVQPFQEQPWGFTGVFDKSNGGGFLDEIYPSAAKAIWYVENNPVPFRGDFEGIFCTSRHIPHVKFAGLIHPGILGCAPSAEVLETWNKREAELIAANKLDRQVALPPEPSNGMYREMSPELFFTLSLRSRADSFVVHAGAANADTKRKVGMEGARTVPGRPEHGGNCDIKNLSRGSKVYLPVHVPGAKFSVGDLHFSQGDGEISFCGAIEMAGIITCNFKVIKNGMADLGLKSPIYIPGPVEPQFGAGRHIYFEGFSVDQHGKQHYMDVTVAYRQTSLRCIEYLRRFGYSDYQSYLLLSCAPIQGHIAGIVDIPNACTTLGLPMDIFDFDISPSGTAQSLDMGSCAFETGLEKGKVTAGGENSEHSFGGGMTYKA

SEQ ID NO: 17183 - DNA, 1062 bp, Muscodor strobelii
  misc_feature: SGI EST ID NO. CUFF.40440.1
  misc_feature: Variant of the nucleotide sequence at SEQ ID NO 17181
cggcgaccatgcgattttagtggtcagtggcaaagggggatgataagaggacatgcgcatgcaagtacccatactcgtcacctcgaactgggttggaggtgacgtctgtcatatgtagtatgagttcgaaacccttcgagacacgatgcggggtaacaacaagtataagaagcccatgtcgacgaagctgtggtcatgtgtctttacacatcgccgtgcatgattgcccattccccatctgaaattcaattcacaggccagacagcaatttcatgtcgcatcgaaacatggggaaatctggtattagaaccgccggaaaagtgaacctggaccagcccgctactgagcagttgaacattcacaaccgatggcatccagatattccatctgttggcatcatacaaaacaatgagacagtcaagatcgagtgtcttgactggaccggtggacagatcggtaataacgacagtgcagacgatgtgcgtgatgccgatttgacacgagtgcattatctcactgggccatttgagatcgagaccgcacaacctggtgatatcttactcgtcgaaatcatggatgttcagccttttcaggagcagccgtggggatttacaggcgtcttcgacaagtctaatggcggcggatttctcgatgagatctatccatccgccgccaaggccatatggtatgtagaaaacaatcctgttccctttcgtggttcgttatgttgtgtgaaaaattgtactaatttatgccacagtaagtactgcttgtttcgatttaggacgcggcaacagctagggaatacgaattcattctattccatatcataccgaataagaggaaggactaacatgttttcatacaccaggggacttcgaaggcattttctgtacctcacgccacatccctcacgtcaaattcgccggcttaattcatcctggaatcctgggctgcgcgccatcggcggaggtcttggagacctggaataagcgtgaagccgaactcatagcggcaaacaagctagatcgtcaggtggcgctgccccctgagccatccaat

SEQ ID NO: 17184 - DNA, 1188 bp, Muscodor strobelii
  misc_feature: SGI cDNA ID NO. 565736
  misc_feature: Encodes the peptide sequence at SEQ ID NO 17185
atgcccgagcccggcagcctcaggcttgacaaggaaaaaatgaaggacgccttcgacgtatctcactttgacctcaatgcattaattcgcggagctcagttgactttggttggtgcccatcgtgctcttcagaacccagctatattcaccaatacccactacaaacaagctgctattgctgtcggtgctggcatcgccatccgtcttgccattgctgttccgatcattggtctcaaggtctttttgacggtgttgtcctacgccgttaacctcgaccgcgcaacctgggatgacactctagtcaatggtttagatctcattgccaaccatgttctacaaattcccctgttccttatgaccctgatgcgatacttcaccccgacgcttgatgacatgttcatggactctctccgttgggtcgatgagacctacgtagccaagcataagggtgaggcacctgtcaatctacgccagatgtactatccaaatctcagcaagtataagcagaaggatggtacaacgcactcgactagcaccgcagagaacattaccatgttcctctggcgattcgcgcgcaaggggctcatctccttggccatctttgctttgtcatgtgttccttacttcggcaagcttgtgcttcccgccgcaagtttctatactttcaacaaggccgtcggccttggccctgccgccgtcatcttcggcacgggaatcctgttgcccaaacgctacctcatcatattcctccaagcctatttctcttcacgaagtctcatgcgcaatcttctagagccctactttgcgcgtgtccatctaaataaggagcagaaacggaactggtatgttcacgatccgaggtttcgtagtcgcgaaggtcttcttttcgggttcggtgttggattttacatcctcttacgggttccactgcttggtgtcttgatttatggcatagctgaggcgtccacggcgtatttgataaccaaaattacagaccctccacccccagctgatgccagcatgacagagcgggagaggttcctagctgatcagcaggagtggaggaacaagcacgaattcgtgaacctatctctgtccgacttggatgcgaaactgagagatagcccaccatcatatgaggaagccactcggtctcgatcggcagcgggaacaacaggcagtccgtaa

SEQ ID NO: 17185 - protein, 395 aa, Muscodor strobelii
  misc_feature: SGI Peptide ID NO. 565736
  misc_feature (1)..(394): NCBI GI: 145616148 Blast Desc: MGG_03534 [Magnaporthe grisea 70-15] gi|145009904|gb|EDJ94560.1| MGG_03534 [Magnaporthe grisea 70-15]
  misc_feature (12)..(380): NCBI GI: 85093894 Blast Desc: NCU02360 [Neurospora crassa OR74A] gi|28921235|gb|EAA30545.1| NCU02360 [Neurospora crassa OR74A]
  misc_feature (11)..(370): NCBI GI: 46127177 Blast Desc: FG07966.1 [Gibberella zeae PH-1]
  misc_feature (8)..(381): NCBI GI: 189091916 Blast Desc: [Podospora anserina] gi|188219311|emb|CAP49291.1| protein product [Podospora anserina]
  misc_feature (8)..(381): NCBI GI: 27803068 Blast Desc: protein product [Podospora anserina]
  misc_feature (20)..(369): NCBI GI: 225554917 Blast Desc: transmembrane protein [Ajellomyces capsulatus G186AR]
  misc_feature (20)..(369): NCBI GI: 240274296 Blast Desc: transmembrane protein [Ajellomyces capsulatus H143]
  misc_feature (18)..(381): NCBI GI: 116179520 Blast Desc: CHGG_00388 [Chaetomium globosum CBS 148.51] gi|88184685|gb|EAQ92153.1| CHGG_00388 [Chaetomium globosum CBS 148.51]
  misc_feature (20)..(369): NCBI GI: 261195937 Blast Desc: transmembrane protein UsgS [Ajellomyces dermatitidis SLH14081] gi|239587505|gb|EEQ70148.1| transmembrane protein UsgS [Ajellomyces dermatitidis SLH14081] gi|239614458|gb|EEQ91445.1|
  misc_feature (6)..(369): NCBI GI: 189191648 Blast Desc: transmembrane protein UsgS [Pyrenophora tritici-repentis Pt-1C-BFP] gi|187973769|gb|EDU41268.1| transmembrane protein UsgS [Pyrenophora tritici-repentis
MPEPGSLRLDKEKMKDAFDVSHFDLNALIRGAQLTLVGAHRALQNPAIFTNTHYKQAAIAVGAGIAIRLAIAVPIIGLKVFLTVLSYAVNLDRATWDDTLVNGLDLIANHVLQIPLFLMTLMRYFTPTLDDMFMDSLRWVDETYVAKHKGEAPVNLRQMYYPNLSKYKQKDGTTHSTSTAENITMFLWRFARKGLISLAIFALSCVPYFGKLVLPAASFYTFNKAVGLGPAAVIFGTGILLPKRYLIIFLQAYFSSRSLMRNLLEPYFARVHLNKEQKRNWYVHDPRFRSREGLLFGFGVGFYILLRVPLLGVLIYGIAEASTAYLITKITDPPPPADASMTERERFLADQQEWRNKHEFVNLSLSDLDAKLRDSPPSYEEATRSRSAAGTTGSP

SEQ ID NO: 17186 - DNA, 1696 bp, Muscodor strobelii
  misc_feature: SGI EST ID NO. CUFF.40462.0
  misc_feature: Variant of the nucleotide sequence at SEQ ID NO 17184
aataccaccaccttgtgcggtatagcagatactaggtagacatcatcgcaactgtacctactcatcaaccttaatcaagaccattctgctctggctatcagagcctcaaccggcttaataggtatatctgaaatacctttgcacaccatcgactcactgaactatcatcgaccttcaactcccgacctcgcctagaccacgccctatataatcagtatatccttgcccagaaagtgttgttcatcacttaaaatgcccgagcccggcagcctcaggcttgacaaggaaaaaatgaaggacgccttcgacgtatctcactttgacctcaatgcattaattcgcggagctcagttgactttggttggtgcccatcgtgctcttcagaacccagctatattcaccaatacccactacaaacaagctgctattgctgtcggtgctggcatcgccatccgtcttgccattgctgttccggtgattctaccttgttccttgctgtggtccataccccaagatctcatgctcatgccatcgtagatcattggtctcaaggtctttttgacggtgttgtcctacgccgttaacctcgaccgcgcaacctgggatgacactctagtcaatggtttagatctcattgccaaccatgttctacaaattcccctgttccttatgaccctgatgcgatacttcaccccgacgcttgatgacatgttcatggactctctccgttgggtcgatgagacctacgtagccaagcataagggtgaggcacctgtcaatctacgccagatgtactatccaaatctcagcaagtataagcagaaggatggtacaacgcactcgactagcaccgcagagaacattaccatgttcctctggcgattcgcgcgcaaggggctcatctccttggccatctttgctttgtcatgtgttccttacttcggcaagcttgtgcttcccgccgcaagtttctatactttcaacaaggccgtcggccttggccctgccgccgtcatcttcggcacgggaatcctgttgcccaaacgctacctcatcatattcctccaagcctatttctcttcacgaagtctcatgcgcaatcttctagagccctactttgcgcgtgtccatctaaataaggagcagaaacggaactgtatgtacccgatatctgccgttcgtaggcgatacacgagtctcgcctataaactcttctgaaatgaaatgttggaaactaataagacaaatgcagggtttcgtagtcgcgaaggtcttcttttcgggttcggtgttggattttacatcctcttacgggttccactgcttggtgtcttgatttatggcatagctgaggcgtccacggcgtatttgataaccaaaattacagaccctccacccccagctgatgccagcatgacagagcgggagaggttcctagctgatcagcaggagtggaggaacaagcacgaattcgtgaacctatctctgtccgacttggatgcgaaactgagagatagcccaccatcatatgaggaagccactcggtctcgatcggcagcgggaacaacaggcagtccgtaagggagtgttctcgttcattatgaaagatagcccaacattataattgtatgaagcaattacttacttcgagcactattgtatgatatgtcaagtgcttctcataattagctcactc

SEQ ID NO: 17187 - DNA, 1149 bp, Muscodor strobelii
  misc_feature: SGI cDNA ID NO. 565737
  misc_feature: Encodes the peptide sequence at SEQ ID NO 17188
atgaaggacgccttcgacgtatctcactttgacctcaatgcattaattcgcggagctcagttgactttggttggtgcccatcgtgctcttcagaacccagctatattcaccaatacccactacaaacaagctgctattgctgtcggtgctggcatcgccatccgtcttgccattgctgttccgatcattggtctcaaggtctttttgacggtgttgtcctacgccgttaacctcgaccgcgcaacctgggatgacactctagtcaatggtttagatctcattgccaaccatgttctacaaattcccctgttccttatgaccctgatgcgatacttcaccccgacgcttgatgacatgttcatggactctctccgttgggtcgatgagacctacgtagccaagcataagggtgaggcacctgtcaatctacgccagatgtactatccaaatctcagcaagtataagcagaaggatggtacaacgcactcgactagcaccgcagagaacattaccatgttcctctggcgattcgcgcgcaaggggctcatctccttggccatctttgctttgtcatgtgttccttacttcggcaagcttgtgcttcccgccgcaagtttctatactttcaacaaggccgtcggccttggccctgccgccgtcatcttcggcacgggaatcctgttgcccaaacgctacctcatcatattcctccaagcctatttctcttcacgaagtctcatgcgcaatcttctagagccctactttgcgcgtgtccatctaaataaggagcagaaacggaactggtatgttcacgatccgaggtttcgtagtcgcgaaggtcttcttttcgggttcggtgttggattttacatcctcttacgggttccactgcttggtgtcttgatttatggcatagctgaggcgtccacggcgtatttgataaccaaaattacagaccctccacccccagctgatgccagcatgacagagcgggagaggttcctagctgatcagcaggagtggaggaacaagcacgaattcgtgaacctatctctgtccgacttggatgcgaaactgagagatagcccaccatcatatgaggaagccactcggtctcgatcggcagcgggaacaacaggcagtccgtaa

SEQ ID NO: 17188 - protein, 382 aa, Muscodor strobelii
  misc_feature: SGI Peptide ID NO. 565737
  misc_feature (1)..(381): NCBI GI: 145616148 Blast Desc: MGG_03534 [Magnaporthe grisea 70-15] gi|145009904|gb|EDJ94560.1| MGG_03534 [Magnaporthe grisea 70-15]
  misc_feature (1)..(367): NCBI GI: 85093894 Blast Desc: NCU02360 [Neurospora crassa OR74A] gi|28921235|gb|EAA30545.1| NCU02360 [Neurospora crassa OR74A]
  misc_feature (1)..(357): NCBI GI: 46127177 Blast Desc: FG07966.1 [Gibberella zeae PH-1]
  misc_feature (1)..(368): NCBI GI: 189091916 Blast Desc: [Podospora anserina] gi|188219311|emb|CAP49291.1| protein product [Podospora anserina]
  misc_feature (1)..(368): NCBI GI: 27803068 Blast Desc: protein product [Podospora anserina]
  misc_feature (7)..(356): NCBI GI: 225554917 Blast Desc: transmembrane protein [Ajellomyces capsulatus G186AR]
  misc_feature (5)..(368): NCBI GI: 116179520 Blast Desc: CHGG_00388 [Chaetomium globosum CBS 148.51] gi|88184685|gb|EAQ92153.1| CHGG_00388 [Chaetomium globosum CBS 148.51]
  misc_feature (7)..(356): NCBI GI: 240274296 Blast Desc: transmembrane protein [Ajellomyces capsulatus H143]
  misc_feature (7)..(356): NCBI GI: 261195937 Blast Desc: transmembrane protein UsgS [Ajellomyces dermatitidis SLH14081] gi|239587505|gb|EEQ70148.1| transmembrane protein UsgS [Ajellomyces dermatitidis SLH14081] gi|239614458|gb|EEQ91445.1|
  misc_feature (5)..(356): NCBI GI: 189191648 Blast Desc: transmembrane protein UsgS [Pyrenophora tritici-repentis Pt-1C-BFP] gi|187973769|gb|EDU41268.1| transmembrane protein UsgS [Pyrenophora tritici-repentis
MKDAFDVSHFDLNALIRGAQLTLVGAHRALQNPAIFTNTHYKQAAIAVGAGIAIRLAIAVPIIGLKVFLTVLSYAVNLDRATWDDTLVNGLDLIANHVLQIPLFLMTLMRYFTPTLDDMFMDSLRWVDETYVAKHKGEAPVNLRQMYYPNLSKYKQKDGTTHSTSTAENITMFLWRFARKGLISLAIFALSCVPYFGKLVLPAASFYTFNKAVGLGPAAVIFGTGILLPKRYLIIFLQAYFSSRSLMRNLLEPYFARVHLNKEQKRNWYVHDPRFRSREGLLFGFGVGFYILLRVPLLGVLIYGIAEASTAYLITKITDPPPPADASMTERERFLADQQEWRNKHEFVNLSLSDLDAKLRDSPPSYEEATRSRSAAGTTGSP

SEQ ID NO: 17189 - DNA, 1696 bp, Muscodor strobelii; identical to SEQ ID NO: 17186
  misc_feature: SGI EST ID NO. CUFF.40462.0
  misc_feature: Variant of the nucleotide sequence at SEQ ID NO 17187

SEQ ID NO: 17190 - DNA, 1155 bp, Muscodor strobelii
  misc_feature: SGI cDNA ID NO. 565738
  misc_feature: Encodes the peptide sequence at SEQ ID NO 17191
atgaaggacgccttcgacgtatctcactttgacctcaatgcattaattcgcggagctcagttgactttggttggtgcccatcgtgctcttcagaacccagctatattcaccaatacccactacaaacaagctgctattgctgtcggtgctggcatcgccatccgtcttgccattgctgttccgatcattggtctcaaggtctttttgacggtgttgtcctacgccgttaacctcgaccgcgcaacctgggatgacactctagtcaatggtttagatctcattgccaaccatgttctacaaattcccctgttccttatgaccctgatgcgatacttcaccccgacgcttgatgacatgttcatggactctctccgttgggtcgatgagacctacgtagccaagcataagggtgaggcacctgtcaatctacgccagatgtactatccaaatctcagcaagtataagcagaaggatggtacaacgcactcgactagcaccgcagagaacattaccatgttcctctggcgattcgcgcgcaaggggctcatctccttggccatctttgctttgtcatgtgttccttacttcggcaagcttgtgcttcccgccgcaagtttctatactttcaacaaggccgtcggccttggccctgccgccgtcatcttcggcacgggaatcctgttgcccaaacgctacctcatcatattcctccaagcctatttctcttcacgaagtctcatgcgcaatcttctagagccctactttgcgcgtgtccatctaaataaggagcagaaacggaactgtatgtacccgatatctgccgttcggtttcgtagtcgcgaaggtcttcttttcgggttcggtgttggattttacatcctcttacgggttccactgcttggtgtcttgatttatggcatagctgaggcgtccacggcgtatttgataaccaaaattacagaccctccacccccagctgatgccagcatgacagagcgggagaggttcctagctgatcagcaggagtggaggaacaagcacgaattcgtgaacctatctctgtccgacttggatgcgaaactgagagatagcccaccatcatatgaggaagccactcggtctcgatcggcagcgggaacaacaggcagtccgtaa

SEQ ID NO: 17191 - protein, 384 aa, Muscodor strobelii
  misc_feature: SGI Peptide ID NO. 565738
  misc_feature (1)..(383): NCBI GI: 145616148 Blast Desc: MGG_03534 [Magnaporthe grisea 70-15] gi|145009904|gb|EDJ94560.1| MGG_03534 [Magnaporthe grisea 70-15]
  misc_feature (1)..(369): NCBI GI: 85093894 Blast Desc: NCU02360 [Neurospora crassa OR74A] gi|28921235|gb|EAA30545.1| NCU02360 [Neurospora crassa OR74A]
  misc_feature (1)..(359): NCBI GI: 46127177 Blast Desc: FG07966.1 [Gibberella zeae PH-1]
  misc_feature (1)..(370): NCBI GI: 189091916 Blast Desc: [Podospora anserina] gi|188219311|emb|CAP49291.1| protein product [Podospora anserina]
  misc_feature (1)..(370): NCBI GI: 27803068 Blast Desc: protein product [Podospora anserina]
  misc_feature (7)..(358): NCBI GI: 225554917 Blast Desc: transmembrane protein [Ajellomyces capsulatus G186AR]
  misc_feature (7)..(358): NCBI GI: 240274296 Blast Desc: transmembrane protein [Ajellomyces capsulatus H143]
  misc_feature (5)..(370): NCBI GI: 116179520 Blast Desc: CHGG_00388 [Chaetomium globosum CBS 148.51] gi|88184685|gb|EAQ92153.1| CHGG_00388 [Chaetomium globosum CBS 148.51]
  misc_feature (7)..(358): NCBI GI: 261195937 Blast Desc: transmembrane protein UsgS [Ajellomyces dermatitidis SLH14081] gi|239587505|gb|EEQ70148.1| transmembrane protein UsgS [Ajellomyces dermatitidis SLH14081] gi|239614458|gb|EEQ91445.1|
  misc_feature (5)..(358): NCBI GI: 189191648 Blast Desc: transmembrane protein UsgS [Pyrenophora tritici-repentis Pt-1C-BFP] gi|187973769|gb|EDU41268.1| transmembrane protein UsgS [Pyrenophora tritici-repentis
MKDAFDVSHFDLNALIRGAQLTLVGAHRALQNPAIFTNTHYKQAAIAVGAGIAIRLAIAVPIIGLKVFLTVLSYAVNLDRATWDDTLVNGLDLIANHVLQIPLFLMTLMRYFTPTLDDMFMDSLRWVDETYVAKHKGEAPVNLRQMYYPNLSKYKQKDGTTHSTSTAENITMFLWRFARKGLISLAIFALSCVPYFGKLVLPAASFYTFNKAVGLGPAAVIFGTGILLPKRYLIIFLQAYFSSRSLMRNLLEPYFARVHLNKEQKRNCMYPISAVRFRSREGLLFGFGVGFYILLRVPLLGVLIYGIAEASTAYLITKITDPPPPADASMTERERFLADQQEWRNKHEFVNLSLSDLDAKLRDSPPSYEEATRSRSAAGTTGSP

SEQ ID NO: 17192 - DNA, 1696 bp, Muscodor strobelii; identical to SEQ ID NO: 17186
  misc_feature: SGI EST ID NO. CUFF.40462.0
  misc_feature: Variant of the nucleotide sequence at SEQ ID NO 17190

SEQ ID NO: 17193 - DNA, 713 bp, Muscodor strobelii
  misc_feature: SGI cDNA ID NO. 565739
  misc_feature: Reduced expression when VOC is produced
  misc_feature: Encodes the peptide sequence at SEQ ID NO 17194
atgtccggcctcattaacaaagtcaaagaagctgtctccagcaaacacgacgcctcttcggcccctgagggtactcacggacaccataactccagagctgccaacgccgctgaccccaggatcgactctgaccgtgaccaccgtgcccatcctggctctacagtcggtggtaatgaaccatacggcacctcccaacactatacagccggcaccgagggtccccatggctctaacatggcaaacaagatggatcctaggattgactctgaccgatctggtcagcacatgggaaacaccgctggtgaccagtatggcagtggccgtgagggcgcccacggtccccacagctctagcctagctaatgccgccgaccctcgagtcgactctgatcgtgatgcgagtcgcactgtaggaaacacctacgggagctccggcaccgctggtacaaccggtgctcaccacactaccaccggcactactggtactcacggcatgaccggtactcacggcactcagcacaccaccggcactcatactggaggcatggctcctggacctgcttcaaccactgccggtcctcactcgagcgacatgatgaacaaggctgatcctcgtgtcgactctaatctcgatgggagcaagacttacggcggcgacaagacgtaccagtctacgactggctctggcatgacgggttccggcatgactggatc

SEQ ID NO: 17194 - protein, 237 aa, Muscodor strobelii
  misc_feature: SGI Peptide ID NO. 565739
  misc_feature (1)..(230): NCBI GI: 171691665 Blast Desc: protein product [Podospora anserina] gi|170945781|emb|CAP72581.1| protein product [Podospora anserina]
  misc_feature (1)..(223): NCBI GI: 85092066 Blast Desc: NCU04667 [Neurospora crassa OR74A] gi|28920612|gb|EAA29974.1| [Neurospora crassa OR74A] gi|28950056|emb|CAD70810.1| [Neurospora crassa]
  misc_feature (1)..(225): NCBI GI: 46137071 Blast Desc: FG10051.1 [Gibberella zeae PH-1]
  misc_feature (1)..(223): NCBI GI: 116179746 Blast Desc: CHGG_00501 [Chaetomium globosum CBS 148.51] gi|88184798|gb|EAQ92266.1| CHGG_00501 [Chaetomium globosum CBS 148.51]
  misc_feature (1)..(217): NCBI GI: 256732129 Blast Desc: NECHADRAFT_80428 [Nectria haematococca mpVI 77-13-4]
  misc_feature (23)..(223): NCBI GI: 156055506 Blast Desc: SS1G_05105 [Sclerotinia sclerotiorum 1980] gi|154702889|gb|EDO02628.1| SS1G_05105 [Sclerotinia sclerotiorum 1980]
  misc_feature (1)..(234): NCBI GI: 169785809 Blast Desc: [Aspergillus oryzae RIB40] gi|238506711|ref|XP_002384557.1| period circadian protein, [Aspergillus flavus NRRL3357] gi|83776113|dbj|BAE66232.1| protein
  misc_feature (2)..(211): NCBI GI: 119472523 Blast Desc: NFIA_058130 [Neosartorya fischeri NRRL 181] gi|119406512|gb|EAW16463.1| conserved [Neosartorya fischeri NRRL 181]
  misc_feature (1)..(211): NCBI GI: 115391125 Blast Desc: [Aspergillus terreus NIH2624] gi|114193991|gb|EAU35691.1| [Aspergillus terreus NIH2624]
  misc_feature (23)..(223): NCBI GI: 154310513 Blast Desc: BC1G_07177 [Botryotinia fuckeliana B05.10] gi|150851508|gb|EDN26701.1| BC1G_07177 [Botryotinia fuckeliana B05.10]
  misc_feature: Useful for introducing or modulating the production of volatile compounds
MSGLINKVKEAVSSKHDASSAPEGTHGHHNSRAANAADPRIDSDRDHRAHPGSTVGGNEPYGTSQHYTAGTEGPHGSNMANKMDPRIDSDRSGQHMGNTAGDQYGSGREGAHGPHSSSLANAADPRVDSDRDASRTVGNTYGSSGTAGTTGAHHTTTGTTGTHGMTGTHGTQHTTGTHTGGMAPGPASTTAGPHSSDMMNKADPRVDSNLDGSKTYGGDKTYQSTTGSGMTGSGMTG

SEQ ID NO: 17195 - DNA, 1157 bp, Muscodor strobelii
  misc_feature: SGI EST ID NO. CUFF.40452.0
  misc_feature: Variant of the nucleotide sequence at SEQ ID NO 17193
tgacggtgtatgaagcaacgccgagagaacaacgtctccttctgctacacctggcggccaccaatacgtatctgccaggtgagccaggcacacccgcttccaacatgtcgcttgcttgctagtgttggaagacacggggcattacgtccgctggccaatggatgaagtgacacagcatgtcagaagcagtttcatatccacatatgatgacatacgtagttgcttgagctatcacggggaaacagcttgcacgaagcaagcgtaccggtccttcaccaagttctataaaactttacttcccctcctcttagaacagcttttcttccatttctcatcttcatactaattctaacacgaccaacacaaataacaaccataatacacatcccccttatctctacccctctgaacgcttagcacattatcgacgacatacatatcaaccatgtccggcctcattaacaaagtcaaagaagctgtctccagcaaacacgacgcctcttcggcccctgagggtactcacggacaccataactccagagctgccaacgccgctgaccccaggatcgactctgaccgtgaccaccgtgcccatcctggctctacagtcggtggtaatgaaccatacggcacctcccaacactatacagccggcaccgagggtccccatggctctaacatggcaaacaagatggatcctaggattgactctgaccgatctggtcagcacatgggaaacaccgctggtgaccagtatggcagtggccgtgagggcgcccacggtccccacagctctagcctagctaatgccgccgaccctcgagtcgactctgatcgtgatgcgagtcgcactgtaggaaacacctacgggagctccggcaccgctggtacaaccggtgctcaccacactaccaccggcactactggtactcacggcatgaccggtactcacggcactcagcacaccaccggcactcatactggaggcatggctcctggacctgcttcaaccactgccggtcctcactcgagcgacatgatgaacaaggctgatcctcgtgtcgactctaatctcgatgggagcaagacttacggcggcgacaagacgtaccagtctacgactggctctggcatgacgggttccggcatgactggat

SEQ ID NO: 17196 - DNA, 372 bp, Muscodor strobelii
  misc_feature: SGI cDNA ID NO. 565740
  misc_feature: Reduced expression when VOC is produced
  misc_feature: Encodes the peptide sequence at SEQ ID NO 17197
atgatcctcaccgaccttgtctccataatcctccgccttgcggaactggtattcgctgctattgttgctggactcaacggagaatatcttcaccttgttcgacacacgtcaagctggtctcagggtcgtttcatctacactgaggcccttggtgactcttgcggctatgtcttcgactggaccaatgtcggcctccgtggcgatcaatgcggcaagtggaaagccgtagaggctttcgcctttttgtctgccatctgctggctggtctcggcattcattggagtctattgggtccatgaacgcgagcatagcggccgatactcctaccgcacccgtcgcacttggggaagccgtcgtcgtgccgtagtttag

SEQ ID NO: 17197 - protein, 123 aa, Muscodor strobelii
  misc_feature: SGI Peptide ID NO. 565740
  misc_feature (1)..(120): NCBI GI: 46137073 Blast Desc: FG10052.1 [Gibberella zeae PH-1]
  misc_feature (1)..(104): NCBI GI: 164425292 Blast Desc: NCU11309 [Neurospora crassa OR74A] gi|157070869|gb|EDO65128.1| conserved [Neurospora crassa OR74A]
  misc_feature (1)..(118): NCBI GI: 256732130 Blast Desc: [Nectria haematococca mpVI 77-13-4]
  misc_feature (1)..(114): NCBI GI: 171691663 Blast Desc: protein product [Podospora anserina] gi|170945780|emb|CAP72580.1| protein product [Podospora anserina]
  misc_feature (1)..(119): NCBI GI: 39958477 Blast Desc: MGG_09260 [Magnaporthe grisea 70-15] gi|145013291|gb|EDJ97932.1| MGG_09260 [Magnaporthe grisea 70-15]
  misc_feature (2)..(122): NCBI GI: 121713154 Blast Desc: conserved [Aspergillus clavatus NRRL 1] gi|119402341|gb|EAW12762.1| conserved [Aspergillus clavatus NRRL 1]
  misc_feature (2)..(109): NCBI GI: 242790735 Blast Desc: integral membrane protein [Talaromyces stipitatus ATCC 10500] gi|218718202|gb|EED17622.1| integral membrane protein [Talaromyces stipitatus ATCC 10500]
  misc_feature (2)..(114): NCBI GI: 212534648 Blast Desc: integral membrane protein [Penicillium marneffei ATCC 18224] gi|210069879|gb|EEA23969.1| integral membrane protein [Penicillium marneffei ATCC 18224]
  misc_feature (2)..(116): NCBI GI: 119479585 Blast Desc: NFIA_078640 [Neosartorya fischeri NRRL 181] gi|119407975|gb|EAW17924.1| conserved [Neosartorya fischeri NRRL 181]
  misc_feature (2)..(116): NCBI GI: 255949636 Blast Desc: Pc22g16710 [Penicillium chrysogenum Wisconsin 54-1255] gi|211592602|emb|CAP98959.1| Pc22g16710 [Penicillium chrysogenum Wisconsin 54-1255]
  misc_feature: Useful for introducing or modulating the production of volatile compounds
MILTDLVSIILRLAELVFAAIVAGLNGEYLHLVRHTSSWSQGRFIYTEALGDSCGYVFDWTNVGLRGDQCGKWKAVEAFAFLSAICWLVSAFIGVYWVHEREHSGRYSYRTRRTWGSRRRAVV

SEQ ID NO: 17198 - DNA, 3138 bp, Muscodor strobelii
  misc_feature: SGI EST ID NO. CUFF.40832.1
  misc_feature: Variant of the nucleotide sequence at SEQ ID NO 17196
gctcatgcgggtctaccaaagatagggagagatgaagatgataggtatggtagacgataatcgaagcacaggtagcgtgatatttgtgatgaagacaatcgtcgatggagcggatgagacgaggagatgaccgagataatcgtcatattccatgtgtctctctgcgatgacgatggcagatctcaccactgtctgattcgctccttcttccattgtaaagacttttatctcaaggaagctatcaccatcacgctatgtacgagtggcaagaccgtgtgaatttcagcagacaaaaatgggttgctgggaatcgacgagcgacttctcctcaccactcctgagctatcgttctacgacaacgataaaagactaagcctcaacgttcatgcccctaccctgagatacttgtctcggagtcacatagtagcggcgctgagactttcctgcatggaattgacacctagctacctcgtgagtgatagcaggggcagtaactcaggcagtaagagaagtgcctatttaagatgagaaatagcatctatcttacgtgcaggcacattatttcaccttcggtcatctcgcaatgtatatatgaggatctcaagaaggagcaaaatggcactttcgcctttgcttgaaaagattctgacaatccatcgagttggaagaacattagtggtcaattcttttggctcaatgcgttatcccctgttgggcatttgtagtaacatctgaaggtgtgttgcattgttgaatctttagcccagggtttcgacatcctctcgatcttcaacgtaggttgtgatcctgaaaaatctggctcaattcccacgacccaataacgtcaagccccgcgcgcccgctggttgcctggtgtcgatgattgccgtacccagccatcgaacggttgcgtgttccaaccttttgcgactttttagacaaaagctatcgactgtgccctctgaagtgatccatccgaactacctgtgataaccttatcccagcaagtctactaggaatgcattcaggtctctagaaatggaaatacaatcatacgagcttttaagtatcttacaacattcttccattcacaatgacaaatgcagaggcatgtgaaaacctaacgatacattgtcacgggtatgcatgagggtggataggaggtacatgtagttagctccaagcatttacatgttaccttattgctagatcgatgccggatgccggtagttggaggcgccaagccttggactagcgtgcctatggagctcactcgcccgccactctgcccgcccagtcgcctaaatactctgaggacgttgcaatattacaggaccacgcacatcctgcagtgtgctgcaagccatgaccccactgatctgcgatgccgtgccaatttctggcgtgctcgtttccataaaccctgtttattctgtgtcaaatacattctctgtctgccttgatttccctgcgaacgggctacctgtatgacttcattccgagcatcgcagcacaaggcccgagagttgcccatgaaattaacagtaccccattcgtcacggcgttgtagcagtgtctggccccgggggtcaattgaagcttgtggaataagctcgcctggcagccactgacgactaccaccgaatggtgaatcaattggaagccaacgataagtgaaagtggtcagctagttgccaggccaaaagtgtcagcccatgagtcacgggttatatggtaagaatgcttgatcagagatgcacaaggaatgctgcctagagccgagtattccgagccacatcgttgcgcgtgatgtcctcgtggccagtcccggcaaggggagtagagtagcattttcaggtttcgtctacgatattagaaactgttttaatccaatcagccgccgaccgaccgtttgttccggagcctgctggtgtggacgtcattttgctttgcggtgtgttggccatgcatcatactccaaatgccagagcacgttcatgcctccatgggaaataaatatctgatctatcgccagacaaactagaatttcgaaaggccaatttgcccccttaacaagccacaatcttccctcagctacagtaacatctagtgctgtgtaattcgcagattcccatcaatcgcatattttatccaatagcggtatattgatctttaccaacatgatcctcaccgaccttgtctccataatcctccgccttgcggaactggtattcgctgctattgttgctggactcaacggagaatatcttcaccttgttcgacacacgtcaagctggtctcagggtcgtttcatctacactgaggtcgttgcgggcatttccatcttcctatctctcatctggctgttcccctttccggctccttcatccactggcccgttgatattttgatctctatcacatggtttgttgcctttggactgcttgttaatgcccttggtgactcttgcggctatgtcttcgactggaccaatgtcggcctccgtggcgatcaatgcggcaagtggaaagccgtagaggctttcgcctttttgtctgccatctgctggctggtctcggcattcattggagtctattgggtccatgaacgcgagcatagcggccgatactcctaccgcacccgtcgcacttggggaagccgtcgtcgtgccgtagtttagtactatggccgagttagcataacacaacacaacaccaacctggacattcccagtgctgccagctatcttcaatcattgggtactgtgtaatgtaataattaaccaattacgatatcatgtggacttaagcagtggttattcggcgttctttgttggaatggtagcatgatgattcggatgacaaaagatatttgatgggagcaataattagcatgaagttgatacccttaattgaaagcctgctcttcatctatattctccatgcgctgtgtgctaccgatggatagttaaagacggacttgtgcccatgattgttgaagtcacatattctcgaatcgattttcaatacgcatctattataaggtagcttcaggtgttggatctctcatacctcaaacaaaattcttagacaaaattttgggaaagatgccaaaacatttaaactgacgtcatcggat

SEQ ID NO: 17199 - DNA, 4035 bp, Muscodor strobelii
  misc_feature: SGI cDNA ID NO. 565741
  misc_feature: Reduced expression when VOC is produced
  misc_feature: Encodes the peptide sequence at SEQ ID NO 17200
atggatgaccaaatggaagcagaatcccgaccgaatgcatctaattcatcactcaagcctatgagtaatggttcagtatcgagtcgatcctcggcagctcgtgtcgagagttatcgacattctctgctaaagtccaatgcgcaacgcgaacaaacagttgaaaaggacttgcctgtcccccctgttcttactcaggacattggttcagtttcgttgccagcgactcctcccacacatcattctgaagatgacttcaatcatccaactatagatcctcgtcctgtagcaaaatggccagaacgggtattcttcaacgaatcacggacggtggcaattgatcctccgctggacgaggggaacattgatggccgtgactccatgcgcagcgagaactcgttcgccaatctatacagagatgcatgcatcaaggggcaaccacccaacgggcgatttcccatatcgaaagttcgtcctgcattcgaaaccgtggaagaggtcaagttcagtcgtgagggtgaagaatctccgtcaaattcggcactgtcagactggatctatccagtgcgtgatcatttccgctatgaccgcatgcaaacaccaaaagtccgttcgtacgcggatcatgcgcacataagtcaacagctgagctcagaaagactccagaatccgacagagcccacgaatgaggcatcggaagttcagaacaatgaaaagccatctgtatcttcgacttactggagatttttacatcatttcggagaaaaacaagatgcccaatatgagagatcgacgcagcatgaagctccttcatctatgcttcagcctctagaggaatctcggctgccatctgcaatggtccctcaagcattgccgaatgccctacatcttcctcttgtcagcgacgaaactccgcagacagaagagattcagagtgtaggcggttcaactgggaaggtccaactaagtaaggatgcagaagcttccagaaatgaagttcaagaagatgatgcagcagacgatagcgttccgccaacatcaatggaaagttcatcctggaaaccgggaaaactcgatcgtcgctggactgctgcatggctccgtcactttttaagtcagccagaagatgaaacttcaaacttgacaagacttccgaagcgcgcttcattgactcgaaaagcccggcttagtgacgacatcggatcattgacgtctcgaatgacctcattctctggccaaaccacaactgataagatggccatggaaaatgtcatgaataacctcgagcagctccttagcgaagcacttcatttgacaaacgaactcagcgagcagactcaatgcggacacattgatgattcaaaccttccattgagatctacatctgaggactcgggagagacatatcctcaaagtatccacgagagcattcaaagcattcctgatgagcatgaagcgaccgcgataccgttagctccgtcctgctcggaaatgcctttgaaatcggtcaaatgtcatccagttgcggagtctgtacggcctaggatatcggatggactgaggctcagaaggaccgcccataacgtcaagatctgtcaccaccaagccgacgactgcattctacctatgccacccgcagatcgtgatctccaacggcgacaagattcagaaggacgtcttgcgtacaatgaagatgactcaagtggagtgatcaagccgcgatcaggagaggtccccaatagcagagaagtgcgcgagtacatacgagtcttccaccagccaccaatcggacagcgaggtagttcaagaaatgatagctcagccgacaattgtctcgatgacttgggtatgcctcatagctatggagcaggccgtgttcgtcgatacagcttgagtctatgcagtctagacggcggcacttccgacgacatggtcgatgacttaacctcatgccagaatgttgagaactcaggaaccagtatccctgtacctcgaaataattccaaacaaaagcagggtaagcccaacaagagctctactaagccacaaacaatgactggcccgggaaacaacaggccgacacatagattgcgaaatataaagctccgcaacacatcgcatgtgagccttggcgagggtgagggaatcaacttagccaaacatggcaaaagacgacccgttattgctcgtgactggtccccaggccggaaaaggtttgtcgccagtgtcgcctgtatcagtacaacattgatcggtgtcttgatcggaatttatgccggtcttgtgcctgcaattcagtactggattgccgatttcaaacattacgcgattattggaaatgtggctctttatctcgggatggcagtgccaacgttattcttttggcccttgcctttgctacatgggcgcaaaccatatatcgtgggcagtatgtgtctggctatgcctctgctgtttccacaagccgttgcctgcttcatcggttccttgagtgtcggcttcgttgtgggcgccgttgtgatcgaccatttgcagcctgcatggggattctatatctgcatcatcatcgccgcggtcgtgctattcctcaatgtattctgccccgaagttcggcgttccggctggagacgatcggtagctgaagtgcagaagggcacaaccatttctcggcgaatggcccggggcgaggttatgatgcaccggatacaaacagggccaagctggtggggtcaagaagtgtatcacggcgttgctttaattcttgaaatgcttcggcagcccggcttcacagtcatggcgatatattacgcgtggatatatgctcaaattgtgttgattatagtgctcttgggatcacttacatccaagtcatatcgctaccgctcctcgtatgtcggggctgtggtctcgtcagtagcgattggtgcctttgccgccataccattccaaaaggcaaatctcttctctcgagccagaaacatgggtccgccgtcaaaccgcatgacgttcgacaagacgattcagtggacctctcatttgatccgccgagccatcttcactctgatcctccctgtcgctggtatcgtgtacactgtggtatctacaggaccaccggtacatgtggttgtcccttctttctttgcggctctgatcgggtttctttcgtgtctcgcaatttcagaatgcaccgggttacttatggaaacatgggactgttcagatcttcaagccggtatgggtggaccaaagtcagataacggtggcaagaaacgtacaaactattcctccttccctcgagtcactgccggatggaatttcatccagggcttaggattcatctttgcggctggttcaactggtctcggtggctctgttactcgccgtctgggccagcaagaaaccacaggcatcgttgcaggtattcttttgattttgagcctcttgcttctcagcatccttgctcgattcaaaaaggtgcagataattcccaactgcagttgttctgaaatggatagatggaccaaggaacgccgagtcagtctaacccatcgcgctgcagcggtggcagccgcaaaatccgctggaaacaaagacctaagcggaattccggaagacgacattggttggaaaccttctgttctgggaaatcctgtcgacagataccgtcgtatcaatatcctggaactgggatcactgacacgttggagcgaaattcgcaaagtgaaccgcctcactgacgagaaccctcacctcaacagacaagcatttgggtttgctcaagaaaggctgcatcatagcgcacaccacagtgcggaaagacttggcaatattgcgcgcatgatgagtaaaaggagtcttctaagcaaatacagtcatgatcaagatgatgaaatcaaaggaggtcagagtgatttcactgacgacgatatcgtcagcgtccactcgcaagaggttcgcggcgtgcgtgagaaagatatcgaagccgaatgtgataagttcgaggatgtcgacctgggcaagaaaaatcatggaccttaa

SEQ ID NO: 17200 - protein, 1344 aa, Muscodor strobelii
  misc_feature: SGI Peptide ID NO. 565741
  misc_feature (697)..(1260): NCBI GI: 261351997 Blast Desc: conserved [Verticillium albo-atrum VaMs.102]
  misc_feature (658)..(1255): NCBI GI: 145603069 Blast Desc: MGG_13812 [Magnaporthe grisea 70-15] gi|145011395|gb|EDJ96051.1| MGG_13812 [Magnaporthe grisea 70-15]
  misc_feature (824)..(1262): NCBI GI: 46137157 Blast Desc: FG10094.1 [Gibberella zeae PH-1]
  misc_feature (689)..(1271): NCBI GI: 154304793 Blast Desc: BC1G_08982 [Botryotinia fuckeliana B05.10] gi|150853844|gb|EDN29036.1| BC1G_08982 [Botryotinia fuckeliana B05.10]
  misc_feature (824)..(1265): NCBI GI: 171692019 Blast Desc: protein product [Podospora anserina] gi|170945958|emb|CAP72759.1| protein product [Podospora anserina]
  misc_feature (689)..(1343): NCBI GI: 156044354 Blast Desc: SS1G_10280 [Sclerotinia sclerotiorum 1980] gi|154694669|gb|EDN94407.1| SS1G_10280 [Sclerotinia sclerotiorum 1980]
  misc_feature (824)..(1243): NCBI GI: 189197059 Blast Desc: conserved [Pyrenophora tritici-repentis Pt-1C-BFP] gi|187980815|gb|EDU47441.1| conserved [Pyrenophora tritici-repentis Pt-1C-BFP]
  misc_feature (824)..(1253): NCBI GI: 169621933 Blast Desc: SNOG_14179 [Phaeosphaeria nodorum SN15] gi|160704655|gb|EAT78416.2| SNOG_14179 [Phaeosphaeria nodorum SN15]
  misc_feature (619)..(1293): NCBI GI: 28950072 Blast Desc: related to Polyamine transport protein [Neurospora crassa]
  misc_feature (697)..(822): NCBI GI: 171692019 Blast Desc: protein product [Podospora anserina] gi|170945958|emb|CAP72759.1| protein product [Podospora anserina]
  misc_feature: Useful for introducing or modulating the production of volatile compounds
MDDQMEAESRPNASNSSLKPMSNGSVSSRSSAARVESYRHSLLKSNAQREQTVEKDLPVPPVLTQDIGSVSLPATPPTHHSEDDFNHPTIDPRPVAKWPERVFFNESRTVAIDPPLDEGNIDGRDSMRSENSFANLYRDACIKGQPPNGRFPISKVRPAFETVEEVKFSREGEESPSNSALSDWIYPVRDHFRYDRMQTPKVRSYADHAHISQQLSSERLQNPTEPTNEASEVQNNEKPSVSSTYWRFLHHFGEKQDAQYERSTQHEAPSSMLQPLEESRLPSAMVPQALPNALHLPLVSDETPQTEEIQSVGGSTGKVQLSKDAEASRNEVQEDDAADDSVPPTSMESSSWKPGKLDRRWTAAWLRHFLSQPEDETSNLTRLPKRASLTRKARLSDDIGSLTSRMTSFSGQTTTDKMAMENVMNNLEQLLSEALHLTNELSEQTQCGHIDDSNLPLRSTSEDSGETYPQSIHESIQSIPDEHEATAIPLAPSCSEMPLKSVKCHPVAESVRPRISDGLRLRRTAHNVKICHHQADDCILPMPPADRDLQRRQDSEGRLAYNEDDSSGVIKPRSGEVPNSREVREYIRVFHQPPIGQRGSSRNDSSADNCLDDLGMPHSYGAGRVRRYSLSLCSLDGGTSDDMVDDLTSCQNVENSGTSIPVPRNNSKQKQGKPNKSSTKPQTMTGPGNNRPTHRLRNIKLRNTSHVSLGEGEGINLAKHGKRRPVIARDWSPGRKRFVASVACISTTLIGVLIGIYAGLVPAIQYWIADFKHYAIIGNVALYLGMAVPTLFFWPLPLLHGRKPYIVGSMCLAMPLLFPQAVACFIGSLSVGFVVGAVVIDHLQPAWGFYICIIIAAVVLFLNVFCPEVRRSGWRRSVAEVQKGTTISRRMARGEVMMHRIQTGPSWWGQEVYHGVALILEMLRQPGFTVMAIYYAWIYAQIVLIIVLLGSLTSKSYRYRSSYVGAVVSSVAIGAFAAIPFQKANLFSRARNMGPPSNRMTFDKTIQWTSHLIRRAIFTLILPVAGIVYTVVSTGPPVHVVVPSFFAALIGFLSCLAISECTGLLMETWDCSDLQAGMGGPKSDNGGKKRTNYSSFPRVTAGWNFIQGLGFIFAAGSTGLGGSVTRRLGQQETTGIVAGILLILSLLLLSILARFKKVQIIPNCSCSEMDRWTKERRVSLTHRAAAVAAAKSAGNKDLSGIPEDDIGWKPSVLGNPVDRYRRINILELGSLTRWSEIRKVNRLTDENPHLNRQAFGFAQERLHHSAHHSAERLGNIARMMSKRSLLSKYSHDQDDEIKGGQSDFTDDDIVSVHSQEVRGVREKDIEAECDKFEDVDLGKKNHGP

SEQ ID NO: 17201 - DNA, 3491 bp, Muscodor strobelii
  misc_feature: SGI EST ID NO. CUFF.40841.0
  misc_feature: Variant of the nucleotide sequence at SEQ ID NO 17199
tgaaacttcaaacttgacaagacttccgaagcgcgcttcattgactcgaaaagcccggcttagtgacgacatcggatcattgacgtctcgaatgacctcattctctggccaaaccacaactgataagatggccatggaaaatgtcatgaataacctcgagcagctccttagcgaagcacttcatttgacaaacgaactcagcgagcagactcaatgcggacacattgatgattcaaaccttccattgagatctacatctgaggactcgggagagacatatcctcaaagtatccacgagagcattcaaagcattcctgatgagcatgaagcgaccgcgataccgttagctccgtcctgctcggaaatgcctttgaaatcggtcaaatgtcatccagttgcggagtctgtacggcctaggatatcggatggactgaggctcagaaggaccgcccataacgtcaagatctgtcaccaccaagccgacgactgcattctacctatgccacccgcagatcgtgatctccaacggcgacaagattcagaaggacgtcttgcgtacaatgaagatgactcaagtggagtgatcaagccgcgatcaggagaggtccccaatagcagagaagtgcgcgagtacatacgagtcttccaccagccaccaatcggacagcgaggtagttcaagaaatgatagctcagccgacaattgtctcgatgacttgggtatgcctcatagctatggagcaggccgtgttcgtcgatacagcttgagtctatgcagtctagacggcggcacttccgacgacatggtcgatgacttaacctcatgccagaatgttgagaactcaggaaccagtatccctgtacctcgaaataattccaaacaaaagcagggtaagcccaacaagagctctactaagccacaaacaatgactggcccgggaaacaacaggccgacacatagattgcgaaatataaagctccgcaacacatcgcatgtgagccttggcgagggtgagggaatcaacttagccaaacatggcaaaagacgacccgttattgctcgtgactggtccccaggccggaaaaggtttgtcgccagtgtcgcctgtatcagtacaacattgatcggtgtcttgatcggaatttatgccggtcttgtgcctgcaattcagtactggattgccgatttcaaacattacgcgattattggaaatgtggctctttatctcgggatggcagtgccaacgttattcttttggcccttgcctttgctacatgggcgcaaaccatatatcgtgggcagtatgtgtctggctatgcctctgctgtttccacaagccgttgccgtaagcgcgcccaggtcgcccacaacttctatttggaggattgcgctactcttgccaagaggcttgatgggatgcgctctaggcttcgccagcatgaatttccattccattctgaccgacctgtttggagcttcattaatgagcagtaacccgcatgaagaattggttgatgagtatgatgtcagacgccatggaggcggtcttggtgcatggctaggaatctggacctagtgcttcatcggttccttgagtgtcggcttcgttgtgggcgccgttgtgatcgaccatttgcagcctgcatggggattctatatctgcatcatcatcgccgcggtcgtgctattcctcaatgtattctgccccgaagttcggcgttccggctggagacgatcggtagctgaagtgcagaagggcacaaccatttctcggcgaatggcccggggcgaggttatgatgcaccggatacaaacagggccaagctggtggggtcaagaagtgtatcacggcgttgctttaattcttgaaatgcttcggcagcccggcttcacagtcatggcgatatattacgcgtggatatatgctcaaattgtgttgattatagtgctcttgggatcacttacatccaagtcatatcgctaccgctcctcgtatgtcggggctgtggtctcgtcagtagcgattggtgcctttgccgccataccattccaaaaggcaaatctcttctctcgagccagaaacatgggtccgccgtcaaaccgcatgacgttcgacaagacgattcagtggacctctcatttgatccgccgagccatcttcactctgatcctccctgtcgctggtatcgtgtacactgtggtatctacaggaccaccggtacatgtggttgtcccttctttctttgcggctctgatcgggtttctttcgtgtctcgcaatttcagaatgcaccgggttacttatggaaacatgggactgttcagatcttcaagccggtatgggtggaccaaagtcagataacggtggcaagaaacgtacaaactattcctccttccctcgagtcactgccggatggaatttcatccagggcttaggattcatctttgcggctggttcaactggtctcggtggctctgttactcgccgtctgggccagcaagaaaccacaggcatcgttgcaggtattcttttgattttgagcctcttgcttctcagcatccttgctcgattcaaaaaggtgcagataattcccaactgcagttgttctgaaatggatagatggaccaaggaacgccgagtcagtctaacccatcgcgctgcagcggtggcagccgcaaaatccgctggaaacaaagacctaagcggaattccggaagacgacattggttggaaaccttctgttctgggaaatcctgtcgacagataccgtcgtatcaatatcctggaactgggatcactgacacgttggagcgaaattcgcaaagtgaaccgcctcactgacgagaaccctcacctcaacagacaagcatttgggtttgctcaagaaaggctgcatcatagcgcacaccacagtgcggaaagacttggcaatattgcgcgcatgatgagtaaaaggagtcttctaagcaaatacagtcatgatcaagatgatgaaatcaaaggagtgagcaatgggcacacgccaatgtccacgggagaacatcgtcacaatcaacccgagtcttttccggatgaaacacaaaggctttctccgatagataataaatcttacgctgagacccagagaccaaggtcagcaccagggcttgcccagtcaggtcctgaacgacaaaggctccaagatcagtctcagaaaagtaccactgatgctcggagtcgggcggaagtatcaccttacgcagacgagtctcctacatcatctgatacgcacaggaagaggcatattcggtagggtcagagtgatttcactgacgacgatatcgtcagcgtccactcgcaagaggttcgcggcgtgcgtgagaaagatatcgaagccgaatgtgataagttcgaggatgtcgacctgggcaagaaaaatcatggaccttaaaatctggtactcagtggccacgacaatgaccatatccctagaagataaattagaaagcaga

SEQ ID NO: 17202 - DNA, 1299 bp, Muscodor strobelii
  misc_feature: SGI cDNA ID NO. 565742
  misc_feature: Reduced expression when VOC is produced
  misc_feature: Encodes the peptide sequence at SEQ ID NO 17203
atggaaacgggtgaatctggcactaggcaaagtggttttacctccgccagcagacctgatttgtacagccaagggcagctcgaagcaccacgctccagacatctccatgaagtaccaaatatggccgccgctactctactaaacccagctgcggcttatcgccctcatcaccaaacattctcgccatcgtatcaccacgcgccggcccctccaacagtgtcaagtatgatgtcgtcaggcgagagcaaacggcctccggccgaatctgaaactggcgtgcgacagtcccttccatccatctccgaagttttctcagcagcaaagcccagtccatacgcaccgaccacaccaacaactttggctggttcccagaatcttcctcatccgttcgcgtctaatgggccaccacctcgagccgagcctgtcccagaaccaaggtcaattcccccacatgatgacaagttctttcgatttccagcacgtccagagctcagcccgtcgtctcaaggaccgccgtcctcttattctattcctgagcaacgggataccccaagtaatctaacacgggagcccagcacgaatcacagtaaccctcaacatccgtcctctgtgtcctatccgccgggacaactgcctttatctgcgccccaagttctttcacagcaccgcagctccattccttcttatgatccccatagaccgcctgctcacgccgatgacgaatatgggttgcaccgaaatcactataatacggcattgaaccgccagctccaagcaatgaattacaaagaatcgctccagaaagtagcatggaatgcgcgcacaatatcaaacttcgcagaagcctacgcgaaacttgcctctgagcaacagcatggagagcatccgattccagaacgacttccaaccgaaagggaagtcagcgaggtcatagacgtcacccattggttaaagcagcagttagagactctgcgcgagaccgtagcgacattagcggagaaggctcgagataacaatcgaaattcgggaccaggattcgatggtgaggatgaaatcatgtatggcgacggagtgaagccctcgtacagtcttggggaggttaagaaaaggagaggacgcgctgcaccaccaggccggtgtcacagttgcaaccgtatcgatactccagaatggcgacgtggaccagatggagctaggacattatgcaatgcgtgtggtttgcattacgcgaaattggaacgaaaacgccaaatggaacagcgatcaatccggccgaaagtagtggaggagaggacttga

SEQ ID NO: 17203 - protein, 432 aa, Muscodor strobelii
  misc_feature: SGI Peptide ID NO. 565742
  misc_feature (380)..(415): Pfam Id: PF00320 Pfam Desc: GATA zinc finger
  misc_feature (41)..(432): NCBI GI: 85098161 Blast Desc: NCU01154 [Neurospora crassa OR74A] gi|18376262|emb|CAD21376.1| related to NsdD protein [Neurospora crassa] gi|28922074|gb|EAA31340.1| conserved [Neurospora crassa
  misc_feature (88)..(426): NCBI GI: 261351991 Blast Desc: sexual development transcription factor NsdD [Verticillium albo-atrum VaMs.102]
  misc_feature (41)..(432): NCBI GI: 171692021 Blast Desc: protein product [Podospora anserina] gi|170945959|emb|CAP72760.1| protein product [Podospora anserina]
  misc_feature (1)..(426): NCBI GI: 256731677 Blast Desc: NECHADRAFT_104418 [Nectria haematococca mpVI 77-13-4]
  misc_feature (41)..(426): NCBI GI: 256720564 Blast Desc: NECHADRAFT_88991 [Nectria haematococca mpVI 77-13-4]
  misc_feature (1)..(383): NCBI GI: 116180128 Blast Desc: CHGG_00692 [Chaetomium globosum CBS 148.51] gi|88184989|gb|EAQ92457.1| CHGG_00692 [Chaetomium globosum CBS 148.51]
  misc_feature (1)..(372): NCBI GI: 46136953 Blast Desc: FG09992.1 [Gibberella zeae PH-1]
  misc_feature (301)..(424): NCBI GI: 39972007 Blast Desc: conserved [Magnaporthe grisea 70-15] gi|59802934|gb|AAX07672.1| white collar 2 protein-like protein [Magnaporthe grisea] gi|145019827|gb|EDK04055.1| conserved grisea
  misc_feature (249)..(415): NCBI GI: 242781640 Blast Desc: GATA-type sexual development transcription factor NsdD [Talaromyces stipitatus ATCC 10500] gi|218719988|gb|EED19407.1| GATA-type sexual development transcription factor NsdD stipitatus
  misc_feature (249)..(415): NCBI GI: 212526718 Blast Desc: GATA-type sexual development transcription factor NsdD [Penicillium marneffei ATCC 18224] gi|212526720|ref|XP_002143517.1| GATA-type sexual development
  misc_feature: Useful for introducing or modulating the production of volatile compounds
METGESGTRQSGFTSASRPDLYSQGQLEAPRSRHLHEVPNMAAATLLNPAAAYRPHHQTFSPSYHHAPAPPTVSSMMSSGESKRPPAESETGVRQSLPSISEVFSAAKPSPYAPTTPTTLAGSQNLPHPFASNGPPPRAEPVPEPRSIPPHDDKFFRFPARPELSPSSQGPPSSYSIPEQRDTPSNLTREPSTNHSNPQHPSSVSYPPGQLPLSAPQVLSQHRSSIPSYDPHRPPAHADDEYGLHRNHYNTALNRQLQAMNYKESLQKVAWNARTISNFAEAYAKLASEQQHGEHPIPERLPTEREVSEVIDVTHWLKQQLETLRETVATLAEKARDNNRNSGPGFDGEDEIMYGDGVKPSYSLGEVKKRRGRAAPPGRCHSCNRIDTPEWRRGPDGARTLCNACGLHYAKLERKRQMEQRSIRPKVVEERT

SEQ ID NO: 17204 - DNA, 3195 bp, Muscodor strobelii
  misc_feature: SGI EST ID NO. CUFF.40671.2
  misc_feature: Variant of the nucleotide sequence at SEQ ID NO 17202
gaccaaggccgaaaaattgatagatccagcagaccccatatcttacctaacctacaataatcgcttgtttccatcccacacacacctttacgacgacgacgacgacgagcaacaatctagctatctccttcggtgtggtctcgtcttttgttcctgcatagcggcattctgttttattgctctacacgtactttatatccgtgcaatcataatactagaccgaacaatcggtttattgctaagtcgtcgacgtcaacaagcaattttttgtttaattctcgccccattgctctctcccgtcgtctttcaagatatatatcaggtgtactctgcagattggtgtttgagccgagacacgcggctcttattgatcgccggaacagacaacattgaaggctgcttcccttccatagttctcaaaacttcgaccacgtcattccaccagttcaagttgggtaacactgacgtcttggtcgagcccggaaccattctcgaatctgctcacgataaccgatgaaagcatccgagaggtactaaacacactggggccacattagagtatatgacaacggcgtccagtcccgcgaccattttgagtataatcgcataaagctttttgacgtttccaattcgagaggatcagagggacgaagaagagaatcgtagaaccgctacgaatacactttcaccatctcgacgccaccgcgtgcccaccgttgacgccctccgtaccggcttttaggccattcacgcatcagtctgaggacgcatcggcaattacgttgcatatctttaattcataggcaacacggtgtagacgagagtaacagcgagtcaaggcacgcgagacccattgtgaagttacaactacattctcccactccagcatcgacatcacggctttggtatcgtctacattaattactcaaatgcggcagtgttgagcgattggctggggggtctctttggtaacgcggtcactggctcagcatcgcgctatggaaacgggtgaatctggcactaggcaaagtggttttacctccgccagcagacctgatttgtacagccaagggcagctcgaagcaccacgctccagacatctccatgaagtaccaaatatggccgccgctactctactaaacccagctgcggcttatcgccctcatcaccaaacattctcgccatcgtatcaccacgcgccggcccctccaacagtgtcaagtatgatgtcgtcaggcgagagcaaacggcctccggccgaatctgaaactggcgtgcgacagtcccttccatccatctccgaagttttctcagcagcaaagcccagtccatacgcaccgaccacaccaacaactttggctggttcccagaatcttcctcatccgttcgcgtctaatgggccaccacctcgagccgagcctgtcccagaaccaaggtcaattcccccacatgatgacaagttctttcgatttccagcacgtccagagctcagcccgtcgtctcaaggaccgccgtcctcttattctattcctgagcaacgggataccccaagtaatctaacacgggagcccagcacgaatcacagtaaccctcaacatccgtcctctgtgtcctatccgccgggacaactgcctttatctgcgccccaagttctttcacagcaccgcagctccattccttcttatgatccccatagaccgcctgctcacgccgatgacgaatatgggttgcaccgaaatcactataatacggcattgaaccgccagctccaagcaatgaattacaaagaatcgctccagaaagtagcatggaatgcgcgcacaatatcaaacttcgcagaagcctacgcgaaacttgcctctgagcaacagcatggagagcatccgattccagaacgacttccaaccgaaagggaagtcagcgaggtcatagacgtcacccattggttaaagcagcagttagagactctgcgcgagaccgtagcgacattagcggagaaggctcgagataacaatcgaaattcgggaccaggattcgatggtgaggatgaaatcatgtatggcgacggagtgaagccctcgtacagtcttggggaggttaagaaaaggagaggagtgagtagtttgtggccctgtgagatttcaagttgtgactgaccatgtgaccgtagcgcgctgcaccaccaggccggtgtcacagttgcaaccgtatcgatactccagaatggcgacgtggaccagatggagctaggacattatgcaatgcgtgtggtttgcattacgcgaaattggaacgaaaacgccaaatggaacagcgatcaatccggccgaaagtagtggaggagaggacttgaaaacttggccgatatactacgtttcagcttgcaacgttggaagcctccatcaataaaccgtgaccgacgaatggccgtctagagtcttggtaaaggggcacatttgggagaacggcatctctcataccttaaggccgcttgaatcgcgaccacatataaactatattccctgaaggaagcagaagcattaccggcaagctctgctgtttcctgacgctgatacgctccattgtacatagcctcacacgagcagaggaattgggcacattggtttaatgcatgcataggcgctcggtttgggtggaattctggcacaatcatgactgcgtagggaactggtattctgggaaaggtgtatttgatcacgggacttctgtatgtgagagcattgtgaggatgtgaagagttggaccttgtcttctcgtgttctatgatactaccacatcgagttcgcagattaacacggcagtaatgcatcctagagagtgttggcgggaggtcttgtgcgtttgagggcaatgaaaatgcaagtgttgcaggcatgttttggttcagtccataggtatcacctcccacagacgcaaacattggtcgggcagttacactttcgatgaaaatagacgttgtttcaacacaaagtctatctgccttcatcatttgatcttatagaatgacatgcgctaaagtctagacatgaatattaactcgccgcaatttactttcaacatcttgcagacctatgcatccgaagctcccgcgaactctaatccgctgctgttggatgggctaccttggtaagaccacccgtatgattcgcagtagagaagcggtacatgagtcag

SEQ ID NO: 17205 - DNA, 2094 bp, Muscodor strobelii
  misc_feature: SGI cDNA ID NO. 565743
  misc_feature: Reduced expression when VOC is produced
  misc_feature: Encodes the peptide sequence at SEQ ID NO 17206
atgggactcctagctgtaggtactgcgcttgattggccagatgcacaaaaacatgcggcaaaagtgagagaatggggtattaagcaactgctggagatctggaacaaagcaaagaccaaggaacgggatgcaatgttatggggcgatgaggtggaatacctcgttgtgacatattcgaaggatgaccccaaagtcctcctgtcacttcgccaggctgacatcctgcaagcccttgcggctgatgaggagctgtgcgcgaatggcggaggggtaccagatattcaggatctcaaatcgcagaacgcaaacccgctaccggttttccaccccgaatttggtagattcatgcttgaggcgactcctggtaaaccgtggggcatcgatttcaaggagcttctgggggttgagccggatatgaagacaaggaggagaattgccaaagaacacatgaaaagggaagaatatccgatcaccctcacaacattcccacgcctgggtgttcctggagtcttcacggatccatactaccccccgagcggaccaaagcttcgctctcagttcgtcccggatgaaatcgccaaccctcacatccgctttcccacactagcagctaacattcgatggcggcgtgggaagaaggtgcaggtaaatgtacccgttttccacgatgagaagacacccaacccctggaaggatccgacggtcaattatgaccttcataattggccagaagatgacgatgtgagatcgaaaggggctgcaccggataacttcattcatatggatgccatggcttttggcatgggaagctgctgcttgcaaattacgtttcaagcgaagaatatcgtagaaggcaggaaaatgtatgatcaactcagtccgcttggcccgattatgttagctttgacagcagcgacacccatctacaaaggtttcctagccgacacagatgtgagatggaaccaaatcagcagggctgtcgactgtcgaactgcggaagagctgggagaagagcccctgaagaacaatcgatggcggattcccaagtcccgttatgcctctaattcaacttatattagcacggatccacgccttcgcaaagagtattttgaccccaatctcatcattgatgaatctatcaaatctcagctactcgaaggtggcatggacgaccttctggcaacgcatttcgcccatctttttatccgcgaccccatcgtcatttttaatgaggatatggaaacacttgacatgacgaaagctgaccactttgaaaatctgcaaagcaccaactggcagcatatgaggttcaagccacctccggctggttctgatatcggctggcgcgtggaattccggcccatggagatccagatcacggatttcgagaacgcggcgttctctgtcttcatggtacttataactcgcgccatcctcagctttgatctgaacttttatatcccgatcctgaaagtggatgagaacatggaaacggcgcatgcaaaggacgcagtattggaaaagaaattctatttccgcaagaatcctttccccactcggcctatgaggagcgctggcccctctgcagtgaactctccagctgccagccgtcccgcgactccagtcggacccgttgaagacgagtatgctttgatgacagtgaacgaggtgatcaatgggtcccagtccgagcaacatgacttcccaggcctcattcctatcgtcgagagctatctggactccgtgaacgtagatgttcaaacacgatgcgagctagccacctacttggacctcatccgcaagcgtgcaagcggcgagctttggactgctgcgaagtggatcagacatttcgtggataagcacccagcctataaacatgatagcgtcgttgatgatgagattaccaagagccttattggctctgtgatcgaaattggagagcgtgagcaggtgggcaggggctggaagggcctcgacgtgcctgacttagaggagctccttggacagttcagagggggttgtggtggagagccttcaaggaagcgacggcgatcagaagaatacgggcagcgggcagcgaaaagagatgcatag

SEQ ID NO: 17206 - protein, 697 aa, Muscodor strobelii
  misc_feature: SGI Peptide ID NO. 565743
  misc_feature (259)..(647): Pfam Id: PF03074 Pfam Desc: Glutamate-cysteine ligase
  misc_feature (1)..(679): NCBI GI: 39972003 Blast Desc: MGG_07317 [Magnaporthe grisea 70-15] gi|145019824|gb|EDK04052.1| MGG_07317 [Magnaporthe grisea 70-15]
  misc_feature (1)..(676): NCBI GI: 85103485 Blast Desc: glutamate-cysteine ligase catalytic subunit [Neurospora crassa OR74A] gi|22653732|sp|Q8X0X0.1|GSH1_NEUCR RecName: Full=Glutamate--cysteine ligase; AltName: synthetase; to
  misc_feature (1)..(667): NCBI GI: 256732051 Blast Desc: [Nectria haematococca mpVI 77-13-4]
  misc_feature (5)..(670): NCBI GI: 171691957 Blast Desc: protein product [Podospora anserina] gi|170945927|emb|CAP72728.1| protein product [Podospora anserina]
  misc_feature (1)..(667): NCBI GI: 46136951 Blast Desc: FG09991.1 [Gibberella zeae PH-1]
  misc_feature (5)..(671): NCBI GI: 189207779 Blast Desc: glutamate-cysteine ligase [Pyrenophora tritici-repentis Pt-1C-BFP] gi|187976316|gb|EDU42942.1| glutamate-cysteine ligase [Pyrenophora tritici-repentis
  misc_feature (8)..(671): NCBI GI: 156044528 Blast Desc: SS1G_10368 [Sclerotinia sclerotiorum 1980] gi|154694756|gb|EDN94494.1| SS1G_10368 [Sclerotinia sclerotiorum 1980]
  misc_feature (1)..(658): NCBI GI: 242781645 Blast Desc: glutamate-cysteine ligase Gcs1, [Talaromyces stipitatus ATCC 10500] gi|218719989|gb|EED19408.1| glutamate-cysteine ligase Gcs1, [Talaromyces stipitatus ATCC
  misc_feature (6)..(658): NCBI GI: 212526724 Blast Desc: glutamate-cysteine ligase Gcs1, [Penicillium marneffei ATCC 18224] gi|210072917|gb|EEA27004.1| glutamate-cysteine ligase Gcs1, [Penicillium marneffei ATCC 18224]
  misc_feature (1)..(658): NCBI GI: 154286558 Blast Desc: glutamate--cysteine ligase [Ajellomyces capsulatus NAm1] gi|150407715|gb|EDN03256.1| glutamate--cysteine ligase [Ajellomyces capsulatus NAm1]
  misc_feature (1)..(676): SWISSPROT Homolog: EC 6.3.2.2 Glutamate--cysteine ligase
  misc_feature: Useful for introducing or modulating the production of volatile compounds
MGLLAVGTALDWPDAQKHAAKVREWGIKQLLEIWNKAKTKERDAMLWGDEVEYLVVTYSKDDPKVLLSLRQADILQALAADEELCANGGGVPDIQDLKSQNANPLPVFHPEFGRFMLEATPGKPWGIDFKELLGVEPDMKTRRRIAKEHMKREEYPITLTTFPRLGVPGVFTDPYYPPSGPKLRSQFVPDEIANPHIRFPTLAANIRWRRGKKVQVNVPVFHDEKTPNPWKDPTVNYDLHNWPEDDDVRSKGAAPDNFIHMDAMAFGMGSCCLQITFQAKNIVEGRKMYDQLSPLGPIMLALTAATPIYKGFLADTDVRWNQISRAVDCRTAEELGEEPLKNNRWRIPKSRYASNSTYISTDPRLRKEYFDPNLIIDESIKSQLLEGGMDDLLATHFAHLFIRDPIVIFNEDMETLDMTKADHFENLQSTNWQHMRFKPPPAGSDIGWRVEFRPMEIQITDFENAAFSVFMVLITRAILSFDLNFYIPILKVDENMETAHAKDAVLEKKFYFRKNPFPTRPMRSAGPSAVNSPAASRPATPVGPVEDEYALMTVNEVINGSQSEQHDFPGLIPIVESYLDSVNVDVQTRCELATYLDLIRKRASGELWTAAKWIRHFVDKHPAYKHDSVVDDEITKSLIGSVIEIGEREQVGRGWKGLDVPDLEELLGQFRGGCGGEPSRKRRRSEEYGQRAAKRDA

SEQ ID NO: 17207 - DNA, 3216 bp, Muscodor strobelii
  misc_feature: SGI EST ID NO. CUFF.40533.5
  misc_feature: Variant of the nucleotide sequence at SEQ ID NO 17205
cagaaatgccccatgttactgccgccagactggcaatgaaaagcctcgaatcgtctttgcgaacccttactcgtgcctgtaggcgcaaatatctctcggaggcaccattatcgactattgcatgtttttgatcccaccgttttcaatcattgcgtcgagcgaatagcaatccgaaggcagaaaacgcaatattgcgtctatatcaagtgccgtcgaaagcacatctctggtcagccctagttcatatataaaggagcttccctttgcgaccactcgcacgcgcgaaagattgcgtgcttttgtccgtcgcctcaccaccctctttcagaaccctgtcgagctcctgattcgcggtataatgcccatgggaccttgaatctgtcgtgggggatctataataatccttctgctaagccgacgttcctggctctgtcgcgagcgaaaggtcaacacgctagatgatccgaattgtggcgctgtctacctcaataccttaacatcacctccaaacctgcgggggaagacactgaacagcatctagacctagaaagtgaacagaaagtccagaccaagacgcaacataaacccgacgagtgagcaccattggacattatcaatacacagaccctgagtggctggatgctaccattgattcattagccctgttcacctgttggccaacaaaactgccgccttttgtatcttgattgcccctttgggatagccaatattttgaacgactccgagccacatcacgcaattctctccgcggattcagtagcggccgcatttgttaccatttgagcagacgaccgaatacttgcttccacaatgggactcctagctgtaggtactgcgcttgattggccagatgcacaaaaacatgcggcaaaagtgagagaatggggtattaagcaactgctggagatctggaacaaagcaaagaccaaggaacgggatgcaatgttatggggcgatgaggtggaatacctcgttgtgacatattcgaaggatgaccccaaagtcctcctgtcacttcgccaggctgacatcctgcaagcccttgcggctgatgaggagctgtgcgcgaatggcggaggggtaccagatattcaggatctcaaatcgcagaacgcaaacccgctaccggttttccaccccgaatttggtagattcatgcttgaggcgactcctggtaaaccgtggggcatcgatttcaaggagcttctgggggttgagccggatatgaagacaaggaggagaattgccaaagaacacatgaaaagggaagaatatccgatcaccctcacaacattcccacgcctgggtgttcctggagtcttcacggatccatactaccccccgagcggaccaaagcttcgctctcagttcgtcccggatgaaatcgccaaccctcacatccgctttcccacactagcagctaacattcgatggcggcgtgggaagaaggtgcaggtaaatgtacccgttttccacgatgagaagacacccaacccctggaaggatccgacggtcaattatgaccttcataattggccagaagatgacgatgtgagatcgaaaggggctgcaccggataacttcattcatatggatgccatggcttttggcatgggaagctgctgcttgcaaattacgtttcaagcgaagaatatcgtagaaggcaggaaaatgtatgatcaactcagtccgcttggcccgattatgttagctttgacagcagcgacacccatctacaaaggtttcctagccgacacagatgtgagatggaaccaaatcagcagggctgtcgactgtcgaactgcggaagagctgggagaagagcccctgaagaacaatcgatggcggattcccaagtcccgttatgcctctaattcaacttatattagcacggatccacgccttcgcaaagagtattttgaccccaatctcatcattgatgaatctatcaaatctcagctactcgaaggtggcatggacgaccttctggcaacgcatttcgcccatctttttatccgcgaccccatcgtcatttttaatgaggatatggaaacacttgacatgacgaaagctgaccactttgaaaatctgcaaagcaccaactggcagcatatgaggttcaagccacctccggctggttctgatatcggctggcgcgtggaattccggcccatggagatccagatcacggatttcgagaacgcggcgttctctgtcttcatggtacttataactcgcgccatcctcagctttgatctgaacttttatatcccgatcctgaaagtggatgagaacatggaaacggcgcatgcaaaggacgcagtattggaaaagaaattctatttccgcaagaatcctttccccactcggcctatgaggagcgctggcccctctgcagtgaactctccagctgccagccgtcccgcgactccagtcggacccgttgaagacgagtatgctttgatgacagtgaacgaggtgatcaatgggtcccagtccgagcaacatgacttcccaggcctcattcctatcgtcgagagctatctggactccgtgaacgtagatgttcaaacacgatgcgagctagccacctacttggacctcatccgcaagcgtgcaagcggcgagctttggactgctgcgaagtggatcagacatttcgtggataagcacccagcctataaacatgatagcgtcgttgatgatgagattaccaagagccttattggctctgtgatcgaaattggagagcgtgagcaggtgggcaggggctggaagggcctcgacgtgcctgacttagaggagctccttggacagttcagagggggttgtggtggagagccttcaaggaagcgacggcgatcagaagaatacgggcagcgggcagcgaaaagagatgcatagaggccgtggagttcggtcaaacttcagtgcttggcgacttcaggtggcatatgggagtttgggaaactgcgttctttttggtacgcctcttaacatttgaaggctactgcttatagatggtgcgttacaacagatactctatagtagagaatccatcctcgtacgaaatatttcatcatactacaccttaagctgccagaaagttagaactctaatgtgaggttagctcctgacgactcacccttatttacaggaggatgcggattggccctcgatgctacataaacgagg

SEQ ID NO: 17208 - DNA, 1587 bp, Muscodor strobelii
  misc_feature: SGI cDNA ID NO. 565744
  misc_feature: Encodes the peptide sequence at SEQ ID NO 17209
atgacgtcccttcgtagaagctcgtcggcgggtgagggccacttgaagcctcgactttcgaggctcacgatggtggccctcacctttgctatcctgaatacgtggatcgcacttgcagggtcgatcggacttgtattaccctcaggcggatctgtttcgttcctctatggtttcattttcacagttctgtgtaacttggcgttggcggcgagtctcggagagatggcagcaatttggccaaccgcgggaggccagtatcactttgtgtatgcgctgtgtaccgacaagtggaagaaatcgatgagcttttgggtcggctggacgaatattgcgggttggcttacactcgtaacgacggagggattcttttgtgctcagttcatccaggcagctgctaatcttgcttccaatggcacatacgagatcaggccgtgggcgacatacttaatcttccttgctattctaactttcaccactggtgcgaatatctggggaaataggattttgggtcgttggaatgatgctgcgctgtattggtccttgtttgccgtcgtcattatcagtattgttcttctggccacatcagataagaacgacgcaaaattcgtcttcgccgatttcgagaactctaccggttggtcagatggcttggcttggattctgggattgctgcagtctgcgctctcgctcatcggtttcgatgctgcacttcatatgacggaggagatgccgagtccggcggtcgatgctccgagagcaattctatacgctgttggagtcggtggcgtaaccggaaccgtattcatcttggttatcttgttttgtatcactgatcccgaaacggtcctaagtacgtcaacgaatatgccaatcgccgaacttctgctccaaggaaccggaagccgagcagcagcggcgatattgacccttgctctcgctatctgcttcgtcaatggcacgaatgggtgcatcacgagcacgagccgtttgttgtacgcgatggcaagagacaagggattggtttaccacgactattttgcacacattaatccaggcctcgacgttccagtccgcacgatcatgttgacatttgtcttcaacgttctcttcggacttttgtatctcggtccatccgtagccttcggcgcgtacgtatcgagctgtacgatattcctcaatgtttcttacgcgtaccccgtcatcgtcttgctcatccgcggccgcaaggttttggaggaatttcagtcggagcacacgttcttcgcacttggcaagtggggatacttcctaaactacgttgcggctattttcgtggtagttacatctgtcttcttcacgtttccagctggactcccggtcgatagcagcaacatgaactacgtgacagcagtcattggcatattcttgatttgggtcagcacgtactggatcgtttatggcaagacttttgaaggaccgaaattcgatattatcatgggacatcgccaacccgtcgacgaagagatgcttcatgacgatgcggaaaattctgggagcggtcttgatgagaaagtcgctattgcacctgacgagcagggcaaaaaatag

SEQ ID NO: 17209 - protein, 528 aa, Muscodor strobelii
  misc_feature: SGI Peptide ID NO. 565744
  misc_feature (25)..(492): Pfam Id: PF00324 Pfam Desc: Amino acid permease
  misc_feature (183)..(390): Pfam Id: PF00324 Pfam Desc: Amino acid permease
  misc_feature (8)..(501): NCBI GI: 256732360 Blast Desc: NECHADRAFT_80856 [Nectria haematococca mpVI 77-13-4]
  misc_feature (10)..(517): NCBI GI: 261358323 Blast Desc: choline transport protein [Verticillium albo-atrum VaMs.102]
  misc_feature (8)..(486): NCBI GI: 256727283 Blast Desc: NECHADRAFT_33652 [Nectria haematococca mpVI 77-13-4]
  misc_feature (7)..(520): NCBI GI: 46120464 Blast Desc: FG04879.1 [Gibberella zeae PH-1]
  misc_feature (7)..(510): NCBI GI: 46110216 Blast Desc: FG01990.1 [Gibberella zeae PH-1]
  misc_feature (7)..(517): NCBI GI: 46115292 Blast Desc: FG03488.1 [Gibberella zeae PH-1]
  misc_feature (22)..(523): NCBI GI: 134111693 Blast Desc: CNBE0980 [Cryptococcus neoformans var. neoformans B-3501A] gi|50258041|gb|EAL20735.1| CNBE0980 [Cryptococcus neoformans var. neoformans B-3501A]
  misc_feature (22)..(523): NCBI GI: 58267378 Blast Desc: choline transporter [Cryptococcus neoformans var. neoformans JEC21] gi|57227079|gb|AAW43538.1| choline transporter, [Cryptococcus neoformans var. neoformans JEC21]
  misc_feature (12)..(506): NCBI GI: 255944771 Blast Desc: Pc20g06240 [Penicillium chrysogenum Wisconsin 54-1255] gi|211587888|emb|CAP85953.1| Pc20g06240 [Penicillium chrysogenum Wisconsin 54-1255]
  misc_feature (12)..(515): NCBI GI: 189208282 Blast Desc: GABA permease [Pyrenophora tritici-repentis Pt-1C-BFP] gi|187976567|gb|EDU43193.1| GABA permease [Pyrenophora tritici-repentis Pt-1C-BFP]
MTSLRRSSSAGEGHLKPRLSRLTMVALTFAILNTWIALAGSIGLVLPSGGSVSFLYGFIFTVLCNLALAASLGEMAAIWPTAGGQYHFVYALCTDKWKKSMSFWVGWTNIAGWLTLVTTEGFFCAQFIQAAANLASNGTYEIRPWATYLIFLAILTFTTGANIWGNRILGRWNDAALYWSLFAVVIISIVLLATSDKNDAKFVFADFENSTGWSDGLAWILGLLQSALSLIGFDAALHMTEEMPSPAVDAPRAILYAVGVGGVTGTVFILVILFCITDPETVLSTSTNMPIAELLLQGTGSRAAAAILTLALAICFVNGTNGCITSTSRLLYAMARDKGLVYHDYFAHINPGLDVPVRTIMLTFVFNVLFGLLYLGPSVAFGAYVSSCTIFLNVSYAYPVIVLLIRGRKVLEEFQSEHTFFALGKWGYFLNYVAAIFVVVTSVFFTFPAGLPVDSSNMNYVTAVIGIFLIWVSTYWIVYGKTFEGPKFDIIMGHRQPVDEEMLHDDAENSGSGLDEKVAIAPDEQGKK

SEQ ID NO: 17210 - DNA, 8213 bp, Muscodor strobelii
  misc_feature: SGI EST ID NO. CUFF.40641.4
  misc_feature: Variant of the nucleotide sequence at SEQ ID NO 17208
agaatggttggtgttctaccgattgcgccaatggtataattgtattgtcccggaggacggaaaggtggttcgatacatttggttcatctcctcccgtatcgacgtatccagctaagacacttgagacactctcaactgtcccatacaaacctattttgatgtatgcatgtggtcatgaatataattcaaccagtcctagcatttgggagcttcggtgtttgacgatctttcaacggtgtctgtgaggaaggccgtttatcagaatagcacgttggcgtggtgtttatgaagcacaagtatgtgttccgctgtacttgtagacggcactacctagagacgagctacctccaggaggaagttaagtttgatagacagataagcagacgaggtgaattgtacaagtatgcgcggcttggctggcaaataccaaagatccatctggcttcacacttcagctcatgcatgaataggtaataatctcaccgttctcgtcacgtccaagcatacaataccaccgcgaatccttgtaatgtaggcccctgtctacatctttgcatacgctacaatttcgatacgttcgtaaggtaggtatgccgcgatgacgacgaacaacatcccgagtttgttgtcgttccccgatatttggggtagcagttgggacgagttcaaacaacgaagctggctgactgtctgctgcccaatatcttcaccggtgccgccatcgtctatctgatgagatcgatattgtctggccagatggtagccaacaggcagtcaccgcgggttacaccaccatctctatccaatccagacgagaaccagacttaggtgcctaccctacctcttatttaaaatctcactccattacgatcgtcgttgctgagcgcagccttcgagctgaagcagtcatgttcgagatcgtgcagagatttcccatcgccttttcatggtaacaatcgccggggggtgacgtagagagccaaggtgatatgctcgccgtcagcagtaagtgcattctgaacctggtcaacggcgactaccatcccttgagacttgaacaaatgagagtcacacaaatgccgacgaaatgcgaacatacgataagtgtacaagtgcggttctgctgtcgcatcgacgccggcctggacgctcggcgatattgagggtgtgcatgtgtgctcagtgctctatttgtgcttcgtgtctgtcgcttgtctctggcgcattaggaacttttgccatcccccacgttgattccgcggccggagctgtcgcatgggttgttggcgcacatttggggacatcgcatggacgcgggtggcctgtcgggatttgcttcattcgcgacagagtcgcaggcataccaacgtcccaagagcaaccccaaaccacccccggctcgcctggccccattggccggggataatagaggacctcctctttctccagctggaggcgccagtggacccgcgttagaccttctcttcctctcttcaattcgacataatcatatattgatcgtagtgaggcataggcagaaactgcccatgctgcatatttgttgtcattgcccttttggccaatctagcctacaggctgttgcaatgaagtgtatcatggcagcttccagaaccggctgaccacagccaaagatccgagtcgctgttcgtccgtccccaagattcatctagataaaaataacacccggccccgatctctccttcggtgggggcttctcctcagccttgtactcatcaatccaatcctatcactaaaaggatgcaaggctcaagtacctgatcggagcgatcctatttagaagcttaccgtgccatttgttcaaccagagtcatggaaaccgtgagacgaacgcaagggtgttggacctgcaaaaagcggaaaatcggctgcgatcgcggttatccagcttgcaacaactgcctgcgcaccggcagagaatgtctgggctatggaattcggcttgcttggccagatcagccagacggccgccgtcgagggagccgtgctcctgaccaagtcgttcattacatcaacaaggcccctatcaactacggcaaacaattcttaaatatgacctttgccgacctgatgcatgctactaagggatcgatggtacttgatgaaatacttatccacagccaaatgcgaccagcacgcagcatctctctcatcccagagtttcgtgaacgcgagtctcatcttatgagttattatagcaacaggctctcgcaaatgatatcgactatcgatgtgaataacggtttccgagatgacttgctccctatggctctatcgagttccggaaaggcttcccatggcctccgaaacgccatccttgccgttgccgcattccatgcctggggagccgagcaggcgttttcatataaagctgaagcgattcggtctctctcgtcctccctatctaccgaatccttcggtactacagagatccagttagcaacctcgatgatgctctgcgtgtataacgtatttgatgaaacggaaggcaactggagtttgcatctgtacggcgcccaaaaaattcttcatcaacttgcgagtatccatggaggacaccttgcctttagtttcctttacacttggttcctatatcacgagattctcggcggtttcagtcaaccactcaggcaatggcctcatggtccggcatcgctcagactgctctatgataccacttttgatagatcaaagatcattggatcactgggctgttctgtcgaggttatggaaatcatcagtcgtgttaatacttggcgtgccaatgacaatcgctttgatccttcgtcattgtcacatcaagagaagtctgagagagccgaggaactcagtcacttagaaaggagtctcgccactttaaaacaaacccttgatccggcatatgaggctgaccttactccgtcggagcgcacgagaacaatggcgacagcagaactgtatcggatcgccgctttcctctatctccagagaattggaaaccccgagccctctccagaaatgagatcaaattatcttaaatctgcactggaaattataaatgttttggacgtctgcacaagcccgtggccattgttcgtcattgcttgcgagacagagaatgatgatcaacgcatcgacatattgaaaaccctggacctaatggacgatagaagacatattggcaatgtctttgtattgagacagattattgagtccttctggaagcaacaagatatccacgcagacactggtcgcgctgggagtttgagatggtgggatacactggcactcaacctgtccacaccttggttcatctgagatcgattccttgatccacctatttcggcatgtcggttacatgcttggccgctgtaggattgaccaacaagctgagcagatcaggtcgagcgtagtggccgacaacgtcaatgaacgctttgggatagtcgatatcgcggaggtcgacatcagctttcaggatgccctcttcaccatcaccgatcggttcgcacaatggttttccatctggaccaaatatcattgagaatccaccccccggctagaaacatgagattgttcttctccaagtttttctccgtcagtatttgcgacgcaattaagacgaaacactgtccctcaatggccatgaactgcgaggcccgatagcttgcctcccctgtctcatggtagagccaagcaagctttttggggtccggcatttcgaactcggccggccagctacctaggtgtcaacagtcgaaaacggccgtcgttagtactgattctcaccttgcaacatggatctgcactccttgtgagtactcatagtatcgaagcaacggctggaggtgctcccagcaattcagcccgccgatcttgccgaacttcgagggcacaacacattttagagactccgcctgtccctcgccccaaatggttcgctcaatgtgggtaggcttgatcttgcgacgatggtggactatttcaccctcgggcgatatgaatgattggcccatatagaggctccctccgtctcgttcactatatcccaacacaacgaacattcctgcttctttgactgcatcttggatacgacgcatttgcggggagtcgcgcgacattgagttcttcatgtagtcgtgaatgatgtgcgtgttctcgatcacgctcgacgtccacatagacctagacgagaggcaagtcgacattagctttggtcgactatatatacaatcgcccgacacttaccacgggtagccaggaatccagacttcaggaaaccccagaacttccacgccatctgaagcagcgtcttgaatgagcgagatagtcttgtcaacactaccgtcgagatcaagccacactggctctgcctggacagctccgacacgaaccatgttgatagtatctgagcgaatgtgtgaaggtggcggggtaatgataaagccttgaacagctagatctagttcttttcaaagagaccagatttggggaaatcttgggtcgcaatccttctcatttatacagtagcacgcatgacctggcacccttccggcatccacccgaactgtagtgtctatgccttcgatctaagccccccttccatctaatagctacagtcgaatgttatttacctaatagctccactgtctttgaatcctatgcagtgattcacctagctcagggtcatgcaccccatagtcacggaccaggttgtcggtttcctggtgcatgatgcagtagcttttcactgtcgaaagaccccatggctcggattgagctatacgaagcgggtccaaagatcgcagagtccttcccacgtcggagaattaaagagctatctggagctcgtaacccgggtttacttgtgcttccccgtccgccacgtgggtcttaaacacaccgagagaaagtagatcaccggaatgttaaccgggatttgaaacgtccacctcatctctgttcactcaatgtcatatttctcagcggccgcttgactaatatgtgtatggctccttatcacctaccccgcagtctgtgctcaatgcttctgcagcagctacatatgaggatcaaaccccttgacttttctggaggcgagggcaagacatccacctcttgaggtgcgttgtgctttgtgctcgccataccttccattctcgtgtaatttcgcatacactatccatactcggtatcatcggaaaactatcaatcagtttgatacagctccttgcatacgccagagtcgagaacgcgtaacatatcattctagctactccaaagtgatttgacccgcactttgcacgacagcaggtggggtgagaagggaggttggtgatacgattaacctattctattgttgtttctatctccctcacttaaacttctttctcgacagtttctacggctcggtaattgtaacttgcgaccatcggattgtttatcgttgtgttccgtagtcttacgcgtacttacggttgtttgtttagtggaggattgaaaagtgccggtcaactaggacaggcatgccataattgaggagataaatcaaaagtataggactttgacggatatggaccctgcaattatacctacctattacccatatcatatcttgataagagctgcgtctaccatagaaaacctagccgccgcatgcatgtcattcgcatcatccaacgggaagaagcggtgaaatgaatacaaccaatacaaatcgtgagagcaccaagccaatgttgcaccttcgattgaaaacaaagttcaatttgatgacccatggtattacagccgcactagcctacgccctgttgatctcgacctttcgtgcgaagcgtctgtgctcccgtacccattgactacagtagaagcgtctctcttgagattgatgataaggcaggatccccaattacttaatagggatgtttgataacaaccatgtcttggcgggaatgcaattgcaatctcaaggtagctttcatcgcccaattcatataaccttaggtaagtcacatgattacgtgagtttgcgcatgcagtgaggttgcgtgtgctgcatatctgatgtaattgaggtaaatatctggcccgctactttgcgtatcatttaaagagtctcgagccgcctccgccgcggacgacaccgttctcttgttcgacttcgagtgcgatctttcagcttgtgttacctaacgccgtcttacctacgtgatcttgccttcctacacttttggcgatcggcgatgacgtcccttcgtagaagctcgtcggcgggtgagggccacttgaagcctcgactttcgaggctcacggtatgggaattcttgtcatgactccacaactttctcttccggctgctgaactcgatttctagatggtggccctcacctttgctatcctgaatacgtggatcgcacttgcagggtcgatcggacttgtattaccctcaggcggatctgtttcgttcctctatggtttcattttcacagttctgtgtaacttggcgttggcggcgagtctcggagagatggcagcaatttggccaaccgcgggaggccagtatcactttgtgtatgcgctgtgtaccgacaagtggaagaaatcgatgagcttttgggtcggctggacgaatattgcgggttggcttacactcgtaacgacggagggattcttttgtgctcagttcatccaggcagctgctaatcttgcttccaatggcacatacgagatcaggccgtgggcgacatacttaatcttccttgctattctaactttcaccactggtgcgaatatctggggaaataggattttgggtcgttggaatgatgctgcgctgtattggtccttgtttgccgtcgtcattatcagtattgttcttctggccacatcagataagaacgacgcaaaattcgtcttcgccgatttcgagaactctaccggttggtcagatggcttggcttggattctgggattgctgcagtctgcgctctcgctcatcggtttcgatgctgcacttcatatgacggaggagatgccgagtccggcggtcgatgctccgagagcaattctatacgctgttggagtcggtggcgtaaccggaaccgtattcatcttggttatcttgttttgtatcactgatcccgaaacggtcctaagtacgtcaacgaatatgccaatcgccgaacttctgctccaaggaaccggaagccgagcagcagcggcgatattgacccttgctctcgctatctgcttcgtcaatggcacgaatgggtgcatcacgagcacgagccgtttgttgtacgcgatggcaagagacaagggattggtttaccacgactattttgcacacattaatccaggcctcgacgttccagtccgcacgatcatgttgacatttgtcttcaacgttctcttcggacttttgtatctcggtccatccgtagccttcggcgcgtacgtatcgagctgtacgatattcctcaatgtttcttacgcgtaccccgtcatcgtcttgctcatccgcggccgcaaggttttggaggaatttcagtcggagcacacgttcttcgcacttggcaagtggggatacttcctaaactacgttgcggctattttcgtggtagttacatctgtcttcttcacgtttccagctggactcccggtcgatagcagcaacatgaactacgtgacagcagtcattggcatattcttgatttgggtcagcacgtactggatcgtttatggcaagacttttgaaggaccgaaattcgatattatcatgggacatcgccaacccgtcgacgaagagatgcttcatgacgatgcggaaaattctgggagcggtcttgatgagaaagtcgctattgcacctgacgagcagggcaaaaaatagcggaagagatacaaatgtccattagatagtatcggagttatgttcatttttttgggccatagataaagggggtcgtctctcagttcatcctgtaatttattcaaaggaaactaaagtgcaaagttaatacgtcagatgagttacgggatggtactaaatgaacttgaaaagtttgaagataatatcataccacagaataatgtgaattcataccccccattttagaatttctgcatctgctccgtgtggcgtacgagggttcgtctgcaccgccacagtgcactatgggctaccaagggagccg

SEQ ID NO: 17211 - DNA, 204 bp, Muscodor strobelii
  misc_feature: SGI cDNA ID NO. 565745
  misc_feature: Elevated expression when VOC is produced
  misc_feature: Encodes the peptide sequence at SEQ ID NO 17212
atgatatttggtccagatggaaaaccattgtgcgaaccgatcggtgatggtgaagagggcatcctgaaagctgatgtcgacctccgcgatatcgactatcccaaagcgttcattgacgttgtcggccactacgctcgacctgatctgctcagcttgttggtcaatcctacagcggccaagcatgtaaccgacatgccgaaatag

SEQ ID NO: 17212 - protein, 67 aa, Muscodor strobelii
  misc_feature: SGI Peptide ID NO. 565745
  misc_feature (1)..(67): NCBI GI: 212529588 Blast Desc: nitrilase, [Penicillium marneffei ATCC 18224] gi|210074349|gb|EEA28436.1| nitrilase, [Penicillium marneffei ATCC 18224]
  misc_feature (1)..(67): NCBI GI: 242762750 Blast Desc: nitrilase, [Talaromyces stipitatus ATCC 10500] gi|218723637|gb|EED23054.1| nitrilase, [Talaromyces stipitatus ATCC 10500]
  misc_feature (1)..(65): NCBI GI: 159123913 Blast Desc: nitrilase, [Aspergillus fumigatus A1163]
  misc_feature (1)..(65): NCBI GI: 70983001 Blast Desc: nitrilase [Aspergillus fumigatus Af293] gi|66844653|gb|EAL84990.1| nitrilase, [Aspergillus fumigatus Af293]
  misc_feature (1)..(65): NCBI GI: 119483824 Blast Desc: nitrilase, [Neosartorya fischeri NRRL 181] gi|119409971|gb|EAW19918.1| nitrilase, [Neosartorya fischeri NRRL 181]
  misc_feature (2)..(64): NCBI GI: 145254465 Blast Desc: An18g01740 [Aspergillus niger] gi|134084214|emb|CAK47246.1| protein product [Aspergillus niger]
  misc_feature (1)..(62): NCBI GI: 169780804 Blast Desc: [Aspergillus oryzae RIB40] gi|238504998|ref|XP_002383728.1| nitrilase, [Aspergillus flavus NRRL3357] gi|83773606|dbj|BAE63733.1| protein product oryzae]
  misc_feature (1)..(55): NCBI GI: 58613940 Blast Desc: NitA [Pseudomonas fluorescens]
  misc_feature (1)..(59): NCBI GI: 256723781 Blast Desc: NECHADRAFT_92236 [Nectria haematococca mpVI 77-13-4]
  misc_feature (2)..(64): NCBI GI: 238505344 Blast Desc: aliphatic nitrilase, [Aspergillus flavus NRRL3357] gi|220690015|gb|EED46365.1| aliphatic nitrilase, [Aspergillus flavus NRRL3357]
  misc_feature (2)..(55): SWISSPROT Homolog: EC 3.5.5.7 Aliphatic nitrilase
  misc_feature: Useful for introducing or modulating the production of volatile compounds
MIFGPDGKPLCEPIGDGEEGILKADVDLRDIDYPKAFIDVVGHYARPDLLSLLVNPTAAKHVTDMPK

SEQ ID NO: 17213 - DNA, 6597 bp, Muscodor strobelii
  misc_feature: SGI EST ID NO. CUFF.40640.0
  misc_feature: Variant of the nucleotide sequence at SEQ ID NO 17211
cggctcccttggtagcccatagtgcactgtggcggtgcagacgaaccctcgtacgccacacggagcagatgcagaaattctaaaatggggggtatgaattcacattattctgtggtatgatattatcttcaaacttttcaagttcatttagtaccatcccgtaactcatctgacgtattaactttgcactttagtttcctttgaataaattacaggatgaactgagagacgaccccctttatctatggcccaaaaaaatgaacataactccgatactatctaatggacatttgtatctcttccgctattttttgccctgctcgtcaggtgcaatagcgactttctcatcaagaccgctcccagaattttccgcatcgtcatgaagcatctcttcgtcgacgggttggcgatgtcccatgataatatcgaatttctgcgaatattagtcttatccatagcgacattcgtcattgaatcacaggtgccagtcagcatcgaacttaccggtccttcaaaagtcttgccataaacgatccagtacgtgctgacccaaatcaagaatatgccaatgactgctgtcacgtagttcatgttgctgctatcgaccgggagtccagctggaaacgtgaagaagacagatgtaactaccacgaaaatagccgcaacgtagtttaggaagtatccccacttgccaagtgcgaagaacgtgtgctccgactgaaattcctccaaaaccttgcggccgcggatgagcaagacgatgacggggtacgcgtaagaaacattgaggaatatcgtacagctcgatacgtacgcgccgaaggctacggatggaccgagatacaaaagtccgaagagaacgttgaagacaaatgtcaacatgatcgtgcggactggaacgtcgaggcctggattaatgtgtgcaaaactaaacgccagggaagtcaatatgcgtattccctattaaatgatacggatggcaggtgaaaactgactagtcgtggtaaaccaatcccttgtctcttgccatcgcgtacaacaaacggctcgtgctcgtgatgcacccattcgtgccattgacgaagcagatagcgagagcaagggtcaatatcgccgctgctgctcggcttccggttccttggagcagaagttcggcgattggcatattcgttgacgtacttaggaccgtttcgggatcagtgatacaaaacaagataaccaagatgaatacggttccgctgatatcgcctgtcagtgatttctcgcacccatcattcggatctgtcactcacgttacgccaccgactccaacagcgtatagaattgctctcggagcatcgaccgccggactcggcatctcctccgtcatatgaagtgcagcatcgaaaccgatgagcgagagcgcagactgcagcaatcccagaatccaagccaagccatctgaccaaccggtagagttctcgaaatcggcgaagacgaattttgcgtcgttcttatctgatgtggccagaagaacaatactgataatgacgacggcaaacaaggaccaatacagcgcagcatcattccaacgacccaaaatcctatttccccagatattcgcaccagtggtgaaagttagaatagcaaggaagattaagtatgtcgcccacggcctgatctcgtatgtgccattggaagcaagattagcagctgcctggatgaactgagctatgtggcacgtcagacagtccttttaatgttaaaaatctgccttcgatctgggtgctcaccacaaaagaatccctccgtcgttacgagtgtaagccaacccgcaatattcgtccagccgacccaaaagctcatcgatttcttccacttgtcggtacacagcgcatacacaaagtgatactggcctcccgcggttggccaaattgctgccatctctccgagactcgccgccaacgccaagttacacagaactgtgaaaatgaaaccatagaggaacgaaacagatccgcctgagggtaatacaagtccgatcgaccctgcaagtgcgatccacgtactacgcaaatgtatcagctgtatatttcttacggcctatagagatagcaaacaaggagctaaaactccgtggacttacttcaggatagcaaaggtgagggccaccatctagaaatcgagttcagcagccggaagagaaagttgtggagtcatgacaagaattcccataccgtgagcctcgaaagtcgaggcttcaagtggccctcacccgccgacgagcttctacgaagggacgtcatcgccgatcgccaaaagtgtaggaaggcaagatcacgtaggtaagacggcgttaggtaacacaagctgaaagatcgcactcgaagtcgaacaagagaacggtgtcgtccgcggcggaggcggctcgagactctttaaatgatacgcaaagtagcgggccagatatttacctcaattacatcagatatgcagcacacgcaacctcactgcatgcgcaaactcacgtaatcatgtgacttacctaaggttatatgaattgggcgatgaaagctaccttgagattgcaattgcattcccgccaagacatggttgttatcaaacatccctattaagtaattggggatcctgccttatcatcaatctcaagagagacgcttctactgtagtcaatgggtacgggagcacagacgcttcgcacgaaaggtcgagatcaacagggcgtaggctagtgcggctgtaataccatgggtcatcaaattgaactttgttttcaatcgaaggtgcaacattggcttggtgctctcacgatttgtattggttgtattcatttcaccgcttcttcccgttggatgatgcgaatgacatgcatgcggcggctaggttttctatggtagacgcagctcttatcaagatatgatatgggtaataggtaggtataattgcagggtccatatccgtcaaagtcctatacttttgatttatctcctcaattatggcatgcctgtcctagttgaccggcacttttcaatcctccactaaacaaacaaccgtaagtacgcgtaagactacggaacacaacgataaacaatccgatggtcgcaagttacaattaccgagccgtagaaactgtcgagaaagaagtttaagtgagggagatagaaacaacaatagaataggttaatcgtatcaccaacctcccttctcaccccacctgctgtcgtgcaaagtgcgggtcaaatcactttggagtagctagaatgatatgttacgcgttctcgactctggcgtatgcaaggagctgtatcaaactgattgatagttttccgatgataccgagtatggatagtgtatgcgaaattacacgagaatggaaggtatggcgagcacaaagcacaacgcacctcaagaggtggatgtcttgccctcgcctccagaaaagtcaaggggtttgatcctcatatgtagctgctgcagaagcattgagcacagactgcggggtaggtgataaggagccatacacatattagtcaagcggccgctgagaaatatgacattgagtgaacagagatgaggtggacgtttcaaatcccggttaacattccggtgatctactttctctcggtgtgtttaagacccacgtggcggacggggaagcacaagtaaacccgggttacgagctccagatagctctttaattctccgacgtgggaaggactctgcgatctttggacccgcttcgtatagctcaatccgagccatggggtctttcgacagtgaaaagctactgcatcatgcaccaggaaaccgacaacctggtccgtgactatggggtgcatgaccctgagctaggtgaatcactgcataggattcaaagacagtggagctattaggtaaataacattcgactgtagctattagatggaaggggggcttagatcgaaggcatagacactacagttcgggtggatgccggaagggtgccaggtcatgcgtgctactgtataaatgagaaggattgcgacccaagatttccccaaatctggtctctttgaaaagaactagatctagctgttcaaggctttatcattaccccgccaccttcacacattcgctcagatactatcaacatggttcgtgtcggagctgtccaggcagagccagtgtggcttgatctcgacggtagtgttgacaagactatctcgctcattcaagacgctgcttcagatggcgtggaagttctggggtttcctgaagtctggattcctggctacccgtggtaagtgtcgggcgattgtatatatagtcgaccaaagctaatgtcgacttgcctctcgtctaggtctatgtggacgtcgagcgtgatcgagaacacgcacatcattcacgactacatgaagaactcaatgtcgcgcgactccccgcaaatgcgtcgtatccaagatgcagtcaaagaagcaggaatgttcgttgtgttgggatatagtgaacgagacggagggagcctctatatgggccaatcattcatatcgcccgagggtgaaatagtccaccatcgtcgcaagatcaagcctacccacattgagcgaaccatttggggcgagggacaggcggagtctctaaaatgtgttgtgccctcgaagttcggcaagatcggcgggctgaattgctgggagcacctccagccgttgcttcgatactatgagtactcacaaggagtgcagatccatgttgcaaggtgagaatcagtactaacgacggccgttttcgactgttgacacctaggtagctggccggccgagttcgaaatgccggaccccaaaaagcttgcttggctctaccatgagacaggggaggcaagctatcgggcctcgcagttcatggccattgagggacagtgtttcgtcttaattgcgtcgcaaatactgacggagaaaaacttggagaagaacaatctcactggaaatcctgttactaaaaccgtaaggactgcttcctattcccacgaacacgaaattgaataactgactgtttctagccggggggtggattctcaatgatatttggtccagatggaaaaccattgtgcgaaccgatcggtgatggtgaagagggcatcctgaaagctgatgtcgacctccgcgatatcgactatcccaaagcgttcattgacgttgtcggccactacgctcgacctgatctgctcagcttgttggtcaatcctacagcggccaagcatgtaaccgacatgccgaaataggtggatcaaggaatcgatctcagatgaaccaaggtgtggacaggttgagtgccagtgtatcccaccatctcaaactcccagcgcgaccagtgtctgcgtggatatcttgttgcttccagaaggactcaataatctgtctcaatacaaagacattgccaatatgtcttctatcgtccattaggtccagggttttcaatatgtcgatgcgttgatcatcattctctgtctcgcaagcaatgacgaacaatggccacgggcttgtgcagacgtccaaaacatttataatttccagtgcagatttaagataatttgatctcatttctggagagggctcggggtttccaattctctggagatagaggaaagcggcgatccgatacagttctgctgtcgccattgttctcgtgcgctccgacggagtaaggtcagcctcatatgccggatcaagggtttgttttaaagtggcgagactcctttctaagtgactgagttcctcggctctctcagacttctcttgatgtgacaatgacgaaggatcaaagcgattgtcattggcacgccaagtattaacacgactgatgatttccataacctcgacagaacagcccagtgatccaatgatctataagatacttagtgtttgtcaaaaggcttgggtcatgatgccttacctttgatctatcaaaagtggtatcatagagcagtctgagcgatgccggaccatgaggccattgcctgagtggttgactgaaaccgccgagaatctcgtgatataggaaccaagtgtaaaggaaactaaaggcaaggtgtcctccatggatactcgcaagttgatgaagaattttttgggcgccgtacagactattgcacattatgttagcaagccgtttgacgcgaggagcctcacagccctagaagcattataaccggaatatggtcacttagcggagggattacgcactgcaaactccagttgccttccgtttcatcaaatacctgatttaatgtaagcacaagtcagataattcgattatgcaggttcctatgacgacgaaagggatatttacgttatacacgcagagcatcatcgaggttgctaactggatctctgtagtaccgaaggattcggtagatagggaggacgagagagaccgaatcgcttcagctttatatgaaaacgcctgctcggctccccaggcatggaatgcggcaacggcaaggatggcgtttcggaggccatgggaagcctttccggaactcgatagagccatagggagcaagtcatctcggaaaccgttattcacatcgatagtcgatatcatttgcgagagcctgtt

SEQ ID NO: 17214 - DNA, 1485 bp, Muscodor strobelii
  misc_feature: SGI cDNA ID NO. 565746
  misc_feature: Elevated expression when VOC is produced
  misc_feature: Encodes the peptide sequence at SEQ ID NO 17215
atggaaaccgtgagacgaacgcaagggtgttggacctgcaaaaagcggaaaatcggctgcgatcgcggttatccagcttgcaacaactgcctgcgcaccggcagagaatgtctgggctatggaattcggcttgcttggccagatcagccagacggccgccgtcgagggagccgtgctcctgaccaagtcgttcattacatcaacaaggcccctatcaactacggcaaacaattcttaaatatgacctttgccgacctgatgcatgctactaagggatcgatggtacttgatgaaatacttatccacagccaaatgcgaccagcacgcagcatctctctcatcccagagtttcgtgaacgcgagtctcatcttatgagttattatagcaacaggctctcgcaaatgatatcgactatcgatgtgaataacggtttccgagatgacttgctccctatggctctatcgagttccggaaaggcttcccatggcctccgaaacgccatccttgccgttgccgcattccatgcctggggagccgagcaggcgttttcatataaagctgaagcgattcggtctctctcgtcctccctatctaccgaatccttcggtactacagagatccagttagcaacctcgatgatgctctgcgtgtataacgtatttgatgaaacggaaggcaactggagtttgcatctgtacggcgcccaaaaaattcttcatcaacttgcgagtatccatggaggacaccttgcctttagtttcctttacacttggttcctatatcacgagattctcggcggtttcagtcaaccactcaggcaatggcctcatggtccggcatcgctcagactgctctatgataccacttttgatagatcaaagatcattggatcactgggctgttctgtcgaggttatggaaatcatcagtcgtgttaatacttggcgtgccaatgacaatcgctttgatccttcgtcattgtcacatcaagagaagtctgagagagccgaggaactcagtcacttagaaaggagtctcgccactttaaaacaaacccttgatccggcatatgaggctgaccttactccgtcggagcgcacgagaacaatggcgacagcagaactgtatcggatcgccgctttcctctatctccagagaattggaaaccccgagccctctccagaaatgagatcaaattatcttaaatctgcactggaaattataaatgttttggacgtctgcacaagcccgtggccattgttcgtcattgcttgcgagacagagaatgatgatcaacgcatcgacatattgaaaaccctggacctaatggacgatagaagacatattggcaatgtctttgtattgagacagattattgagtccttctggaagcaacaagatatccacgcagacactggtcgcgctgggagtttgagatggtgggatacactggcactcaacctgtccacaccttggttcatctga

SEQ ID NO: 17215 - protein, 494 aa, Muscodor strobelii
  misc_feature: SGI Peptide ID NO. 565746
  misc_feature (8)..(47): Pfam Id: PF00172 Pfam Desc: Fungal Zn(2)-Cys(6) binuclear cluster domain
  misc_feature (111)..(468): NCBI GI: 156040944 Blast Desc: SS1G_11450 [Sclerotinia sclerotiorum 1980] gi|154695834|gb|EDN95572.1| SS1G_11450 [Sclerotinia sclerotiorum 1980]
  misc_feature (289)..(494): NCBI GI: 242762745 Blast Desc: TSTA_065130 [Talaromyces stipitatus ATCC 10500] gi|218723636|gb|EED23053.1| TSTA_065130 [Talaromyces stipitatus ATCC 10500]
  misc_feature (9)..(469): NCBI GI: 256730237 Blast Desc: NECHADRAFT_82527 [Nectria haematococca mpVI 77-13-4]
  misc_feature (16)..(468): NCBI GI: 256730463 Blast Desc: NECHADRAFT_73999 [Nectria haematococca mpVI 77-13-4]
  misc_feature (5)..(474): NCBI GI: 255950920 Blast Desc: Pc22g23360 [Penicillium chrysogenum Wisconsin 54-1255] gi|211593244|emb|CAP99624.1| Pc22g23360 [Penicillium chrysogenum Wisconsin 54-1255]
  misc_feature (5)..(475): NCBI GI: 225555333 Blast Desc: conserved [Ajellomyces capsulatus G186AR]
  misc_feature (5)..(475): NCBI GI: 240273926 Blast Desc: conserved [Ajellomyces capsulatus H143]
  misc_feature (1)..(467): NCBI GI: 169615733 Blast Desc: SNOG_11030 [Phaeosphaeria nodorum SN15] gi|111060409|gb|EAT81529.1| SNOG_11030 [Phaeosphaeria nodorum SN15]
  misc_feature (4)..(127): NCBI GI: 242762740 Blast Desc: TSTA_065120 [Talaromyces stipitatus ATCC 10500] gi|218723635|gb|EED23052.1| TSTA_065120 [Talaromyces stipitatus ATCC 10500]
  misc_feature (9)..(479): NCBI GI: 242806647 Blast Desc: conserved [Talaromyces stipitatus ATCC 10500] gi|218715412|gb|EED14834.1| conserved [Talaromyces stipitatus ATCC 10500]
  misc_feature: Useful for introducing or modulating the production of volatile compounds
METVRRTQGCWTCKKRKIGCDRGYPACNNCLRTGRECLGYGIRLAWPDQPDGRRRGSRAPDQVVHYINKAPINYGKQFLNMTFADLMHATKGSMVLDEILIHSQMRPARSISLIPEFRERESHLMSYYSNRLSQMISTIDVNNGFRDDLLPMALSSSGKASHGLRNAILAVAAFHAWGAEQAFSYKAEAIRSLSSSLSTESFGTTEIQLATSMMLCVYNVFDETEGNWSLHLYGAQKILHQLASIHGGHLAFSFLYTWFLYHEILGGFSQPLRQWPHGPASLRLLYDTTFDRSKIIGSLGCSVEVMEIISRVNTWRANDNRFDPSSLSHQEKSERAEELSHLERSLATLKQTLDPAYEADLTPSERTRTMATAELYRIAAFLYLQRIGNPEPSPEMRSNYLKSALEIINVLDVCTSPWPLFVIACETENDDQRIDILKTLDLMDDRRHIGNVFVLRQIIESFWKQQDIHADTGRAGSLRWWDTLALNLSTPWFI

SEQ ID NO: 17216 - DNA, 8213 bp, Muscodor strobelii; identical to SEQ ID NO: 17210
  misc_feature: SGI EST ID NO. CUFF.40641.4
  misc_feature: Variant of the nucleotide sequence at SEQ ID NO 17214

SEQ ID NO: 17217 - DNA, 381 bp, Muscodor strobelii
  misc_feature: SGI cDNA ID NO. 565747
  misc_feature: Encodes the peptide sequence at SEQ ID NO 17218
atgggtctggccaacgacaaattcccttcttcggctgctttcgatgccatccacagcgccctcaacgccagtgaagccgacaagaaggatgctatcaagcagggcaacggtgtctacgctttcacgctgaagaacaaggctggagaaacccagagctggcacatcgacctcaaggagaccggctccgtcggcgatggagtaggaaacaagcccaatgttaccctttcgctctcggacgaggacttcggcaagctcgtagccggcaacgccaatgcacagcgcttgttcatgtctggaaagctcaagatcaagggcgacgtgatgaaggcgacgaagctcgaccccatcatgaagaaggctcagaccaaggccaagctataa

SEQ ID NO: 17218 - protein, 126 aa, Muscodor strobelii
  misc_feature: SGI Peptide ID NO. 565747
  misc_feature (14)..(118): Pfam Id: PF02036 Pfam Desc: SCP-2 sterol transfer family
  misc_feature (1)..(126): NCBI GI: 116180172 Blast Desc: conserved [Chaetomium globosum CBS 148.51] gi|88185011|gb|EAQ92479.1| conserved [Chaetomium globosum CBS 148.51]
  misc_feature (1)..(126): NCBI GI: 164424767 Blast Desc: NCU06643 [Neurospora crassa OR74A] gi|18307428|emb|CAD21491.1| peroxisomal protein POX18 [Neurospora crassa] gi|157070651|gb|EAA31640.2| NCU06643 [Neurospora crassa
  misc_feature (1)..(126): NCBI GI: 46137097 Blast Desc: FG10064.1 [Gibberella zeae PH-1]
  misc_feature (7)..(126): NCBI GI: 261351994 Blast Desc: fatty acid-binding protein [Verticillium albo-atrum VaMs.102]
  misc_feature (1)..(126): NCBI GI: 154294859 Blast Desc: oleate-induced peroxisomal protein [Botryotinia fuckeliana B05.10] gi|150844510|gb|EDN19703.1| oleate-induced peroxisomal protein [Botryotinia fuckeliana B05.10]
  misc_feature (1)..(126): NCBI GI: 212534190 Blast Desc: lipid transfer protein, [Penicillium marneffei ATCC 18224] gi|210069650|gb|EEA23740.1| lipid transfer protein, [Penicillium marneffei ATCC 18224]
  misc_feature (1)..(126): NCBI GI: 156044470 Blast Desc: SS1G_10338 [Sclerotinia sclerotiorum 1980] gi|154694727|gb|EDN94465.1| SS1G_10338 [Sclerotinia sclerotiorum 1980]
  misc_feature (1)..(126): NCBI GI: 39972043 Blast Desc: conserved [Magnaporthe grisea 70-15] gi|59803154|gb|AAX07727.1| oleate-induced peroxisomal protein-like protein [Magnaporthe grisea] conserved [Magnaporthe
  misc_feature (1)..(126): NCBI GI: 169621861 Blast Desc: SNOG_14143 [Phaeosphaeria nodorum SN15] gi|111057260|gb|EAT78380.1| SNOG_14143 [Phaeosphaeria nodorum SN15]
  misc_feature (1)..(126): NCBI GI: 261200106 Blast Desc: lipid transfer protein [Ajellomyces dermatitidis SLH14081] gi|239594662|gb|EEQ77243.1| lipid transfer protein [Ajellomyces dermatitidis SLH14081]
  misc_feature (6)..(118): SWISSPROT Homolog: EC 1.1.1.35 3-hydroxyacyl-CoA dehydrogenase
MGLANDKFPSSAAFDAIHSALNASEADKKDAIKQGNGVYAFTLKNKAGETQSWHIDLKETGSVGDGVGNKPNVTLSLSDEDFGKLVAGNANAQRLFMSGKLKIKGDVMKATKLDPIMKKAQTKAKL

SEQ ID NO: 17219 - DNA, 934 bp, Muscodor strobelii
  misc_feature: SGI EST ID NO. CUFF.40520.0
  misc_feature: Variant of the nucleotide sequence at SEQ ID NO 17217
ccgaggcttcaatcacatgtgcttgggcggacagagcgttgcgcacagcgtcattcctccaaaccttgagcgcctcgatccgaaaaactgccccagaccagcgccccggattgattggaaacatctataagcgccttttacgtctcccaacgacatctctgtagtcatctttgtcatctctctgatctgtttcacacctcaaggctcttccatcaaatcatctgctcgcatctcctagccatactcactctcttgccgcaataccgtttgctcttctagtataactatctcacaaccatagaagatgggtctggccaacgacaaattcccttcttcggctgctttcgatgccatccacagcgccctcaacgccagtgaagccgacaagaaggatgctatcaagcagggcaacggtgtctacgctttcacgctgaagaacaaggctggagaaacccagagctggcacatcgacctcaaggagaccggctccgtcggcgatggagtaggaaacaagcccaatgttaccctttcgctctcggacgaggacttcggcaagctcgtagccggcaacgccaatgcacagcgcttgttcatgtctggaaagctcaagatcaagggcgacgtgatgaaggcgacgaagctcgaccccatcatgaagaaggctcagaccaaggccaagctataaagggttggaacccacgatacgcgaaagctggattggacaaaagctgggttgatggccacatgcgaattcgcaaggcccgcccgtgtacattctgtttagccataaatgatattcgataccacatttgctcagatacctactgacgtactcgttgattctaccatcacttcttctgcttccgtcgtgatgatggcgagcctgcgcctacacattaagacgggcaggaattacttactcatcgaattgttc

SEQ ID NO: 17220 - DNA, 3678 bp, Muscodor strobelii
  misc_feature: SGI cDNA ID NO. 565748
  misc_feature: Reduced expression when VOC is produced
  misc_feature: Encodes the peptide sequence at SEQ ID NO 17221
atgagttccaccaactcgaacacgcctttcaagcctcgcgcctcgttgggccaccagccgcagcagcagggcccgtcgcccttccgctcttcttccgccgacaagttccgatcctctcttgtccccaccagcagaccttcgccttctcgtcttttgagcccggccaccaagctctccaaatcttctcccagcgcccgtgatctcttccgctctgcaaagtccagcccacagcatggccgcgacatattccggactgccaccccccagcccgctcgcaccaagaccttctcccccgatcttcccgcctccgtcgcccgccccgccgcaagcatgcgcaagttcgctccccgtaagagcgtctccgcaggcatggccggcaccggttccaccgagccctttgccatgagaatttcctctcccgaccgcgacctcacaggtgaggtcatcgccaagcagatccctcatgaccccaatcgcaccgacaccgtctacgccgaccaattccttgcccacaagtgccccgagggcctcgacgagcaccagcgccgccagttcttctgcgtcctcgacctgcgcaggctcaagtatgccgccgacgagatcttcgccaagaaggactggaagctgaacatcatcaatttcgccaaggagtacgagaagagcagaagcatgatcatgctgcgctacgggctgtaccaatttaagaacatcaagccgtcggacgacatcatgaagcagtggcgcgccagtcatggccttcccgacgcctccagccccgcggtgggctcgacgaagcgcaaagccgagcacgagctgtcctccaaggacaacaccctgatggactcgaccgtcaaccagaacaagcggcgcaacttggcgcaagacacaaagaaccctgcactgcaaggcccggccccgttcaagaagagcaagcgcaaggcggacgaaaccgaggaggcggacgagaacgagagccaaccttcgaagttgcagaaatcgactccatcgggggccgcatctaaattcgagagcatcatcaacaaaacccagagcacgtcatctcccctcaaggccccagcgccgtctccgtcgcttttcgatgccacaaagcccactgactctcccgcgcccgtccctgctaccaggttgaatccttttgcgcccacgagctcctccctcctctctggctctggcaagacagacacctccaagggccctgcggcgtcagtgttagctggccacaagatcggatcaactcccacttctaatggtggaaacatctttagctacttgtcagagagctcccccaacgatagcggaaacgagaatggaaacgccaacgacgaagactcggactcggaacccgaacacgattcagaagagcaggggcccagcgctgctgttagcaccggcacgagcactcctcctgttcaagcaggctccctcttcggcacaccgagctacaaggcagaccccgttgccaagctgtttggcggtatgaccaagtccagcgagccaacatccgcaccagcaccaaagggcggccttttcgatcgccagaagcagactccagcgaagcagccaggagactttacgttcaatgcgcagaccactcccatccagtttggcaagcctgctgcaccgactaccaacactgcagatgcacttttcgcgaacaagaagcggtcgatcgacgacgaagtggcccctcccgccaagaagaagccggccgcggctccctcgacctcgtccgctagtgccgagcccaaacaagactcagcgaagagcgatggccagctcaaggccacaagtatttttgacaaggctttcctcgcacaagcttcctccgccaaggccccagcattgccgaaaccgactggaacgttctttaacaaacaaccttccccggagccggcacctgttgacaactcgaagagtggctcgggcttaggagagtctgcgatagcttctacgaactcaggtgtgagcaagaacctcccgggagcgctgggacttcagtctaccacacctcctacgacatcagccccgtcactcttcagtactctagcaaaccccaacgcaaccacaactgcgtcgaatagtcttttcggagaaaagaaaaccgatacctccgccaccaccatgccgaacatcttcagcaccaagccagctgcgactacaaatgcggtatttggtgagaagaagctagaggagcctgccaaagccgcgcctagcatatttagcaccgttgaggctgtagctcctgcaactccggcacctggtatacctagtatactcggcgagaagaagacagaggcacccaagaacccagcccccagtatctttggcatcactacacctgccgcagccagtacccccagcctgtttggggaaaaggaacaagcagacccaacgaggcctacgaccagcatgtttggcgccacttcaactacgcctgctactaatggtatgtttggcaacaagatgagggaggagcctgcaaaagctacggccgcgcccagcatctttggcacgtcttcggttccagctgcttcaggtaacctctttggagacaagaaagccgaaccagccaaagcttcaggcatcttcagtaacaatgcatcagctacgaatggatcgatgtttgggtcccagccagctaccaacggaaatactcaaacctcatctttcacttttggaggtagtgcgactcctagccctgccgtatcatttggggcgtcaaattcccagcccaatggaacggagcccaagaagctcgacttccagtttggaagcaccacgccaagtgctcattctacattcacattcggccaagattcggcggcggcagggtccggatttagcttcacagccggaggaaatggccaacaagtcaataaccccttcacagcagcacagccatcttcacaggtctccgcgcccacgacaacaccatcggcgagctttaacttcagctttgggcagcagccgccctctacgccagctacggcacctagcacacaaaccagtgctatattctcaggctttgggacaaacaatgcggctcccagcatcagcttcacccaagcttcaccaggccaaaacaagccatcggctgccccaagcattttcagcggacttcaggctggtggttctgggcttgccggtaccagttctccattcccggcgccctctagtatagggacgacaccggtgaatggcacccccgagccacaagcacctaatgaagatggcgaagcgccacaagagcagatctcgctgacaggaggcggaccaggcgaagaagacgagatcttacttcacgaggtccgggcgaaagctatccaatacataccggtgggtaaaggaggagacgaagaagagaagagcaaatctccctggtctactcgaggagtaggccccctacgcgttctgaagaacaacaccacaggatcggtccgcattctgctacgagcagaacccagaggacacattgctatgaacaagacgatcctgtcggatgttgagtacaaagtcaaagagaagacggtcaattttgtggctgccagcgacgatggatcgggcttggagacatgggtgctccaggtgaagaagcccgagtttgcaaaagaacttgcagcagtgttggaagcaaacaagagcgccaacaagaaatag

SEQ ID NO: 17221 - protein, 1225 aa, Muscodor strobelii
  misc_feature: SGI Peptide ID NO. 565748
  misc_feature (1100)..(1222): Pfam Id: PF00638 Pfam Desc: RanBP1 domain
  misc_feature (47)..(1225): NCBI GI: 116180174 Blast Desc: CHGG_00715 [Chaetomium globosum CBS 148.51] gi|88185012|gb|EAQ92480.1| CHGG_00715 [Chaetomium globosum CBS 148.51]
  misc_feature (66)..(1222): NCBI GI: 261351995 Blast Desc: conserved [Verticillium albo-atrum VaMs.102]
  misc_feature (130)..(1225): NCBI GI: 85099966 Blast Desc: NCU06644 [Neurospora crassa OR74A] gi|18307429|emb|CAD21492.1| conserved [Neurospora crassa] gi|28922407|gb|EAA31641.1| [Neurospora crassa OR74A]
  misc_feature (41)..(981): NCBI GI: 46136957 Blast Desc: FG09994.1 [Gibberella zeae PH-1]
  misc_feature (50)..(484): NCBI GI: 39972045 Blast Desc: MGG_07338 [Magnaporthe grisea 70-15] gi|145019851|gb|EDK04079.1| MGG_07338 [Magnaporthe grisea 70-15]
  misc_feature (745)..(1220): NCBI GI: 46136957 Blast Desc: FG09994.1 [Gibberella zeae PH-1]
  misc_feature (993)..(1223): NCBI GI: 156044454 Blast Desc: SS1G_10330 [Sclerotinia sclerotiorum 1980] gi|154694719|gb|EDN94457.1| SS1G_10330 [Sclerotinia sclerotiorum 1980]
  misc_feature (1080)..(1223): NCBI GI: 154294877 Blast Desc: BC1G_13561 [Botryotinia fuckeliana B05.10] gi|150844519|gb|EDN19712.1| BC1G_13561 [Botryotinia fuckeliana B05.10]
  misc_feature (691)..(1157): NCBI GI: 171692041 Blast Desc: protein product [Podospora anserina] gi|170945969|emb|CAP72770.1| protein product [Podospora anserina]
  misc_feature (1083)..(1220): NCBI GI: 226293319 Blast Desc: conserved [Paracoccidioides brasiliensis Pb18]
  misc_feature: Useful for introducing or modulating the production of volatile compounds
MSSTNSNTPFKPRASLGHQPQQQGPSPFRSSSADKFRSSLVPTSRPSPSRLLSPATKLSKSSPSARDLFRSAKSSPQHGRDIFRTATPQPARTKTFSPDLPASVARPAASMRKFAPRKSVSAGMAGTGSTEPFAMRISSPDRDLTGEVIAKQIPHDPNRTDTVYADQFLAHKCPEGLDEHQRRQFFCVLDLRRLKYAADEIFAKKDWKLNIINFAKEYEKSRSMIMLRYGLYQFKNIKPSDDIMKQWRASHGLPDASSPAVGSTKRKAEHELSSKDNTLMDSTVNQNKRRNLAQDTKNPALQGPAPFKKSKRKADETEEADENESQPSKLQKSTPSGAASKFESIINKTQSTSSPLKAPAPSPSLFDATKPTDSPAPVPATRLNPFAPTSSSLLSGSGKTDTSKGPAASVLAGHKIGSTPTSNGGNIFSYLSESSPNDSGNENGNANDEDSDSEPEHDSEEQGPSAAVSTGTSTPPVQAGSLFGTPSYKADPVAKLFGGMTKSSEPTSAPAPKGGLFDRQKQTPAKQPGDFTFNAQTTPIQFGKPAAPTTNTADALFANKKRSIDDEVAPPAKKKPAAAPSTSSASAEPKQDSAKSDGQLKATSIFDKAFLAQASSAKAPALPKPTGTFFNKQPSPEPAPVDNSKSGSGLGESAIASTNSGVSKNLPGALGLQSTTPPTTSAPSLFSTLANPNATTTASNSLFGEKKTDTSATTMPNIFSTKPAATTNAVFGEKKLEEPAKAAPSIFSTVEAVAPATPAPGIPSILGEKKTEAPKNPAPSIFGITTPAAASTPSLFGEKEQADPTRPTTSMFGATSTTPATNGMFGNKMREEPAKATAAPSIFGTSSVPAASGNLFGDKKAEPAKASGIFSNNASATNGSMFGSQPATNGNTQTSSFTFGGSATPSPAVSFGASNSQPNGTEPKKLDFQFGSTTPSAHSTFTFGQDSAAAGSGFSFTAGGNGQQVNNPFTAAQPSSQVSAPTTTPSASFNFSFGQQPPSTPATAPSTQTSAIFSGFGTNNAAPSISFTQASPGQNKPSAAPSIFSGLQAGGSGLAGTSSPFPAPSSIGTTPVNGTPEPQAPNEDGEAPQEQISLTGGGPGEEDEILLHEVRAKAIQYIPVGKGGDEEEKSKSPWSTRGVGPLRVLKNNTTGSVRILLRAEPRGHIAMNKTILSDVEYKVKEKTVNFVAASDDGSGLETWVLQVKKPEFAKELAAVLEANKSANKK

SEQ ID NO: 17222 - DNA, 4832 bp, Muscodor strobelii
  misc_feature: SGI EST ID NO. CUFF.40950.0
  misc_feature: Variant of the nucleotide sequence at SEQ ID NO 17220
ccgcgatcgatgatcacctgcatccacacaaccaagacgcatcaaccctgcccgtaattttttaggtacccgtgtcgccgtgcacgagcccgccagctctctcaccccaaacctccatgtttttttcctcgctctgctcgagaccagcccaacgcagcttcatcgcgcccgcctccgccatcgagctatagcggctgttgatgttgatgcatcaactcttttccttcgtgtgtctttgaagctcatttcattgcgtgttttcccgcattatacgcctgttgagctcgtctctcgcgtgcagacccatccctctctttgacttaaggcccatcgtactatcgtgccttcccgatctctgtttcccactacgcacctgccgtacctccttcgatctactactagccctttccgcgacctttcatccaccaccataccatagtactgcctcttgtctctcgacgcgacgcgctacagcgttgtcgactatcccgtcatcctcgcaacattcaactcttcattttgtaataacacactccctggcttcccgcctcgtcatcgcgtggtccgccaccaacatcgcccgtcatgagttccaccaactcgaacacgcctttcaagcctcgcgcctcgttgggccaccagccgcagcagcagggcccgtcgcccttccgctcttcttccgccgacaagttccgatcctctcttgtccccaccagcagaccttcgccttctcgtcttttgagcccggccaccaagctctccaaatcttctcccagcgcccgtgatctcttccgctctgcaaagtccagcccacagcatggccgcgacatattccggactgccaccccccagcccgctcgcaccaagaccttctcccccgatcttcccgcctccgtcgcccgccccgccgcaagcatgcgcaagttcgctccccgtaagagcgtctccgcaggcatggccggcaccggttccaccgagccctttgccatgagaatttcctctcccgaccgcgacctcacaggtgaggtcatcgccaagcagatccctcatgaccccaatcgcaccgacaccgtctacgccgaccaattccttgcccacaagtgccccgagggcctcgacgagcaccagcgccgccagttcttctgcgtcctcgacctgcgcaggctcaagtatgccgccgacgagatcttcgccaagaaggactggaagctgaacatcatcaatttcgccaaggagtacgagaagagcagaagcatgatcatgctgcgctacgggctgtaccaatttaagaacatcaagccgtcggacgacatcatgaagcagtggcgcgccagtcatggccttcccgacgcctccagccccgcggtgggctcgacgaagcgcaaagccgagcacgagctgtcctccaaggacaacaccctgatggactcgaccgtcaaccagaacaagcggcgcaacttggcgcaagacacaaagaaccctgcactgcaaggcccggccccgttcaagaagagcaagcgcaaggcggacgaaaccgaggaggcggacgagaacgagagccaaccttcgaagttgcagaaatcgactccatcgggggccgcatctaaattcgagagcatcatcaacaaaacccagagcacgtcatctcccctcaaggccccagcgccgtctccgtcgcttttcgatgccacaaagcccactgactctcccgcgcccgtccctgctaccaggttgaatccttttgcgcccacgagctcctccctcctctctggctctggcaagacagacacctccaagggccctgcggcgtcagtgttagctggccacaagatcggatcaactcccacttctaatggtggaaacatctttagctacttgtcagagagctcccccaacgatagcggaaacgagaatggaaacgccaacgacgaagactcggactcggaacccgaacacgattcagaagagcaggggcccagcgctgctgttagcaccggcacgagcactcctcctgttcaagcaggctccctcttcggcacaccgagctacaaggcagaccccgttgccaagctgtttggcggtatgaccaagtccagcgagccaacatccgcaccagcaccaaagggcggccttttcgatcgcgtctccatggggggctaatggccgcccactacgcgcgatccccgatgccgaggagcagcagaagcagactccagcgaagcagccaggagactttacgttcaatgcgcagaccactcccatccagtttggcaagcctgctgcaccgactaccaacactgcagatgcacttttcgcgaacaagaagcggtcgatcgacgacgaagtggcccctcccgccaagaagaagccggccgcggctccctcgacctcgtccgctagtgccgagcccaaacaagactcagcgaagagcgatggccagctcaaggccacaagtatttttgacaaggctttcctcgcacaagcttcctccgccaaggccccagcattgccgaaaccgactggaacgttctttaacaaacaaccttccccggagccggcacctgttgacaactcgaagagtggctcgggcttaggagagtctgcgatagcttctacgaactcaggtgtgagcaagaacctcccgggagcgctgggacttcagtctaccacacctcctacgacatcagccccgtcactcttcagtactctagcaaaccccaacgcaaccacaactgcgtcgaatagtcttttcggagaaaagaaaaccgatacctccgccaccaccatgccgaacatcttcagcaccaagccagctgcgactacaaatgcggtatttggtgagaagaagctagaggagcctgccaaagccgcgcctagcatatttagcaccgttgaggctgtagctcctgcaactccggcacctggtatacctagtatactcggcgagaagaagacagaggcacccaagaacccagcccccagtatctttggcatcactacacctgccgcagccagtacccccagcctgtttggggaaaaggaacaagcagacccaacgaggcctacgaccagcatgtttggcgccacttcaactacgcctgctactaatggtatgtttggcaacaagatgagggaggagcctgcaaaagctacggccgcgcccagcatctttggcacgtcttcggttccagctgcttcaggtaacctctttggagacaagaaagccgaaccagccaaagcttcaggcatcttcagtaacaatgcatcagctacgaatggatcgatgtttgggtcccagccagctaccaacggaaatactcaaacctcatctttcacttttggaggtagtgcgactcctagccctgccgtatcatttggggcgtcaaattcccagcccaatggaacggagcccaagaagctcgacttccagtttggaagcaccacgccaagtgctcattctacattcacattcggccaagattcggcggcggcagggtccggatttagcttcacagccggaggaaatggccaacaagtcaataaccccttcacagcagcacagccatcttcacaggtctccgcgcccacgacaacaccatcggcgagctttaacttcagctttgggcagcagccgccctctacgccagctacggcacctagcacacaaaccagtgctatattctcaggctttgggacaaacaatgcggctcccagcatcagcttcacccaagcttcaccaggccaaaacaagccatcggctgccccaagcattttcagcggacttcaggctggtggttctgggcttgccggtaccagttctccattcccggcgccctctagtatagggacgacaccggtgaatggcacccccgagccacaagcacctaatgaagatggcgaagcgccacaagagcagatctcgctgacaggaggcggaccaggcgaagaagacgagatcttacttcacgaggtccgggcgaaagctatccaatacataccggtgggtaaaggaggagacgaagaagagaagagcaaatctccctggtctactcgaggagtaggccccctacgcgttctgaagaacaacaccacaggatcggtccgcattctgctacgagcagaacccagaggacacattgctatgaacaagacgatcctgtcggatgttgagtacaaagtcaaagagaagacggtcaattttgtggctgccagcgacgatggatcgggcttggagacatgggtgctccaggtgaagaagcccgagtttgcaaaagaacttgcagcagtgttggaagcaaacaagagcgccaacaagaaataggaaatgcacgggaatggcatataattgcgcaagagtagatgaagagcagggtgtcaatgagagacccatgggaatgtcatgtctgcctggtaggagtggcattcggctatgtcgcccgaacaaacgtatcaacgggtacttgcatttgcgtcgcaggatgagaaaaacagaacagcagcatcgggcaagggagcaaaggattcctgcattcaaaattaaggcgttggtggtgtttttatagtgcattaatttgtttagactgtatatggatatggcgcggactactactgctcctgaatgcgagcacagaatgagagggaacacaatagtgataattaccctactgctcttgcagccgtagcgcagagtcaagtagccgagagggaaatacattctgttctgattgtagcaactagtcattcccttgagttctgatgaaagctacagactatgtgacgattgttctgactgtctgcctataggaggattctacacatctggaggcctgagg

SEQ ID NO: 17223 - DNA, 882 bp, Muscodor strobelii
  misc_feature: SGI cDNA ID NO. 565749
  misc_feature: Reduced expression when VOC is produced
  misc_feature: Encodes the peptide sequence at SEQ ID NO 17224
atggctgacgaaattacacacgctaccatcaaggatggctggttccgtgagatctctcacatgtggcctggccaggccatgaccctcaaggtcgagaaggtcctccaccacgagaagagccaatatcaagatgtcttgatcttcaagtctactgactacggcaccgttctggtccttgacaacgtcatccagtgcactgagcgtgatgaattctcctaccaggagatgatcacccatctcgccatgaactctcaccctgaccccaagaaggtcctcgtcattggtggtggggatggcggtgtcttgcgcgaggtcgtcaagcacgagtgcatcgaggaggctatcctttgcgacattgacgaggccgtcatccgtctctccaaggagtacctcccgggcatgtccgagggtttcaagcaccccaaggtcaaggtccacgttggcgacggcttcaagttcctcgacgactacaagaacgccttcgacgtcatcatcacagactcttccgacccggatggtcccgccgagtctctgtttcagaagtcgtacttccagctgctgcacgacgccctgaggcccggcggcgtcatcacgacacaaggttccgagaaccaatggctccacctccccctgatcaccaaactgaagaaggactgcggcgaggtcttccccgtcgccgagtacgcctacaccaccatccccacctatccctcaggccagatcggcttcatggtctgctgcaaggaggccggacgcaatgtcaaggttcctctgcgctcttggtctgctgaggaggaggaaaagatctgcagatactataatgctgagattcacaaggctagctttattctgcctacctttgctaagaaggcccttgagtag

SEQ ID NO: 17224 - protein, 293 aa, Muscodor strobelii
  misc_feature: SGI Peptide ID NO. 565749
  misc_feature (13)..(256): Pfam Id: PF01564 Pfam Desc: Spermine/spermidine synthase
  misc_feature (4)..(293): NCBI GI: 171693823 Blast Desc: protein product [Podospora anserina] gi|170946860|emb|CAP73664.1| protein product [Podospora anserina]
  misc_feature (4)..(293): NCBI GI: 85100119 Blast Desc: spermidine synthase [Neurospora crassa OR74A] gi|8134725|sp|Q9Y8H7.1|SPEE_NEUCR RecName: Full=Spermidine synthase; Short=SPDSY; AltName: Full=Putrescine spermidine crassa
  misc_feature (4)..(293): NCBI GI: 212532039 Blast Desc: spermidine synthase [Penicillium marneffei ATCC 18224] gi|210071540|gb|EEA25629.1| spermidine synthase [Penicillium marneffei ATCC 18224]
  misc_feature (12)..(293): NCBI GI: 116197943 Blast Desc: spermidine synthase [Chaetomium globosum CBS 148.51] gi|88178406|gb|EAQ85874.1| spermidine synthase [Chaetomium globosum CBS 148.51]
  misc_feature (2)..(293): NCBI GI: 256731679 Blast Desc: [Nectria haematococca mpVI 77-13-4]
  misc_feature (4)..(293): NCBI GI: 156044358 Blast Desc: SS1G_10282 [Sclerotinia sclerotiorum 1980] gi|154694671|gb|EDN94409.1| SS1G_10282 [Sclerotinia sclerotiorum 1980]
  misc_feature (4)..(293): NCBI GI: 212532035 Blast Desc: spermidine synthase [Penicillium marneffei ATCC 18224] gi|210071538|gb|EEA25627.1| spermidine synthase [Penicillium marneffei ATCC 18224]
  misc_feature (4)..(293): NCBI GI: 121701283 Blast Desc: spermidine synthase [Aspergillus clavatus NRRL 1] gi|119397049|gb|EAW07480.1| spermidine synthase [Aspergillus clavatus NRRL 1]
  misc_feature (4)..(293): NCBI GI: 242774578 Blast Desc: spermidine synthase [Talaromyces stipitatus ATCC 10500] gi|218722087|gb|EED21505.1| spermidine synthase [Talaromyces stipitatus ATCC 10500]
  misc_feature (4)..(293): NCBI GI: 70995928 Blast Desc: spermidine synthase [Aspergillus fumigatus Af293] gi|42820759|emb|CAF32072.1| spermidine synthase, [Aspergillus fumigatus] gi|66850354|gb|EAL90681.1| spermidine synthase Af293]
  misc_feature (4)..(293): SWISSPROT Homolog: EC 2.5.1.16 Spermidine synthase
  misc_feature: Useful for introducing or modulating the production of volatile compounds
MADEITHATIKDGWFREISHMWPGQAMTLKVEKVLHHEKSQYQDVLIFKSTDYGTVLVLDNVIQCTERDEFSYQEMITHLAMNSHPDPKKVLVIGGGDGGVLREVVKHECIEEAILCDIDEAVIRLSKEYLPGMSEGFKHPKVKVHVGDGFKFLDDYKNAFDVIITDSSDPDGPAESLFQKSYFQLLHDALRPGGVITTQGSENQWLHLPLITKLKKDCGEVFPVAEYAYTTIPTYPSGQIGFMVCCKEAGRNVKVPLRSWSAEEEEKICRYYNAEIHKASFILPTFAKKALE

SEQ ID NO: 17225 - DNA, 1176 bp, Muscodor strobelii
  misc_feature: SGI EST ID NO. CUFF.41122.0
  misc_feature: Variant of the nucleotide sequence at SEQ ID NO 17223
cgcagagggatctccgattatcccacctgaataaaaggctacaattcgcctgtctccagctctgtcaatcgcatacgctagtgggaacccgctggcagtatcacaagcaacaacgacccctccattatcttcgtgtcccactccaacgtcacaacctgtctacctcacctcattgtggaagtacactgcaccttacgcgacaagtagatacgatggctgacgaaattacacacgctaccatcaaggatggctggttccgtgagatctctcacatgtggcctggccaggccatgaccctcaaggtcgagaaggtcctccaccacgagaagagccaatatcaagatgtcttgatcttcaagtctactgactacggcaccgttctggtccttgacaacgtcatccagtgcactgagcgtgatgaattctcctaccaggagatgatcacccatctcgccatgaactctcaccctgaccccaagaaggtcctcgtcattggtggtggggatggcggtgtcttgcgcgaggtcgtcaagcacgagtgcatcgaggaggctatcctttgcgacattgacgaggccgtcatccgtctctccaaggagtacctcccgggcatgtccgagggtttcaagcaccccaaggtcaaggtccacgttggcgacggcttcaagttcctcgacgactacaagaacgccttcgacgtcatcatcacagactcttccgacccggatggtcccgccgagtctctgtttcagaagtcgtacttccagctgctgcacgacgccctgaggcccggcggcgtcatcacgacacaagccgagaaccaatggctccacctccccctgatcaccaaactgaagaaggactgcggcgaggtcttccccgtcgccgagtacgcctacaccaccatccccacctatccctcaggccagatcggcttcatggtctgctgcaaggaggccggacgcaatgtcaaggttcctctgcgctcttggtctgctgaggaggaggaaaagatctgcagatactataatgctgagattcacaaggctagctttattctgcctacctttgctaagaaggcccttgagtaggaaggtcgatacgaggagtagggtgaagggaagagagtagataccaaaatgaaaataggtagtaatgcgaaagcttctgatgata

SEQ ID NO: 17226 - DNA, 2598 bp, Muscodor strobelii
  misc_feature: SGI cDNA ID NO. 565750
  misc_feature: Reduced expression when VOC is produced
  misc_feature: Encodes the peptide sequence at SEQ ID NO 17227
atgtctcgagtgtacgaagagcgcgatatccgctacacgcgggagcgcagtcactcttcttctggcgacgaaggcaaacataagtctactactgtccgccgctacaaagtcggcgggcgcggcggcgggacccgtctcgagcggattgagcgctacgaagaggaggatgattccagatcgaaatattcctcccacgctggtcgctcatccgcagatgtcttcgagatcgaccgtcgcaccgagagaatcgtttatcccgatcgcccacactcggccttcgatcctccctcccgaggatctgattcgttccgcggtgatgatcgttatagaaccgtagagtatgagcgcgaggttgagagagaccgcgacttctatgtccccgaccgccgctcgagtacgcgcgtcgttgaagagacgcgagagacgacgagagacgacaactattgggaccgtaggcatccctcacatgatggcgagactgatgtccgcttcgagaagcgcgttgtccgtcgagactctgatggcgacgtcaagatcaaggagaaaaaggtagacatccacaaggataaccatcgggatgagcatagggactatagagagcgcgatcttaaggtagagcgccgtgttattgacgagagggacaatcatgatggcgacgtcgagcattatcgcagagaagttgaatactatgctgcaccctcgccgccgcctgctcccgttgtaatccgtcaaaagtttcctgagcagaggatcattgtgcaggaggcgccgcctccggcgccgatcattatgcctcgtcaagagccggggtacatcgtcttgcgggagcgagagcgcgaaaggcgtgatgatgattattacgatcgtcgacgagacgaccgccgctacgaagattacgatgaagattactatgtgaagcggacgataattcggcgagaccgaagctcgagctcagatcaccacaaaaagcgccatatagctgagggtgctcttgctggagcaggtctttcggcccttgtggccagccggcgtggaaaagatggcgaatatacggaccatagaggccgaaaggttctggccggtgctgcattaggcgcattagggactgaagtcatccggagagctaggagcgcctatgaagatagatacgatgagtacgagtccgaagatgaccatcggcaccgccaccgaagcaagtcgcgaagtcgactcaccactggtctggctctcggtgctgctgcattggctgtggccggtggcctgaagtacatgcaaagtaataagattgaaaaagaagaggccaatcgtggtcgccaacatcaccggcgctactcgaatgatgagtattctcgctcgcgcagccgttcttcccgtggacgtagccgcagtaaatcaaatgttgcaaaagcaggcgtcgcaactgctgcaattgctggcttagtccaacactataggtcaaagtctcgcggcaaatcacgatcgaaatcccgcctccgaactggtgctgagatcgctgctgctggacttaccggtgccgcggcgactaagctctgggagcgtcataaggacaagaaagaccgtgaactgtctgatgatgaatatagtcatcgagaccggagcttttcgaggagcaggtctagatcgaggtcacttggccgcaactcaattcctcgtgatcccgctgctgatccggaattaggcctggttcgcatgcctgatgtcgagtacggcagtgagcctctcgactatgattctgcctctaacgaaaggagacgtcacaggcatcgacgtcgatcaacctcagcatctgaccacaagcccgaaaagaagagaagcaagagtagactccgggatgtagctgctgctggattgggcacggctgcggccgccatcggcatcaagaagtattcagaccgccaaaagagtaaagaacgcgaggctcgttcaagagagcagagtatagagaggtcgaggtctcgagagagaaaagaacgaaaacgtgaacgtcgatcccgggatcgtgagcgtagacgttatgaggacgaggctgctgctgctactggttatcctgactatgatgtcgaagcgccacccccatcccctccacatgcgtcaggaggattcccagctaccaacggaccaatccctccagcaggcacatacatgcatccgaattattcgacgacgcatgtcaaccaaccaattccgccgtacaatccacaggactacgtgaaccttcctcctccgccatcgggtcccccagggccggcaggaccaccaccaggtggttatcaccggcccggaccagaaaacgtgagtcaagcccccgatttagatgccggcgggccccatcccgacgcgtcgcggagcacggctgcgactacgaagcaggtcactttcgcgtccgtcaaagccaaaatcaatttcaccttctccatcttcttcctctttatcaactatttccctaccatcacctccaccggcaaagaagcggaaggaaaaagaaccggagagaaagagaagcttgccaaaagtccagttccgcgagctttctccagaatcctcgcggacgatccagcaactccacagatcgactag

SEQ ID NO: 17227 - protein, 865 aa, Muscodor strobelii
  misc_feature: SGI Peptide ID NO. 565750
  misc_feature (1)..(757): NCBI GI: 116197657 Blast Desc: CHGG_06984 [Chaetomium globosum CBS 148.51] gi|88178263|gb|EAQ85731.1| CHGG_06984 [Chaetomium globosum CBS 148.51]
  misc_feature (1)..(581): NCBI GI: 171694401 Blast Desc: protein product [Podospora anserina] gi|170947149|emb|CAP73954.1| protein product [Podospora anserina]
  misc_feature (4)..(643): NCBI GI: 145603220 Blast Desc: MGG_06194 [Magnaporthe grisea 70-15] gi|145011493|gb|EDJ96149.1| MGG_06194 [Magnaporthe grisea 70-15]
  misc_feature (1)..(744): NCBI GI: 46137747 Blast Desc: FG10389.1 [Gibberella zeae PH-1]
  misc_feature (1)..(526): NCBI GI: 85098876 Blast Desc: NCU08957 [Neurospora crassa OR74A] gi|28922196|gb|EAA31445.1| NCU08957 [Neurospora crassa OR74A]
  misc_feature (28)..(486): NCBI GI: 256720913 Blast Desc: NECHADRAFT_85686 [Nectria haematococca mpVI 77-13-4]
  misc_feature (237)..(526): NCBI GI: 189211385 Blast Desc: [Pyrenophora tritici-repentis Pt-1C-BFP] gi|187978116|gb|EDU44742.1| [Pyrenophora tritici-repentis Pt-1C-BFP]
  misc_feature (679)..(751): NCBI GI: 156055336 Blast Desc: [Sclerotinia sclerotiorum 1980] gi|154702804|gb|EDO02543.1| [Sclerotinia sclerotiorum 1980]
  misc_feature (116)..(368): NCBI GI: 121698176 Blast Desc: conserved [Aspergillus clavatus NRRL 1] gi|119395881|gb|EAW06313.1| conserved [Aspergillus clavatus NRRL 1]
  misc_feature (679)..(748): NCBI GI: 154302465 Blast Desc: [Botryotinia fuckeliana B05.10] gi|150855298|gb|EDN30490.1| [Botryotinia fuckeliana B05.10]
  misc_feature: Useful for introducing or modulating the production of volatile compounds
MSRVYEERDIRYTRERSHSSSGDEGKHKSTTVRRYKVGGRGGGTRLERIERYEEEDDSRSKYSSHAGRSSADVFEIDRRTERIVYPDRPHSAFDPPSRGSDSFRGDDRYRTVEYEREVERDRDFYVPDRRSSTRVVEETRETTRDDNYWDRRHPSHDGETDVRFEKRVVRRDSDGDVKIKEKKVDIHKDNHRDEHRDYRERDLKVERRVIDERDNHDGDVEHYRREVEYYAAPSPPPAPVVIRQKFPEQRIIVQEAPPPAPIIMPRQEPGYIVLRERERERRDDDYYDRRRDDRRYEDYDEDYYVKRTIIRRDRSSSSDHHKKRHIAEGALAGAGLSALVASRRGKDGEYTDHRGRKVLAGAALGALGTEVIRRARSAYEDRYDEYESEDDHRHRHRSKSRSRLTTGLALGAAALAVAGGLKYMQSNKIEKEEANRGRQHHRRYSNDEYSRSRSRSSRGRSRSKSNVAKAGVATAAIAGLVQHYRSKSRGKSRSKSRLRTGAEIAAAGLTGAAATKLWERHKDKKDRELSDDEYSHRDRSFSRSRSRSRSLGRNSIPRDPAADPELGLVRMPDVEYGSEPLDYDSASNERRRHRHRRRSTSASDHKPEKKRSKSRLRDVAAAGLGTAAAAIGIKKYSDRQKSKEREARSREQSIERSRSRERKERKRERRSRDRERRRYEDEAAAATGYPDYDVEAPPPSPPHASGGFPATNGPIPPAGTYMHPNYSTTHVNQPIPPYNPQDYVNLPPPPSGPPGPAGPPPGGYHRPGPENVSQAPDLDAGGPHPDASRSTAATTKQVTFASVKAKINFTFSIFFLFINYFPTITSTGKEAEGKRTGEKEKLAKSPVPRAFSRILADDPATPQID

SEQ ID NO: 17228 - DNA, 3561 bp, Muscodor strobelii
  misc_feature: SGI EST ID NO. CUFF.41350.1
  misc_feature: Variant of the nucleotide sequence at SEQ ID NO 17226
ttgtccatcatgcacgacatgacacacaccctctgcgcctcttgctctgccgcgacgcggacgatgggctacttgtagttgcgtgctaaacaggttatgttggacatgtacttgtgccaatgccatgtatgccacttgagatgtccaccggcgaaaaccaagtctgcccgcaatctgcctgtcaccagtccaagccctgccacactgtactatctctctcctcttcccaacacatttccccttcttgtccttcgcacagggtcgctgttccttgcaaaacatttaataggtgtatcgcattagactttgcaaactttgctcatcttcgttccttcaactttatctcgagtcgtgcatccgccaaccttgtagatctgatatttgtgaattaccaccccgtgacgtcacctgactggcgcgggcgcaaatccgcagcgacgggacgacgaagatgtctcgagtgtacgaagagcgcgatatccgctacacgcgggagcgcagtcactcttcttctggcgacgaaggcaaacataagtctactactgtccgccgctacaaagtcggcgggcgcggcggcgggacccgtctcgagcggattgagcgctacgaagaggaggatgattccagatcgaaatattcctcccacgctggtcgctcatccgcagatgtcttcgagatcgaccgtcgcaccgagagaatcgtttatcccgatcgcccacactcggccttcgatcctccctcccgaggatctgattcgttccgcggtgatgatcgttatagaaccgtagagtatgagcgcgaggttgagagagaccgcgacttctatgtccccgaccgccgctcgagtacgcgcgtcgttgaagagacgcgagagacgacgagagacgacaactattgggaccgtaggcatccctcacatgatggcgagactgatgtccgcttcgagaagcgcgttgtccgtcgagactctgatggcgacgtcaagatcaaggagaaaaaggtagacatccacaaggataaccatcgggatgagcatagggactatagagagcgcgatcttaaggtagagcgccgtgttattgacgagagggacaatcatgatggcgacgtcgagcattatcgcagagaagttgaatactatgctgcaccctcgccgccgcctgctcccgttgtaatccgtcaaaagtttcctgagcagaggatcattgtgcaggaggcgccgcctccggcgccgatcattatgcctcgtcaagagccggggtacatcgtcttgcgggagcgagagcgcgaaaggcgtgatgatgattattacgatcgtcgacgagacgaccgccgctacgaagattacgatgaagattactatgtgaagcggacgataattcggcgagaccgaagctcgagctcagatcaccacaaaaagcgccatatagctgagggtgctcttgctggagcaggtctttcggcccttgtggccagccggcgtggaaaagatggcgaatatacggaccatagaggccgaaaggttctggccggtgctgcattaggcgcattagggactgaagtcatccggagagctaggagcgcctatgaagatagatacgatgagtacgagtccgaagatgaccatcggcaccgccaccgaagcaagtcgcgaagtcgactcaccactggtctggctctcggtgctgctgcattggctgtggccggtggcctgaagtacatgcaaagtaataagattgaaaaagaagaggccaatcgtggtcgccaacatcaccggcgctactcgaatgatgagtattctcgctcgcgcagccgttcttcccgtggacgtagccgcagtaaatcaaatgttgcaaaagcaggcgtcgcaactgctgcaattgctggcttagtccaacactataggtcaaagtctcgcggcaaatcacgatcgaaatcccgcctccgaactggtgctgagatcgctgctgctggacttaccggtgccgcggcgactaagctctgggagcgtcataaggacaagaaagaccgtgaactgtctgatgatgaatatagtcatcgagaccggagcttttcgaggagcaggtctagatcgaggcctggttcgcatgcctgatgtcgagtacggcagtgagcctctcgactatgattctgcctctaacgaaaggagacgtcacaggcatcgacgtcgatcaacctcagcatctgaccacaagcccgaaaagaagagaagcaagagtagactccgggatgtagctgctgctggattgggcacggctgcggccgccatcggcatcaagaagtattcagaccgccaaaagagtaaagaacgcgaggctcgttcaagagagcagagtatagagaggtcgaggtctcgagagagaaaagaacgaaaacgtgaacgtcgatcccgggatcgtgagcgtagacgttatgaggacgaggctgctgctgctactggttatcctgactatgatgtcgaagcgccacccccatcccctccacatgcgtcaggaggattcccagctaccaacggaccaatccctccagcaggcacatacatgcatccgaattattcgacgacgcatgtcaaccaaccaattccgccgtacaatccacaggactacgtgaaccttcctcctccgccatcgggtcccccagggccggcaggaccaccaccaggtggttatcaccggcccggaccagaaaacatggtgtaaatggcgtaacatcgacacccgctagctcctcgaaaccaaagtcactttcgcgtccgtcaaagccaaaatcaatttcaccttctccatcttcttcctctttatcaactatttccctaccatcacctccaccggcaaagaagcggaaggaaaaagaaccggagagaaagagaagcttgccaaaagtccagttccgcgagctttctccagaatcctcgcggacgatccagcaactccacagatcgactagtgagctctcgaaaacaaactcgaatcgcagtcatagagatgaggttgaggacttgccagcgcgtttcgacaattctgggcggccccttgatcgctctcgagacggaccacgcaggaagagcggcgagtttgagattcaaccacagcgacctggtgaggcgcatgttcgcggtgcgtgggcgacggaaagtagcggagataccggtaatatggatatggcacaaatagcgcaggcagtgggaagtttattgcaaggtcagcaagggtttttgggtgtgcttgggcatgcgctgagagatgggatggagggtaaaggacgataatcaaagggttttttgggtatgttttctttggatgtcatgagtttaacgacattatgtttctcatttctttttaggctatcattttgtatattggatcggaggaagcgagtttgttggcttttgcggtgtgttagagttcctggggatagataatttcggtttttttaattgaatgaatgagttatgacgcataggcattcatttattctaacatattatttccgttgctatctcgcgttatcgggacatgcggtcgtgtgaggaaagtcgag

SEQ ID NO: 17229 - DNA, 345 bp, Muscodor strobelii
  misc_feature: SGI cDNA ID NO. 565751
  misc_feature: Encodes the peptide sequence at SEQ ID NO 17230
atgaagttcgcactctcctttttcgtgctcggcctctgcgctgctgcaccactgaacaatgctcggcaagcagacgccacattcatcaccgtacccgacagacttgctttcccgcatgccactgggacgattagcttatccacagcttttccactgagacctacaggcggctcgggatctctaccagtgccaacaggtggtccagctccaccgttagggtttggaggagcgagacctccataccctacagacggaccaaaacctcctcaccaaggcggtgcaccacccattccatacccaagtggctcaagtcattataccccaagctcccttccctaccaataa

SEQ ID NO: 17230 - protein, 114 aa, Muscodor strobelii
  misc_feature: SGI Peptide ID NO. 565751
MKFALSFFVLGLCAAAPLNNARQADATFITVPDRLAFPHATGTISLSTAFPLRPTGGSGSLPVPTGGPAPPLGFGGARPPYPTDGPKPPHQGGAPPIPYPSGSSHYTPSSLPYQ

SEQ ID NO: 17231 - DNA, 2729 bp, Muscodor strobelii
  misc_feature: SGI EST ID NO. CUFF.40545.0
  misc_feature: Variant of the nucleotide sequence at SEQ ID NO 17229
gacggaaagccggggaaggcgaggggccatggtcgaagaggggtcgccgccaagtatatgataccactgatgtcagccattacgaggggctagatttgccaaggcctcccgttccgggcgtaatcgaagtacaggataccacatcgccatcgtcacgaattgaatttggagctgctttcactgaaccgtatgaccaaactggctggcatcgacctgcagaggagaatagatcttcgatgatgcgtgacgagaaagtgagacattgcaaacaaatagtgtgttttctgcttaacgaattccaacgactagcatgtcgacaagtcatcccctgtccatctggcatcatggccactgatatggccttcatggatatatctgtgtggtggctggctgcctagttgcagttatcggataacaatgacgccaacgcgggagaacaataacttgttctcaaatcgtgtccttacattgtggtgtccattgtaagacccaaatgtccatacgttgacaggcggtcggtatcacgaatggtaaatggtggatcacctgttgagtatacgcgaaaatcttagaaacccggctgaccacgttctatggatgcttgctcatcatcagctcccggggctgtgctatattggttcgttgaggttcccgccgaaatgcgaaaggcgacctcaaaacgagttggcgtctaatcaaacatgtcgcaatcctcctgtcggcaatgaaattggtattatatccgaatagagcgcacaaccacaactcactgtgtctgttttttttaataatgcgcgacattaccaggtactgccacaaatcggctggcaagtctggatgaacggcggggcataggcaaattcatgggcacagggaccaacagtgaagtctccagatttggcccccaatgtcttcagggtaattctctggaccctgatcaccaccaaaattctcatccgacgaatcttacataagcagaatgacacatcggccgtggatattcatatcccaataaatcgagaaaattcggtatagcgcataggaaccgcttagaagctggtaaatattttactttattctctacagggaatttgacattgttggagtcgcagacttgaggagtgaaatatgtggatcgtgaacggcattcggatggtgttaagaccgaagaggtacagttgggcgggttccttctaaattcacttttgtgttgaaggaatcagacttacatgccggaacgtgcgacagctcaaagacttctcttggtgactcatcccgagtttctcgttctgtgcttttcctcgagctctagcgggctgcatggcacttactcggttcgccgcacctcatctcttcaggggcaaaaaggggttctcgctgctaagcattactggtactgaaaggatacacatcatcaatttggaagcgccaggaagggagctgccccaatttcgtatgaacgggcacggcagagtcgagtgctgagaatcaaacaggtcgaattggaggcctgcgagttcatcttggccgctttagttgcatggagcctgagcattgcaacgggaactttcgtgaatgtgttcgtcagaacgggtatggtattatgatatcacaggagcctcagtcatgggattgtaatgagtggagctgacgtaagtttaatattgttttgccacgtcggtttatattgatcttatcgaataagtaagatggatgcacagttagcctcattatatccttggccgtaacggcccattcatgtgccgaggaaaagctccaatatggctgtcactctcgagatcaaaatcacaagccgcgtcaagtttcgagtcatagctgggtagaaaagatgcggattagcttagtacgagcacttaaagaaatttgacaactcgctccatgtcatcgatgactcttatcacaaggcataataaaacgcttctacctaacaaattgagcaatttgatcacacaaggctagtctgactcgatagaacgaagccttctagaagcgcattcttccccagacaaggaggacccctttcgagactgattagagttggggggacggcagctcccgctgtcatgcttgagtcaatcagtacggcttcagggcggccagggcagagtttggtgccttgtcaaatatgcagatagaaccacgtagtttacgtagctccagattttagatattcggcttcgagccctgactagaacaacattttgtgcccaattttcccgcaagaagggtggtgtcaagcgactcatgatagtcaactacgaatacggagcaaaggagcagaggagcagaagactgaacatttgcagtatataatccgctcactcagcggacctctagccagcatgaattccagtattcccaccaaaagaaacagataacattcatttgtgagggctgtgtttgcacattttgctgcgcatagatcgatcgttatacttagatcgcacaccatgaagttcgcactctcctttttcgtgctcggcctctgcgctgctgcaccactgaacaatgctcggcaagcagacgccacattcatcaccgtacccgacagacttgctttcccgcatgccactgggacgattagcttatccacagcttttccactgagacctacaggcggctcgggatctctaccagtgccaacaggtggtccagctccaccgttagggtttggaggagcgagacctccataccctacagacggacca

SEQ ID NO: 17232 - DNA, 9234 bp, Muscodor strobelii
  misc_feature: SGI cDNA ID NO. 565752
  misc_feature: Encodes the peptide sequence at SEQ ID NO 17233
atgctaatactacttcaagccgagaatagtgaagtagaaggtgaaggaggtgatggagctccttccgaatccacacctcctgacacgccatcgcccaaatctaagaaagaaaagaaaaagaagaaaaagggaaagagtaaatctgagccggaagacgcatctccagagcccgaagcagacgctgagccggtcccggagccgaagcaagcgccagaaacacctacttcgaagaagccgccaagggccacaagtctaaaaagcgagccctccgaaggctcgtcagatccgccggcgactactgaagaagtatccgacaacactgccaacgaccaagctcccgatgatgccgaagatggggctaatgcgcctaatcttgaggccgccacagccccggagacagaaataccagtcgaggctgagcccgttgcagaaccgcaatccgaggccaaagaggcgtccggcgacgctcctccaccagacgcttcggaggttggcggatcatcaggtgatgccccagaaatcagcgccaaagccgttgcccaggacgaagagccaaaagcggaatccgcagttgagcccgcagtcgaagcagaatcctctgcgccgatcgaggccgtcagcgatgccaccgaagagcagccaacgacctcagatgaggttaagcctgaatccagtgtcgagcatgaagattctccagcaattgaaactcaggaagaggttccagaggagcccaagacggatgagcccgtagccgaacttactgaagttgctccggaagagactccagcaaccatggatgattccaccactgacaagcccgctatggacggagccgttacggagcaagtacccataactgaaccagagacttcagagtctgctgagaagacagacgagccggagcatatcgaaaagatatcggagactgtggctgaggccgaggctatctccgaggagggtcccgagggcaatgacgaggctatagtcgaagaatcaaaagaagcagccccaactacaagcgagaaatccgtcgagcccgtcgaggaatcacaagccgctatctctgaggaatctacgactgaagtccctgccgcagaagaatctgccgtgcctgaggcttcagaacaacatccggagtcagtatcgaaagacgccgaaaccgaagccgaagcaccagttgaagccacgtccgagccagagaaaattgccgaaaacgccgaggagcatcccgcggccgatactactggggatatacaggagccttctgaagacactgcccccgccattgaggataccccggccgaaactggcgcctctgagtctatctctcacgctgaggaggtcaaggagaccgaggcaactagtgatgacaagaccgacgccccggcgccggagacagacaatgaagcatccgctgaagccgcaccaaatgacgatgtcaaggagccggaactcgagggtgcccaggagcaagaggaacccgctgatgccacggagccagacgtgattccggtcgaagaggctcccgccacagtcgatactccggaagcgagcgagagcctcgagaaaacaaaggccgaagaggctccagcacaagaatcagtggaagagcctactgagtcaaatgagacggatattaccgatcctgaacccaagacggaagttacagaggccgaggagcccacgtccacggatgacaaccccaaatcactagaggtcgcggaagaagcacccgccgataaggatgcaccgatcgatgaggcacccgaggcgccagtggtcgagactgcagaggaatcacaggccgaattggaaactcaacaaactgagcctgaagccacggatgatgcacaggcagaccctgaaccccttgaagctcctaataccgaagctcattcgtcaggcgatgcagaggcacaggaaccagaatcaacagcacaaattgatgacaacgaagcgacggcttctgaggagcctgaagcacctgccacggaagacaagaaagagacagaagaagcgcccgttgctgaagaggaggcgcccgctacggagcctcagattgaagctcctttcgagacggttgctgcagaggagcccgctgacgcacccgtcgatacacccgccgataaagaggtcgaggaatccaatgagcccccgacaattacttccatcgaagttccagcggaggttcctgttgaagggtccacaaaggattcagttgatgagtccgctacggaacccgtcgagaaggccgtggagacggaaacagagcctacaccagcgtccgagaatacaagccccggagagccaactgacgaaaaccccgcggaaacgacagcggagccggaaacggaaactcaggacgaacctgcaaaagccgaaggggacgagccagaagccgacgcacacgacagcggaccggatgactgggagttagatgccgaagatgatgcatcggtcatcggggctgatgaaaccgtggctgccgggcctgaaacagaagcaccaatagtagatgatcacgctgcgcttgaatccatggtctataacgagtccgcgccagttgagggcacgccagagccagagccagaggcagctgttgtggacattgcggagcctgaggttgagcataccgatgctccagcagaggaagccaagcctgttgagcccgagattgctggtgaggttgactctctgggtgagactccaactgacgagaacgtcgaggaatctgaagctctcactcaagaggtaaaagacaccgaagctgttcccgaagagtccgtcactgccgaggagcccaccgcaagcgaggaacctactgcttccgaagaatcgactattccggaagagcccgctgttgtcgaagcacccgctcctgccgaggaatccgcggtggctgacgagcctacggccgaggaaaaggcaactgatgagcctgttactgaagacatggccgtcgaagaaagtccagcagaatccgatgcaacaaaggaagttattgctcaagaacaaaccgagccagttacggagtcagaagttacggagcccgtcgtcgaaaaggagcctgagccagttgaggaagccgtggcagtagaacccgaagccaaggatgattcatccgaagaggttgctgctgtcgaggcacctgcagcagaagagcctgcaacagtcgaaactcaagaagaaacccctgctgacgagccaattgccgaggaatctaaggctgaagagacagtcgttgaagaacttgttgctgaagcatctgccgtcgaggagcccacttccgaagtgcccgctgctgaagaatctgctgttgagaaacccgccgtcgaggagtccgtagccgaggaggtacatgacgaagaacctgctgaatccgccgccgaagaacccactgccgctgagcccgaggcttccaaggaaccaatagttgtggaagagacttctacggaggaatctatcgccaaggagcctgaagtcatcgaagagcccgcggtggttgaaaaggcagccgaagagcctgcagttgacaacgtcacagaggcagcggccgtcgaagagccagtttccgaagagccagctgctctcgatgaaacacccgccgcacagctcgaaactgaatctccatccgacgagatcggtgtagaggaagcggccgcggaaccagttgttgatacagcccccgttgaggatacttcccaaaacgttgcggccgaggagctcgccgcagaggaacctgcaccagaagtacccgtcgcagacgagactccggcagaaggacaaccagccgaaacagcacccgcagaagagtccatcgccacagctcccgctgaagatgcttccgaggaaaatgagcccaatgattctgcggcagtggaaccagtggaggacgcgcctgctgttgaacaaccagctaacgaagaacccagcgtagatgaggttgctgtggacggatccgcacctgaagagcccgtcgacgaagtgcccaaagacgtcgaagtcgaagaacctgcgacggaggatgttccagaggcacctgtagttgaagaaattcagggtgaagaggcgccttcggaatcaacgacagaagagcctgcagcggaagagattgttgagaccgaagagccaatcatgaacgcagctcccgttgaagaatctcatgatgaaccacccgtcgaagaagcgcctaaggagatagaggcggaggaacccgcagcagaggaggctcccgatgtcgctccgggagataatgaagctgccatcgtcgaagcggctcctgacgtaggaatcgtctcaaaagcggttgataaagacgagcccgcggatgaggctccaacagaagaagaatcaagagagatcgaagccgaagagcccacagtccatactgccgtcgacgaagccccaattgacgaggcaccacttaacgaagagccagtggaggaggttgtaacaaaagaaccaccaacggacgagagccccgaagaaagccccgaagagcctcccgtcgaagaaaccgtcgttgaacaagcgcccgctgaagatgctcccatcgagagtgcccccatcgagagtgcccccatcgaggacgtgcccatcgaggacgactccgtcaaagatgaagcccctcttgaagaggctcccgtcgacgaaactccaagcacggagattacggccgcggagcccgagaccgtagcgccagctgaagttgtagtggacgaagctccggcttccgaagaagccgtcgtggaagaagtttcaagggagattgctccagaggaggcagagcccgaagctccgaagggaacgattccggctcagcccgatgtcgttgaggcgccggaacctcctaaggatgaagctgcaaatgagaaagcggaagaggctgaggagagcaaagataccgttggtcccatccctggtgatgagagaactgcgaagaggagcagtagaggtaagcatgaatttgttttttgtttcgttgatgatgctgcgagtgatgttgtgcttgatattggtggagatgtacctgaaccggtcctggagaatgacgcgcttttggacaactgtgtcgaaaatacgagtgagagtgcattcgcaacaacgccgcatgatatcgacaacgtcgctggagctagtcttgaggcgctagaaagttcgagtgacgacaagcaccattctatcaagtcgatacccgaaaattcgagcactgatgccgacccaatagctctcgacgtttggcctgtggatgcctgtaatcctggcagcgagaattccgagaacggaggacttgttgatcccttcgatatccaggaggttgatgagacctctgcgtcacattttcatgagcccaaagatccattctgcgaagcctcgactcaagaaatcgtcggtgcgcctcgcgattttataccgacactcgaaatggacatccgtcacgagggcattccggcagaggatcatatcgaagctacaggtgcagcggatatcgactactttcagcataaagttcgcgcgcatgagtctgacaaatccggactgcatgaagcacgcgatgccaatacgatgccatggcgagcggatttgactgctcctgacccgccaacgccagaaggtgacctgatcttgggaagccctgaaagtgctattgtagctatcagcaatgaagacatccctagggcggaattggtagaagatacacatcctcgagaagcaactcaagtcaaccaaaaatcgcatgcttctcttcaggagcctgctcaggatgatctactctctccagagcacgtcgaacttggacagtcattctactccgaccaattcgacctggagttcaaggaagtatatcttcagcattcaaagaacgataatctatatgttccgactcaagcaaacgccacactaggtgatagcctaggagtaaaggactatatagatggcatgtccgctgcaagctcaccattcatcgatgacccaatcatagagaatgccgatgtcagtcataatcccagtgctgaaaatttagattctatcgataatggggaagccagctcggcaacaaatctcgccgtgaacagcatgatagagcccgtggtgctcacgcatgataagccggatcatggatttagtggaattgcggttcattctgctgttcgcgacgtggaccaatcagaggtctttgtccagaagcatatccaagaagaggatgacacggccgtcgatgcgaagtccaccaaggaacacactatcctgccagagagggatctcgacattgctgtgatagagaactgtccacaacagccaataaccgagaattcggcacttgttgatggttttgcgtcacatcctcattgggcttctgacgatgatgtggcacatagcatcaaagaggagctacaacacgacaacaataatgccgcttctgtcgaaaatgccaatcttacagaattggctgaagccgcaaatgccgccatgcatcttcacgacctcgaccacaagaatgacgacgagcacgtgacagctagctctttgcctgaggctacttctgagcatgtagcaggtgaccgactgctggaatatattgtacccgaaaagggaacaaaaactaccgctacctcttcactaccagataccgaagaatataatgtaccaggcgaatcggaagatgaagcggaagatcgcgtagacattgactatcttcccaagaatctgcacgtcgtggttccattggaagacggcagagcagagcgtgtgaaagccaacacgacacacatagcagactttcttgaagatacgccacgtgcactcgcctattcctccgaaccaccaatcgatcatgtcgcctatgtctctaaagatatcccgcacgtggccgaaggtgaacatgtctccgtgtccccttctcagagaaatgtggacacgacagagtccgtgacgctcgatggctccgatagccacgatattgaaccagcgtctatgcgcaatgcgactcggtcgaccgatagcagacgggtacctgatgttcctcaagactctaccatcgcccaaaccatcacccttgatccctctgaggggttgaatacagaacctcatatcgatggatcatcttcaagtgtcctcgaggatgccgctacctcgatcacgccaggtataggaacatatgactcgaatgagcacggtaatttgaatctgcctattcctccgcatagcagtgcaaaagctatcgatacttccgattctgcagctcggggaggatttgaaccacagtcatctccccgtccaacgcccgatcttgaagggtggccgttagctcaaggcagcagggacccaatctcaactgcagacgaggtcattgacagggaagctgaaacgggtgaggcgtttccaacatcgtctatagaggaccacctgtcgacgcgtcaggatccaccgcattcagagggcaaagataactcatatattcatgtgtcaacctctgtgaagaatcctcccaaactacaggaacaattgccagccgacaccgctgcatcagtagatcgaaatagtgtaccaagcactactaccaagcatatacagcaacatgctatagactctgagtgggcaccatcaatcgcgtcgggtatttcgacaccaatctctccagttccgtctcacctggaagatgcttttatgttcgatagaatacccagtcctatcccacctaaaagcaagagacgcgcacaccggccttctcttattcactcttcaactcagaccgacgacgaatcggcattcagcacaccagggtctcctattctgggcccatctagctcaacgttcgacgagccgcggccagcaacaccagctatcgaactgccagattttgctgatccgaaggcgagggctttgggaagagctcgaagccaaaggagaactcgtcgtcgcaatttaaggctggctgaggagactgtggcagcagctgtcgtcatctatgcgacagcgcaagaattgagtcaaccgccagagataatctcgcgtgcatttgaagtagatcaaagcattgcaagattgatggaggaagctcaaggactggttcaaggatcttcagatgttgtatcactaggcgatgtggcaggagaacgcagcatttctaatgaaattgacgtttcgctcgctgttgctgacctatcgacagatgacgaagacaaagaccggcaccaccgccataggcaccatcggcaccatcgacactcatcttcgggctcaaaggaaagcagtcgtagcatcgaagagcgccgacaccatcattcctcttcaagatcgaaagacagcgtgaacagcgatgaacatcggcgccatcatcgacatcatcgccgagagagtgatctctcggtaaagtctacttctgatcgcaccttggacggatctacgccttcgacgccgaagcgagttgagagagagcgtgaaaaggttgatagcgggttcgaaagtggacccagcccctctcatcatcgtcgtcgtcgcacgcctgaagagcaggccgctcatgataaacgaaaagcagagcgcaaggcacgcgatgcagaagaaggcgcacgagatcgagacagagaccgtgagcgtgagcgtgagcgtgagcgtgagcgtgaatccaggaaacgtgactcggatccagcggcagcagaacgtcattctcatcgcagctccagacgttctagccaatcttttcctgagcgtgagcgccgcgtttcgatcagtgaagcaccagtgcctggaaagaaattctttgatatgaagaacggtgagagcgtcctcgctccaaacactcggtcgccgagaagagaagaattcgccatcccgcgcggatcaccagcccgtggctcacctcgcgactcaccccgagaatcaccacgtcagtcacctcggcccgacaagcgattgagcacttcatcgagacaccatggctcacatcgtaggtctgctgatatctcacgatccaagagcacgcgtcatcacgatgagcctagggaagagtccagaagacatagacgagagtcggtccatcatgttcgagctgaagaggacccgaaggcatccacctcgtctcatgacagagaggctcgcgagtcgagagacgctcatcgttcacgacgcgaggaacgccagagaacgcgtgatgctgaggccgcgaagaagagtaagaaggacggtgcttctggtggtctcaaagccgccttcaagaagctttttacgtaa

SEQ ID NO: 17233 - protein, 3077 aa, Muscodor strobelii
  misc_feature: SGI Peptide ID NO. 565752
  misc_feature (2567)..(3077): NCBI GI: 145607221 Blast Desc: MGG_04093 [Magnaporthe grisea 70-15] gi|145014819|gb|EDJ99387.1| MGG_04093 [Magnaporthe grisea 70-15]
  misc_feature (2569)..(3077): NCBI GI: 46137137 Blast Desc: FG10084.1 [Gibberella zeae PH-1]
  misc_feature (2829)..(3009): NCBI GI: 116206794 Blast Desc: CHGG_02690 [Chaetomium globosum CBS 148.51] gi|88183287|gb|EAQ90755.1| CHGG_02690 [Chaetomium globosum CBS 148.51]
  misc_feature (2573)..(2843): NCBI GI: 171692131 Blast Desc: protein product [Podospora anserina] gi|170946014|emb|CAP72815.1| protein product [Podospora anserina]
  misc_feature (2835)..(3076): NCBI GI: 256731799 Blast Desc: [Nectria haematococca mpVI 77-13-4]
  misc_feature (960)..(1532): NCBI GI: 156402955 Blast Desc: [Nematostella vectensis] gi|156226986|gb|EDO47792.1| [Nematostella vectensis]
  misc_feature (2610)..(2863): NCBI GI: 85099624 Blast Desc: NCU01283 [Neurospora crassa OR74A] gi|28922346|gb|EAA31584.1| [Neurospora crassa OR74A] gi|28950084|emb|CAD70847.1| conserved [Neurospora crassa]
  misc_feature (1260)..(1553): NCBI GI: 268571005 Blast Desc: CBG25020 [Caenorhabditis briggsae] gi|187039541|emb|CAP21491.1| CBG25020 [Caenorhabditis briggsae]
  misc_feature (1249)..(1553): NCBI GI: 268571005 Blast Desc: CBG25020 [Caenorhabditis briggsae] gi|187039541|emb|CAP21491.1| CBG25020 [Caenorhabditis briggsae]
  misc_feature (1439)..(1553): NCBI GI: 268558452 Blast Desc: CBG18881 [Caenorhabditis briggsae] gi|187024180|emb|CAP36224.1| CBG18881 [Caenorhabditis briggsae]
MLILLQAENSEVEGEGGDGAPSESTPPDTPSPKSKKEKKKKKKGKSKSEPEDASPEPEADAEPVPEPKQAPETPTSKKPPRATSLKSEPSEGSSDPPATTEEVSDNTANDQAPDDAEDGANAPNLEAATAPETEIPVEAEPVAEPQSEAKEASGDAPPPDASEVGGSSGDAPEISAKAVAQDEEPKAESAVEPAVEAESSAPIEAVSDATEEQPTTSDEVKPESSVEHEDSPAIETQEEVPEEPKTDEPVAELTEVAPEETPATMDDSTTDKPAMDGAVTEQVPITEPETSESAEKTDEPEHIEKISETVAEAEAISEEGPEGNDEAIVEESKEAAPTTSEKSVEPVEESQAAISEESTTEVPAAEESAVPEASEQHPESVSKDAETEAEAPVEATSEPEKIAENAEEHPAADTTGDIQEPSEDTAPAIEDTPAETGASESISHAEEVKETEATSDDKTDAPAPETDNEASAEAAPNDDVKEPELEGAQEQEEPADATEPDVIPVEEAPATVDTPEASESLEKTKAEEAPAQESVEEPTESNETDITDPEPKTEVTEAEEPTSTDDNPKSLEVAEEAPADKDAPIDEAPEAPVVETAEESQAELETQQTEPEATDDAQADPEPLEAPNTEAHSSGDAEAQEPESTAQIDDNEATASEEPEAPATEDKKETEEAPVAEEEAPATEPQIEAPFETVAAEEPADAPVDTPADKEVEESNEPPTITSIEVPAEVPVEGSTKDSVDESATEPVEKAVETETEPTPASENTSPGEPTDENPAETTAEPETETQDEPAKAEGDEPEADAHDSGPDDWELDAEDDASVIGADETVAAGPETEAPIVDDHAALESMVYNESAPVEGTPEPEPEAAVVDIAEPEVEHTDAPAEEAKPVEPEIAGEVDSLGETPTDENVEESEALTQEVKDTEAVPEESVTAEEPTASEEPTASEESTIPEEPAVVEAPAPAEESAVADEPTAEEKATDEPVTEDMAVEESPAESDATKEVIAQEQTEPVTESEVTEPVVEKEPEPVEEAVAVEPEAKDDSSEEVAAVEAPAAEEPATVETQEETPADEPIAEESKAEETVVEELVAEASAVEEPTSEVPAAEESAVEKPAVEESVAEEVHDEEPAESAAEEPTAAEPEASKEPIVVEETSTEESIAKEPEVIEEPAVVEKAAEEPAVDNVTEAAAVEEPVSEEPAALDETPAAQLETESPSDEIGVEEAAAEPVVDTAPVEDTSQNVAAEELAAEEPAPEVPVADETPAEGQPAETAPAEESIATAPAEDASEENEPNDSAAVEPVEDAPAVEQPANEEPSVDEVAVDGSAPEEPVDEVPKDVEVEEPATEDVPEAPVVEEIQGEEAPSESTTEEPAAEEIVETEEPIMNAAPVEESHDEPPVEEAPKEIEAEEPAAEEAPDVAPGDNEAAIVEAAPDVGIVSKAVDKDEPADEAPTEEESREIEAEEPTVHTAVDEAPIDEAPLNEEPVEEVVTKEPPTDESPEESPEEPPVEETVVEQAPAEDAPIESAPIESAPIEDVPIEDDSVKDEAPLEEAPVDETPSTEITAAEPETVAPAEVVVDEAPASEEAVVEEVSREIAPEEAEPEAPKGTIPAQPDVVEAPEPPKDEAANEKAEEAEESKDTVGPIPGDERTAKRSSRGKHEFVFCFVDDAASDVVLDIGGDVPEPVLENDALLDNCVENTSESAFATTPHDIDNVAGASLEALESSSDDKHHSIKSIPENSSTDADPIALDVWPVDACNPGSENSENGGLVDPFDIQEVDETSASHFHEPKDPFCEASTQEIVGAPRDFIPTLEMDIRHEGIPAEDHIEATGAADIDYFQHKVRAHESDKSGLHEARDANTMPWRADLTAPDPPTPEGDLILGSPESAIVAISNEDIPRAELVEDTHPREATQVNQKSHASLQEPAQDDLLSPEHVELGQSFYSDQFDLEFKEVYLQHSKNDNLYVPTQANATLGDSLGVKDYIDGMSAASSPFIDDPIIENADVSHNPSAENLDSIDNGEASSATNLAVNSMIEPVVLTHDKPDHGFSGIAVHSAVRDVDQSEVFVQKHIQEEDDTAVDAKSTKEHTILPERDLDIAVIENCPQQPITENSALVDGFASHPHWASDDDVAHSIKEELQHDNNNAASVENANLTELAEAANAAMHLHDLDHKNDDEHVTASSLPEATSEHVAGDRLLEYIVPEKGTKTTATSSLPDTEEYNVPGESEDEAEDRVDIDYLPKNLHVVVPLEDGRAERVKANTTHIADFLEDTPRALAYSSEPPIDHVAYVSKDIPHVAEGEHVSVSPSQRNVDTTESVTLDGSDSHDIEPASMRNATRSTDSRRVPDVPQDSTIAQTITLDPSEGLNTEPHIDGSSSSVLEDAATSITPGIGTYDSNEHGNLNLPIPPHSSAKAIDTSDSAARGGFEPQSSPRPTPDLEGWPLAQGSRDPISTADEVIDREAETGEAFPTSSIEDHLSTRQDPPHSEGKDNSYIHVSTSVKNPPKLQEQLPADTAASVDRNSVPSTTTKHIQQHAIDSEWAPSIASGISTPISPVPSHLEDAFMFDRIPSPIPPKSKRRAHRPSLIHSSTQTDDESAFSTPGSPILGPSSSTFDEPRPATPAIELPDFADPKARALGRARSQRRTRRRNLRLAEETVAAAVVIYATAQELSQPPEIISRAFEVDQSIARLMEEAQGLVQGSSDVVSLGDVAGERSISNEIDVSLAVADLSTDDEDKDRHHRHRHHRHHRHSSSGSKESSRSIEERRHHHSSSRSKDSVNSDEHRRHHRHHRRESDLSVKSTSDRTLDGSTPSTPKRVEREREKVDSGFESGPSPSHHRRRRTPEEQAAHDKRKAERKARDAEEGARDRDRDRERERERERERESRKRDSDPAAAERHSHRSSRRSSQSFPERERRVSISEAPVPGKKFFDMKNGESVLAPNTRSPRREEFAIPRGSPARGSPRDSPRESPRQSPRPDKRLSTSSRHHGSHRRSADISRSKSTRHHDEPREESRRHRRESVHHVRAEEDPKASTSSHDREARESRDAHRSRREERQRTRDAEAAKKSKKDGASGGLKAAFKKLFT

SEQ ID NO: 17234 - DNA, 6240 bp, Muscodor strobelii
  misc_feature: SGI EST ID NO. CUFF.40561.1
  misc_feature: Variant of the nucleotide sequence at SEQ ID NO 17232
ggcgactactgaagaagtatccgacaacactgccaacgaccaagctcccgatgatgccgaagatggggctaatgcgcctaatcttgaggccgccacagccccggagacagaaataccagtcgaggctgagcccgttgcagaaccgcaatccgaggccaaagaggcgtccggcgacgctcctccaccagacgcttcggaggttggcggatcatcaggtgatgccccagaaatcagcgccaaagccgttgcccaggacgaagagccaaaagcggaatccgcagttgagcccgcagtcgaagcagaatcctctgcgccgatcgaggccgtcagcgatgccaccgaagagcagccaacgacctcagatgaggttaagcctgaatccagtgtcgagcatgaagattctccagcaattgaaactcaggaagaggttccagaggagcccaagacggatgagcccgtagccgaacttactgaagttgctccggaagagactccagcaaccatggatgattccaccactgacaagcccgctatggacggagccgttacggagcaagtacccataactgaaccagagacttcagagtctgctgagaagacagacgagccggagcatatcgaaaagatatcggagactgtggctgaggccgaggctatctccgaggagggtcccgagggcaatgacgaggctatagtcgaagaatcaaaagaagcagccccaactacaagcgagaaatccgtcgagcccgtcgaggaatcacaagccgctatctctgaggaatctacgactgaagtccctgccgcagaagaatctgccgtgcctgaggcttcagaacaacatccggagtcagtatcgaaagacgccgaaaccgaagccgaagcaccagttgaagccacgtccgagccagagaaaattgccgaaaacgccgaggagcatcccgcggccgatactactggggatatacaggagccttctgaagacactgcccccgccattgaggataccccggccgaaactggcgcctctgagtctatctctcacgctgaggaggtcaaggagaccgaggcaactagtgatgacaagaccgacgccccggcgccggagacagacaatgaagcatccgctgaagccgcaccaaatgacgatgtcaaggagccggaactcgagggtgcccaggagcaagaggaacccgctgatgccacggagccagacgtgattccggtcgaagaggctcccgccacagtcgatactccggaagcgagcgagagcctcgagaaaacaaaggccgaagaggctccagcacaagaatcagtggaagagcctactgagtcaaatgagacggatattaccgatcctgaacccaagacggaagttacagaggccgaggagcccacgtccacggatgacaaccccaaatcactagaggtcgcggaagaagcacccgccgataaggatgcaccgatcgatgaggcacccgaggcgccagtggtcgagactgcagaggaatcacaggccgaattggaaactcaacaaactgagcctgaagccacggatgatgcacaggcagaccctgaaccccttgaagctcctaataccgaagctcattcgtcaggcgatgcagaggcacaggaaccagaatcaacagcacaaattgatgacaacgaagcgacggcttctgaggagcctgaagcacctgccacggaagacaagaaagagacagaagaagcgcccgttgctgaagaggaggcgcccgctacggagcctcagattgaagctcctttcgagacggttgctgcagaggagcccgctgacgcacccgtcgatacacccgccgataaagaggtcgaggaatccaatgagcccccgacaattacttccatcgaagttccagcggaggttcctgttgaagggtccacaaaggattcagttgatgagtccgctacggaacccgtcgagaaggccgtggagacggaaacagagcctacaccagcgtccgagaatacaagccccggagagccaactgacgaaaaccccgcggaaacgacagcggagccggaaacggaaactcaggacgaacctgcaaaagccgaaggggacgagccagaagccgacgcacacgacagcggaccggatgactgggagttagatgccgaagatgatgcatcggtcatcggggctgatgaaaccgtggctgccgggcctgaaacagaagcaccaatagtagatgatcacgctgcgcttgaatccatggtctataacgagtccgcgccagttgagggcacgccagagccagagccagaggcagctgttgtggacattgcggagcctgaggttgagcataccgatgctccagcagaggaagccaagcctgttgagcccgagattgctggtgaggttgactctctgggtgagactccaactgacgagaacgtcgaggaatctgaagctctcactcaagaggtaaaagacaccgaagctgttcccgaagagtccgtcactgccgaggagcccaccgcaagcgaggaacctactgcttccgaagaatcgactattccggaagagcccgctgttgtcgaagcacccgctcctgccgaggaatccgcggtggctgacgagcctacggccgaggaaaaggcaactgatgagcctgttactgaagacatggccgtcgaagaaagtccagcagaatccgatgcaacaaaggaagttattgctcaagaacaaaccgagccagttacggagtcagaagttacggagcccgtcgtcgaaaaggagcctgagccagttgaggaagccgtggcagtagaacccgaagccaaggatgattcatccgaagaggttgctgctgtcgaggcacctgcagcagaagagcctgcaacagtcgaaactcaagaagaaacccctgctgacgagccaattgccgaggaatctaaggctgaagagacagtcgttgaagaacttgttgctgaagcatctgccgtcgaggagcccacttccgaagtgcccgctgctgaagaatctgctgttgagaaacccgccgtcgaggagtccgtagccgaggaggtacatgacgaagaacctgctgaatccgccgccgaagaacccactgccgctgagcccgaggcttccaaggaaccaatagttgtggaagagacttctacggaggaatctatcgccaaggagcctgaagtcatcgaagagcccgcggtggttgaaaaggcagccgaagagcctgcagttgacaacgtcacagaggcagcggccgtcgaagagccagtttccgaagagccagctgctctcgatgaaacacccgccgcacagctcgaaactgaatctccatccgacgagatcggtgtagaggaagcggccgcggaaccagttgttgatacagcccccgttgaggatacttcccaaaacgttgcggccgaggagctcgccgcagaggaacctgcaccagaagtacccgtcgcagacgagactccggcagaaggacaaccagccgaaacagcacccgcagaagagtccatcgccacagctcccgctgaagatgcttccgaggaaaatgagcccaatgattctgcggcagtggaaccagtggaggacgcgcctgctgttgaacaaccagctaacgaagaacccagcgtagatgaggttgctgtggacggatccgcacctgaagagcccgtcgacgaagtgcccaaagacgtcgaagtcgaagaacctgcgacggaggatgttccagaggcacctgtagttgaagaaattcagggtgaagaggcgccttcggaatcaacgacagaagagcctgcagcggaagagattgttgagaccgaagagccaatcatgaacgcagctcccgttgaagaatctcatgatgaaccacccgtcgaagaagcgcctaaggagatagaggcggaggaacccgcagcagaggaggctcccgatgtcgctccgggagataatgaagctgccatcgtcgaagcggctcctgacgtaggaatcgtctcaaaagcggttgataaagacgagcccgcggatgaggctccaacagaagaagaatcaagagagatcgaagccgaagagcccacagtccatactgccgtcgacgaagccccaattgacgaggcaccacttaacgaagagccagtggaggaggttgtaacaaaagaaccaccaacggacgagagccccgaagaaagccccgaagagcctcccgtcgaagaaaccgtcgttgaacaagcgcccgctgaagatgctcccatcgagagtgcccccatcgagagtgcccccatcgaggacgtgcccatcgaggacgactccgtcaaagatgaagcccctcttgaagaggctcccgtcgacgaaactccaagcacggagattacggccgcggagcccgagaccgtagcgccagctgaagttgtagtggacgaagctccggcttccgaagaagccgtcgtggaagaagtttcaagggagattgctccagaggaggcagagcccgaagctccgaagggaacgattccggctcagcccgatgtcgttgaggcgccggaacctcctaaggatgaagctgcaaatgagaaagcggaagaggctgaggagagcaaagataccgttggtcccatccctggtgatgagagaactgcgaagaggagcagtagagatgacgaagacaaagaccggcaccaccgccataggcaccatcggcaccatcgacactcatcttcgggctcaaaggaaagcagtcgtagcatcgaagagcgccgacaccatcattcctcttcaagatcgaaagacagcgtgaacagcgatgaacatcggcgccatcatcgacatcatcgccgagagagtgatctctcggtaaagtctacttctgatcgcaccttggacggatctacgccttcgacgccgaagcgagttgagagagagcgtgaaaaggttgatagcgggttcgaaagtggacccagcccctctcatcatcgtcgtcgtcgcacgcctgaagagcaggccgctcatgataaacgaaaagcagagcgcaaggcacgcgatgcagaagaaggcgcacgagatcgagacagagaccgtgagcgtgagcgtgagcgtgagcgtgagcgtgaatccaggaaacgtgactcggatccagcggcagcagaacgtcattctcatcgcagctccagacgttctagccaatcttttcctgagcgtgagcgccgcgtttcgatcagtgaagcaccagtgcctggaaagaaattctttgatatgaagaacggtgagagcgtcctcgctccaaacactcggtcgccgagaagagaagaattcgccatcccgcgcggatcaccagcccgtggctcacctcgcgactcaccccgagaatcaccacgtcagtcacctcggcccgacaagcgattgagcacttcatcgagacaccatggctcacatcgtaggtctgctgatatctcacgatccaagagcacgcgtcatcacgatgagcctagggaagagtccagaagacatagacgagagtcggtccatcatgttcgagctgaagaggacccgaaggcatccacctcgtctcatgacagagaggctcgcgagtcgagagacgctcatcgttcacgacgcgaggaacgccagagaacgcgtgatgctgaggccgcgaagaagagtaagaaggacggtgcttctggtggtctcaaagccgccttcaagaagctttttacgtaagcgcagattgcatggtggttcgaaaggttatgaaaaagggaagacgaagatatggtacatgtatgtatgagtttgtaaaggatacgggacggacttcgggttggtcgggcatggaggatattcggcagaacgacgttacgatgcatagatatgttggcacaagcatggaagtatggcctgttggattacgacttgatgattaacatcattgcgttgcgccttgttttttgttcgatatctgttactttctacttctttctcatacgaactcctattcttgtatgaaacaagcacttgggacgacaagactacgatgatttggattgtattaagtcagtttgttacgatgcggtgattttaatgatggaatgtgtatcagtgagcagaaatagattgatcaatttttgaattttgcatatggtttgccgcacttttgtgtaattttgtcagtagagagttcgaccagggactctgatgagagactgaaatacatggacgtatagacagatgtttac

SEQ ID NO: 17235 - DNA, 675 bp, Muscodor strobelii
  misc_feature: SGI cDNA ID NO. 565753
  misc_feature: Encodes the peptide sequence at SEQ ID NO 17236
atgtctggcgtctggggctggtttggcggcggtggtgccgcccagaagaagaaggactcgcccaagaatgccatcctcggcttgcgcacccagcttgagatgctgcagaagcgcgaaaaacacctgcagacccagatggacgaacaagaagccatcgcccggaagaacgtcaactccaacaaaaatgctgccaaggctgccttacggaggaaaaaggcacatgagaatagtctcgaccagaccatcgcacaaatcggcacgctcgaacaacagatcaacgctatcgagtccgccaatatcaaccgcgaaacccttgccgccatggagagagctggcgaagccatgaaggctatccacggcaagatgacagtcgacaaggtcgacgagactatggacaaattgcgtgagcagaacgagctgagcaaagagattgtcgacgccattaccagccagtctcttggcgaacccatagacgacgacgaacttgaagcggagctcgaggatctgcagcaagagcagctagaccaaaagatgctcgaatctggaagtgtaccagtctcagcccccccagatactgcacaaagactccccagcgtcgccaccaagccaattgctctcaccgaagacgacgaggaagaggagcttcgaaagctacaggccgaaatggctatgtga

SEQ ID NO: 17236 - protein, 224 aa, Muscodor strobelii
  misc_feature: SGI Peptide ID NO. 565753
  misc_feature (23)..(204): Pfam Id: PF03357 Pfam Desc: Snf7
  misc_feature (1)..(224): NCBI GI: 154316424 Blast Desc: BC1G_04143 [Botryotinia fuckeliana B05.10] gi|150845943|gb|EDN21136.1| BC1G_04143 [Botryotinia fuckeliana B05.10]
  misc_feature (1)..(224): NCBI GI: 156043207 Blast Desc: SS1G_10606 [Sclerotinia sclerotiorum 1980] gi|154694994|gb|EDN94732.1| SS1G_10606 [Sclerotinia sclerotiorum 1980]
  misc_feature (1)..(224): NCBI GI: 116206792 Blast Desc: CHGG_02689 [Chaetomium globosum CBS 148.51] gi|88183286|gb|EAQ90754.1| CHGG_02689 [Chaetomium globosum CBS 148.51]
  misc_feature (4)..(224): NCBI GI: 46137153 Blast Desc: FG10092.1 [Gibberella zeae PH-1]
  misc_feature (1)..(224): NCBI GI: 145607227 Blast Desc: MGG_04095 [Magnaporthe grisea 70-15] gi|88909654|sp|P0C149.1|SNF7_MAGGR RecName: Full=Vacuolar-sorting protein SNF7; AltName: Full=Vacuolar protein-sorting-associated
  misc_feature (4)..(224): NCBI GI: 256732190 Blast Desc: [Nectria haematococca mpVI 77-13-4]
  misc_feature (1)..(224): NCBI GI: 85099620 Blast Desc: vacuolar sorting protein 32 [Neurospora crassa OR74A] gi|74619776|sp|Q871Y8.1|SNF7_NEUCR RecName: Full=Vacuolar-sorting protein snf-7; AltName: Full=Vacuolar protein-sorting-associated
  misc_feature (1)..(224): NCBI GI: 171692129 Blast Desc: protein product [Podospora anserina] gi|170946013|emb|CAP72814.1| protein product [Podospora anserina]
  misc_feature (4)..(224): NCBI GI: 238844161 Blast Desc: vacuolar-sorting protein snf7 [Microsporum canis CBS 113480]
  misc_feature (4)..(224): NCBI GI: 169768984 Blast Desc: [Aspergillus oryzae RIB40] gi|83766820|dbj|BAE56960.1| protein product [Aspergillus oryzae] gi|152002606|dbj|BAF73608.1| ESCRT-III component [Aspergillus oryzae]
MSGVWGWFGGGGAAQKKKDSPKNAILGLRTQLEMLQKREKHLQTQMDEQEAIARKNVNSNKNAAKAALRRKKAHENSLDQTIAQIGTLEQQINAIESANINRETLAAMERAGEAMKAIHGKMTVDKVDETMDKLREQNELSKEIVDAITSQSLGEPIDDDELEAELEDLQQEQLDQKMLESGSVPVSAPPDTAQRLPSVATKPIALTEDDEEEELRKLQAEMAM

SEQ ID NO: 17237 - DNA, 1611 bp, Muscodor strobelii
  misc_feature: SGI EST ID NO. CUFF.40555.0
  misc_feature: Variant of the nucleotide sequence at SEQ ID NO 17235
ctgaagactagtggaccttgggtgcctccagggcagggccagacagcgagcacgcgggcagatcttgagaccacttgcatcatcggccgacaaggcagcctgctccctatcactccactccttatctgctgccgtcaccgtcaccgtcgccaggcttcctcgattcccatcgtccacctacgcccttgctctctattactcgactacgccgtcgcaggccctctgctttgtttccggttgcctagttccagcttcttccgaatttccaaccgcatcttcctctccgagccgtcgtcccatcggttcaactaccccgccaccgactcgtcttccagccatcgtcgacctctgaccttgcctgccatcgcaaccgccccgagggctcctacttcatcaacccctagctattggggatctccttatccgtcgtagagccgcatctctagtatcatcattatgtctggcgtctggggctggtttggcggcggtggtgccgcccagaagaagaaggactcgcccaagaatgccatcctcggcttgcgcacccagcttgagatgctgcagaagcgcgaaaaacacctgcagacccagatggacgaacaagaagccatcgcccggaagaacgtcaactccaacaaaaatgctgccaaggctgccttacggaggaaaaaggcacatgagaatagtctcgaccagaccatcgcacaaatcggcacgctcgaacaacagatcaacgctatcgagtccgccaatatcaaccgcgaaacccttgccgccatggagagagctggcgaagccatgaaggctatccacggcaagatgacagtcgacaaggtcgacgagactatggacaaattgcgtgagcagaacgagctgagcaaagagattgtcgacgccattaccagccagtctcttggcgaacccatagacgacgacgaacttgaagcggagctcgaggatctgcagcaagagcagctagaccaaaagatgctcgaatctggaagtgtaccagtctcagcccccccagatactgcacaaagactccccagcgtcgccaccaagccaattgctctcaccgaagacgacgaggaagaggagcttcgaaagctacaggccgaaatggctatgtgaggggcttttgggcggctaatgtctgtcttttcatgttttttagatcttatacgatcacagcatcgcatgcgagaagtgcactaggtggcggaaacaccgggctggttaagggcagctcatggctgggcctcatcagaagcatggttgtccttgacattccttctgtcacaggctgacgcgagcctaccgactctttcggcacaatagctgcaccttgctgcacctggcgttggcgttgcaagatgatggcgctacacgggacgatacactttgtttttttacttttcggggaatacgtctcctaagccggtactggctcagatatgctaagtcataagagatgagatgtaaagtgcccacagtttggatgtagtgatgcagatacatattggcaattgtaatctccctgcttctctagacacttcgcttcaacattgaaggaggccgtgtgttggtgaatacgaggtgcctcatcagtct

SEQ ID NO: 17238 - DNA, 726 bp, Muscodor strobelii
  misc_feature: SGI cDNA ID NO. 565754
  misc_feature: Encodes the peptide sequence at SEQ ID NO 17239
atgtctggcgtctggggctggtttggcggcggtggtgccgcccagaagaagaaggactcgcccaagaatgccatcctcggcttgcgcacccagcttgagatgctgcagaagcgcgaaaaacacctgcagacccagatggacgaacaagaagccatcgcccggaagaacgtcaactccaacaaaaatgctgccaaggctgccttacggaggaaaaaggcacatgagaatagtctcgaccagaccatcgcacaaatcggcacgctcgaacaacagatcaacgctatcgagtccgccaatatcaaccgcgaaacccttgccgccatggagagagctggcgaagccatgaaggctatccacggcaagatgacagtcgacaaggtcgacgagactatggacaaattgcgtgagcagaacgagctgagcaaagagattgtcgacgccattaccagccagtctcttggcgaacccatagacgacgacgaacttgaagcggagctcgaggatctgcagcaagagcagctagaccaaaagatgctcgaatctggaagtgtaccagtctcagcccccccagatactgcacaaagactccccagcgtcgccaccaagccaagtaagtgtctgtccgatggcaatcttactttacatactgatgatgtgatagttgctctcaccgaagacgacgaggaagaggagcttcgaaagctacaggccgaaatggctatgtga

SEQ ID NO: 17239 - protein, 241 aa, Muscodor strobelii
  misc_feature: SGI Peptide ID NO. 565754
  misc_feature (23)..(204): Pfam Id: PF03357 Pfam Desc: Snf7
  misc_feature (1)..(199): NCBI GI: 154316424 Blast Desc: BC1G_04143 [Botryotinia fuckeliana B05.10] gi|150845943|gb|EDN21136.1| BC1G_04143 [Botryotinia fuckeliana B05.10]
  misc_feature (1)..(199): NCBI GI: 156043207 Blast Desc: SS1G_10606 [Sclerotinia sclerotiorum 1980] gi|154694994|gb|EDN94732.1| SS1G_10606 [Sclerotinia sclerotiorum 1980]
  misc_feature (1)..(241): NCBI GI: 116206792 Blast Desc: CHGG_02689 [Chaetomium globosum CBS 148.51] gi|88183286|gb|EAQ90754.1| CHGG_02689 [Chaetomium globosum CBS 148.51]
  misc_feature (4)..(241): NCBI GI: 46137153 Blast Desc: FG10092.1 [Gibberella zeae PH-1]
  misc_feature (1)..(241): NCBI GI: 145607227 Blast Desc: MGG_04095 [Magnaporthe grisea 70-15] gi|88909654|sp|P0C149.1|SNF7_MAGGR RecName: Full=Vacuolar-sorting protein SNF7; AltName: Full=Vacuolar protein-sorting-associated
  misc_feature (4)..(241): NCBI GI: 256732190 Blast Desc: [Nectria haematococca mpVI 77-13-4]
  misc_feature (1)..(241): NCBI GI: 85099620 Blast Desc: vacuolar sorting protein 32 [Neurospora crassa OR74A] gi|74619776|sp|Q871Y8.1|SNF7_NEUCR RecName: Full=Vacuolar-sorting protein snf-7; AltName: Full=Vacuolar protein-sorting-associated
  misc_feature (1)..(241): NCBI GI: 171692129 Blast Desc: protein product [Podospora anserina] gi|170946013|emb|CAP72814.1| protein product [Podospora anserina]
  misc_feature (4)..(213): NCBI GI: 238501410 Blast Desc: SNF7 family protein [Aspergillus flavus NRRL3357] gi|220692176|gb|EED48523.1| SNF7 family protein [Aspergillus flavus NRRL3357]
  misc_feature (4)..(200): NCBI GI: 238844161 Blast Desc: vacuolar-sorting protein snf7 [Microsporum canis CBS 113480]
MSGVWGWFGGGGAAQKKKDSPKNAILGLRTQLEMLQKREKHLQTQMDEQEAIARKNVNSNKNAAKAALRRKKAHENSLDQTIAQIGTLEQQINAIESANINRETLAAMERAGEAMKAIHGKMTVDKVDETMDKLREQNELSKEIVDAITSQSLGEPIDDDELEAELEDLQQEQLDQKMLESGSVPVSAPPDTAQRLPSVATKPSKCLSDGNLTLHTDDVIVALTEDDEEEELRKLQAEMAM

SEQ ID NO: 17240 - DNA, 1611 bp, Muscodor strobelii; identical to SEQ ID NO: 17237
  misc_feature: SGI EST ID NO. CUFF.40555.0
  misc_feature: Variant of the nucleotide sequence at SEQ ID NO 17238

SEQ ID NO: 17241 - DNA, 408 bp, Muscodor strobelii
  misc_feature: SGI cDNA ID NO. 565755
  misc_feature: Encodes the peptide sequence at SEQ ID NO 17242
atgtcttctgcgcctctcccttcagaacggtgcctcctgtcaaatctttgcacgagacaagttggcgacaaagtgagattcatgggatgtgtagaaacatattcgaccagatctggacagctgattctcaaacataattgtcccaaggagagtatcgcagtggccaagacagatgtcaagcttctacttagaacgctcaaggcagagcagacggacgtcggtcaatgggtacatgtcatcggctacatcacggccatcgaaccaaacccgatgcctattgcgcaaaaggctgcgacttgcaagacgggggcatcagcgtccgtaagtgtccaggcgcttcttgtatggactgctcgagacctggatatcgaaagatatgaacgatctatgcttgctgaagccgcctga

SEQ ID NO: 17242 - protein, 135 aa, Muscodor strobelii
  misc_feature: SGI Peptide ID NO. 565755
  misc_feature (1)..(128): NCBI GI: 256732141 Blast Desc: NECHADRAFT_102654 [Nectria haematococca mpVI 77-13-4]
  misc_feature (1)..(132): NCBI GI: 171692127 Blast Desc: protein product [Podospora anserina] gi|170946012|emb|CAP72813.1| protein product [Podospora anserina]
  misc_feature (3)..(130): NCBI GI: 154316426 Blast Desc: [Botryotinia fuckeliana B05.10] gi|150845944|gb|EDN21137.1| [Botryotinia fuckeliana B05.10]
  misc_feature (4)..(128): NCBI GI: 225679029 Blast Desc: PABG_07474 [Paracoccidioides brasiliensis Pb03] gi|226288054|gb|EEH43567.1| conserved [Paracoccidioides brasiliensis Pb18]
  misc_feature (4)..(128): NCBI GI: 226281907 Blast Desc: conserved [Paracoccidioides brasiliensis Pb01]
  misc_feature (3)..(130): NCBI GI: 240280807 Blast Desc: conserved [Ajellomyces capsulatus H143]
  misc_feature (3)..(130): NCBI GI: 225560641 Blast Desc: conserved [Ajellomyces capsulatus G186AR]
  misc_feature (3)..(130): NCBI GI: 154278423 Blast Desc: [Ajellomyces capsulatus NAm1] gi|150413610|gb|EDN08993.1| [Ajellomyces capsulatus NAm1]
  misc_feature (3)..(128): NCBI GI: 238501412 Blast Desc: conserved [Aspergillus flavus NRRL3357] gi|220692177|gb|EED48524.1| conserved [Aspergillus flavus NRRL3357]
  misc_feature (4)..(128): NCBI GI: 258576571 Blast Desc: [Uncinocarpus reesii 1704] gi|237902733|gb|EEP77134.1| [Uncinocarpus reesii 1704]
MSSAPLPSERCLLSNLCTRQVGDKVRFMGCVETYSTRSGQLILKHNCPKESIAVAKTDVKLLLRTLKAEQTDVGQWVHVIGYITAIEPNPMPIAQKAATCKTGASASVSVQALLVWTARDLDIERYERSMLAEAA

SEQ ID NO: 17243 - DNA, 573 bp, Muscodor strobelii
  misc_feature: SGI EST ID NO. CUFF.40557.0
  misc_feature: Variant of the nucleotide sequence at SEQ ID NO 17241
gaagaaatcactccagtacgccgccagattagagaggtactgctggacttctttatttgctttagagcttccacatcctgatcgaagactggatgctcgatcatttatgatgattatcagtagctaggttccttccaggctccaagccttactcaacggtgggcccggtatctaatatacaattgacatcttccaacatgccattgcggcattgatacatcgtccagccctcgtgacacggtcccaagaactgcctcttatgcgctttcggagcgacctacacagtctagttttgtgccatcatgtcttctgcgcctctcccttcagaacggtgcctcctgtcaaatctttgcacgagacaagttggcgacaaagtgagattcatgggatgtgtagaaacatattcgaccagatctggacagctgattctcaaacataattgtcccaaggagagtatcgcagtggccaagacagatgtcaagcttctacttagaacgctcaaggcagagcagacggacgtcggtcaatgggtacatgtcatcggctacatcacggccatcgaaccaaacccga

SEQ ID NO: 17244 - DNA, 396 bp, Muscodor strobelii
  misc_feature: SGI cDNA ID NO. 565756
  misc_feature: Encodes the peptide sequence at SEQ ID NO 17245
atgtcatctgtaccgatgaacaaatactggattccaaatctcgaaatcagcaagaaggtccttacgcaggagcttcaatactaccttgggcccgaggcaacagtcagaccgtacactcgcgaaggtgaagatggctttcttatcaccacgcctgggccctgtttgagcgacgagcaaatcgatgatatctgcttgaaatcgaaggagctgtgggagagacaggctgcagcaaagacccagcaatcacaaagcaaggtactcaaacgcccgttgcatcagccagtccttatctcgaaaggcactggagacgcccagaagcgccgcaacaatcggagaggtgcggtctcgaaacgcgtgcataacgatagaaggggtagcgaggcactgcggaagtga

SEQ ID NO: 17245 - protein, 131 aa, Muscodor strobelii
  misc_feature: SGI Peptide ID NO. 565756
  misc_feature (1)..(104): NCBI GI: 85099616 Blast Desc: NCU01281 [Neurospora crassa OR74A] gi|28922344|gb|EAA31582.1| [Neurospora crassa OR74A] gi|38566803|emb|CAE76111.1| [Neurospora crassa]
  misc_feature (1)..(102): NCBI GI: 171692125 Blast Desc: protein product [Podospora anserina] gi|170946011|emb|CAP72812.1| protein product [Podospora anserina]
  misc_feature (6)..(101): NCBI GI: 261352024 Blast Desc: conserved [Verticillium albo-atrum VaMs.102]
  misc_feature (6)..(97): NCBI GI: 156043211 Blast Desc: SS1G_10608 [Sclerotinia sclerotiorum 1980] gi|154694996|gb|EDN94734.1| SS1G_10608 [Sclerotinia sclerotiorum 1980]
  misc_feature (2)..(103): NCBI GI: 116206790 Blast Desc: CHGG_02688 [Chaetomium globosum CBS 148.51] gi|88183285|gb|EAQ90753.1| CHGG_02688 [Chaetomium globosum CBS 148.51]
  misc_feature (6)..(101): NCBI GI: 154316430 Blast Desc: BC1G_04146 [Botryotinia fuckeliana B05.10] gi|150845946|gb|EDN21139.1| BC1G_04146 [Botryotinia fuckeliana B05.10]
  misc_feature (5)..(78): NCBI GI: 255936717 Blast Desc: Pc13g09620 [Penicillium chrysogenum Wisconsin 54-1255] gi|211584005|emb|CAP92031.1| Pc13g09620 [Penicillium chrysogenum Wisconsin 54-1255]
  misc_feature (6)..(78): NCBI GI: 121705746 Blast Desc: conserved [Aspergillus clavatus NRRL 1] gi|119399282|gb|EAW09710.1| conserved [Aspergillus clavatus NRRL 1]
  misc_feature (1)..(112): NCBI GI: 212526754 Blast Desc: conserved [Penicillium marneffei ATCC 18224] gi|210072932|gb|EEA27019.1| conserved [Penicillium marneffei ATCC 18224]
  misc_feature (1)..(78): NCBI GI: 242781726 Blast Desc: conserved [Talaromyces stipitatus ATCC 10500] gi|218720006|gb|EED19425.1| conserved [Talaromyces stipitatus ATCC 10500]
MSSVPMNKYWIPNLEISKKVLTQELQYYLGPEATVRPYTREGEDGFLITTPGPCLSDEQIDDICLKSKELWERQAAAKTQQSQSKVLKRPLHQPVLISKGTGDAQKRRNNRRGAVSKRVHNDRRGSEALRK

SEQ ID NO: 17246 - DNA, 2495 bp, Muscodor strobelii
  misc_feature: SGI EST ID NO. CUFF.40616.2
  misc_feature: Variant of the nucleotide sequence at SEQ ID NO 17244
tagaggccaagcatgtaccatcatcactacaatgctctatcaggccagtcacgaatacatggaggactgttgagctccacctatgtctccaagaccttgaagactgtaggaggaggagaggatcttacgactcgtattgcgacgtgaatgtatagataagcagcatgatctattgctattccgcaacatctacccgcattgcctgataggtcgagtaatatctgcataggaaggagaggagatgtcggataggggccgcatagcttcaagttacccggcgcttatgccactctttgtgtcaagagtttcaatgttaagtctcatcagaaatgcgataacgggataatgctgctcgtaatcttgaataagcgagcactgtatcttctttttcgtcacaagtatcacccggtccaaattgatatcgaaacttgacacagttaatggcaccggaagtggactaccacgaaagaacgggatgtaagcacatagtcccgtcgaacgtgtgatgaccacctctctacgggggtccgtataagagtaagccaacaagtaatatagcataagcgtcgcaatcttctgaagtgacagacacgcgtcgatttgatatcagctgagatcgatcaccgatagtgtatgcgggattggccggtgactacaacaggcgcggtttgcgcccaggaaggtccaagataacatgaaggcgctgcgaagaggctttaagagcccgggaggtactccagttggtcggcacgaaagtagtccaggtaccttatgtacgacttggtgattatggtttaggtatgctaaggattgctgtcaagaaggctgggcctaatgcacaccccagacttgcatagtcttgtggaaaccggatagcgccccgtcgacaattgtctgaaacattatgcttttgcaaacaggggagaaagagcatgtggtctgagtttagacaaaggaagcatcgctattcgtcccttgtttgaaatggggcgtgaaagtgaggcgggcggagaagcccaacgtaggctgattcgaagcatattgcatatgtggctagacaacaacgcatgcattgatgtctgttcgaaagatgctgtttttcggaagcggtcgatatcaatatgcatctcgatgtttatggaagtgtggaatggttccacagaagagcgagttgcggccataaatggaaactagctggcctgaagctcttcttataaataggtggctgcttcatagtcttatccagcattcatgattagattcaacccgagcagaaccctccgagattggcgtcggcggtagcgcgaacatgtcatctgtaccgatgaacaaatactggattccaaatctcgaaatcagcaagaaggtccttacgcaggagcttcaatactaccttgggcccgaggcaacagtcagaccgtacactcgcgaaggtgaagatggctttcttatcaccacgcctgggccctgtttgagcgacgttcgtgagctctacatccatgctggcgaagctttaaggcattaatctcccctcaggagcaaatcgatgatatctgcttgaaatcgaaggagctgtgggagagacaggctgcagcaaagacccagcaatcacaaagcaaggtactcaaacgcccgttgcatcagccagtccttatctcgaaaggcactggagacgcccagaagcgccgcaacaatcggagaggtgcggtctcgaaacgcgtgcataacgatagaaggggtagcgaggcactgcggaagtgagcattccgcataaccttgactgagtaacaggcgtatcaccggtaattcgggcctatcagatcctagagtgtcggggagaatatggaagaggtaatagagagcattagatgggttcaatgattcggtcaacgttggcgaagaaggggagcctgataggaaagattggaaacacgagtgatgtcgtccagcgaggacgtgccatctggcattgctgtcaaagctgtgggtacacgcatgggagcctcacctgggccaatagcgccacgcgcaatcgagacattctgcatactgcgtgcgtggtgaagcgcaatagagggcttaattcggcgataggtgtgtgtgactattgtagatgatcgtaatagcttccatgttgtcctcattgccacataaaccttgcagcagtcgaagttctagaacgatatggaggcatgttagttaatgcaggtcctgtcgatcgtcctagtaattcagttattcagcttgcgacgattttctatcgcgacaaaaggtagacttggtggcacatggaggtatggttcgtggaacgtcggctcacggttggtctccacgttcacatcattcggcctagaaccggccacggagtcgagtgctggcagaaatagcatgatactgcatcgtccaatatgctagagactgcatccagccagcgtgaggattaccacacagtagacctcactcaggcggcttcagcaagcatagatcgttcatat

SEQ ID NO: 17247 - DNA, 3672 bp, Muscodor strobelii
  misc_feature: SGI cDNA ID NO. 565757
  misc_feature: Encodes the peptide sequence at SEQ ID NO 17248
atggcagctgtagtggtgccctcatcgggaactgcgccgccaccctcgacgcaggggccagcaccgctctcgctacaccggccattcttcgcaccagataacgagacgcaaggtctcacactaagatttcgcaaaacagcctcagcgtttgcttcctcgttcggcagtcgagcattcgagtatgactccacgttaggtcgtcttacagggtggttgatcgccgggcatctcaaggaaaccgtggctgttcctctccaaagcaccgtaacgcaactagtggaaaacagccaacacgaatggacatctcgaaacaagccatcccacttcattcgatgctatttcattggttccgatcagcatcatgccgctccttatttgtctatcttgtgcgatcataacgagtacagccagtttttacgtgggatagtgatcaagagtaaaatactttctgctcacccgaaatggcgttgctttcgactcccactagagcccaagcttctcaccataagtcccgttgaaccatctcaagatacatttgacgcgttagctcttgacgagtatgaaatcttcgttcgatcgggtcagttagccgctgtttgcccgttcgatttcgaagtctggagaaactcgacatttcttggcagagctacggtcggcggtattgttcgagtcaattcaaagccatatgctttgactgttgcccatgtcttccacgcattcaagccctctgagccacagtcgtttgaaatagacgagtctgaacttgacttgctagcgtcagatgaagaatctgaatgtgacgatgatatcagtctctcgttttcggaaaacgaacgccagccaaattcttcgtcgagtgaagaacggcttattagtccaccatcaatcgactactttgtagaagataaagtgtgtattggtcgcttaaagttcatctccaatctacaaaaagattcagaaggccagaacatattcgcgggactggattgggcacttctcgagtttgatgttgatagcggtgatcttgactcctctcctatgtcttactgcggtgctctagtcgacacagtcaaccaagagagaaaagtatcagtctacacgcagtcatcaactctgactgcttcattggtatctgacggaaaccttgagcttccagatggaacatttgggctccctattggcacaagctcacagcctgtcattgcgatctcgagccctgaaatacaatacgcacagcagggtgattctggctcatgggtcactcgttccaacaacgagcatttagggatgctgataggttcatcatcttttctacaagaagcttattttttaccattcaattggatcgtgaaggacatcgaccgccaactcggttttggacatatcgttgttgtaccagccctgagcgaatatggacctggcttgcagagacctactactcctccaagtgaaacagaagagcagaaaattttggcagtttcaaaagaggaccttgagtccttggggccctcgcttgcagagcaagtatccgatacactgttgacttccgatggacgactggggaaccgagaatttttgccggcggacgcaattgaatctttgctgacaagagagagtgtcgaggctgaattacattaccttgaggctgacgtgaatccagttcttgtcagctggatccttgccaatgctcggagagtatttttgactcttgtctggatcgacaaggccgatgctattcatgaactttgcaaacatggcttcgacgatgacgcgttacctgttgaaatttataggggccgcgattcaaagaaaagacgatcatggaatattcgatctgcagatatggcagtctcccccagagacggacaagagtggattgtatttcagcaatggagatcagtcgaagtcgaagccttcgcagataaacaatggctgtttctagccccaatcttcacgccagataaatttcattataatttttctgagcatacacctttaccgtttctgccagtaggcgatgggaatgcggttgcaggtttcttcggtgccgtacaccaagctgaacttcataaatcgcattcaaagactttagataaggtcgatgaaaacaagctgcttgtcgcaataaagcagacaaatgtgaacatggacgagaagatgtttgacgacgaactccaagtactacagatattgcatgaagcggatatgcataaccaacacatcattcggcctatcgcagcattcaataggggccaggatagatgttttgtcctaccttgggcgagtggtggtaaccttcgcagcttctggaataatacagaaaggtcgggattaaatagagctcttgttttgtggttcctgcaacagctccatggaatagcgggcgcgttgaagcatttgcacgagctaaacatacgacacggtgatttgaaaccggagaacattcttcacgatacccagtcagagccctatggtactcttatcatctccgatttagggtcaagtcgggtccatttccttgcaaccgacagacgtaatcggagtagcggaccatcagtgggcacacttcgttacggagcaccggaagacatccaagatacaaccggccgtcgctcgcggcttgttgatacgtgggctatgggatgtgtaattctcgagttcctcatatggctcatctatggcaaacacgcgctggatgagttcaacagaccgggagactaccaggcctattggcacaatatagacggacgctcagcagcactgtctccacatgtcgccaaatggctcaaccacatgtcatctgaaataccggcctatactgccatgcgcgatattcttgatattgtcaaaaatcgactcttagtagttgccttgccatctaaaaaccacctcgctacggcatcccgagcatcagcaactgaactaacagagcttatttcagatattttagataaggcctttcgagatgagcaatatttgtttgataaagaatggtggcaaagacctagatcgacgcctgagcccaggcttcatcccattcaacggcttgggtctcgaactttttcggaatacaatttatttcaattgcaactgaaagccacagaactgtcactagagaccatgccgagcccacccgctaccgttagttcgtttgatctacaattaactgacggctcattgaacccagatcaagagaaagagattatccgcgaggctctcgtaaacgtcggtttcaaggacaatgaattcaaattgctgccgagtgcaaccaaaggactccgaatcgaattgcccagacgactcacttcagcacaaaggcgtgaaattcgcgtgtgggtggaacgtagaagaagcgaggaagtaaaacttaagatccccgagccagaggaggtccaaacagaaaacgaggaagaacaggcgctgtcagctttcagcccacctccaagcccacggagcactctcttggacatgagaacaggaccggtagagatagaagtggtcgagctatccgataacgaaagacacttcagctcagctcaatcaaggccacccagattcatttcgggggagcggtcgcaaacgacactggacaatctattccccacagcttttctcccacggtcaggtttcttccaatcttcgccgatacgaccactgtatgcttcttcatga

SEQ ID NO: 17248 - protein, 1223 aa, Muscodor strobelii
  misc_feature: SGI Peptide ID NO. 565757
  misc_feature (706)..(888): Pfam Id: PF00069 Pfam Desc: Protein kinase domain
  misc_feature (42)..(903): NCBI GI: 256734727 Blast Desc: NECHADRAFT_75267 [Nectria haematococca mpVI 77-13-4]
  misc_feature (522)..(955): NCBI GI: 256721865 Blast Desc: NECHADRAFT_88069 [Nectria haematococca mpVI 77-13-4]
  misc_feature (525)..(1007): NCBI GI: 256723898 Blast Desc: NECHADRAFT_78374 [Nectria haematococca mpVI 77-13-4]
  misc_feature (525)..(996): NCBI GI: 256729997 Blast Desc: NECHADRAFT_82546 [Nectria haematococca mpVI 77-13-4]
  misc_feature (520)..(994): NCBI GI: 256722402 Blast Desc: NECHADRAFT_82208 [Nectria haematococca mpVI 77-13-4]
  misc_feature (523)..(974): NCBI GI: 256722820 Blast Desc: NECHADRAFT_87137 [Nectria haematococca mpVI 77-13-4]
  misc_feature (491)..(956): NCBI GI: 256723790 Blast Desc: NECHADRAFT_78344 [Nectria haematococca mpVI 77-13-4]
  misc_feature (496)..(958): NCBI GI: 164425000 Blast Desc: NCU06583 [Neurospora crassa OR74A] gi|157070747|gb|EAA32707.2| NCU06583 [Neurospora crassa OR74A]
  misc_feature (573)..(1020): NCBI GI: 256730245 Blast Desc: NECHADRAFT_82545 [Nectria haematococca mpVI 77-13-4]
  misc_feature (630)..(983): NCBI GI: 46110541 Blast Desc: FG02152.1 [Gibberella zeae PH-1]
MAAVVVPSSGTAPPPSTQGPAPLSLHRPFFAPDNETQGLTLRFRKTASAFASSFGSRAFEYDSTLGRLTGWLIAGHLKETVAVPLQSTVTQLVENSQHEWTSRNKPSHFIRCYFIGSDQHHAAPYLSILCDHNEYSQFLRGIVIKSKILSAHPKWRCFRLPLEPKLLTISPVEPSQDTFDALALDEYEIFVRSGQLAAVCPFDFEVWRNSTFLGRATVGGIVRVNSKPYALTVAHVFHAFKPSEPQSFEIDESELDLLASDEESECDDDISLSFSENERQPNSSSSEERLISPPSIDYFVEDKVCIGRLKFISNLQKDSEGQNIFAGLDWALLEFDVDSGDLDSSPMSYCGALVDTVNQERKVSVYTQSSTLTASLVSDGNLELPDGTFGLPIGTSSQPVIAISSPEIQYAQQGDSGSWVTRSNNEHLGMLIGSSSFLQEAYFLPFNWIVKDIDRQLGFGHIVVVPALSEYGPGLQRPTTPPSETEEQKILAVSKEDLESLGPSLAEQVSDTLLTSDGRLGNREFLPADAIESLLTRESVEAELHYLEADVNPVLVSWILANARRVFLTLVWIDKADAIHELCKHGFDDDALPVEIYRGRDSKKRRSWNIRSADMAVSPRDGQEWIVFQQWRSVEVEAFADKQWLFLAPIFTPDKFHYNFSEHTPLPFLPVGDGNAVAGFFGAVHQAELHKSHSKTLDKVDENKLLVAIKQTNVNMDEKMFDDELQVLQILHEADMHNQHIIRPIAAFNRGQDRCFVLPWASGGNLRSFWNNTERSGLNRALVLWFLQQLHGIAGALKHLHELNIRHGDLKPENILHDTQSEPYGTLIISDLGSSRVHFLATDRRNRSSGPSVGTLRYGAPEDIQDTTGRRSRLVDTWAMGCVILEFLIWLIYGKHALDEFNRPGDYQAYWHNIDGRSAALSPHVAKWLNHMSSEIPAYTAMRDILDIVKNRLLVVALPSKNHLATASRASATELTELISDILDKAFRDEQYLFDKEWWQRPRSTPEPRLHPIQRLGSRTFSEYNLFQLQLKATELSLETMPSPPATVSSFDLQLTDGSLNPDQEKEIIREALVNVGFKDNEFKLLPSATKGLRIELPRRLTSAQRREIRVWVERRRSEEVKLKIPEPEEVQTENEEEQALSAFSPPPSPRSTLLDMRTGPVEIEVVELSDNERHFSSAQSRPPRFISGERSQTTLDNLFPTAFLPRSGFFQSSPIRPLYASS

SEQ ID NO: 17249 - DNA, 3282 bp, Muscodor strobelii
  misc_feature: SGI EST ID NO. CUFF.40579.0
  misc_feature: Variant of the nucleotide sequence at SEQ ID NO 17247
ccgaaatggcgttgctttcgactcccactagagcccaagcttctcaccataagtcccgttgaaccatctcaagatacatttgacgcgttagctcttgacgagtatgaaatcttcgttcgatcgggtcagttagccgctgtttgcccgttcgatttcgaagtctggagaaactcgacatttcttggcagagctacggtcggcggtattgttcgagtcaattcaaagccatatgctttgactgttgcccatgtcttccacgcattcaagccctctgagccacagtcgtttgaaatagacgagtctgaacttgacttgctagcgtcagatgaagaatctgaatgtgacgatgatatcagtctctcgttttcggaaaacgaacgccagccaaattcttcgtcgagtgaagaacggcttattagtccaccatcaatcgactactttgtagaagataaagtgtgtattggtcgcttaaagttcatctccaatctacaaaaagattcagaaggccagaacatattcgcgggactggattgggcacttctcgagtttgatgttgatagcggtgatcttgactcctctcctatgtcttactgcggtgctctagtcgacacagtcaaccaagagagaaaagtatcagtctacacgcagtcatcaactctgactgcttcattggtatctgacggaaaccttgagcttccagatggaacatttgggctccctattggcacaagctcacagcctgtcattgcgatctcgagccctgaaatacaatacgcacagcagggtgattctggctcatgggtcactcgttccaacaacgagcatttagggatgctgataggttcatcatcttttctacaagaagcttattttttaccattcaattggatcgtgaaggacatcgaccgccaactcggttttggacatatcgttgttgtaccagccctgagcgaatatggacctggcttgcagagacctactactcctccaagtgaaacagaagagcagaaaattttggcagtttcaaaagaggaccttgagtccttggggccctcgcttgcagagcaagtatccgatacactgttgacttccgatggacgactggggaaccgagaatttttgccggcggacgcaattgaatctttgctgacaagagagagtgtcgaggctgaattacattaccttgaggctgacgtgaatccagttcttgtcagctggatccttgccaatgctcggagagtatttttgactcttgtctggatcgacaaggccgatgctattcatgaactttgcaaacatggcttcgacgatgacgcgttacctgttgaaatttataggggccgcgattcaaagaaaagacgatcatggaatattcgatctgcagatatggcagtctcccccagagacggacaagagtggattgtatttcagcaatggagatcagtcgaagtcgaagccttcgcagataaacaatggctgtttctagccccaatcttcacgccagataaatttcattataatttttctgagcatacacctttaccgtttctgccagtaggcgatgggaatgcggttgcaggtttcttcggtgccgtacaccaagctgaacttcataaatcgcattcaaagactttagataaggtcgatgaaaacaagctgcttgtcgcaataaagcagacaaatgtgaacatggacgagaagatgtttgacgacgaactccaagtactacagatattgcatgaagcggatatgcataaccaacacatcattcggcctatcgcagcattcaataggggccaggatagatgttttgtcctaccttgggcgagtggtggtaaccttcgcagcttctggaataatacagaaaggtcgggattaaatagagctcttgttttgtggttcctgcaacagctccatggaatagcgggcgcgttgaagcatttgcacgagctaaacatacgacacggtgatttgaaaccggagaacattcttcacgatacccagtcagagccctatggtactcttatcatctccgatttagggtcaagtcgggtccatttccttgcaaccgacagacgtaatcggagtagcggaccatcagtgggcacacttcgttacggagcaccggaagacatccaagatacaaccggccgtcgctcgcggcttgttgatacgtgggctatgggatgtgtaattctcgagttcctcatatggctcatctatggcaaacacgcgctggatgagttcaacagaccgggagactaccaggcctattggcacaatatagacggacgctcagcagcactgtctccacatgtcgccaaatggctcaaccacatgtcatctgaaataccggcctatactgccatgcgcgatattcttgatattgtcaaaaatcgactcttagtagttgccttgccatctaaaaaccacctcgctacggcatcccgagcatcagcaactgaactaacagagcttatttcagatattttagataaggcctttcgagatgagcaatatttgtttgataaagaatggtggcaaagacctagatcgacgcctgagcccaggcttcatcccattcaacggcttgggtctcgaactttttcggaatacaatttatttcaattgcaactgaaagccacagaactgtcactagagaccatgccgagcccacccgctaccgttagttcgtttgatctacaattaactgacggctcattgaacccagatcaagagaaagagattatccgcgaggctctcgtaaacgtcggtttcaaggacaatgaattcaaattgctgccgagtgcaaccaaaggactccgaatcgaattgcccagacgactcacttcagcacaaaggcgtgaaattcgcgtgtgggtggaacgtagaagaagcgaggaagtaaaacttaagatccccgagccagaggaggtccaaacagaaaacgaggaagaacaggcgctgtcagctttcagcccacctccaagcccacggagcactctcttggacatgagaacaggaccggtagagatagaagtggtcgagctatccgataacgaaagacacttcagctcagctcaatcaaggccacccagattcatttcgggggagcggtcgcaaacgacactggacaatctattccccacagcttttctcccacggtcaggtttcttccaatcttcgccgatacgaccactgtatgcttcttcatgatgtacataatggttttgtagcgttgtcattcattacagtatccaatttattgaatgcttctaccag

SEQ ID NO: 17250 - DNA, 1365 bp, Muscodor strobelii
  misc_feature: SGI cDNA ID NO. 565758
  misc_feature: Encodes the peptide sequence at SEQ ID NO 17251
atgctttcccacgtattcgttgtaggaacattggctctacaagcatcagcctctagtatcccgatatggcagcgagatggaagtattgctaattatcaggggcccgggcagctcatcagagacttgaggactccaagcaagacgccctctctgaggctaaggactagctcagcacatatcagggcttttgatcaagacaaggcggaacagttactgggcatggatagcatcgtggactgtcctcctaacggcatgacaagctgggatagtgctgttgatgccgcaaccttgttcattaacagccttggaggcaccccgatgacgttacagccggggacttgttatcacaaagaggcaggaactactatggcccaggtatgctgcaagggcgaaaagcctctaaagcttaccccagaagaggcacagattggattcgatgtcatcgaagagacttgtaccagtcgaaagtcatctggcacggttcgaacgtcgacgggtcttcagtacgctattcatgctaaggtccccgtccgttctcgtaatgccaacaagcgggcatcccagcgaccagtcaaacgatgccttgactcaggtacaaaggaggttacaggatgcgaagaggaagtttgcaaaccggctatcgctatgaacgaaagtggagactgccctaatgttggtaacgacgacaccgatggatgtgcatattgtaagtatcattgttttgtcgatgacctggcagcgacccgggtatccgattcgattccggaccatgccaaacaagaaagccgactaaaatatttttgtacactagactgcgaagtcaaagcggccaagtactatggagttccggaaatctatgacaatacaagatattgcgctggtgatgactgctacctcgaggaaggcgtgtcattcacagttgagaagtcggtgtcagtcgattttgccctggagggagagggtccattggagttggtgctcggtgctggcattagccttggggttgcagtatcgaaaacaactgctctcacgcaaggacacaacttcggcgaaggggcttgtggttattggtacaaggcaccagtgatgcttcacagctgtggatcgatgacagagtacaatcccaacttaacaggtccagagggcggcccgctcctctgcgcgagcgatgcgagtttctccaagacaactgaaaacgtttgtagcgagatccaagccacagcaatcgacggcgacgatgcggatgtggtggtcattccgagatgggtcaactgcggtgataggaaagacctccctgacgaccagaattcggacccttggcaaaacacttacggtgggcagaacgatgaaattcacgaatgttag

SEQ ID NO: 17251 - protein, 454 aa, Muscodor strobelii
  misc_feature: SGI Peptide ID NO. 565758
MLSHVFVVGTLALQASASSIPIWQRDGSIANYQGPGQLIRDLRTPSKTPSLRLRTSSAHIRAFDQDKAEQLLGMDSIVDCPPNGMTSWDSAVDAATLFINSLGGTPMTLQPGTCYHKEAGTTMAQVCCKGEKPLKLTPEEAQIGFDVIEETCTSRKSSGTVRTSTGLQYAIHAKVPVRSRNANKRASQRPVKRCLDSGTKEVTGCEEEVCKPAIAMNESGDCPNVGNDDTDGCAYCKYHCFVDDLAATRVSDSIPDHAKQESRLKYFCTLDCEVKAAKYYGVPEIYDNTRYCAGDDCYLEEGVSFTVEKSVSVDFALEGEGPLELVLGAGISLGVAVSKTTALTQGHNFGEGACGYWYKAPVMLHSCGSMTEYNPNLTGPEGGPLLCASDASFSKTTENVCSEIQATAIDGDDADVVVIPRWVNCGDRKDLPDDQNSDPWQNTYGGQNDEIHEC

SEQ ID NO: 17252 - DNA, 1419 bp, Muscodor strobelii
  misc_feature: SGI cDNA ID NO. 565759
  misc_feature: Encodes the peptide sequence at SEQ ID NO 17253
atgctcagtctccttacgttccatcggtctttacccggactcgagtgtaatggtactgatgtgcctttgatagtgctgaacgccccattactactgttttcggccgcaacgaagcgtgtcggcgaccttgaatctcatactgctacgctcgcaatcctctcggcacgtcgcgtgctgatttcccaacttctcgagcatttgcatcacccagaagaagtgaggatgagccacatgtcgaacttagcacgccgtaacggcaatgggggatcccgcaagcgtagtcgtcagcatgaattggctcttcctggatggcacaagagaaccagaattagtacgctggaggagagactcgataaggtcgaggaggggcttgaaaacttcgaggagagactagaaaaggtcgaggctcacttagcccaattcaactcaacgagtcctcatgaagtcctatctttgtcgtccttgccaccaccaggatcgacctgggaaaatccctggggtaacaatggactcccagactccatcttgggccgtatcaatgagttgatggatatcgaaaagaagagagcaaagatgcttgcgaacttcatccatccgaacgatcgacaggcagcgttgatcaacaatgcgaaggacgcccaacgacagaaggttggtcttgttcaacgacaacatcacctcaactcacctattctcggacgacctgttggtagactgtcgcctaccaatagttttggcgatggagattcacttagcgagctgcgccatctcctctcttcgacatctaatcccgagcacgttcttgggtcttgccgccaatctggtctttctggccctttgacatcaggtcgtcgccccgacgagggtgacgatcttcaggagtccgacgagcccggcaacactgacgagtctgaagagccttttccacgccagtctggtctcctgacatcacgtcgtcgtcaccactgtgcgggtgaggatcttctagattttcatgagtctgacgacactgacgagcctgaagagcctctcccactctatggccctgaaatataccgtcatcgccttctcacttcattcgacgatcttctgaaccgttcgtaccagtccagtgtctctagctctgtgacaccacctcgtcgtcaccccaatgcgggtggcgatcaccctccacgccagtctggtcttctcggcaacggaacgtcacctcgttgtcaccccggcggcctgtatcgcacacgtattagacaggcaaagagaccagcagaagaagcaaatagggccgctagaaatgctgacagagaggcaagaactaagatcaaagctcaagctgaagccgaggccgaggccgctgccgaagatactggagataaccagcattgtttcctcattgaggagatgacggaattaattgtctga

SEQ ID NO: 17253 - protein, 472 aa, Muscodor strobelii
  misc_feature: SGI Peptide ID NO. 565759
MLSLLTFHRSLPGLECNGTDVPLIVLNAPLLLFSAATKRVGDLESHTATLAILSARRVLISQLLEHLHHPEEVRMSHMSNLARRNGNGGSRKRSRQHELALPGWHKRTRISTLEERLDKVEEGLENFEERLEKVEAHLAQFNSTSPHEVLSLSSLPPPGSTWENPWGNNGLPDSILGRINELMDIEKKRAKMLANFIHPNDRQAALINNAKDAQRQKVGLVQRQHHLNSPILGRPVGRLSPTNSFGDGDSLSELRHLLSSTSNPEHVLGSCRQSGLSGPLTSGRRPDEGDDLQESDEPGNTDESEEPFPRQSGLLTSRRRHHCAGEDLLDFHESDDTDEPEEPLPLYGPEIYRHRLLTSFDDLLNRSYQSSVSSSVTPPRRHPNAGGDHPPRQSGLLGNGTSPRCHPGGLYRTRIRQAKRPAEEANRAARNADREARTKIKAQAEAEAEAAAEDTGDNQHCFLIEEMTELIV

SEQ ID NO: 17254 - DNA, 942 bp, Muscodor strobelii
  misc_feature: SGI cDNA ID NO. 565760
  misc_feature: Encodes the peptide sequence at SEQ ID NO 17255
atgaaacttctctacccaacatccctgaagctcgacatcccgagtcttgagggcttcggagtatcgctccactcctatgatgtcaagagcacaatcccagaggatcttatcgacgcggaagtcctcgtgacgtggactaacaccgccgataacctgaaggacgctgcgaagcgtatgaacaaactgcgctggattcagtcgctagccgcaggaccgaatgatgttctttcagcaggctttccttcatcggtaattgtcacaacgggctcaggatgtcacgatcgcacagtcgccgagcacgccttaggcttgttgcttgtcgctgcacgccggttccacgagatgcgcgactatcaggtgctgagcaagtggccaggacatctcggtggtccccaacccgaccgcccgaaggaccgattcaccacattgcgtgacgccaacattctcatctggggttatggcaatatcgccaaaacacttgcaccacacctcaccgcttggggagctaccgtgcgcggtgtcgcgagaacaccaggtgtccggaatggtgttgaggtctatggtgaggacaagctagccgagctattaccccagacggatgcagtcgtcatgattctaccaggctccgacagcaccaagaacgctcttaatgccgagcgcctgaagcatttaccgaatcatgcatggattgtcaatgtcgggcgtggaacgtcaattgacgaggacgcgctagccgacgcgcttgagaagggtgaaattggtggagcagcgcttgatgtctttgtcaaagagccgctgccatctgagtccaagctgtacaaggcacctaactgctttgtgagtccccacgctgccggtggaagaccgcaagacgctgaggctcttatcgcgtataacttgaggagattcttggcggggcaggagttgaagaacgttatctaa

SEQ ID NO: 17255 - protein, 313 aa, Muscodor strobelii
  misc_feature: SGI Peptide ID NO. 565760
  misc_feature (102)..(285): Pfam Id: PF02826 Pfam Desc: D-isomer specific 2-hydroxyacid dehydrogenase, NAD binding domain
  misc_feature (1)..(313): NCBI GI: 46111091 Blast Desc: FG02427.1 [Gibberella zeae PH-1]
  misc_feature (1)..(313): NCBI GI: 39967983 Blast Desc: MGG_02084 [Magnaporthe grisea 70-15] gi|145012963|gb|EDJ97604.1| MGG_02084 [Magnaporthe grisea 70-15]
  misc_feature (1)..(313): NCBI GI: 85095666 Blast Desc: NCU09783 [Neurospora crassa OR74A] gi|28921594|gb|EAA30886.1| conserved [Neurospora crassa OR74A]
  misc_feature (1)..(313): NCBI GI: 255949742 Blast Desc: Pc22g17250 [Penicillium chrysogenum Wisconsin 54-1255] gi|211592655|emb|CAP99013.1| Pc22g17250 [Penicillium chrysogenum Wisconsin 54-1255]
  misc_feature (1)..(313): NCBI GI: 212530997 Blast Desc: 2-hydroxyacid dehydrogenase, [Penicillium marneffei ATCC 18224] gi|210071019|gb|EEA25108.1| 2-hydroxyacid dehydrogenase, [Penicillium marneffei ATCC 18224]
  misc_feature (1)..(307): NCBI GI: 242771509 Blast Desc: 2-hydroxyacid dehydrogenase, [Talaromyces stipitatus ATCC 10500] gi|218721476|gb|EED20894.1| 2-hydroxyacid dehydrogenase, [Talaromyces stipitatus ATCC 10500]
  misc_feature (1)..(313): NCBI GI: 116203257 Blast Desc: CHGG_09513 [Chaetomium globosum CBS 148.51] gi|88178031|gb|EAQ85499.1| CHGG_09513 [Chaetomium globosum CBS 148.51]
  misc_feature (1)..(313): NCBI GI: 171682818 Blast Desc: protein product [Podospora anserina] gi|170941368|emb|CAP67018.1| protein product [Podospora anserina]
  misc_feature (115)..(313): NCBI GI: 261354769 Blast Desc: glyoxylate reductase [Verticillium albo-atrum VaMs.102]
  misc_feature (1)..(313): NCBI GI: 269794455 Blast Desc: phosphoglycerate dehydrogenase-like oxidoreductase [Sanguibacter keddieii DSM 10542] gi|269096640|gb|ACZ21076.1| phosphoglycerate dehydrogenase-like oxidoreductase [Sanguibacter
  misc_feature (16)..(313): SWISSPROT Homolog: EC 1.1.1.81 Hydroxypyruvate reductase
  misc_feature (16)..(313): SWISSPROT Homolog: EC 1.1.1.79 Glyoxylate reductase (NADP(+))
MKLLYPTSLKLDIPSLEGFGVSLHSYDVKSTIPEDLIDAEVLVTWTNTADNLKDAAKRMNKLRWIQSLAAGPNDVLSAGFPSSVIVTTGSGCHDRTVAEHALGLLLVAARRFHEMRDYQVLSKWPGHLGGPQPDRPKDRFTTLRDANILIWGYGNIAKTLAPHLTAWGATVRGVARTPGVRNGVEVYGEDKLAELLPQTDAVVMILPGSDSTKNALNAERLKHLPNHAWIVNVGRGTSIDEDALADALEKGEIGGAALDVFVKEPLPSESKLYKAPNCFVSPHAAGGRPQDAEALIAYNLRRFLAGQELKNVI

SEQ ID NO: 17256 - DNA, 1492 bp, Muscodor strobelii
  misc_feature: SGI EST ID NO. CUFF.40609.0
  misc_feature: Variant of the nucleotide sequence at SEQ ID NO 17254
cggcgcggtattcagcgccgatttaggcttctttggccgatggggtaatactcggtgacctcattgcctctcagagcacgtgcaagaagggtccagacctcacatccgatgtgcagctcgagcaattacaagccgaaggccacaagtcacgatggacttcacctcccccgcgcagtcccccaacaaccccacatactgcatgaacccgttgacgattcccctcgcgacatagttgagaccattatcgtgaaccttgaagtttcgctgagttatttgatttgtttttcttgagtaaacaatatttgcaaacttgattgtagacactcgattctaatcacccaacatgaaacttctctacccaacatccctgaagctcgacatcccgagtcttgagggcttcggagtatcgctccactcctatgatgtcaagagcacaatcccagaggatcttatcgacgcggaagtcctcgtgacgtggactaacaccgccgataacctgaaggacgctgcgaagcgtatgaacaaactgcgctggattcagtcgctagccgcaggaccgaatgatgttctttcagcaggctttccttcatcggtaattgtcacaacgggctcaggatgtcacgatcgcacagtcgccgagcacgccttaggcttgttgcttgtcgctgcacgccggttccacgagatgcgcgactatcaggtgctgagcaagtggccaggacatctcggtggtccccaacccgaccgcccgaaggaccgattcaccacattgcgtgacgccaacattctcatctggggttatggcaatatcgccaaaacacttgcaccacacctcaccgcttggggagctaccgtgcgcggtgtcgcgagaacaccaggtgtccggaatggtgttgaggtctatggtgaggacaagctagccgagctattaccccagacggatgcagtcgtcatgattctaccaggctccgacagcaccaagaacgctcttaatgccgagcgcctgaagcatttaccgaatcatgcatggattgtcaatgtcgggcgtggaacgtcaattgacgaggacgcgctagccgacgcgcttgagaagggtgaaattggtggagcagcgcttgatgtctttgtcaaagagccgctgccatctgagtccaagctgtacaaggcacctaactgctttgtgagtccccacgctgccggtggaagaccgcaagacgctgaggctcttatcgcgtataacttgaggagattcttggcggggcaggagttgaagaacgttatctaaactaggcttaggcaaaggtataatcagagggataattagacagaatgatcgaactcacacggaccgcagttaattatgatcataatgatccgtagcaagtattgatcacatgactctttgacgatgtgtgtaattatgcgcgcccggcaatcatcatgcaactatttcgcccttaatatgcctactataagagatatcagcccagtc

SEQ ID NO: 17257 - DNA, 279 bp, Muscodor strobelii
  misc_feature: SGI cDNA ID NO. 565761
  misc_feature: Encodes the peptide sequence at SEQ ID NO 17258
atggccaaacacactaccaaggtcggcattgtcggcaagtacggtacccgttacggtgcctctctgcgtaagcagaccaagcgattcgagatcacccagcacgcccgctacggatgccccttctgcggaaagaccgccgtccgtcgtagcgccgttggcatctggaactgcaagggctgcaagaagaccatcgccggtggcgcctacaccatgtcctcccccgccgccaccgccgcccgatccaccctccgcagactgagagagaccgtcgaggtttaa

SEQ ID NO: 17258 - protein, 92 aa, Muscodor strobelii
  misc_feature: SGI Peptide ID NO. 565761
  misc_feature (2)..(91): Pfam Id: PF01780 Pfam Desc: Ribosomal L37ae protein family
  misc_feature (1)..(92): NCBI GI: 39977337 Blast Desc: MGG_06571 [Magnaporthe grisea 70-15] gi|145015988|gb|EDK00478.1| MGG_06571 [Magnaporthe grisea 70-15]
  misc_feature (1)..(91): NCBI GI: 212540802 Blast Desc: 60S ribosomal protein L37a [Penicillium marneffei ATCC 18224] gi|212540804|ref|XP_002150557.1| 60S ribosomal protein L37a [Penicillium marneffei ATCC 18224] 60S ribosomal protein 60S
  misc_feature (1)..(92): NCBI GI: 71002688 Blast Desc: 60S ribosomal protein L37a [Aspergillus fumigatus Af293] gi|66853663|gb|EAL93987.1| 60S ribosomal protein L37a [Aspergillus fumigatus Af293] gi|159130078|gb|EDP55192.1| 60S
  misc_feature (1)..(92): NCBI GI: 121716977 Blast Desc: 60S ribosomal protein L37a [Aspergillus clavatus NRRL 1] gi|119404125|gb|EAW14542.1| 60S ribosomal protein L37a [Aspergillus clavatus NRRL 1]
  misc_feature (1)..(92): NCBI GI: 169609490 Blast Desc: SNOG_07837 [Phaeosphaeria nodorum SN15] gi|111064183|gb|EAT85303.1| SNOG_07837 [Phaeosphaeria nodorum SN15]
  misc_feature (1)..(92): NCBI GI: 115385643 Blast Desc: 60S ribosomal protein L43 [Aspergillus terreus NIH2624] gi|238502447|ref|XP_002382457.1| 60S ribosomal protein L37a [Aspergillus flavus NRRL3357] gi|114187815|gb|EAU29515.1|
  misc_feature (1)..(92): NCBI GI: 156033143 Blast Desc: conserved [Sclerotinia sclerotiorum 1980] gi|154699050|gb|EDN98788.1| conserved [Sclerotinia sclerotiorum 1980]
  misc_feature (1)..(92): NCBI GI: 255956383 Blast Desc: Pc21g19530 [Penicillium chrysogenum Wisconsin 54-1255] gi|211590655|emb|CAP96850.1| Pc21g19530 [Penicillium chrysogenum Wisconsin 54-1255]
  misc_feature (1)..(92): NCBI GI: 116207772 Blast Desc: 60S ribosomal protein L43 [Chaetomium globosum CBS 148.51] gi|88183776|gb|EAQ91244.1| 60S ribosomal protein L43 [Chaetomium globosum CBS 148.51]
  misc_feature (1)..(92): NCBI GI: 145259059 Blast Desc: An04g08980 [Aspergillus niger] gi|134074873|emb|CAK38984.1| protein product [Aspergillus niger]
MAKHTTKVGIVGKYGTRYGASLRKQTKRFEITQHARYGCPFCGKTAVRRSAVGIWNCKGCKKTIAGGAYTMSSPAATAARSTLRRLRETVEV

SEQ ID NO: 17259 - DNA, 1117 bp, Muscodor strobelii
  misc_feature: SGI EST ID NO. CUFF.40853.0
  misc_feature: Variant of the nucleotide sequence at SEQ ID NO 17257
cacaaacctccgacatttctgaaatttgcactccggaaacatcgcaattctcgacatcacaacccgacgccaaacaccccccgaccaccgtcaatacaatggccaaacacactaccaaggtcggcattgtcggcaagtacggtacccgttacggtgcctctctgcgtaagcagaccaagcgattcgagatcacccagcacgcccgctacggatgccccttctgcggaaagaccgccgtccgtcgtagcgccgttggcatctggaactgcaagggctgcaagaagaccatcgccggtggcgcctacaccatgtcctcccccgccgccaccgccgcccgatccaccctccgcagactgagagagaccgtcgaggtttaagttgatagcatctggcgaaatgggaaaatggcgtttggctcggtcatgatttcactctcgtgtcttgtcagctaggtagaagaataaccatgcgacaaacatttctccaaccacagcattttccactccgcatccactgtcttgccccgcgatcccgatcccgacccgacgactagagacttctgcgaacgccatggtcagacaaccctattactgcaagagattcaggtcggtccatcgttttcaacgacttgacgttctcatttggggcgtatcaagcgacttctatgaccaccatgataaatgccagatggatcgggcttatgagtccatgactggcaatacgtactgttctacggaacagataggctattagaagcctgtgaatgaggaaaatacaaaaaactatttcatgatcagtcccggggatgatgctgtgctgttattattcatcattgttctctcgtgaacactatcgtcttactgcaaactacctaccccgtgggcattggcgatcgaagatagcgatgcgctggacgtataacaacttggagttgtacatttggacatatcttccgtcactggtctgggtagaagtgctgagcttgcgtaacttgttccctcagaaacaatgattacaggcattcatagcacgggtcgctcatcgactagatttcagccaataagtgttcgcatggacactgtcctgtcgattgagagcaactctctagcatatcgcg

SEQ ID NO: 17260 - DNA, 1413 bp, Muscodor strobelii
  misc_feature: SGI cDNA ID NO. 565762
  misc_feature: Encodes the peptide sequence at SEQ ID NO 17261
atgaatgaactcctcttcgcaagatctacaggggccgttggccctaatgtcttcgccaggcttcagacagcccagctcctgaagtcgttttggcccgcgcctcactaccgtttcgatggcggcgagcgaggcattgccgttcgtgatggtgaggcatcttcagctgagtctcctacatccatctgggcccaccaggcgggagtaggggcgttagctctcgagcgcttcgatggtcgcattcttgtatccggtggctctgatgcttcaatcaaactatgggacctggaagcatcttctcagccatcaatacctatcctctcggttcgcccgtctgcacaaacccacaagttcggcatcacacacctgtcattctacccctttgactcggccgctttcctctcaacatcttacgatcaaacgttgaagctatggtctactgatgatgcacgactatcggcctctttcaaccttgggtctaaagtgtacacccattccatctctccaatagctgatcatctactcgtagcctgtggaacgcagcatccttccgtacgacttgtagatctgcgttctggaacgagcattcaatcactagctggtcatggaggtgctatcctcgctaccgcctggtcgcctcgacacgagcacgtgctggcatctggaagtgtggatggcactgtgaaaatatgggatatacgccgagcaagtgctatgattggcatgctcgatcatgaagacaaccttggaatatatcacaacggtctcatgggtccggataagaaggtcaggacacgtgtcgcggccaaagctcacgccgcaccggtgaacggcttgacctggactgacgacggcagctacattgtctcagctggccatgacaaccgcatccgtgtgtgggatgccgccacgggacgaaacaccttggctagctttgggcctacaattaggaacactcaactggccagtgttaccatgttcacatcgccggtggggttgacacaccctggaaaggagcttttgttttggcccaatgaatctgagattttagttctggacttgcatgatggtcacattgtcaccaagctaagaggcacaggtgccaccgtcgcaagcgtccgatcagcaaaaggcgccgaacgatcagtcaagaaccgtatatccagcatcgtttggagaggggctggtggtggtggcagctctagcggggttgcgatgggtggctctaatatgcccggggctatcgtgagcgcgcatcttgacggtcagattcgtgcatggataccacagctggaaggtgccgatgaagaagacgacgatcaggcatcagccggtgacgaagaaaagaccaggaagcgcaaggctctcaacgatgtcttcaatagcctgatgggtaagaagatcacgtttacttaa

SEQ ID NO: 17261 - protein, 470 aa, Muscodor strobelii
  misc_feature: SGI Peptide ID NO. 565762
  misc_feature (192)..(231): Pfam Id: PF00400 Pfam Desc: WD domain, G-beta repeat
  misc_feature (262)..(300): Pfam Id: PF00400 Pfam Desc: WD domain, G-beta repeat
  misc_feature (55)..(94): Pfam Id: PF00400 Pfam Desc: WD domain, G-beta repeat
  misc_feature (270)..(300): Pfam Id: PF00400 Pfam Desc: WD domain, G-beta repeat
  misc_feature (106)..(145): Pfam Id: PF00400 Pfam Desc: WD domain, G-beta repeat
  misc_feature (1)..(465): NCBI GI: 145612347 Blast Desc: MGG_12329 [Magnaporthe grisea 70-15] gi|145019531|gb|EDK03759.1| MGG_12329 [Magnaporthe grisea 70-15]
  misc_feature (1)..(469): NCBI GI: 154310395 Blast Desc: BC1G_07117 [Botryotinia fuckeliana B05.10] gi|150851449|gb|EDN26642.1| BC1G_07117 [Botryotinia fuckeliana B05.10]
  misc_feature (7)..(465): NCBI GI: 145612355 Blast Desc: MGG_12332 [Magnaporthe grisea 70-15] gi|145019535|gb|EDK03763.1| MGG_12332 [Magnaporthe grisea 70-15]
  misc_feature (81)..(470): NCBI GI: 116179748 Blast Desc: CHGG_00502 [Chaetomium globosum CBS 148.51] gi|88184799|gb|EAQ92267.1| CHGG_00502 [Chaetomium globosum CBS 148.51]
  misc_feature (5)..(470): NCBI GI: 256731743 Blast Desc: [Nectria haematococca mpVI 77-13-4]
  misc_feature (1)..(469): NCBI GI: 156056050 Blast Desc: SS1G_05377 [Sclerotinia sclerotiorum 1980] gi|154703161|gb|EDO02900.1| SS1G_05377 [Sclerotinia sclerotiorum 1980]
  misc_feature (1)..(470): NCBI GI: 46137077 Blast Desc: FG10054.1 [Gibberella zeae PH-1]
  misc_feature (63)..(469): NCBI GI: 169601626 Blast Desc: SNOG_03683 [Phaeosphaeria nodorum SN15] gi|111067768|gb|EAT88888.1| SNOG_03683 [Phaeosphaeria nodorum SN15]
  misc_feature (59)..(469): NCBI GI: 189205439 Blast Desc: DNA excision repair protein ERCC-8 [Pyrenophora tritici-repentis Pt-1C-BFP] gi|187975147|gb|EDU41773.1| DNA excision repair protein ERCC-8 [Pyrenophora tritici-repentis
  misc_feature (1)..(253): NCBI GI: 261352016 Blast Desc: DNA excision repair protein ERCC-8 [Verticillium albo-atrum VaMs.102]
MNELLFARSTGAVGPNVFARLQTAQLLKSFWPAPHYRFDGGERGIAVRDGEASSAESPTSIWAHQAGVGALALERFDGRILVSGGSDASIKLWDLEASSQPSIPILSVRPSAQTHKFGITHLSFYPFDSAAFLSTSYDQTLKLWSTDDARLSASFNLGSKVYTHSISPIADHLLVACGTQHPSVRLVDLRSGTSIQSLAGHGGAILATAWSPRHEHVLASGSVDGTVKIWDIRRASAMIGMLDHEDNLGIYHNGLMGPDKKVRTRVAAKAHAAPVNGLTWTDDGSYIVSAGHDNRIRVWDAATGRNTLASFGPTIRNTQLASVTMFTSPVGLTHPGKELLFWPNESEILVLDLHDGHIVTKLRGTGATVASVRSAKGAERSVKNRISSIVWRGAGGGGSSSGVAMGGSNMPGAIVSAHLDGQIRAWIPQLEGADEEDDDQASAGDEEKTRKRKALNDVFNSLMGKKITFT

SEQ ID NO: 17262 - DNA, 3244 bp, Muscodor strobelii
  misc_feature: SGI EST ID NO. CUFF.40860.0
  misc_feature: Variant of the nucleotide sequence at SEQ ID NO 17260
cgtcatacgacacgacaactgctctcaagttcgaccactcacgacaccagaatccatcagtgtccgtagatgaattacacttgaaacatacttttcttagaccaattttatgagacttaaattaactacctagtcacttgagcatattgaaatctgatgaatgaatgaactcctcttcgcaagatctacaggggccgttggccctaatgtcttcgccaggcttcagacagcccagctcctgaagtcgttttggcccgcgcctcactaccgtttcgatggcggcgagcgaggcattgccgttcgtgatggtgaggcatcttcagctgagtctcctacatccatctgggcccaccaggcgggagtaggggcgttagctctcgagcgcttcgatggtcgcattcttgtatccggtggctctgatgcttcaatcaaactatgggacctggaagcatcttctcagccatcaatacctatcctctcggttcgcccgtctgcacaaacccacaagttcggcatcacacacctgtcattctacccctttgactcggccgctttcctctcaacatcttacgatcaaacgttgaagctatggtctactgatgatgcacgactatcggcctctttcaaccttgggtctaaagtgtacacccattccatctctccaatagctgatcatctactcgtagcctgtggaacgcagcatccttccgtacgacttgtagatctgcgttctggaacgagcattcaatcactagctggtcatggaggtgctatcctcgctaccgcctggtcgcctcgacacgagcacgtgctggcatctggaagtgtggatggcactgtgaaaatatgggatatacgccgagcaagtgctatgattggcatgctcgatcatgaagacaaccttggaatatatcacaacggtctcatgggtccggataagaaggtcaggacacgtgtcgcggccaaagctcacgccgcaccggtgaacggcttgacctggactgacgacggcagctacattgtctcagctggccatgacaaccgcatccgtgtgtgggatgccgccacgggacgaaacaccttggctagctttgggcctacaattaggaacactcaactggccagtgttaccatgttcacatcgccggtggggttgacacaccctggaaaggagcttttgttttggcccaatgaatctgagattttagttctggacttgcatgatggtcacattgtcaccaagctaagaggcacaggtgccaccgtcgcaagcgtccgatcagcaaaaggcgccgaacgatcagtcaagaaccgtatatccagcatcgtttggagaggggctggtggtggtggcagctctagcggggttgcgatgggtggctctaatatgcccggggctatcgtgagcgcgcatcttgacggtcagattcgtgcatggataccacagctggaaggtgccgatgaagaagacgacgatcaggcatcagccggtgacgaagaaaagaccaggaagcgcaaggctctcaacgatgtcttcaatagcctgatgggtaagaagatcacgtttacttaattttaatatcgcacagttcttgcaaaatcagatagtcgaaggcacgtccttgcacatcgcgaattgcataccacatgagaactgggttgaaaaactctcagacttacagatcaaggttcatcgctgtatctgtatagtcatttctctcatagtgaacccctctttcagcccatgctgaggtttgacccaagcaccaggttcatggttcttttctttcacgcgtctccgcctgtaatgacctcaaggagtgttgatgtggatatacccaaaaaatggagtgcaatccatcataccacttacttgctcggcaccacgtggaaaatgcgccggagagatagatacggccacaaactctaaactcttcccgtaagcgagctgtcctaattctggggtttgccgtctcatgacagccgcgtcacgattgatcaaatccggacatcgagactgctttgtggtatcgatgacaaccacagtagagatatatcatatatcatctcgtgcagaatatacgcgacaggcagcaggaagagactaccggcatattgtagtgcttacgagcaatgagcaccttatctaggaggtacacacgtttcttgaatacctatttcaccaaataagcaccttccgagcctgctagtaagcttgagagaatcttatctcgtctacttcatagttacttagcttctatcaagcagccccccaacctctcaatccctctttcatcattctatggttcatcctgctcgcctgccatctgtttcacatcggtgcggagtctcggtcagtgcagccgatgtcgtgattcaatctctgtgatacttctcagggtctgcccccatgctcttgtagtaaggatcctgaacctagtatgctatttgagaagcacctcgtcgggtcctcggcctccatctcatccgtactccatacggatattgctctcgagccgaccggcatcagaataaaatggtcactatgccagattcaagaatgtcgataaattagaagtacagtagaggacctactcgggtgctcccctgctctgcaggtaccccgagtacctcgccttttagcctaccctggcagcctcgctgatggagaatcctgagccctggctttggccctagctcagtgactacttcgaagaccaggatttaatctgatacgtacctaactgtactgtgatgaagaataccccgtaacgagcttcgggatttgctttggtgccgggatcacccgttcatacgttcgtaggcttgttcttggagagagcttattattcttggatccggagattagaatattgaactcgcgcgagtatcatcatgtgtcgcaagtcgctctgcctgagtgagtgacgacaactacccactgtcagtgggtactgagcccacaagacatgccaacacgatgccgtctatgcgcctcatcagaaagcgtgccaacaaacagccatgcggaccgtttctgtcagactatgtcctatcgtgagtcagtaacaaccgacatagcagaacaccaccctccgaacccccaacctcaactctaacatcgacgtcaatcgcgtcaatatgaaaccaaccagccccagaataggcaacattcagccatttggtaagtactgtaccgcgaaagcaaatcccgtggtcacaaaaaccaacacctggtcacacc

SEQ ID NO: 17263 - DNA, 693 bp, Muscodor strobelii
  misc_feature: SGI cDNA ID NO. 565763
  misc_feature: Encodes the peptide sequence at SEQ ID NO 17264
atgctcgatcatgaagacaaccttggaatatatcacaacggtctcatgggtccggataagaaggtcaggacacgtgtcgcggccaaagctcacgccgcaccggtgaacggcttgacctggactgacgacggcagctacattgtctcagctggccatgacaaccgcatccgtgtgtgggatgccgccacgggacgaaacaccttggctagctttgggcctacaattaggaacactcaactggccagtgttaccatgttcacatcgccggtggggttgacacaccctggaaaggagcttttgttttggcccaatgaatctgagattttagttctggacttgcatgatggtcacattgtcaccaagctaagaggcacaggtgccaccgtcgcaagcgtccgatcagcaaaaggcgccgaacgatcagtcaagaaccgtatatccagcatcgtttggagaggggctggtggtggtggcagctctagcggggttgcgatgggtggctctaatatgcccggggctatcgtgagcgcgcatcttgacggtcagattcgtgcatggataccacagctggaaggtgccgatgaagaagacgacgatcaggcatcagccggtgacgaagaaaagaccaggaagcgcaaggctctcaacgatgtcttcaatagcctgatgggtaagaagatcacgtttacttaa

SEQ ID NO: 17264 - protein, 230 aa, Muscodor strobelii
  misc_feature: SGI Peptide ID NO. 565763
  misc_feature (22)..(60): Pfam Id: PF00400 Pfam Desc: WD domain, G-beta repeat
  misc_feature (30)..(60): Pfam Id: PF00400 Pfam Desc: WD domain, G-beta repeat
  misc_feature (1)..(230): NCBI GI: 116179748 Blast Desc: CHGG_00502 [Chaetomium globosum CBS 148.51] gi|88184799|gb|EAQ92267.1| CHGG_00502 [Chaetomium globosum CBS 148.51]
  misc_feature (2)..(230): NCBI GI: 256731743 Blast Desc: [Nectria haematococca mpVI 77-13-4]
  misc_feature (1)..(225): NCBI GI: 145612355 Blast Desc: MGG_12332 [Magnaporthe grisea 70-15] gi|145019535|gb|EDK03763.1| MGG_12332 [Magnaporthe grisea 70-15]
  misc_feature (1)..(225): NCBI GI: 145612347 Blast Desc: MGG_12329 [Magnaporthe grisea 70-15] gi|145019531|gb|EDK03759.1| MGG_12329 [Magnaporthe grisea 70-15]
  misc_feature (1)..(230): NCBI GI: 46137077 Blast Desc: FG10054.1 [Gibberella zeae PH-1]
  misc_feature (2)..(229): NCBI GI: 154310395 Blast Desc: BC1G_07117 [Botryotinia fuckeliana B05.10] gi|150851449|gb|EDN26642.1| BC1G_07117 [Botryotinia fuckeliana B05.10]
  misc_feature (1)..(229): NCBI GI: 156056050 Blast Desc: SS1G_05377 [Sclerotinia sclerotiorum 1980] gi|154703161|gb|EDO02900.1| SS1G_05377 [Sclerotinia sclerotiorum 1980]
  misc_feature (2)..(230): NCBI GI: 226279832 Blast Desc: DNA excision repair protein ERCC-8 [Paracoccidioides brasiliensis Pb01]
  misc_feature (2)..(230): NCBI GI: 225682325 Blast Desc: DNA excision repair protein ERCC-8 [Paracoccidioides brasiliensis Pb03]
  misc_feature (2)..(230): NCBI GI: 226289711 Blast Desc: WD repeat-containing protein [Paracoccidioides brasiliensis Pb18]
MLDHEDNLGIYHNGLMGPDKKVRTRVAAKAHAAPVNGLTWTDDGSYIVSAGHDNRIRVWDAATGRNTLASFGPTIRNTQLASVTMFTSPVGLTHPGKELLFWPNESEILVLDLHDGHIVTKLRGTGATVASVRSAKGAERSVKNRISSIVWRGAGGGGSSSGVAMGGSNMPGAIVSAHLDGQIRAWIPQLEGADEEDDDQASAGDEEKTRKRKALNDVFNSLMGKKITFT

SEQ ID NO: 17265 - DNA, 3244 bp, Muscodor strobelii; identical to SEQ ID NO: 17262
  misc_feature: SGI EST ID NO. CUFF.40860.0
  misc_feature: Variant of the nucleotide sequence at SEQ ID NO 17263

SEQ ID NO: 17266 - DNA, 684 bp, Muscodor strobelii
  misc_feature: SGI cDNA ID NO. 565764
  misc_feature: Encodes the peptide sequence at SEQ ID NO 17267
atgttccaagataggccgaagagacaattcaaacaacggccgccaccatcagattcttcaaatgctagtgacactgaggctgaggatgatgagcgacgaatcattcagaagagaaatgccaatgtctacgatgctgttgcaggccgtgtaacgaccactcgaccaatcgatggtttcaatccggaaagaccccgtgtcggacatcacaaacgttcctcgcgtggcaaaggtcacgatccaacactcgctccaggagaagtattattcagacgttctgatgcgccaattcgctttgcggagaaagacatctacaatgcccatgaagaccttcccaatggtggtcggggcgtattgcccgacagtgacatgctaaaggctatacacagtcacgccgctcaattctacggcgcgttcgacggcgaagcctttaatactagtccgtccattgatgagcgaagcatggacgagaccgcgttactagcgttcggcattctacttgaggaggccagccgcgaagcattgggcaagaaaggggatctggtcttcacggaaggcgaggaagtgattgaacagggggagcaccatgacagaggcaaagcagttaaacttttcggtttcaaggatgcgcagcggtacgaagagcgacaacggcttaaacgacaacgactttcgcgacatgattga

SEQ ID NO: 17267 - protein, 227 aa, Muscodor strobelii
  misc_feature: SGI Peptide ID NO. 565764
  misc_feature (18)..(210): NCBI GI: 256732127 Blast Desc: NECHADRAFT_80425 [Nectria haematococca mpVI 77-13-4]
  misc_feature (38)..(185): NCBI GI: 116179750 Blast Desc: CHGG_00503 [Chaetomium globosum CBS 148.51] gi|88184800|gb|EAQ92268.1| CHGG_00503 [Chaetomium globosum CBS 148.51]
  misc_feature (36)..(185): NCBI GI: 145612345 Blast Desc: MGG_12328 [Magnaporthe grisea 70-15] gi|145019530|gb|EDK03758.1| MGG_12328 [Magnaporthe grisea 70-15]
  misc_feature (10)..(184): NCBI GI: 85092062 Blast Desc: NCU04665 [Neurospora crassa OR74A] gi|28920610|gb|EAA29972.1| [Neurospora crassa OR74A] gi|28950055|emb|CAD70809.1| [Neurospora crassa]
  misc_feature (38)..(188): NCBI GI: 261352015 Blast Desc: membrane protein [Verticillium albo-atrum VaMs.102]
  misc_feature (32)..(202): NCBI GI: 261191877 Blast Desc: conserved [Ajellomyces dermatitidis SLH14081] gi|239589662|gb|EEQ72305.1| conserved [Ajellomyces dermatitidis SLH14081] gi|239608594|gb|EEQ85581.1| conserved [Ajellomyces
  misc_feature (69)..(185): NCBI GI: 46137079 Blast Desc: FG10055.1 [Gibberella zeae PH-1]
  misc_feature (37)..(194): NCBI GI: 225555730 Blast Desc: conserved [Ajellomyces capsulatus G186AR]
  misc_feature (37)..(194): NCBI GI: 154273408 Blast Desc: [Ajellomyces capsulatus NAm1] gi|150416068|gb|EDN11412.1| [Ajellomyces capsulatus NAm1]
  misc_feature (33)..(226): NCBI GI: 225682324 Blast Desc: conserved [Paracoccidioides brasiliensis Pb03]
MFQDRPKRQFKQRPPPSDSSNASDTEAEDDERRIIQKRNANVYDAVAGRVTTTRPIDGFNPERPRVGHHKRSSRGKGHDPTLAPGEVLFRRSDAPIRFAEKDIYNAHEDLPNGGRGVLPDSDMLKAIHSHAAQFYGAFDGEAFNTSPSIDERSMDETALLAFGILLEEASREALGKKGDLVFTEGEEVIEQGEHHDRGKAVKLFGFKDAQRYEERQRLKRQRLSRHD

SEQ ID NO: 17268 - DNA, 1533 bp, Muscodor strobelii
  misc_feature: SGI EST ID NO. CUFF.40619.0
  misc_feature: Variant of the nucleotide sequence at SEQ ID NO 17266
ggagcagtcaactccaacaccaattgacgacattctcctagattgacgacgcatcgtggatgcaaaatgcaagtggcctgcagggctcttcaaggtgatgcaaaggagacatatataataacaaagctcattgacaattacgattcgctgtcgtcggaatatgtgactgcgatcctgcagcaatgttccaagataggccgaagagacaattcaaacaacggccgccaccatcagattcttcaaatgctagtgacactgaggctgaggatgatgagcgacgaatcattcagaagagaaatgccaatgtctacgatgctgttgcaggccgtgtaacgaccactcgaccaatcgatggtttcaatccggaaagaccccgtgtcggacatcacaaacgttcctcgcgtggcaaaggtcacgatccaacactcgctccaggagaagtattattcagacgttctgatgcgccaattcgctttgcggagaaagacatctacaatgcccatgaagaccttcccaatggtggtcggggcgtattgcccgacagtgacatgctaaaggctatacacagtcacgccgctcaattctacggcgcgttcgacggcgaagcctttaatactagtccgtccattgatgagcgaagcatggacgagaccgcgttactagcgttcggcattctacttgaggaggccagccgcgaagcattgggcaagaaaggggatctggtcttcacggaaggcgaggaagtgattgaacagggggagcaccatgacagaggcaaagcagttaaacttttcggtttcaaggatgcgcagcggtacgaagagcgacaacggcttaaacgacaacgactttcgcgacatgattgatcaaacgagacgcacgaagacagtagctctctctccgaccatgccgaaggtgctcaatgcgcgcccatccttcgtttggagacctacctgatacgtcaagttccgcagttgagagagcggagtttccctgtcccatgtcatatcatatcactactcttatcgtagcagcaatggcctagaaaaggtctattctcagcttcctagttcacaaagtccgcaaccacgtggatgatccgagccataagctgtttacagtacatccacacacgtacctccataaagtgaaagtgatatcatttcgcttatgtattagttagtgctcgaatcaactgcaatctgcttagtcgcctatcgcgctcgtgaaggatacatcagctaacgcggtcaatatcattgcttattgttaccaattaacccgttctctgccgtggcagactcaagccggaccgttgggaagtatggaattgctcgattggtccgttcgcatagtcgacgcctcccctgatcagcccccacgaaaatggctggagcatccttgttaagatgcgtaacaatcgagattgaaaatccgacattttacaaacccaatgtttggaagggtaaaataaacaccactcaaatggaattaggtagtcttcacgtgttgttcggagaagcggtattgagg

SEQ ID NO: 17269 - DNA, 3363 bp, Muscodor strobelii
  misc_feature: SGI cDNA ID NO. 565765
  misc_feature: Encodes the peptide sequence at SEQ ID NO 17270
atggaacacgggctgcccgagaccaagcgcccacgtcttcacgtcaacgctggctcgtggtcgacaaacaccggcgtcgctactgtatcactgccgcaaccgcacgcgcaacctcctcacgctgcaccactccatccctccgtctcggggcctcctcctcaccacgctccgtccccgtacccgccggcgcctccctactcacgcccgccagagcctcatcctcccgtgacccatggtctcccccacgacgatcgccgccatcatcaccaccatgaccacgatccctacccgccgatccaggacacctcgagacagcctcccccttcgccagtgcacccgacctaccctccctacgctcgagggggatcctgtcgtcgtgaagcgcgacgtcggagacgaccagctgcttcccagtcgcgcaggccgagctcgactggacacatggtcgacggtctcccacccacgccgcatggccctccgcatcctaaccagcacgtcgatgatctgcgccatcgtatgagcatagacaacagcgcctcgatgccgcactcgcccgcacattaccgcccgacgcttcccccaagctatcaccagcctcccacgccggttgggcagcctccgcactatgagggacctcatggctatggtgctgcgcatccgatgtatcctgctgctctagaggttcaagccgccagcgcgaaacggaaagcacagcgggcgtcgcaagcatgtgacaactgcaggcagctcaaagccaagtgtgatgagacgaaaccatgcaagaactgcagagaaaagaatgtcgagtgtaaatatcgtgatcctccggcgaaacaaccggataagatcactgcggatatattggaggtgctttcgtttttgaaagaagaaatgggctcgatgagagctgagtttaacgtcttcaataagaagctcaatcagatggacaaccgcttatctaatttcgaaggctcacctatcatgcgccctgctggcaagctgaagcgtgagtctatcgaggagcaagatgatcgcgcaagtctacagcaatctcctatgccggacggcggagaggctatggatgatgagaatgccgatgtgtcatctcaaggtcggacgactgtggtggagggccccattactttgaaccaagcccatgaaacgttgcgacatgttgatgatgatgatatagaaaaccagcccggtccggttcctccaccaggaaagccgaccatgcctcagaatcacacgacactcgccagtctgctgttgaaatggccttctatctctacaatgctgcatcaaatcctgcaaaccgaacggatataccacgttgaggaatatccgattcgccaagaaatgcaaagaggcgtactgaagattgcgggcagaggagaatcatattattcagaatctaaaacgtcagacaagggaacgccacaggatcgagattggtcgataaccgacgcggaagaggcatctgatatcgcctcttctacgctttccccggagtcttggggccagatcggagatctctcaccaccctccggtgttgactataaggccactgtgcttggtccaaatggaaacccaaactgggatcataataagctttggtcttatgtcgatagtttcaagtccggcatattgagcatgcaccctatcatgataccacaagaactggatgccatggtaagggtatttatcgagcagctgcctaagggctcgaatacgaacagcaccgggcataaggcgagtggcatgcccccaagattcatcggctactcacaaaatactgccggagctgaagtcgggaccaaacggaagcgttctccgggtggcgaagagcacagtccggtgatgtcatttaggaaacccggtctcccgtacaagaacatcgagagttgcctggtcctgcttgtctttgcacttggcaagatgtgccaacatgagggcaagattcctgatgtagtgcatgatcatgatgatctggtcactagctcccctatggtgcgcaatgggatgctacagtcccctggtcaaggatcgccacccggaatcttcccgccctcgcagtcttcgggcttgccctccccaaaggaaagtggccacattgcgatgagtcgacgatcctcgctacaaggcgctgcgtcagcatcgagaagcaacaaacggaacatagatgttattcctggcctggaatatttcgctctcgcttcggatattatgggcggcgactacggtatgaacaatctaaaacgagtttatgttcatatcttggctggattgtaccatggccagcttggtcgggtcttggagagctgggatcatatctcgcttgctagcaggacccttcaagtcatattacgaccgagcctggatcgtctgtcacgagtccatttttgttccgagacttcccggagagacaatcaacttgcatacgcgttctggacgtgtctgcagttggaaagcgatatattggccgagctgcctttgccacaatctgggattctgcaatacgaggcacaaatgccatacccaagccagaaattcagtatgagtcatggttaccgacccgaaatcatcgagggctattttgcgcagctctatcttaggaagcagttgaacaatattcataacctattttatgacccggccaaagaggccgaaaacgccctccatcatcaggctatggaagacagagttgaagaggttcaacaaaatttgagagatgctagggacaagtgggttcccgctgcctataggtggagtgaaaacgaaccccctgccaaggaactcctcaccgcgcggcttcgtgcaaaatattggggttcacaggttatcttgtatcgcccattcttgaagacactactcgacagagaaccacaaactccttccatataccaaaacgagcacacgccaattcgatatgcaggagaggccattaatgctttgatcgaaagtactcgggctttccacggggtcgaaaaccagaaacgtatcatcattaccaacgtcttcggcaccgcacatgcccaatggggtaacctattaacactatcggcgtgttacaaggatgagacactgcgccaattcgtcaatgtcaatgttctcagcagcctgttctcccgtaccattgcattcttcaggaccgtggctctgccctcgagtgcgctcacaatagatttaaatatgttaacaggcttagccagggagctgggatttgagcccgaacccagagctgattcgagcttctccagtgccacgagcagctcttatctccctcccatacactatacgcctaactatagccaataccatggcgtggcctcaccgtctatgccaagaacacacacacagtga

SEQ ID NO: 17270 - protein, 1120 aa, Muscodor strobelii
  misc_feature: SGI Peptide ID NO. 565765
  misc_feature (242)..(279): Pfam Id: PF00172 Pfam Desc: Fungal Zn(2)-Cys(6) binuclear cluster domain
  misc_feature (153)..(1073): NCBI GI: 116179754 Blast Desc: CHGG_00505 [Chaetomium globosum CBS 148.51] gi|88184802|gb|EAQ92270.1| CHGG_00505 [Chaetomium globosum CBS 148.51]
  misc_feature (81)..(1115): NCBI GI: 171691669 Blast Desc: protein product [Podospora anserina] gi|170945783|emb|CAP72583.1| protein product [Podospora anserina]
  misc_feature (1)..(1080): NCBI GI: 256732126 Blast Desc: [Nectria haematococca mpVI 77-13-4]
  misc_feature (61)..(1101): NCBI GI: 46137083 Blast Desc: FG10057.1 [Gibberella zeae PH-1]
  misc_feature (81)..(1077): NCBI GI: 28950054 Blast Desc: [Neurospora crassa]
  misc_feature (1)..(1060): NCBI GI: 164425299 Blast Desc: NCU04663 [Neurospora crassa OR74A] gi|157070872|gb|EAA29970.2| [Neurospora crassa OR74A]
  misc_feature (235)..(1089): NCBI GI: 156056038 Blast Desc: SS1G_05371 [Sclerotinia sclerotiorum 1980] gi|154703155|gb|EDO02894.1| SS1G_05371 [Sclerotinia sclerotiorum 1980]
  misc_feature (83)..(1101): NCBI GI: 261352014 Blast Desc: C6 zinc finger domain-containing protein [Verticillium albo-atrum VaMs.102]
  misc_feature (91)..(1073): NCBI GI: 39958510 Blast Desc: MGG_09263 [Magnaporthe grisea 70-15] gi|145013287|gb|EDJ97928.1| MGG_09263 [Magnaporthe grisea 70-15]
  misc_feature (235)..(1075): NCBI GI: 154310405 Blast Desc: BC1G_07122 [Botryotinia fuckeliana B05.10] gi|150851454|gb|EDN26647.1| BC1G_07122 [Botryotinia fuckeliana B05.10]
MEHGLPETKRPRLHVNAGSWSTNTGVATVSLPQPHAQPPHAAPLHPSVSGPPPHHAPSPYPPAPPYSRPPEPHPPVTHGLPHDDRRHHHHHDHDPYPPIQDTSRQPPPSPVHPTYPPYARGGSCRREARRRRRPAASQSRRPSSTGHMVDGLPPTPHGPPHPNQHVDDLRHRMSIDNSASMPHSPAHYRPTLPPSYHQPPTPVGQPPHYEGPHGYGAAHPMYPAALEVQAASAKRKAQRASQACDNCRQLKAKCDETKPCKNCREKNVECKYRDPPAKQPDKITADILEVLSFLKEEMGSMRAEFNVFNKKLNQMDNRLSNFEGSPIMRPAGKLKRESIEEQDDRASLQQSPMPDGGEAMDDENADVSSQGRTTVVEGPITLNQAHETLRHVDDDDIENQPGPVPPPGKPTMPQNHTTLASLLLKWPSISTMLHQILQTERIYHVEEYPIRQEMQRGVLKIAGRGESYYSESKTSDKGTPQDRDWSITDAEEASDIASSTLSPESWGQIGDLSPPSGVDYKATVLGPNGNPNWDHNKLWSYVDSFKSGILSMHPIMIPQELDAMVRVFIEQLPKGSNTNSTGHKASGMPPRFIGYSQNTAGAEVGTKRKRSPGGEEHSPVMSFRKPGLPYKNIESCLVLLVFALGKMCQHEGKIPDVVHDHDDLVTSSPMVRNGMLQSPGQGSPPGIFPPSQSSGLPSPKESGHIAMSRRSSLQGAASASRSNKRNIDVIPGLEYFALASDIMGGDYGMNNLKRVYVHILAGLYHGQLGRVLESWDHISLASRTLQVILRPSLDRLSRVHFCSETSRRDNQLAYAFWTCLQLESDILAELPLPQSGILQYEAQMPYPSQKFSMSHGYRPEIIEGYFAQLYLRKQLNNIHNLFYDPAKEAENALHHQAMEDRVEEVQQNLRDARDKWVPAAYRWSENEPPAKELLTARLRAKYWGSQVILYRPFLKTLLDREPQTPSIYQNEHTPIRYAGEAINALIESTRAFHGVENQKRIIITNVFGTAHAQWGNLLTLSACYKDETLRQFVNVNVLSSLFSRTIAFFRTVALPSSALTIDLNMLTGLARELGFEPEPRADSSFSSATSSSYLPPIHYTPNYSQYHGVASPSMPRTHTQ

SEQ ID NO: 17271 - DNA, 5771 bp, Muscodor strobelii
  misc_feature: SGI EST ID NO. CUFF.40809.2
  misc_feature: Variant of the nucleotide sequence at SEQ ID NO 17269
taacaccctaggcgggctacctgtgcttcgggtacagtgttgcagtttggagctggtcctggcttgtcttggcagcgagctacggacacacgaagctgggagctggcaagcttgctctgcgcaagtacctggtatgtcgtacgatgatccctggcgctcacgacctggctgccgctgcattgggatgccctctgggaccgatgactgatgaagtatagagcccctgtacgtggccgacaagggaggagtggaggactgctcggctcgggactggtcgggcaggctctagtcggggtcgaggaacgtccaagtcagtattttgctaacatttgctgttcgtctacaaggcctctcaagcccaactgagtggatcgcgcgccgagtgggtgcatgcgtcgaggaccaggtggaatccctgacctctggctctgctctggagctgtcgtcgtcgccagaacgtgctttgccatttgcgatggacctttgctgggcctttgatcgcccactgacgccgctcactccctgcgcatgcgcttgaagatatcgtcggcgctgcaccactccagtctagcctgagtagccctcacccaaatctccggccacacccagacgtccccaacaccggacagagagcccagaaaatatttcggcttttatggttgtgagaaacttgtgacctgtgttccgcgtctacatctacctatcactgtagctactcgcacacgtatatactaggtatacatatatacgtactatacttgtctcgagggcatccacatccacatccaccaaccccgtcgcctcgttcgccgccttggcgttgtcgcctgtcatcatccgggctcttttcttgtgcttccaccgctggtccaacgtctgccccgagcttgccctctgcccaaccgcaacgcagatcttggagtcgtccatttaggcacgacccacgagacagacaacctggccgcccgaccaccagggccaccgctgctcccgccatccaacaggctacgccgtgtgtacttgcgcttgacagacgtatagccgtccgcgcaggtccgagacaggtatcccgctctgctgccaacgcgagcaccaccagccagcagcagcgtcccgcagcactgtatgtacgtactcggtacgacaacctctgccgtgacgccaagtacaaggaagtgtcaagtctgccctgagcttctctaggtgcgcccacatattggcgccgccccgattgtggatcgcggccagtggacagtcctgtcgagcctgtcgagcctggaaccctcagctcacgacagcttcgacgggcctctgagcgacctctgagcacctctgtttcgtcactcgccatccatcagaggatcccggggcaactgtcaacactcggaccgactcccgagctggcctagcacgatcgctcgagtccagtcgttgggcccatacgtctcgtctcctcgagctccagatcttctgccaggccgatgttcgatgttccctgatattacttacgtcgttgagttgacccgtgcttgtgttgggccaaccgcctgaccctacacaaataaaaccctctccaagtatggaacacgggctgcccgagaccaagcgcccacgtcttcacgtcaacgctggctcgtggtcgacaaacaccggcgtcgctactgtatcactgccgcaaccgcacgcgcaacctcctcacgctgcaccactccatccctccgtctcggggcctcctcctcaccacgctccgtccccgtacccgccggcgcctccctactcacgcccgccagagcctcatcctcccgtgacccatggtctcccccacgacgatcgccgccatcatcaccaccatgaccacgatccctacccgccgatccaggacacctcgagacagcctcccccttcgccagtgcacccgacctaccctccctacgctcgagggggatcctgtcgtcgtgaagcgcgacgtcggagacgaccagctgcttcccagtcgcgcaggccgagctcgactggacacatggtcgacggtctcccacccacgccgcatggccctccgcatcctaaccagcacgtcgatgatctgcgccatcgtatgagcatagacaacagcgcctcgatgccgcactcgcccgcacattaccgcccgacgcttcccccaagctatcaccagcctcccacgccggttgggcagcctccgcactatgagggacctcatggctatggtgctgcgcatccgatgtatcctgctgctctagaggttcaagccgccagcgcgaaacggaaagcacagcgggcgtcgcaagcatgtgacaactgcaggcagctcaaagccaagtgtgatgagacgaaaccatgcaagaactgcagagaaaagaatgtcgagtgtaaatatcgtgatcctccggcgaaacaaccggataagatcactgcggatatattggaggtgctttcgtttttgaaagaagaaatgggctcgatgagagctgagtttaacgtcttcaataagaagctcaatcagatggacaaccgcttatctaatttcgaaggctcacctatcatgcgccctgctggcaagctgaagcgtgagtctatcgaggagcaagatgatcgcgcaagtctacagcaatctcctatgccggacggcggagaggctatggatgatgagaatgccgatgtgtcatctcaaggtcggacgactgtggtggagggccccattactttgaaccaagcccatgaaacgttgcgacatgttgatgatgatgatatagaaaaccagcccggtccggttcctccaccaggaaagccgaccatgcctcagaatcacacgacactcgccagtctgctgttgaaatggccttctatctctacaatgctgcatcaaatcctgcaaaccgaacggatataccacgttgaggaatatccgattcgccaagaaatgcaaagaggcgtactgaagattgcgggcagaggagaatcatattattcagaatctaaaacgtcagacaagggaacgccacaggatcgagattggtcgataaccgacgcggaagaggcatctgatatcgcctcttctacgctttccccggagtcttggggccagatcggagatctctcaccaccctccggtgttgactataaggccactgtgcttggtccaaatggaaacccaaactgggatcataataagctttggtcttatgtcgatagtttcaagtccggcatattgagcatgcaccctatcatgataccacaagaactggatgccatggtaagggtatttatcgagcagctgcctaagggctcgaatacgaacagcaccgggcataaggcgagtggcatgcccccaagattcatcggctactcacaaaatactgccggagctgaagtcgggaccaaacggaagcgttctccgggtggcgaagagcacagtccggtgatgtcatttaggaaacccggtctcccgtacaagaacatcgagagttgcctggtcctgcttgtctttgcacttggcaagatgtgccaacatgagggcaagattcctgatgtagtgcatgatcatgatgatctggtcactagctcccctatggtgcgcaatgggatgctacagtcccctggtcaaggatcgccacccggaatcttcccgccctcgcagtcttcgggcttgccctccccaaaggaaagtggccacattgcgatgagtcgacgatcctcgctacaaggcgctgcgtcagcatcgagaagcaacaaacggaacatagatgttattcctggcctggaatatttcgctctcgcttcggatattatgggcggcgactacggtatgaacaatctaaaacgagtttatgttcatatcttggctggattgtaccatggccagcttggtcgggtcttggagagctgggatcatatctcgcttgctagcaggacccttcaagtcatattacgaccgagcctggatcgtctgtcacgagtccatttttgttccgagacttcccggagagacaatcaacttgcatacgcgttctggacgtgtctgcagttggaaagcgatatattggccgagctgcctttgccacaatctgggattctgcaatacgaggcacaaatgccatacccaagccagaaattcagtatgagtcatggttaccgacccgaaatcatcgagggctattttgcgcagctctatcttaggaagcagttgaacaatattcataacctattttatgacccggccaaagaggccgaaaacgccctccatcatcaggctatggaagacagagttgaagaggttcaacaaaatttgagagatgctagggacaagtgggttcccgctgcctataggtggagtgaaaacgaaccccctgccaaggaactcctcaccgcgcggcttcgtgcaaaatattggggttcacaggttatcttgtatcgcccattcttgaagacactactcgacagagaaccacaaactccttccatataccaaaacgagcacacgccaattcgatatgcaggagaggccattaatgctttgatcgaaagtactcgggctttccacggggtcgaaaaccagaaacgtatcatcattaccaacgtcttcggcaccgcacatgcccaatggggtaacctattaacactatcggcgtgttacaaggatgagacactgcgccaattcgtcaatgtcaatgttctcagcagcctgttctcccgtaccattgcattcttcaggaccgtggctctgccctcgagtgcgctcacaatagatttaaatatgttaacaggcttagccagggagctgggatttgagcccgaacccagagctgattcgagcttctccagtgccacgagcagctcttatctccctcccatacactatacgcctaactatagccaataccatggcgtggcctcaccgtctatgccaagaacacacacacagtgattctaaatgcgttacagcttgaacgctttacaacattccagcgtctcaccagcaggagacacatatttgtcaatgtcagcacaagattcggcaatctcgacacaagggtttcccatgggcctttttcaacaattcgacgaacataggggtatacaattttatgacactaaaagtcgatacacgtatcattcgcaccatgcgtttatcacgcccggggcgattggagcaagcatttggggcggcagcgttcattccgcccattgggccggacgtgtttttggcgttaggtctttggtttttgtttatatcgtcattccatcatcatttggttcttgcttctcgaggccgcggaggagataccaaattcccaattcactttgctctcagagtcggctagcatcatcagcattgttgttcaccattacccaaggttggtcgatccgggcataggatcatgttttggtacatttgtgggggttgcttatttgcatgtcccctgtatgttgcagtctgtatacggtgttgtctataattggaaattggggctagactgagatgtatatactactagccgaaacggcggtggaaaaggggagagacttgaggcttcactagccaggggaggcgaaccaatgagttcgaatcgatgaaggggcattggctacagattcagtagaccacagaatgcctggatctgtgtatgtaatatggaacgaccctaaaagccttgtatcgctaggggcattgaatcctcaagacgggatccaataagataagaaatacgaaagactcattttggagacttcgctacataatcacgagttcgaat

SEQ ID NO: 17272 - DNA, 771 bp, Muscodor strobelii
  misc_feature: SGI cDNA ID NO. 565766
  misc_feature: Elevated expression when VOC is produced
  misc_feature: Encodes the peptide sequence at SEQ ID NO 17273
atgagtgccagtcaaataccgcagaccctgtgggatctgcagattccgttgttcatcacccatacaagcgcacccaacacacctttcgtgacagctgtaccccgcttcagctatctctctttgctgttgcctcgtctatcagcttacttcgggttgccatgctcaagcttccaccacgaggatgtcttgctgcgcaatcttaccgtcggtctgctctgtgatctctaccagcccacgctgccatggaggcttgtcgttggcgatggtgtgagttgggatattagagacacgtttctgaatagtgctaaagaggcagactttgtacgcaatgggaatgctcagcagatcatgtcgctgtccaaagagaataccaatgctctatgggatgcagtcaaagacaatgactacatgtctttcaataaagtgaactcgcgactactgaacacgtcgcgcgacctcaagaacgtcccgatccggctctacataccaacgccgcagcctgaaggggagaatacaaacccggctggcgcatttaaggttgtacaatctcttgtgcagccgcgtgttaatgatcgcacgcctcagacgataggcgcggcgctgcgtaaactccttccgcagctcttcccaagcagcagagacccagttctggctgccgcgatcctgcacggcgcacgtgtaccgtttggcgcgccgctcgaggagctaatgcgcgaggccgcgtacccggacggatggttgtgtctcgtggtcgtgccgctagaaatttga

SEQ ID NO: 17273 - protein, 256 aa, Muscodor strobelii
  misc_feature: SGI Peptide ID NO. 565766
  misc_feature (69)..(254): Pfam Id: PF04106 Pfam Desc: Autophagy protein Apg5
  misc_feature (98)..(254): Pfam Id: PF04106 Pfam Desc: Autophagy protein Apg5
  misc_feature (2)..(252): NCBI GI: 116179756 Blast Desc: CHGG_00506 [Chaetomium globosum CBS 148.51] gi|121792236|sp|Q2HGZ8.1|ATG5_CHAGB RecName: Full=Autophagy protein 5 gi|88184803|gb|EAQ92271.1| CHGG_00506 [Chaetomium CBS
  misc_feature (2)..(254): NCBI GI: 256732128 Blast Desc: [Nectria haematococca mpVI 77-13-4]
  misc_feature (3)..(254): NCBI GI: 46137075 Blast Desc: FG10053.1 [Gibberella zeae PH-1]
  misc_feature (6)..(252): NCBI GI: 171691671 Blast Desc: protein product [Podospora anserina] gi|170945784|emb|CAP72584.1| protein product [Podospora anserina]
  misc_feature (3)..(252): NCBI GI: 218988966 Blast Desc: ATG5 protein [Hypocrea jecorina]
  misc_feature (14)..(252): NCBI GI: 164425301 Blast Desc: autophagy protein 5 [Neurospora crassa OR74A] gi|189045498|sp|Q872C6.2|ATG5_NEUCR RecName: Full=Autophagy protein 5 gi|157070873|gb|EAA29969.2| autophagy protein 5 crassa
  misc_feature (5)..(254): NCBI GI: 39958499 Blast Desc: MGG_09262 [Magnaporthe grisea 70-15] gi|71152290|sp|Q525E4.1|ATG5_MAGGR RecName: Full=Autophagy protein 5 gi|145013288|gb|EDJ97929.1| MGG_09262 [Magnaporthe
  misc_feature (5)..(254): NCBI GI: 143024493 Blast Desc: ATG5 [Magnaporthe grisea]
  misc_feature (4)..(254): NCBI GI: 261352013 Blast Desc: autophagy protein [Verticillium albo-atrum VaMs.102]
  misc_feature (8)..(252): NCBI GI: 28950053 Blast Desc: conserved [Neurospora crassa]
  misc_feature: Useful for introducing or modulating the production of volatile compounds
MSASQIPQTLWDLQIPLFITHTSAPNTPFVTAVPRFSYLSLLLPRLSAYFGLPCSSFHHEDVLLRNLTVGLLCDLYQPTLPWRLVVGDGVSWDIRDTFLNSAKEADFVRNGNAQQIMSLSKENTNALWDAVKDNDYMSFNKVNSRLLNTSRDLKNVPIRLYIPTPQPEGENTNPAGAFKVVQSLVQPRVNDRTPQTIGAALRKLLPQLFPSSRDPVLAAAILHGARVPFGAPLEELMREAAYPDGWLCLVVVPLEI

SEQ ID NO: 17274 - DNA, 3783 bp, Muscodor strobelii
  misc_feature: SGI EST ID NO. CUFF.40645.2
  misc_feature: Variant of the nucleotide sequence at SEQ ID NO 17272
ctgaggttgcctctgacgcctcaccattgcatctcatcccagcagtcaacccaggcaacaattaacagagaaacactttcgatcgctgccttgatactcatgtaaataggcgacgatatgatagcaataaaagcgactcactgggagtgcaaacaaatagtggtttctcccatatctaatctcgggctgtaatgcctaagtactttgacgtcttattcactgatcggtgagcacacttttagttattccaaaactccccttgcctgaacaatgccgatgaagccaattcttttgatcgcctcgacgacactattgttccccttgctgtcgctggctctcgccccaccgaatggctactggcgctggtgggagctaaccaccgatttcttccgcagtttcaggcggaactccaagattcctctgttcatagtcgattcgaaacatccatggattataaagaataaggagagactcgaaaatctccgcgacgttaagtcgtacctttgttcggtgactgggaccaagcccaatatccaggattttgatagtctcggcctcgaggtgccccctgatctgtttgattgtctgtatataggcaacaggcaagctggctgcaaccggcccggctggcccaatgccatggaaagacttcgcgagatgaaagagtgtccaacagctctggcacaagtcaaacacctcagtgttgacgtgtttcttcacgatagcaagtacagcgagttccacttgagaaatctcgagtggtcacagccttcagatgaactagttcatgcttttatagatgttttagggggtatgactagccttgaaacattgagttggggaatcccgccttcctccgcccattactttgagtatgtctttgtcgagcgacgcttgtctatgccctcggtcaagaaactactgccgggcgcaatgagtcattttctagtagagttatgtccaaatctcactgacttagctaatggcgggggtctttcatggcgccatcacgacatgggctggagtttcgaccccggtatatcacttatacatgctggcgcacatgccccgaacttgacaagtttttcgatggattctggctttcatgcatggacgccgtccaaagtacaagatgttattgttgcgatgccgagtctacgtaatttgactctcgatggcgatattgacgaacacgattacatatatgatgatgatcggatgtaccaaggcgagaagcttaggacgatcctgagaactctaaccgacctgaccaacctgacacacctggagctgccttcgtcggcgagtcttggagtaggcttcgacggtggccctcagtgtggcaatgcttactttgggcgatacggccggatctaccggcggcaggtggtgagacagggtgctgaagcaacggagaaagctgcgaagattgtgctggaagaactgcctggcctgaagtcattcatgattggctcgagaatgattcaaatgatacgacgcgagaacggaacagtagatgccgtcttcccgtggacaggtcgaatgcaagaatggctcctggagcaagtgccgaagcatgagaatgagccagaggaagacgaggcaattgatcgctcgcggttgcatgattactcctaaatcatttcatcctagacaacgattacttggttcattgacatatgtttcatgttatgagatagcatgctgagattcatcttcattttggacagggaattcaccgtctctgaaactgaattggtcctggtaaattttcggaaagagatgtaataacaatgtgaccatgtcgagaggtccaataggtgcgaatggaatggagttttagcacactgaagtgcctaaacttaccaggtagctgggcacggttgcgtgatgcaggtgcctgtgtctcaatcaatgtgcggctcaaagcaaacccactgagcacagcggggtatggcaatcacctgaaggttgcttagctccacaggcagtggcgtttgtcccagaaggacgtgctacaccactgatagtgcttgactccaatcaattccaatgacttgatggcttcaactcaaccaggcagcttcatattcatcagaccgctcggctcaaaccgcactgattcgtctgcgatcgcatgtacttcagagaatgtatttgaaaatgaattttgaacatgcaaagcgtgtgatatgagacacaaactggctagtattgctaaaccccgcctcgtccagacaaggcccctagactttcgaccgcccatatcattgcaaaggggtcaagaaactgcaaatgagtgccagtcaaataccgcagaccctgtgggatctgcagattccgttgttcatcacccatacaagcgcacccaacacacctttcgtgacagctgtaccccgcttcagctatctctctttgctgttgcctcgtctatcagcttacttcgggttgccatgctcaagcttccaccacgaggatgtcttgctgcgcaatcttaccgtcggtctgctctgtgatctctaccagcccacgctgccatggaggcttgtcgttggcgatggtgtgagttgggatattagagacacgtttctgaatagtgctaaagaggcagactttgtacgcaatgggaatgctcagcagatcatgtcgctgtccaaagagaataccaatgctctatgggatgcagtcaaagacaatgactacatgtctttcaataaagtgaactcgcgactactgaacacgtcgcgcgacctcaagaacgtcccgatccggctctacataccaacgccgcagcctgaaggggagaatacaaacccggctggcgcatttaaggttgtacaatctcttgtgcagccgcgtgttaatgatcgcacgcctcagacgataggcgcggcgctgcgtaaactccttccgcagctcttcccaagcagcagagacccagttctggctgccgcgatcctgcacggcgcacgtgtaccgtttggcgcgccgctcgaggagctaatgcgcgaggccgcgtacccggacggatggttgtgtctcgtggtcgtgccgctagaaatttgacggtcagctcgacgcgctaagttgcgaatgagtcctgaacatcatgcatagcttgcaaatatcatacgacattttgaacgaaatttgcttcagcattacattttcgcaaaacttgctcaataagcacatagctgaactactagcggacaatgcacggataatcctagcgctagcatttcttggccttaagacaccattgcccgatcgaaagtcttcatcttaacccggagcgcccgtcatctaataatacctagcgccgactagaaaactagataattcagtgcgaacctgggcagaacggcagatagtatcggtacatctcggacccgatctctatgtgatgcatctgccaggaatcatgtgacctaggggctattattaccaccatgccggcaagcaagatctgctgccttgcgcgcacatggcaacagtccaccgccgcgtccctgcagaaagcacagacggacgagagggccattacatcttggccagttctctttcacaacggggttcaggattatgattttccgacatagacatgatgaagcatcgctcgcgatattaaatgctctaaggagatgcgatctagtagcctcactttactatgtagtagtttattacgatttaagttgaaaaattcaacgcgatgcatgatggcccctgctgcaaatctccagctaccgcaactccacagcaaagtctcgatcctaccaacca

SEQ ID NO: 17275 - DNA, 1368 bp, Muscodor strobelii
  misc_feature: SGI cDNA ID NO. 565767
  misc_feature: Encodes the peptide sequence at SEQ ID NO 17276
atgccgatgaagccaattcttttgatcgcctcgacgacactattgttccccttgctgtcgctggctctcgccccaccgaatggctactggcgctggtgggagctaaccaccgatttcttccgcagtttcaggcggaactccaagattcctctgttcatagtcgattcgaaacatccatggattataaagaataaggagagactcgaaaatctccgcgacgttaagtcgtacctttgttcggtgactgggaccaagcccaatatccaggattttgatagtctcggcctcgaggtgccccctgatctgtttgattgtctgtatataggcaacaggcaagctggctgcaaccggcccggctggcccaatgccatggaaagacttcgcgagatgaaagagtgtccaacagctctggcacaagtcaaacacctcagtgttgacgtgtttcttcacgatagcaagtacagcgagttccacttgagaaatctcgagtggtcacagccttcagatgaactagttcatgcttttatagatgttttagggggtatgactagccttgaaacattgagttggggaatcccgccttcctccgcccattactttgagtatgtctttgtcgagcgacgcttgtctatgccctcggtcaagaaactactgccgggcgcaatgagtcattttctagtagagttatgtccaaatctcactgacttagctaatggcgggggtctttcatggcgccatcacgacatgggctggagtttcgaccccggtatatcacttatacatgctggcgcacatgccccgaacttgacaagtttttcgatggattctggctttcatgcatggacgccgtccaaagtacaagatgttattgttgcgatgccgagtctacgtaatttgactctcgatggcgatattgacgaacacgattacatatatgatgatgatcggatgtaccaaggcgagaagcttaggacgatcctgagaactctaaccgacctgaccaacctgacacacctggagctgccttcgtcggcgagtcttggagtaggcttcgacggtggccctcagtgtggcaatgcttactttgggcgatacggccggatctaccggcggcaggtggtgagacagggtgctgaagcaacggagaaagctgcgaagattgtgctggaagaactgcctggcctgaagtcattcatgattggctcgagaatgattcaaatgatacgacgcgagaacggaacagtagatgccgtcttcccgtggacaggtcgaatgcaagaatggctcctggagcaagtgccgaagcatgagaatgagccagaggaagacgaggcaattgatcgctcgcggttgcatgattactcctaa

SEQ ID NO: 17276 - protein, 455 aa, Muscodor strobelii
  misc_feature: SGI Peptide ID NO. 565767
MPMKPILLIASTTLLFPLLSLALAPPNGYWRWWELTTDFFRSFRRNSKIPLFIVDSKHPWIIKNKERLENLRDVKSYLCSVTGTKPNIQDFDSLGLEVPPDLFDCLYIGNRQAGCNRPGWPNAMERLREMKECPTALAQVKHLSVDVFLHDSKYSEFHLRNLEWSQPSDELVHAFIDVLGGMTSLETLSWGIPPSSAHYFEYVFVERRLSMPSVKKLLPGAMSHFLVELCPNLTDLANGGGLSWRHHDMGWSFDPGISLIHAGAHAPNLTSFSMDSGFHAWTPSKVQDVIVAMPSLRNLTLDGDIDEHDYIYDDDRMYQGEKLRTILRTLTDLTNLTHLELPSSASLGVGFDGGPQCGNAYFGRYGRIYRRQVVRQGAEATEKAAKIVLEELPGLKSFMIGSRMIQMIRRENGTVDAVFPWTGRMQEWLLEQVPKHENEPEEDEAIDRSRLHDYS

SEQ ID NO: 17277 - DNA, 3783 bp, Muscodor strobelii; identical to SEQ ID NO: 17274
  misc_feature: SGI EST ID NO. CUFF.40645.2
  misc_feature: Variant of the nucleotide sequence at SEQ ID NO 17275

SEQ ID NO: 17278 - DNA, 3717 bp, Muscodor strobelii
  misc_feature: SGI cDNA ID NO. 565768
  misc_feature: Encodes the peptide sequence at SEQ ID NO 17279
atgccgtcgaagccacggaaggaagtcgggccacgtgcggcgcacaactactacctcggagttgtcgaacaaatctttcgagtggccaatgtgccggttgcgccttccacgaacgatcccagtagttccaagggtcccaaggactccgatgaggcaaaaacataccgttggaatccatacaacagacttgggcccatagatggcgagagattcctcaagttctacggtgggtttaaatatcgcgccaataactttcgtgaccgagagaagtttgcgaaattcgccattagcaaagcccttggtgacgactttgagggcaagttcgacaagtcgggcgagattatgaagcatcagtccgttataaccggatctatgggcagccaagaggtcgcgcatgcaatcaccacagcgatcagaactgacattcagcaagatatcgatgccgagtacgctcccaagaacgacagcgatgtcgacttgatccagaacgttggtgctgctgcccagtccatatttgccgcgagtcccaattgtctcggtccgccaatcaatccttgcgtccaatacctccgaatggaaaagtgtggtgaatacggtcgcaacaactcgacattgtggaaatctcccctgtttcccaatctggatggcgaagagggacgtcgagccctgctcgaccaccaagtcacggggattgtctggttgctgtccagactgcttggagatctcccgagattgtcatacgtggatcctaccaccaatgagcgcaccagcaatatcgagacgccagcggatcaaaagaatcgcgatcgactaagagggcccaagtacttcggtggcatcctggcagactccatgggccttggcaagaccctaattacagtcgcgtttctacatcttatagtcagccagaagttgaacgtggtgcgggatgcgagcggcaaggaaaagtaccgccctattcttcttctgactccgaatatgacagtgttaaatcaatgggtcgaggagatctcccaggtcattgatcaaacggtgatccgccatatagtagtttctgggaacattcacaatgggagtacccagcaagggaggatcatccgcatggggcgtgagaacttcttgaaatggcccggcgaaatccgttacatgtgggatgaagatgatcccactgctgcacaggctattcttattgtacctctggacacctggcaagccagaaccatggtcaacgaagatgggaaatcgatatcaagcttctcgagaatgggccgcaagttctccatcgttgtagtggacgaggcttacaaagtcaagaacacgagcaccaagaattggcagtctatctaccatctacgtcgcaaatatactcttctcgtcaccgctactccatgcatgaacacactatccgaccttttcggactagcaaggctcctttggactgcaccagagaaatacctcaaacatgatcccaagaaatgggccgacattgaggcgactttcaagaagttgggggatctagactgtctcgataaacttgaaccattccatgactatcgactcgtggctggacgcccagcactgctgaccaagttgcttttcaaatccaaaaacaacagaaccgctgatattcagctaacgcgtcggtaccttaagtacttcgagagtcttgcgatgcttaagcgttcgccaagttctcatatatacgccaagtggaacaagtccgatccagtgtctcttgagggcttgtttcctcgggttgaaaactacacaatcgacataagcctaggcgaggagttcgatcgagaataccagagagaacacattcgtatattgatcaactatctgaaatgtctcagggactgggccagtaagcataaaaacgctaccagaatgacaaaggcccagaagcgcgaggcaagatcgccgcttgtctcctgccatagactttttcaactactctccgcctcagtggacgtatacgaaatcgaccaaatcatgaaagaatgcggtaagtcgaccttatccaacgatgttgcattcatgcgtgataacggaatcaacttgctctggctcatgccgcttctgatgccgccgcatgccgagagacctcctacgcatgtcaaatctttaagactggctatcactaggtctcccatcttacagtacattctctactatatccgacacaacattctcaccagggacaagaacgagaagatccgaaaactcctgattgtagaagttaatcccatgctcgccttctactatgaacgcgtcctccaattcctgggatttgagtgtcgatgcatgcatgcccagctatcaaacgaggagcgacaggaacttgtcaacagtttcaatagtgatgactgggaatcatgccagatcttaattcagatgtacacggttggtttcgctggtaccaatctgcacaagaactgctcgcgggtgttggttgcttcacagtcgcacagccttcaggtccagtctcaggccgttcatcgagtaattagagttggccagacttccgatgtcgaggtttcacgattgatgctgaagaactcttttcacgcgtttatggaaagtcgtcaagttgagaaggtcttaccagagcttggagcaagagcgaaagggccaacaaatgcaattctcgtacagattttgaatctctttcagcatgaggccgttgaagcatggcattcggctgacggacaaatgctccgagagaataaaaatctacttcacgacgatagcctcgtcttcatcaaaaaggaagaactcgatgaacacgaggttaagcgagccaaattcgaggaagagaaagcagccgaagcacgcaagtccgcgagtatcaagcagacactagaaacgaaaataagtccagaggacagattcgagcttgaagacgacgactctgagcaggaggacgagccctttactgtcatcaccacaaatcaagactcttctagcaagaagaggaaacacgaggatgatacgtcgccgggcaaggatggaaaactaggctggtccaacggtggtctcgatgacaacgcggcgtttcttgcgtggcgtactcgcaacgagtactatcaggagttcatcaatcttcctcagaactctaagagccatttgagccatgacaagaatagcctccgacgccttttgtccttcgcttcagacccaaatggcaacctgtcgacccagccgtggaaggcagctgatcttgccaagatccctgtcttggaacgtgctctcgagctgatagttcgcgtgcggcttggggccaagcacatagccatgctgccgttccccatgatcgatttgtcacaggctcctcattcacgtcgtgctgagctccatggaattctcgccacgatgcaagccattgaccaagaggtcgaacccgtaccggatgtagggacaaagtcggcacaggggaagattccgagggagagtctgaaggattttggtgttggaaaaaccttggccgaagttgacaaagatcttgagcttcaggccagatatggcgtatcttaccaggcctcgatcgcgggccagagcgaccagagcggtttgggtttgggtagtgatcatggtcttgatggcgatgagggtgaggaagagcctgaagagctcgaggagaccgaggtgggtggttcagaagagggccgtgatctcaaaggcaagatgactttcaaggaggagtatgctggatga

SEQ ID NO: 17279 - protein, 1238 aa, Muscodor strobelii
  misc_feature: SGI Peptide ID NO. 565768
  misc_feature (226)..(629): Pfam Id: PF00176 Pfam Desc: SNF2 family N-terminal domain
  misc_feature (226)..(339): Pfam Id: PF00176 Pfam Desc: SNF2 family N-terminal domain
  misc_feature (278)..(875): NCBI GI: 238842247 Blast Desc: conserved [Microsporum canis CBS 113480]
  misc_feature (270)..(874): NCBI GI: 238841524 Blast Desc: conserved [Microsporum canis CBS 113480]
  misc_feature (279)..(495): NCBI GI: 212529714 Blast Desc: nucleosome remodeling complex ATPase subunit (Snf2h), [Penicillium marneffei ATCC 18224] gi|210074412|gb|EEA28499.1| nucleosome remodeling complex ATPase subunit (Snf2h), marneffei
  misc_feature (278)..(482): NCBI GI: 241950577 Blast Desc: DNA repair protein, [Candida dubliniensis CD36] gi|223641350|emb|CAX43310.1| DNA repair protein, [Candida dubliniensis CD36]
  misc_feature (222)..(544): NCBI GI: 190345390 Blast Desc: PGUG_01361 [Pichia guilliermondii ATCC 6260]
  misc_feature (676)..(874): NCBI GI: 154305675 Blast Desc: [Botryotinia fuckeliana B05.10] gi|150853171|gb|EDN28363.1| [Botryotinia fuckeliana B05.10]
  misc_feature (278)..(482): NCBI GI: 254570913 Blast Desc: DNA helicase [Pichia pastoris GS115] gi|238032364|emb|CAY70387.1| DNA helicase [Pichia pastoris GS115]
  misc_feature (277)..(485): NCBI GI: 189206215 Blast Desc: ISWI chromatin-remodeling complex ATPase ISW2 [Pyrenophora tritici-repentis Pt-1C-BFP] gi|187975535|gb|EDU42161.1| ISWI chromatin-remodeling complex
  misc_feature (278)..(482): NCBI GI: 50284977 Blast Desc: CAGL0A03432g [Candida glabrata CBS138] gi|74691178|sp|Q6FY76.1|RAD5_CANGA RecName: Full=DNA repair protein RAD5 gi|49524219|emb|CAG57810.1| protein product [Candida
  misc_feature (277)..(498): NCBI GI: 193712533 Blast Desc: : similar to helicase [Acyrthosiphon pisum]
MPSKPRKEVGPRAAHNYYLGVVEQIFRVANVPVAPSTNDPSSSKGPKDSDEAKTYRWNPYNRLGPIDGERFLKFYGGFKYRANNFRDREKFAKFAISKALGDDFEGKFDKSGEIMKHQSVITGSMGSQEVAHAITTAIRTDIQQDIDAEYAPKNDSDVDLIQNVGAAAQSIFAASPNCLGPPINPCVQYLRMEKCGEYGRNNSTLWKSPLFPNLDGEEGRRALLDHQVTGIVWLLSRLLGDLPRLSYVDPTTNERTSNIETPADQKNRDRLRGPKYFGGILADSMGLGKTLITVAFLHLIVSQKLNVVRDASGKEKYRPILLLTPNMTVLNQWVEEISQVIDQTVIRHIVVSGNIHNGSTQQGRIIRMGRENFLKWPGEIRYMWDEDDPTAAQAILIVPLDTWQARTMVNEDGKSISSFSRMGRKFSIVVVDEAYKVKNTSTKNWQSIYHLRRKYTLLVTATPCMNTLSDLFGLARLLWTAPEKYLKHDPKKWADIEATFKKLGDLDCLDKLEPFHDYRLVAGRPALLTKLLFKSKNNRTADIQLTRRYLKYFESLAMLKRSPSSHIYAKWNKSDPVSLEGLFPRVENYTIDISLGEEFDREYQREHIRILINYLKCLRDWASKHKNATRMTKAQKREARSPLVSCHRLFQLLSASVDVYEIDQIMKECGKSTLSNDVAFMRDNGINLLWLMPLLMPPHAERPPTHVKSLRLAITRSPILQYILYYIRHNILTRDKNEKIRKLLIVEVNPMLAFYYERVLQFLGFECRCMHAQLSNEERQELVNSFNSDDWESCQILIQMYTVGFAGTNLHKNCSRVLVASQSHSLQVQSQAVHRVIRVGQTSDVEVSRLMLKNSFHAFMESRQVEKVLPELGARAKGPTNAILVQILNLFQHEAVEAWHSADGQMLRENKNLLHDDSLVFIKKEELDEHEVKRAKFEEEKAAEARKSASIKQTLETKISPEDRFELEDDDSEQEDEPFTVITTNQDSSSKKRKHEDDTSPGKDGKLGWSNGGLDDNAAFLAWRTRNEYYQEFINLPQNSKSHLSHDKNSLRRLLSFASDPNGNLSTQPWKAADLAKIPVLERALELIVRVRLGAKHIAMLPFPMIDLSQAPHSRRAELHGILATMQAIDQEVEPVPDVGTKSAQGKIPRESLKDFGVGKTLAEVDKDLELQARYGVSYQASIAGQSDQSGLGLGSDHGLDGDEGEEEPEELEETEVGGSEEGRDLKGKMTFKEEYAG

SEQ ID NO: 17280 - DNA, 1668 bp, Muscodor strobelii
  misc_feature: SGI cDNA ID NO. 565769
  misc_feature: Encodes the peptide sequence at SEQ ID NO 17281
atggacaactcacaggccccaattgtggatgaaccacgcgactcctctcacgacgattcgaagattgccaagcatgttgaagccgacggtggcgttgccgatttgggtcaggccgctgcgagaggtttacaggcaccggaaatcattgcgcgactgtctccggagcagcgcatcgagctagaaaaacgtcttgtgagaaggatcgatttgagactgatgcctatgatcatcctcatgtacattttgaactatatcgatcgcaacaatatctcacaggcgaaattgtctggtctacccgaggctctacatcttgaaggaccccagttccaaactgccgttagtatcctattcgtcggttacctacttttccaagtgccctccaatctattcttgaacaagattggaaagccctctatttaccttccaacttgcgtcagtacaattctctgctatgcatatattattgatggggaactaatgtatggacgtcagatggtcatctggggcgtgatctcagcctccactgctgcagtcacggtatgcaatcaacttctaattagcagacaagtcaaattcgctaattcgttccagaatttcggtggtctgattgcagtacgattcttcctcggtttcgtagaggctgcctactttcccggttgcctctactacctcagttgttggtacacacgcaaggagctcggtctgcgaacggctttcctgtactctggtgctctcatctcaggcgctttttcaggcttgatatctgcaggtgtcacggcaaatcttaatggggcgagaggctttggcgcatggcagtggctcttcatcatcgaaggggtcatcacaattggcgtttcattcattgccgtctgggttctaccaaatttccccaagacaacatcatggctcagcgaggaagaaaaggcccttgcgacttggcgactcgaggaagacattggtcaggcagattgggtcgatgaagaccagaagtctctgtggtatggtgccaaacttgcgtttgccgaccccaagacgtacattctcatgactatccttgtgggaatcgtgtcctcgggaggcgtgactaacttcctaccggctgtcgtcaaaactctgggctacaacaatgtcaacacacaactcttgaccagtccgccctatgtgctctgtgttattactacgtctctcaatgcgtggcacgcggatcggaccggggagagattctggcatattaccggttctttgttggtggccttggtaggcttcattgtcgcagcgacgaccacatcgattgggccccgatacttcgcaatcatcatcatggttcctggagtatacggtgcctttgtcgttgcgctggcctggatcagcaacacaatgcccaggccacccgccaagcgtgcagccgcattggctttcatcaacgccgtgtcgaacgcaactagtatctatgcaagctatctgtaccaagactggatggctcctcgctatatcatcgccttctctgtgaacagcgcaactgtcgtcttagccatctctgccgccgctgtcctccgaatagtactcgggagactgaataagaagctagatcaaggcattcatgtcgagggcgcaatcaatgccttgcctggcgaagctgctgaacatggatttagattcaagttgtag

SEQ ID NO: 17281 - protein, 555 aa, Muscodor strobelii
  misc_feature: SGI Peptide ID NO. 565769
  misc_feature (76)..(486): Pfam Id: PF07690 Pfam Desc: Major Facilitator Superfamily
  misc_feature (196)..(486): Pfam Id: PF07690 Pfam Desc: Major Facilitator Superfamily
  misc_feature (16)..(553): NCBI GI: 189209113 Blast Desc: pantothenate transporter liz1 [Pyrenophora tritici-repentis Pt-1C-BFP] gi|187976982|gb|EDU43608.1| pantothenate transporter liz1 [Pyrenophora tritici-repentis
  misc_feature (14)..(554): NCBI GI: 154302615 Blast Desc: BC1G_09884 [Botryotinia fuckeliana B05.10] gi|150855373|gb|EDN30565.1| BC1G_09884 [Botryotinia fuckeliana B05.10]
  misc_feature (41)..(555): NCBI GI: 156055476 Blast Desc: SS1G_05090 [Sclerotinia sclerotiorum 1980] gi|154702874|gb|EDO02613.1| SS1G_05090 [Sclerotinia sclerotiorum 1980]
  misc_feature (12)..(553): NCBI GI: 70996562 Blast Desc: MFS transporter [Aspergillus fumigatus Af293] gi|66850671|gb|EAL90998.1| MFS transporter, [Aspergillus fumigatus Af293] gi|159131772|gb|EDP56885.1| MFS transporter,
  misc_feature (12)..(553): NCBI GI: 119494389 Blast Desc: MFS transporter, [Neosartorya fischeri NRRL 181] gi|119412252|gb|EAW22193.1| MFS transporter, [Neosartorya fischeri NRRL 181]
  misc_feature (9)..(553): NCBI GI: 145230291 Blast Desc: An01g10360 [Aspergillus niger] gi|134055571|emb|CAK37217.1| protein product [Aspergillus niger]
  misc_feature (44)..(553): NCBI GI: 121700683 Blast Desc: MFS transporter, [Aspergillus clavatus NRRL 1] gi|119396749|gb|EAW07180.1| MFS transporter, [Aspergillus clavatus NRRL 1]
  misc_feature (16)..(553): NCBI GI: 156043924 Blast Desc: SS1G_10065 [Sclerotinia sclerotiorum 1980] gi|154694454|gb|EDN94192.1| SS1G_10065 [Sclerotinia sclerotiorum 1980]
  misc_feature (11)..(553): NCBI GI: 154296844 Blast Desc: BC1G_12511 [Botryotinia fuckeliana B05.10] gi|150843165|gb|EDN18358.1| BC1G_12511 [Botryotinia fuckeliana B05.10]
  misc_feature (42)..(476): NCBI GI: 28950007 Blast Desc: conserved [Neurospora crassa]
MDNSQAPIVDEPRDSSHDDSKIAKHVEADGGVADLGQAAARGLQAPEIIARLSPEQRIELEKRLVRRIDLRLMPMIILMYILNYIDRNNISQAKLSGLPEALHLEGPQFQTAVSILFVGYLLFQVPSNLFLNKIGKPSIYLPTCVSTILCYAYIIDGELMYGRQMVIWGVISASTAAVTVCNQLLISRQVKFANSFQNFGGLIAVRFFLGFVEAAYFPGCLYYLSCWYTRKELGLRTAFLYSGALISGAFSGLISAGVTANLNGARGFGAWQWLFIIEGVITIGVSFIAVWVLPNFPKTTSWLSEEEKALATWRLEEDIGQADWVDEDQKSLWYGAKLAFADPKTYILMTILVGIVSSGGVTNFLPAVVKTLGYNNVNTQLLTSPPYVLCVITTSLNAWHADRTGERFWHITGSLLVALVGFIVAATTTSIGPRYFAIIIMVPGVYGAFVVALAWISNTMPRPPAKRAAALAFINAVSNATSIYASYLYQDWMAPRYIIAFSVNSATVVLAISAAAVLRIVLGRLNKKLDQGIHVEGAINALPGEAAEHGFRFKL

SEQ ID NO: 17282 - DNA, 2283 bp, Muscodor strobelii
  misc_feature: SGI EST ID NO. CUFF.40669.0
  misc_feature: Variant of the nucleotide sequence at SEQ ID NO 17280
gcggaagggtataatgcaactctaccgtgactcgcttgagctctggcctgtgaccgcgtctcgcgacggtatttcaagtaacgggttggctggttacttggtagcgcttgttttcagcaactattagcaacagtcgattcagctagcgctgtcggtcgtacttcgctgtcctacaaaaccgagcctaccataggtatctaccgtcatcctcaagcgaagaggggtaaatatggaggaatttggagattggcgggttgaggaactggggtagctgcttcttgcagcggtccttttataccgcctaataacaatcctggcatcacgctccacgcatgcccgtcaatgcccatcactcgcctatgcgctttacccaacttgtacatgttatccaatcgaccaaccattcattgtcgcatgctgctgcttgagtgagcaagttcagaggaatacctagctcattagagcctccacgtgagcttggcgtgctggggtaagctggggaataaatacgatgtcggggtccctcaagaaagttcgaacgatttgcgcctggtctcattcctatccgtaaacgcgacctttctgtttaccgaaagacttgccggccttcaagttctaccatcagacgttgcgaatatggacaactcacaggccccaattgtggatgaaccacgcgactcctctcacgacgattcgaagattgccaagcatgttgaagccgacggtggcgttgccgatttgggtcaggccgctgcgagaggtttacaggcaccggaaatcattgcgcgactgtctccggagcagcgcatcgagctagaaaaacgtcttgtgagaaggatcgatttgagactgatgcctatgatcatcctcatgtacattttgaactatatcgatcgcaacaatatctcacaggcgaaattgtctggtctacccgaggctctacatcttgaaggaccccagttccaaactgccgttagtatcctattcgtcggttacctacttttccaagtgccctccaatctattcttgaacaagattggaaagccctctatttaccttccaacttgcatggtcatctggggcgtgatctcagcctccactgctgcagtcacgaatttcggtggtctgattgcagtacgattcttcctcggtttcgtagaggctgcctactttcccggttgcctctactacctcagttgttggtacacacgcaaggagctcggtctgcgaacggctttcctgtactctggtgctctcatctcaggcgctttttcaggcttgatatctgcaggtgtcacggcaaatcttaatggggcgagaggctttggcgcatggcagtggctcttcatcatcgaaggggtcatcacaattggcgtttcattcattgccgtctgggttctaccaaatttccccaagacaacatcatggctcagcgaggaagaaaaggcccttgcgacttggcgactcgaggaagacattggtcaggcagattgggtcgatgaagaccagaagtctctgtggtatggtgccaaacttgcgtttgccgaccccaagacgtacattctcatgactatccttgtgggaatcgtgtcctcgggaggcgtgactaacttcctaccggctgtcgtcaaaactctgggctacaacaatgtcaacacacaactcttgaccagtccgccctatgtgctctgtgttattactacgtctctcaatgcgtggcacgcggatcggaccggggagagattctggcatattaccggttctttgttggtggccttggtaggcttcattgtcgcagcgacgaccacatcgattgggccccgatacttcgcaatcatcatcatggttcctggagtatacggtgcctttgtcgttgcgctggcctggatcagcaacacaatgcccaggccacccgccaagcgtgcagccgcattggctttcatcaacgccgtgtcgaacgcaactagtatctatgcaagctatctgtaccaagactggatggctcctcgctatatcatcgccttctctgtgaacagcgcaactgtcgtcttagccatctctgccgccgctgtcctccgaatagtactcgggagactgaataagaagctagatcaaggcattcatgtcgagggcgcaatcaatgccttgcctggcgaagctgctgaacatggatttagattcaagttgtagatggggaaagtgttcctaattgagacttaagtgcttgaactgcgctttatgaggcgatagaatttatgaaattatgatgctattagatcaaat

SEQ ID NO: 17283 - DNA, 1554 bp, Muscodor strobelii
  misc_feature: SGI cDNA ID NO. 565770
  misc_feature: Elevated expression when VOC is produced
  misc_feature: Encodes the peptide sequence at SEQ ID NO 17284
atggacaactcacaggccccaattgtggatgaaccacgcgactcctctcacgacgattcgaagattgccaagcatgttgaagccgacggtggcgttgccgatttgggtcaggccgctgcgagaggtttacaggcaccggaaatcattgcgcgactgtctccggagcagcgcatcgagctagaaaaacgtcttgtgagaaggatcgatttgagactgatgcctatgatcatcctcatgtacattttgaactatatcgatcgcaacaatatctcacaggcgaaattgtctggtctacccgaggctctacatcttgaaggaccccagttccaaactgccgttagtatcctattcgtcggttacctacttttccaagtgccctccaatctattcttgaacaagattggaaagccctctatttaccttccaacttgcatggtcatctggggcgtgatctcagcctccactgctgcagtcacgaatttcggtggtctgattgcagtacgattcttcctcggtttcgtagaggctgcctactttcccggttgcctctactacctcagttgttggtacacacgcaaggagctcggtctgcgaacggctttcctgtactctggtgctctcatctcaggcgctttttcaggcttgatatctgcaggtgtcacggcaaatcttaatggggcgagaggctttggcgcatggcagtggctcttcatcatcgaaggggtcatcacaattggcgtttcattcattgccgtctgggttctaccaaatttccccaagacaacatcatggctcagcgaggaagaaaaggcccttgcgacttggcgactcgaggaagacattggtcaggcagattgggtcgatgaagaccagaagtctctgtggtatggtgccaaacttgcgtttgccgaccccaagacgtacattctcatgactatccttgtgggaatcgtgtcctcgggaggcgtgactaacttcctaccggctgtcgtcaaaactctgggctacaacaatgtcaacacacaactcttgaccagtccgccctatgtgctctgtgttattactacgtctctcaatgcgtggcacgcggatcggaccggggagagattctggcatattaccggttctttgttggtggccttggtaggcttcattgtcgcagcgacgaccacatcgattgggccccgatacttcgcaatcatcatcatggttcctggagtatacggtgcctttgtcgttgcgctggcctggatcagcaacacaatgcccaggccacccgccaagcgtgcagccgcattggctttcatcaacgccgtgtcgaacgcaactagtatctatgcaagctatctgtaccaagactggatggctcctcgctatatcatcgccttctctgtgaacagcgcaactgtcgtcttagccatctctgccgccgctgtcctccgaatagtactcgggagactgaataagaagctagatcaaggcattcatgtcgagggcgcaatcaatgccttgcctggcgaagctgctgaacatggatttagattcaagttgtag

SEQ ID NO: 17284 - protein, 517 aa, Muscodor strobelii
  misc_feature: SGI Peptide ID NO. 565770
  misc_feature (76)..(448): Pfam Id: PF07690 Pfam Desc: Major Facilitator Superfamily
  misc_feature (16)..(515): NCBI GI: 189209113 Blast Desc: pantothenate transporter liz1 [Pyrenophora tritici-repentis Pt-1C-BFP] gi|187976982|gb|EDU43608.1| pantothenate transporter liz1 [Pyrenophora tritici-repentis
  misc_feature (14)..(516): NCBI GI: 154302615 Blast Desc: BC1G_09884 [Botryotinia fuckeliana B05.10] gi|150855373|gb|EDN30565.1| BC1G_09884 [Botryotinia fuckeliana B05.10]
  misc_feature (41)..(517): NCBI GI: 156055476 Blast Desc: SS1G_05090 [Sclerotinia sclerotiorum 1980] gi|154702874|gb|EDO02613.1| SS1G_05090 [Sclerotinia sclerotiorum 1980]
  misc_feature (12)..(515): NCBI GI: 70996562 Blast Desc: MFS transporter [Aspergillus fumigatus Af293] gi|66850671|gb|EAL90998.1| MFS transporter, [Aspergillus fumigatus Af293] gi|159131772|gb|EDP56885.1| MFS transporter,
  misc_feature (12)..(515): NCBI GI: 119494389 Blast Desc: MFS transporter, [Neosartorya fischeri NRRL 181] gi|119412252|gb|EAW22193.1| MFS transporter, [Neosartorya fischeri NRRL 181]
  misc_feature (9)..(515): NCBI GI: 145230291 Blast Desc: An01g10360 [Aspergillus niger] gi|134055571|emb|CAK37217.1| protein product [Aspergillus niger]
  misc_feature (44)..(515): NCBI GI: 121700683 Blast Desc: MFS transporter, [Aspergillus clavatus NRRL 1] gi|119396749|gb|EAW07180.1| MFS transporter, [Aspergillus clavatus NRRL 1]
  misc_feature (16)..(515): NCBI GI: 156043924 Blast Desc: SS1G_10065 [Sclerotinia sclerotiorum 1980] gi|154694454|gb|EDN94192.1| SS1G_10065 [Sclerotinia sclerotiorum 1980]
  misc_feature (11)..(515): NCBI GI: 154296844 Blast Desc: BC1G_12511 [Botryotinia fuckeliana B05.10] gi|150843165|gb|EDN18358.1| BC1G_12511 [Botryotinia fuckeliana B05.10]
  misc_feature (42)..(438): NCBI GI: 28950007 Blast Desc: conserved [Neurospora crassa]
  misc_feature: Useful for introducing or modulating the production of volatile compounds
MDNSQAPIVDEPRDSSHDDSKIAKHVEADGGVADLGQAAARGLQAPEIIARLSPEQRIELEKRLVRRIDLRLMPMIILMYILNYIDRNNISQAKLSGLPEALHLEGPQFQTAVSILFVGYLLFQVPSNLFLNKIGKPSIYLPTCMVIWGVISASTAAVTNFGGLIAVRFFLGFVEAAYFPGCLYYLSCWYTRKELGLRTAFLYSGALISGAFSGLISAGVTANLNGARGFGAWQWLFIIEGVITIGVSFIAVWVLPNFPKTTSWLSEEEKALATWRLEEDIGQADWVDEDQKSLWYGAKLAFADPKTYILMTILVGIVSSGGVTNFLPAVVKTLGYNNVNTQLLTSPPYVLCVITTSLNAWHADRTGERFWHITGSLLVALVGFIVAATTTSIGPRYFAIIIMVPGVYGAFVVALAWISNTMPRPPAKRAAALAFINAVSNATSIYASYLYQDWMAPRYIIAFSVNSATVVLAISAAAVLRIVLGRLNKKLDQGIHVEGAINALPGEAAEHGFRFKL

SEQ ID NO: 17285 - DNA, 2283 bp, Muscodor strobelii; identical to SEQ ID NO: 17282
  misc_feature: SGI EST ID NO. CUFF.40669.0
  misc_feature: Variant of the nucleotide sequence at SEQ ID NO 17283

SEQ ID NO: 17286 - DNA, 1695 bp, Muscodor strobelii
  misc_feature: SGI cDNA ID NO. 565771
  misc_feature: Encodes the peptide sequence at SEQ ID NO 17287
atgcgctccttcgcgcaacttgtcggcttgacagccatcattccttcagctcttgttcaagcagctccttatatggatgcaggctttgatctcgcccctcggcaaacttgcgagtttgactctgctaccaatccttcatgctggggagactactcgctcagcaccaacttctatgaagaggttcctgacacgggagtcgttcgagagtactggcttgaggtcggcgatgccgtgcttgcacctgatggcgtcgagcgtccagtcatggttgtgaacggcacaatccccggcccaactttgaccgccgattggggtgacacttttgtcgttcatatccataacacgttgacgaccaatggaaccagtatccactggcatggtcttcgccagaacttcaccaaccaggcagatggtgttgcttctatcgtccaatgcccaatcgctccaggtgatactgcgacttacaccttcagagcaactcagtacgggtccacctggtatcatagccacttctcagtccaagcctgggatggtgtcttcggtggtatgatcatcaacggacccgcttccgctccgtatgatgaagacaagggcgttattctcctgtccgactggttccacgacactgttagctcgctcttcgacaaagcggcatcttcgggaccgcaaaaagcaaacaatgccctgataaacggcctcaacgtctgggacgatggtggttctcgctacgagacgagtttcacttccggaaacacataccgcctgcgtcttgtcaacacagcaatagacacacacttcaaattcggaatcgacaaccacaccctcacaattatcgcagtggatttggtacctatagaaccgtacactgtcgattgggtctcaattgccattgctcagcgtgtcgatgttgtcgtcactgctgatcaagatgcagggaactattggatgcgtgcgatcccacagctcacttgcagtaccaatgataacactctcaatatcaaaggcattgtgacctacgacgatgtcgcagtcacagaccccaccacgacagctccagactacatcgacgactgtatggatgaaccgattgccagcatcacacctgttgtgtcaattgatgccggtgacgcctcaaccatcgcacagttcgacgttggtcttgccattgcgaacggaatcatcaagtggaccatcaacgacaacgcgttcctcgcaacctgggggaatccaactcttcagaaagttctagacccgaccgccagttacgacgtgaccgagaacatcatcagagtaaacgagagtaacgcctggacatacctcgtcatcgagtctcaactgggtgtagcacatcctatccaccttcacggccacgacttcttcatccttgctcaggagcaagcggccacctattccgactcgtcggcgctcaacctttccaaccctcctcgtcgtgacgtggcgatgctcccagcagccggatacattgtcatggctttccagaatgacaaccctggagtgtggcttgtgcattgtcacatcggctggcacaccactcttggtctggccctccagatcatcgaacgggaatcagatatcgccggcatcactgacagcgatgctctcgacgagacgtgcacaaattggaatgcataccagactgaccaaggcatcattcagaacgacgatggcatttaa

SEQ ID NO: 17287 - protein, 564 aa, Muscodor strobelii
  misc_feature: SGI Peptide ID NO. 565771
  misc_feature (196)..(342): Pfam Id: PF00394 Pfam Desc: Multicopper oxidase
  misc_feature (404)..(531): Pfam Id: PF07731 Pfam Desc: Multicopper oxidase
  misc_feature (73)..(190): Pfam Id: PF07732 Pfam Desc: Multicopper oxidase
  misc_feature (196)..(330): Pfam Id: PF00394 Pfam Desc: Multicopper oxidase
  misc_feature (7)..(564): NCBI GI: 69047730 Blast Desc: laccase 3 [Cryphonectria parasitica]
  misc_feature (7)..(564): NCBI GI: 189208153 Blast Desc: laccase-1 precursor [Pyrenophora tritici-repentis Pt-1C-BFP] gi|187976503|gb|EDU43129.1| laccase-1 precursor [Pyrenophora tritici-repentis Pt-1C-BFP]
  misc_feature (17)..(564): NCBI GI: 46138179 Blast Desc: FG10604.1 [Gibberella zeae PH-1]
  misc_feature (37)..(564): NCBI GI: 154293446 Blast Desc: BC1G_14349 [Botryotinia fuckeliana B05.10] gi|150845330|gb|EDN20523.1| BC1G_14349 [Botryotinia fuckeliana B05.10]
  misc_feature (31)..(564): NCBI GI: 256726480 Blast Desc: NECHADRAFT_93139 [Nectria haematococca mpVI 77-13-4]
  misc_feature (8)..(564): NCBI GI: 152013644 Blast Desc: Lcc4 [Fusarium oxysporum]
  misc_feature (37)..(557): NCBI GI: 156035665 Blast Desc: SS1G_13036 [Sclerotinia sclerotiorum 1980] gi|154698441|gb|EDN98179.1| SS1G_13036 [Sclerotinia sclerotiorum 1980]
  misc_feature (1)..(564): NCBI GI: 261357868 Blast Desc: laccase-1 [Verticillium albo-atrum VaMs.102]
  misc_feature (40)..(564): NCBI GI: 145236308 Blast Desc: protein product [Aspergillus niger] gi|134075254|emb|CAK44895.1| protein product [Aspergillus niger]
  misc_feature (37)..(564): NCBI GI: 39976573 Blast Desc: MGG_05790 [Magnaporthe grisea 70-15] gi|145011976|gb|EDJ96632.1| MGG_05790 [Magnaporthe grisea 70-15]
  misc_feature (1)..(564): SWISSPROT Homolog: EC 1.10.3.2 Laccase
MRSFAQLVGLTAIIPSALVQAAPYMDAGFDLAPRQTCEFDSATNPSCWGDYSLSTNFYEEVPDTGVVREYWLEVGDAVLAPDGVERPVMVVNGTIPGPTLTADWGDTFVVHIHNTLTTNGTSIHWHGLRQNFTNQADGVASIVQCPIAPGDTATYTFRATQYGSTWYHSHFSVQAWDGVFGGMIINGPASAPYDEDKGVILLSDWFHDTVSSLFDKAASSGPQKANNALINGLNVWDDGGSRYETSFTSGNTYRLRLVNTAIDTHFKFGIDNHTLTIIAVDLVPIEPYTVDWVSIAIAQRVDVVVTADQDAGNYWMRAIPQLTCSTNDNTLNIKGIVTYDDVAVTDPTTTAPDYIDDCMDEPIASITPVVSIDAGDASTIAQFDVGLAIANGIIKWTINDNAFLATWGNPTLQKVLDPTASYDVTENIIRVNESNAWTYLVIESQLGVAHPIHLHGHDFFILAQEQAATYSDSSALNLSNPPRRDVAMLPAAGYIVMAFQNDNPGVWLVHCHIGWHTTLGLALQIIERESDIAGITDSDALDETCTNWNAYQTDQGIIQNDDGI

SEQ ID NO: 17288 - DNA, 3588 bp, Muscodor strobelii
  misc_feature: SGI EST ID NO. CUFF.40675.0
  misc_feature: Variant of the nucleotide sequence at SEQ ID NO 17286
ggtaagcatcgtggttgccaagtgttgcctgggtcatcaaaacattattcacctgaccttcaaagtccaggagacagctgcaacggtgcatccgagaagagaaacatcagacgaggatggtccagaggctgctccgttcccaataacaaggttgactaagactcagataattcttctttgtcagagcctagaacatacattgatgctagggacaacccaaagcctcgagggccaccagtctttgtcctggcacacgacatggctgccataccttgtcacgaacaacgatacgaagcacctccaactcaacactgattgttggagaataatgctaattaccaagcagaagcatacagtcgcgcgcttagaggacgtctctggaatactcatgcaggtacggaggcacggtcgtaacaatgggtgatataccatgggtcccttgttcctagttagcgatccgagggttgataagctgcgagctggatcctatcaattcacaacttcttcagcactgtacgccatattatcacggcgtacgtgtcgtcgtgtatctttggagttgtaagttatgaacactgacaatcgacaagcggacgcggaggtgctcggctccaggacaagatgcaagcgcatcgaacggaaagatatctcggggaacgctattgatttcctgcagttttaactcaactattcttgcgcgccacaaaagcgacatcgttcctcagcatgcaggagctataatggacatccttttagcaagatgcttacatcgctgacgagaaatacgatgtatcctctttcgccttggccaagccttccggtcaagcacggagaagcaacgtacccgcgatatgatgcccataatggatgatcctaatgccgaatccttgataatattgaatcgagctgtcgagaactctctgcaagagaccatctccacaccaccagtgccttttgcccatgactcttttccaatgttcgtgagaaagcccatgctaacgtagcatgccggtctccagttccggggactggagcgcttcgagaaagctatgcacggcgcggtcgaagcgagtgcatcgcttcgaagagtcgctactcttggacatagaccggacgtgagtatctcacatcttgatgctatgatgttgcggcctataaagctgaggcttcgtccctctttgaaatgggaaaagaagaccagcagcaacccgacagcgatcttggatagccactcttttccgaattttcactttaaggtctctctcttgtgaacagtttttcaacatgcgctccttcgcgcaacttgtcggcttgacagccatcattccttcagctcttgttcaagcagctccttatatggatgcaggctttgatctcgcccctcggcaaacttgcgagtttgactctgctaccaatccttcatgctggggagactactcgctcagcaccaacttctatgaagaggttcctgacacgggagtcgttcgagagtactggcttgaggtcggcgatgccgtgcttgcacctgatggcgtcgagcgtccagtcatggttgtgaacggcacaatccccggcccaactttgaccgccgattggggtgacacttttggtatgtcgctggtccattagcggaatcatctcgtcggcactgaagctgatcttttgcagtcgttcatatccataacacgttgacgaccaatggaaccagtatccactggcatggtcttcgccagaacttcaccaaccaggcagatggtgttgcttctatcgtccaatgcccaatcgctccaggtgatactgcgacttacaccttcagagcaactcagtacgggtccacctggtatcatagccacttctcagtccaagcctggtgagtaaagaaatgtacttcttgaattattagtcgctgattcgtcctagggatggtgtcttcggtggtatgatcatcaacggacccgcttccgctccgtatgatgaagacaagggcgttattctcctgtccgactggttccacgacactgttagctcgctcttcgacaaagcggcatcttcgggaccgcaaaaagcaaacaatgccctgataaacggcctcaacgtctgggacgatggtggttctcgctacgagacgagtttcacttccggaaacacataccgcctgcgtcttgtcaacacagcaatagacacacacttcaaattcggaatcgacaaccacaccctcacaattatcgcagtggatttggtacctatagaaccgtacactgtcgattgggtctcaattgccattgctcagcgtgtcgatgttgtcgtcactgctgatcaagatgcagggaactattggatgcgtgcgatcccacagctcacttgcagtaccaatgataacactctcaatatcaaaggcattgtgacctacgacgatgtcgcagtcacagaccccaccacgacagctccagactacatcgacgactgtatggatgaaccgattgccagcatcacacctgttgtgtcaattgatgccggtgacgcctcaaccatcgcacagttcgacgttggtcttgccattgcgaacggaatcatcaagtggaccatcaacgacaacgcgttcctcgcaacctgggggaatccaactcttcagaaagttctagacccgaccgccagttacgacgtgaccgagaacatcatcagagtaaacgagagtaacgcctggacatacctcgtcatcgagtctcaactgggtgtagcacatcctatccaccttcacggccacgacttcttcatccttgctcaggagcaagcggccacctattccgactcgtcggcgctcaacctttccaaccctcctcgtcgtgacgtggcgatgctcccagcagccggatacattgtcatggctttccagaatgacaaccctggagtgtggcttgtgcattgtcacatcggctggcacaccactcttggtctggccctccagatcatcgaacgggaatcagatatcgccggcatcactgacagcgatgctctcgacgagacgtgcacaaattggaatgcataccagactgaccaaggcatcattcagaacgacgatggcatttaagcctcattctagtaatcgataaaaaagtcgtccgaacagcgcaggtggtcgtcgccagtaagcagtcggttttcgagtaatatgtaaagcccccttcgcatcttttgacgaccaacggcatgcccgtcttttcttctcagtcacgagtagccattccttcggaagcatagcccacgcccgcactctttatgaatccgctcatttccattttgccatctttttctagacggcacactccaatcaccaagtccgatgaactgtatgactttcgaggcggggagaaggtgactccatcatccatgaacggtggggtagtatccgtggacctgggtcggctgtcaggcacagggttttaataatgaggcgaggagagaaaggcgacagaagtcggagcgaggcgattgatcaaacattctactgtatatattacaccacataccagtctcacttttactagtacatatctgtcatctcaattggtatccttccgcatctcaata

SEQ ID NO: 17289 - DNA, 858 bp, Muscodor strobelii
  misc_feature: SGI cDNA ID NO. 565772
  misc_feature: Reduced expression when VOC is produced
  misc_feature: Encodes the peptide sequence at SEQ ID NO 17290
atggagaaccagaacgtgccaaaggtgttgctgtttgatattggaggcgtgtgtgtcgtctcgcctttccaatcaatactagactatgagttaagccttggcataccgccaggatggataaactattcgatttccaagacagccccgaacggcttctggcaacgtctcgaaagaggcgagattcccatggacgatgcctacttcacaggtttcaacaatgacttgcatgactctgagagatggacgacgttctacaacattcaagcagccaaagacccgaatctgcccaaagaagtgcctccggttcccaaaatggacggtcgatgggtgttcaacgacatgatgacgaagtctaccgccccagatccatggatgtttccagccctgcagcgcttgaaagagagcggacgctttatcatggcggctgtcagtaatacagttgtcttccccaaagaccatccactttacgaagacgacttctttggaaatccggtacgacgtttattcgacgtctttgtatcttctgctcatgttggcctgagaaagcctgactcgcgcatatatgagtatacgctaggggagatcaacaagtatgcaaaggacaatgctagcacggccaggggccagaggctgggctgggctaatggtgtcaagcctgaggaaatcgtatttgtagacgatattggggagaatctgaagggaggtcgtaaaatgggcttccggactgtgaaggtgactctgggcaaggcattcgaagctgtagatgagctggaggcgatcaccggtttgaagcttgctggaagtcacccgagaatagctgtaaagccaatgtataataagcctaaggcaaacatataa

SEQ ID NO: 17290 - protein, 285 aa, Muscodor strobelii
  misc_feature: SGI Peptide ID NO. 565772
  misc_feature (7)..(248): Pfam Id: PF00702 Pfam Desc: haloacid dehalogenase-like hydrolase
  misc_feature (3)..(285): NCBI GI: 39971467 Blast Desc: MGG_07049 [Magnaporthe grisea 70-15] gi|145019509|gb|EDK03737.1| MGG_07049 [Magnaporthe grisea 70-15]
  misc_feature (1)..(285): NCBI GI: 261355741 Blast Desc: conserved [Verticillium albo-atrum VaMs.102]
  misc_feature (7)..(285): NCBI GI: 116197727 Blast Desc: CHGG_07019 [Chaetomium globosum CBS 148.51] gi|88178298|gb|EAQ85766.1| CHGG_07019 [Chaetomium globosum CBS 148.51]
  misc_feature (7)..(285): NCBI GI: 256732037 Blast Desc: NECHADRAFT_40587 [Nectria haematococca mpVI 77-13-4]
  misc_feature (19)..(285): NCBI GI: 171694357 Blast Desc: protein product [Podospora anserina] gi|170947127|emb|CAP73932.1| protein product [Podospora anserina]
  misc_feature (1)..(275): NCBI GI: 156044430 Blast Desc: SS1G_10318 [Sclerotinia sclerotiorum 1980] gi|154694707|gb|EDN94445.1| SS1G_10318 [Sclerotinia sclerotiorum 1980]
  misc_feature (1)..(265): NCBI GI: 121701411 Blast Desc: epoxide hydrolase, [Aspergillus clavatus NRRL 1] gi|119397113|gb|EAW07544.1| epoxide hydrolase, [Aspergillus clavatus NRRL 1]
  misc_feature (1)..(265): NCBI GI: 145240085 Blast Desc: An08g05720 [Aspergillus niger] gi|134077203|emb|CAK45544.1| protein product [Aspergillus niger]
  misc_feature (1)..(265): NCBI GI: 119495378 Blast Desc: epoxide hydrolase, [Neosartorya fischeri NRRL 181] gi|119412637|gb|EAW22578.1| epoxide hydrolase, [Neosartorya fischeri NRRL 181]
  misc_feature (7)..(265): NCBI GI: 255937097 Blast Desc: Pc13g11580 [Penicillium chrysogenum Wisconsin 54-1255] gi|211584195|emb|CAP92227.1| Pc13g11580 [Penicillium chrysogenum Wisconsin 54-1255]
  misc_feature (8)..(268): SWISSPROT Homolog: EC 3.3.2.10 Soluble epoxide hydrolase
  misc_feature: Useful for introducing or modulating the production of volatile compounds
MENQNVPKVLLFDIGGVCVVSPFQSILDYELSLGIPPGWINYSISKTAPNGFWQRLERGEIPMDDAYFTGFNNDLHDSERWTTFYNIQAAKDPNLPKEVPPVPKMDGRWVFNDMMTKSTAPDPWMFPALQRLKESGRFIMAAVSNTVVFPKDHPLYEDDFFGNPVRRLFDVFVSSAHVGLRKPDSRIYEYTLGEINKYAKDNASTARGQRLGWANGVKPEEIVFVDDIGENLKGGRKMGFRTVKVTLGKAFEAVDELEAITGLKLAGSHPRIAVKPMYNKPKANI

SEQ ID NO: 17291 - DNA, 1083 bp, Muscodor strobelii
  misc_feature: SGI EST ID NO. CUFF.40684.0
  misc_feature: Variant of the nucleotide sequence at SEQ ID NO 17289
atctcgctgcaacgctgaggcgacacgtttagttcttgatcatccaaatagactctgttcaggcgactacgtatcatcctagactttgtttgacatagatacttgatacatttgcatatctccatttgattggctactcaatttgttcccttttgtcttgcattctaggatcaagagctctatctccaaacccaaccatggagaaccagaacgtgccaaaggtgttgctgtttgatattggaggcgtgtgtgtcgtctcgcctttccaatcaatactagactatgagttaagccttggcataccgccaggatggataaactattcgatttccaagacagccccgaacggcttctggcaacgtctcgaaagaggcgagattcccatggacgatgcctacttcacaggtttcaacaatgacttgcatgactctgagagatggacgacgttctacaacattcaagcagccaaagacccgaatctgcccaaagaagtgcctccggttcccaaaatggacggtcgatgggtgttcaacgacatgatgacgaagtctaccgccccagatccatggatgtttccagccctgcagcgcttgaaagagagcggacgctttatcatggcggctgtcagtaatacagttgtcttccccaaagaccatccactttacgaagacgacttctttggaaatccggtacgacgtttattcgacgtctttgtatcttctgctcatgttggcctgagaaagcctgactcgcgcatatatgagtatacgctaggggagatcaacaagtatgcaaaggacaatgctagcacggccaggggccagaggctgggctgggctaatggtgtcaagcctgaggaaatcgtatttgtagacgatattggggagaatctgaagggaggtcgtaaaatgggcttccggactgtgaaggtgactctgggcaaggcattcgaagctgtagatgagctggaggcgatcaccggtttgaagcttgctggaagtcacccgagaatagctgtaaagccaatgtataataagcctaaggcaaacatataattagtctataattacatgattgatctca

SEQ ID NO: 17292 - DNA, 906 bp, Muscodor strobelii
  misc_feature: SGI cDNA ID NO. 565773
  misc_feature: Reduced expression when VOC is produced
  misc_feature: Encodes the peptide sequence at SEQ ID NO 17293
atgactttccacaagttggtcaagaacagcgcgtactacagccgcttccaaaccaagtacaagcgcagaagagccggaaagaccgactactacgcccgcaagcgcctcgtcacccaggccaagaacaagtacaatgcgcccaagtaccgcctcgtcgtccgcttcaccaaccgcgacatcatcatgcagatcgtcacttccgagatctccggcgacaaggtcttctgctccgcctactcccacgagctcaaggcttacggcatcgagcacggtctgaccaactgggccgctgcctacgccaccggcctcctcattgcccgtcgtgtcctcaagaagctcggcctcgacgagaccttcaccggtgtcgaggaggctgatggcgagtacaccctcaccgaggccgccgaggaggacggcgaggagcgccgccccttcaaggccttcctcgacgtcggtcttgcccgtacctccactggtgctcgtgtcttcggtgccatgaagggcgcttctgacggtggcatcttcatcccccactccgagaaccgcttccccggctacgacatggagagcgaggagctcgacgccgagaccctcaagaagtatatcttcggtggccacgtcgctgagtacatggagactcttgccgacgacgacgaggagcgctacaagtcccagttccagcagtacatcgacgacgacatcgaggccgacggtcttgaggacatgtacaccgaggcccatgccgccatccgcgaggatcctttcaagaagcccgaggacgagggcgagaagaagggcaaggactactggaaggccgagagcaagaagcaccgcgctgtcaagtccaccaaggctgagcgagaggagagagtcaaggccaagattgccgagctccgtgacgagtaa

SEQ ID NO: 17293 - protein, 301 aa, Muscodor strobelii
  misc_feature: SGI Peptide ID NO. 565773
  misc_feature (26)..(176): Pfam Id: PF00861 Pfam Desc: Ribosomal L18p/L5e family
  misc_feature (1)..(301): NCBI GI: 85098188 Blast Desc: 60S ribosomal protein L5 [Neurospora crassa OR74A] gi|6094087|sp|O59953.1|RL5_NEUCR RecName: Full=60S ribosomal protein L5; AltName: Full=CPR4 gi|3003044|gb|AAC09000.1| 5S rRNA
  misc_feature (1)..(301): NCBI GI: 256731660 Blast Desc: [Nectria haematococca mpVI 77-13-4]
  misc_feature (1)..(301): NCBI GI: 261355740 Blast Desc: 60S ribosomal protein L5 [Verticillium albo-atrum VaMs.102]
  misc_feature (1)..(299): NCBI GI: 154294907 Blast Desc: 60S ribosomal protein L5 [Botryotinia fuckeliana B05.10] gi|150844534|gb|EDN19727.1| 60S ribosomal protein L5 [Botryotinia fuckeliana B05.10]
  misc_feature (1)..(300): NCBI GI: 156044424 Blast Desc: 60S ribosomal protein L5 [Sclerotinia sclerotiorum 1980] gi|154694704|gb|EDN94442.1| 60S ribosomal protein L5 [Sclerotinia sclerotiorum 1980]
  misc_feature (1)..(300): NCBI GI: 39971465 Blast Desc: MGG_07048 [Magnaporthe grisea 70-15] gi|145019508|gb|EDK03736.1| MGG_07048 [Magnaporthe grisea 70-15]
  misc_feature (1)..(301): NCBI GI: 171694355 Blast Desc: protein product [Podospora anserina] gi|170947126|emb|CAP73931.1| protein product [Podospora anserina]
  misc_feature (1)..(301): NCBI GI: 116197729 Blast Desc: 60S ribosomal protein L5 [Chaetomium globosum CBS 148.51] gi|88178299|gb|EAQ85767.1| 60S ribosomal protein L5 [Chaetomium globosum CBS 148.51]
  misc_feature (1)..(298): NCBI GI: 189207733 Blast Desc: 60S ribosomal protein L5-B [Pyrenophora tritici-repentis Pt-1C-BFP] gi|187976293|gb|EDU42919.1| 60S ribosomal protein L5-B [Pyrenophora tritici-repentis Pt-1C-BFP]
  misc_feature (1)..(298): NCBI GI: 121701409 Blast Desc: 60S ribosomal protein L5, [Aspergillus clavatus NRRL 1] gi|119397112|gb|EAW07543.1| 60S ribosomal protein L5, [Aspergillus clavatus NRRL 1]
  misc_feature: Useful for introducing or modulating the production of volatile compounds
MTFHKLVKNSAYYSRFQTKYKRRRAGKTDYYARKRLVTQAKNKYNAPKYRLVVRFTNRDIIMQIVTSEISGDKVFCSAYSHELKAYGIEHGLTNWAAAYATGLLIARRVLKKLGLDETFTGVEEADGEYTLTEAAEEDGEERRPFKAFLDVGLARTSTGARVFGAMKGASDGGIFIPHSENRFPGYDMESEELDAETLKKYIFGGHVAEYMETLADDDEERYKSQFQQYIDDDIEADGLEDMYTEAHAAIREDPFKKPEDEGEKKGKDYWKAESKKHRAVKSTKAEREERVKAKIAELRDE

SEQ ID NO: 17294 - DNA, 1249 bp, Muscodor strobelii
  misc_feature: SGI EST ID NO. CUFF.41129.1
  misc_feature: Variant of the nucleotide sequence at SEQ ID NO 17292
ggagatttgtgtgcatctcaaactgagactcttccatccttcacccaacttcatcttcctacacgacactgctgataccgcccggtcagcaacaaccgtcaagatgactttccacaagttggtcaagaacagcgcgtactacagccgcttccaaaccaagtacaagcgcagaagagccggaaagaccgactactacgcccgcaagcgcctcgtcacccaggccaagaacaagtacaatgcgcccaagtaccgcctcgtcgtccgcttcaccaaccgcgacatcatcatgcagatcgtcacttccgagatctccggcgacaaggtcttctgctccgcctactcccacgagctcaaggcttacggcatcgagcacggtctgaccaactgggccgctgcctacgccaccggcctcctcattgcccgtcgtgtcctcaagaagctcggcctcgacgagaccttcaccggtgtcgaggaggctgatggcgagtacaccctcaccgaggccgccgaggaggacggcgaggagcgccgccccttcaaggccttcctcgacgtcggtcttgcccgtacctccactggtgctcgtgtcttcggtgccatgaagggcgcttctgacggtggcatcttcatcccccactccgagaaccgcttccccggctacgacatggagagcgaggagctcgacgccgagaccctcaagaagtatatcttcggtggccacgtcgctgagtacatggagactcttgccgacgacgacgaggagcgctacaagtcccagttccagcagtacatcgacgacgacatcgaggccgacggtcttgaggacatgtacaccgaggcccatgccgccatccgcgaggatcctttcaagaagcccgaggacgagggcgagaagaagggcaaggactactggaaggccgagagcaagaagcaccgcgctgtcaagtccaccaaggctgagcgagaggagagagtcaaggccaagattgccgagctccgtgacgagtaaactgtatctagtcgagggttatgaaaaaagggatcatgcacgcttgagcatcaacggttgtcttccggcaaggggagttacaggagtgactttttgacagtacgctaaatgatatcatgacattcacgttctgtccattgccgggaatttttttatgtgatcacggtgaaataatcaagtgcatgagggaactgctgtcgagttgccgagtatgaaaatgcatgcctatctcgtaatacg

SEQ ID NO: 17295 - DNA, 345 bp, Muscodor strobelii
  misc_feature: SGI cDNA ID NO. 565774
  misc_feature: Elevated expression when VOC is produced
  misc_feature: Encodes the peptide sequence at SEQ ID NO 17296
atggagagcgaggagctcgacgccgagaccctcaagaagtatatcttcggtggccacgtcgctgagtacatggagactcttgccgacgacgacgaggagcgctacaagtcccagttccagcagtacatcgacgacgacatcgaggccgacggtcttgaggacatgtacaccgaggcccatgccgccatccgcgaggatcctttcaagaagcccgaggacgagggcgagaagaagggcaaggactactggaaggccgagagcaagaagcaccgcgctgtcaagtccaccaaggctgagcgagaggagagagtcaaggccaagattgccgagctccgtgacgagtaa

SEQ ID NO: 17296 - protein, 114 aa, Muscodor strobelii
  misc_feature: SGI Peptide ID NO. 565774
  misc_feature (1)..(114): NCBI GI: 261355740 Blast Desc: 60S ribosomal protein L5 [Verticillium albo-atrum VaMs.102]
  misc_feature (1)..(114): NCBI GI: 256731660 Blast Desc: [Nectria haematococca mpVI 77-13-4]
  misc_feature (1)..(114): NCBI GI: 85098188 Blast Desc: 60S ribosomal protein L5 [Neurospora crassa OR74A] gi|6094087|sp|O59953.1|RL5_NEUCR RecName: Full=60S ribosomal protein L5; AltName: Full=CPR4 gi|3003044|gb|AAC09000.1| 5S rRNA
  misc_feature (1)..(111): NCBI GI: 189207733 Blast Desc: 60S ribosomal protein L5-B [Pyrenophora tritici-repentis Pt-1C-BFP] gi|187976293|gb|EDU42919.1| 60S ribosomal protein L5-B [Pyrenophora tritici-repentis Pt-1C-BFP]
  misc_feature (1)..(112): NCBI GI: 154294907 Blast Desc: 60S ribosomal protein L5 [Botryotinia fuckeliana B05.10] gi|150844534|gb|EDN19727.1| 60S ribosomal protein L5 [Botryotinia fuckeliana B05.10]
  misc_feature (1)..(113): NCBI GI: 156044424 Blast Desc: 60S ribosomal protein L5 [Sclerotinia sclerotiorum 1980] gi|154694704|gb|EDN94442.1| 60S ribosomal protein L5 [Sclerotinia sclerotiorum 1980]
  misc_feature (1)..(114): NCBI GI: 116197729 Blast Desc: 60S ribosomal protein L5 [Chaetomium globosum CBS 148.51] gi|88178299|gb|EAQ85767.1| 60S ribosomal protein L5 [Chaetomium globosum CBS 148.51]
  misc_feature (1)..(113): NCBI GI: 39971465 Blast Desc: MGG_07048 [Magnaporthe grisea 70-15] gi|145019508|gb|EDK03736.1| MGG_07048 [Magnaporthe grisea 70-15]
  misc_feature (1)..(112): NCBI GI: 169614528 Blast Desc: SNOG_10409 [Phaeosphaeria nodorum SN15] gi|160702763|gb|EAT81803.2| SNOG_10409 [Phaeosphaeria nodorum SN15]
  misc_feature (1)..(111): NCBI GI: 154271618 Blast Desc: 60S ribosomal protein L5 [Ajellomyces capsulatus NAm1] gi|150409332|gb|EDN04782.1| 60S ribosomal protein L5 [Ajellomyces capsulatus NAm1]
  misc_feature: Useful for introducing or modulating the production of volatile compounds
MESEELDAETLKKYIFGGHVAEYMETLADDDEERYKSQFQQYIDDDIEADGLEDMYTEAHAAIREDPFKKPEDEGEKKGKDYWKAESKKHRAVKSTKAEREERVKAKIAELRDE

SEQ ID NO: 17297 - DNA, 1249 bp, Muscodor strobelii; identical to SEQ ID NO: 17294
  misc_feature: SGI EST ID NO. CUFF.41129.1
  misc_feature: Variant of the nucleotide sequence at SEQ ID NO 17295

SEQ ID NO: 17298 - DNA, 1395 bp, Muscodor strobelii
  misc_feature: SGI cDNA ID NO. 565775
  misc_feature: Elevated expression when VOC is produced
  misc_feature: Encodes the peptide sequence at SEQ ID NO 17299
atggacggactatcaaccatctccagcgtcgttgcggtggttcagctggcaaaagaagtcggaaaaggggcttcacatacccagatcacagacctcattgtggttctccaggaagtcaacgatcttctcaaatcactagatgatgaaacctcccaatcagacgccgaagtcatcacaaatggctatagctacagagaccaaggccagatggcttccaatgcaaagagacttggtaagactgcgcaccgtttcttctttcattgccgtgtggaatatagctcgcctgatcttcctgatcgcgattggccgtcaaacgctcgccacaagatcgtcaccggcctatcgtttcgggacctcgagacagagcttcaggaacatccagaagatatcgacaaacaagatgccttatgccgaagcgccatatcatgggccgctgctcgcggcaatgaggaacatgtcacattgctactgacatacggtgcaaatcctaatattctggacaactccctctcagggcctgtgacatactccgcagaccggagtcatgctgtgtgtacgcgactactgcttgatgcccatgctagaactgatcccgttctacctcccggtttcacgataggaactccgctcaactgcgcggcacgtaacgcgagtgatccagctgtgattgaattactgctccaatacggcgccaatccagacgcgacaggcgtggatcgtaggacaccgttgatccacgcagcccgcaagaacatgccggagtttgcccatttaatgttacaatatggcgcaaacataaacgcagtggccagcgatggtcaaacgcctttgacaaccgccattatcaacaacagctacgatgttttagcattacttttacatcgctgggcagaatacagcgtttgtccacgacttagtggtcccaaccttctccttgttgtcgcccaatacgcagacgcccacacaatcgagatactaaagaaaacagaccacttccgcatcaaatatgaccgaacatattccgaaggcgattttgaagcgatcatccgatcgcgccacgacgcggacgaaaagctattgatggcctttgatagcttcttaagcacgatgcgacttgcggaggtagccgaacttaaggataaaaagctaaagcgatgtcctacaggcgggtggccgcaatggcctgacatcgagaaaggctttgtgcaagatgattcggataacagtgatgagttctatgatgcggaagcggaatcgggatacataccatggatcaggtctcacggcagatggtgtggtgcgatttgttattatatgaaggatatgcgcatgattgaagccagaagtttttgtcgataccctttactacattatacccttacatcgtcgaattaa

SEQ ID NO: 17299 - protein, 464 aa, Muscodor strobelii
  misc_feature: SGI Peptide ID NO. 565775
  misc_feature (239)..(271): Pfam Id: PF00023 Pfam Desc: Ankyrin repeat
  misc_feature (136)..(168): Pfam Id: PF00023 Pfam Desc: Ankyrin repeat
  misc_feature (208)..(238): Pfam Id: PF00023 Pfam Desc: Ankyrin repeat
  misc_feature (108)..(394): NCBI GI: 255940536 Blast Desc: Pc16g07030 [Penicillium chrysogenum Wisconsin 54-1255] gi|211585660|emb|CAP93373.1| Pc16g07030 [Penicillium chrysogenum Wisconsin 54-1255]
  misc_feature (106)..(370): NCBI GI: 154304610 Blast Desc: BC1G_08044 [Botryotinia fuckeliana B05.10] gi|150853944|gb|EDN29136.1| BC1G_08044 [Botryotinia fuckeliana B05.10]
  misc_feature (108)..(415): NCBI GI: 238493777 Blast Desc: ankyrin repeat domain, [Aspergillus flavus NRRL3357] gi|220696619|gb|EED52961.1| ankyrin repeat domain, [Aspergillus flavus NRRL3357]
  misc_feature (108)..(367): NCBI GI: 240107578 Blast Desc: ankyrin repeat containing protein [Coccidioides posadasii C735 delta SOWgp]
  misc_feature (108)..(415): NCBI GI: 169783950 Blast Desc: [Aspergillus oryzae RIB40] gi|83775181|dbj|BAE65304.1| protein product [Aspergillus oryzae]
  misc_feature (108)..(367): NCBI GI: 119177745 Blast Desc: CIMG_07774 [Coccidioides immitis RS]
  misc_feature (108)..(373): NCBI GI: 171679375 Blast Desc: protein product [Podospora anserina] gi|170939313|emb|CAP64541.1| protein product [Podospora anserina]
  misc_feature (108)..(329): NCBI GI: 238844076 Blast Desc: TPR Domain containing protein [Microsporum canis CBS 113480]
  misc_feature (108)..(317): NCBI GI: 258576855 Blast Desc: [Uncinocarpus reesii 1704] gi|237902875|gb|EEP77276.1| [Uncinocarpus reesii 1704]
  misc_feature (118)..(314): NCBI GI: 242012957 Blast Desc: ankyrin repeat-containing protein, [Pediculus humanus corporis] gi|212511477|gb|EEB14452.1| ankyrin repeat-containing protein, [Pediculus humanus corporis]
  misc_feature: Useful for introducing or modulating the production of volatile compounds
MDGLSTISSVVAVVQLAKEVGKGASHTQITDLIVVLQEVNDLLKSLDDETSQSDAEVITNGYSYRDQGQMASNAKRLGKTAHRFFFHCRVEYSSPDLPDRDWPSNARHKIVTGLSFRDLETELQEHPEDIDKQDALCRSAISWAAARGNEEHVTLLLTYGANPNILDNSLSGPVTYSADRSHAVCTRLLLDAHARTDPVLPPGFTIGTPLNCAARNASDPAVIELLLQYGANPDATGVDRRTPLIHAARKNMPEFAHLMLQYGANINAVASDGQTPLTTAIINNSYDVLALLLHRWAEYSVCPRLSGPNLLLVVAQYADAHTIEILKKTDHFRIKYDRTYSEGDFEAIIRSRHDADEKLLMAFDSFLSTMRLAEVAELKDKKLKRCPTGGWPQWPDIEKGFVQDDSDNSDEFYDAEAESGYIPWIRSHGRWCGAICYYMKDMRMIEARSFCRYPLLHYTLTSSN

SEQ ID NO: 17300 - DNA, 1158 bp, Muscodor strobelii
  misc_feature: SGI cDNA ID NO. 565776
  misc_feature: Elevated expression when VOC is produced
  misc_feature: Encodes the peptide sequence at SEQ ID NO 17301
atggctatagctacagagaccaaggccagatggcttccaatctcgcctgatcttcctgatcgcgattggccgtcaaacgctcgccacaagatcgtcaccggcctatcgtttcgggacctcgagacagagcttcaggaacatccagaagatatcgacaaacaagatgccttatgccgaagcgccatatcatgggccgctgctcgcggcaatgaggaacatgtcacattgctactgacatacggtgcaaatcctaatattctggacaactccctctcagggcctgtgacatactccgcagaccggagtcatgctgtgtgtacgcgactactgcttgatgcccatgctagaactgatcccgttctacctcccggtttcacgataggaactccgctcaactgcgcggcacgtaacgcgagtgatccagctgtgattgaattactgctccaatacggcgccaatccagacgcgacaggcgtggatcgtaggacaccgttgatccacgcagcccgcaagaacatgccggagtttgcccatttaatgttacaatatggcgcaaacataaacgcagtggccagcgatggtcaaacgcctttgacaaccgccattatcaacaacagctacgatgttttagcattacttttacatcgctgggcagaatacagcgtttgtccacgacttagtggtcccaaccttctccttgttgtcgcccaatacgcagacgcccacacaatcgagatactaaagaaaacagaccacttccgcatcaaatatgaccgaacatattccgaaggcgattttgaagcgatcatccgatcgcgccacgacgcggacgaaaagctattgatggcctttgatagcttcttaagcacgatgcgacttgcggaggtagccgaacttaaggataaaaagctaaagcgatgtcctacaggcgggtggccgcaatggcctgacatcgagaaaggctttgtgcaagatgattcggataacagtgatgagttctatgatgcggaagcggaatcgggatacataccatggatcaggtctcacggcagatggtgtggtgcgatttgttattatatgaaggatatgcgcatgattgaagccagaagtttttgtcgataccctttactacattatacccttacatcgtcgaattaa

SEQ ID NO: 17301 - protein, 385 aa, Muscodor strobelii
  misc_feature: SGI Peptide ID NO. 565776
  misc_feature (160)..(192): Pfam Id: PF00023 Pfam Desc: Ankyrin repeat
  misc_feature (57)..(89): Pfam Id: PF00023 Pfam Desc: Ankyrin repeat
  misc_feature (129)..(159): Pfam Id: PF00023 Pfam Desc: Ankyrin repeat
  misc_feature (29)..(315): NCBI GI: 255940536 Blast Desc: Pc16g07030 [Penicillium chrysogenum Wisconsin 54-1255] gi|211585660|emb|CAP93373.1| Pc16g07030 [Penicillium chrysogenum Wisconsin 54-1255]
  misc_feature (27)..(291): NCBI GI: 154304610 Blast Desc: BC1G_08044 [Botryotinia fuckeliana B05.10] gi|150853944|gb|EDN29136.1| BC1G_08044 [Botryotinia fuckeliana B05.10]
  misc_feature (29)..(336): NCBI GI: 238493777 Blast Desc: ankyrin repeat domain, [Aspergillus flavus NRRL3357] gi|220696619|gb|EED52961.1| ankyrin repeat domain, [Aspergillus flavus NRRL3357]
  misc_feature (29)..(336): NCBI GI: 169783950 Blast Desc: [Aspergillus oryzae RIB40] gi|83775181|dbj|BAE65304.1| protein product [Aspergillus oryzae]
  misc_feature (29)..(291): NCBI GI: 240107578 Blast Desc: ankyrin repeat containing protein [Coccidioides posadasii C735 delta SOWgp]
  misc_feature (29)..(291): NCBI GI: 119177745 Blast Desc: CIMG_07774 [Coccidioides immitis RS]
  misc_feature (29)..(294): NCBI GI: 171679375 Blast Desc: protein product [Podospora anserina] gi|170939313|emb|CAP64541.1| protein product [Podospora anserina]
  misc_feature (29)..(250): NCBI GI: 238844076 Blast Desc: TPR Domain containing protein [Microsporum canis CBS 113480]
  misc_feature (29)..(238): NCBI GI: 258576855 Blast Desc: [Uncinocarpus reesii 1704] gi|237902875|gb|EEP77276.1| [Uncinocarpus reesii 1704]
  misc_feature (39)..(249): NCBI GI: 242012957 Blast Desc: ankyrin repeat-containing protein, [Pediculus humanus corporis] gi|212511477|gb|EEB14452.1| ankyrin repeat-containing protein, [Pediculus humanus corporis]
  misc_feature: Useful for introducing or modulating the production of volatile compounds
MAIATETKARWLPISPDLPDRDWPSNARHKIVTGLSFRDLETELQEHPEDIDKQDALCRSAISWAAARGNEEHVTLLLTYGANPNILDNSLSGPVTYSADRSHAVCTRLLLDAHARTDPVLPPGFTIGTPLNCAARNASDPAVIELLLQYGANPDATGVDRRTPLIHAARKNMPEFAHLMLQYGANINAVASDGQTPLTTAIINNSYDVLALLLHRWAEYSVCPRLSGPNLLLVVAQYADAHTIEILKKTDHFRIKYDRTYSEGDFEAIIRSRHDADEKLLMAFDSFLSTMRLAEVAELKDKKLKRCPTGGWPQWPDIEKGFVQDDSDNSDEFYDAEAESGYIPWIRSHGRWCGAICYYMKDMRMIEARSFCRYPLLHYTLTSSN

SEQ ID NO: 17302 - DNA, 2325 bp, Muscodor strobelii
  misc_feature: SGI cDNA ID NO. 565777
  misc_feature: Encodes the peptide sequence at SEQ ID NO 17303
atgggtactgcatatttattgaaggcactagtcacgagagacaccagcggccgtactgcgctgcattacgcggctgaatacggtatgaccatgatatgcgaacaatatctcaagtggctggcttcaaattcagtagtctcaccacaacccgatacctcgatcatcctttttgtcgatagtcaaggggatacaccactgtcgcttagcgtcagcgggggacataaggaagtcttgaacgtgcttctagcttacgtaaaggatgatggcaagcgaggcacgaacggacttggagagctcatcatagagctgacttccttagctattcgatcacgacggattgatattatagaaacactcctcgaccactcgccgcggcttttgaaatcacaccctgaggcaccgcgcctactctatatggcttcacagtatggtcaagagtcgatcgtatctcgtttaatgacttatgcaggcgacatcaattatcacgagccaattcaagggaaaacgcctcttatgatagcctcgatttacgagcacactattgttgtagaagctctgttgaaacatccgagctgtgacatacttattcaggactatgcaggctggacagccgtggaccatgctgctttccgagggcctcctagcctcgtcaaaatactacaaggtcagaaaaaagactcttctgtcgcccttggtcgcccgtcgcatgcaatcgagccgccagtccaacgttccaaaagtcgaaacgttgcatctgaagatatttcctcggagactgatcgtgatgtcaaccacgtcttcgtaaaccttggacacttcgatatggataaagagccgtcattattgaagatagaagcctttcgcaaactagttgcgcccatgcagatcccggaaagcagtctaacacttgagataaccggcatcaactgtgcttcgacccgaccctacctgatctcattaccaattctgtccgatctttgcaacgatccactccatttcactgccaaagacctgaacaccgctaggttacttttcagagtttacagctcagtattgccgagcggaagcggtacgcaggagccttcgttagtcggctcagctgtcgcttccctcaaagatgctcgcgaggggctcggaagctccctcgagagccttgagagagatcatactgtctctttggtgtcttcggaggcatttggttataattatgcaggaagctttaccttcacgtttgtcgtctctcgcccattcattttcgaaggcgcaagtccgacacctcttaagtttaatctcagaagagatgatgtaccattggtagcaggtcatcgtgggcttggtcagaataatcccaataaaaatcgtttgcaacttggagaaaacacaatggactcttttcatgcggctctacgtcaaggggcggatattttagagcatcgtatcgcgatgcttatttatccagatatacaagttacgagagatttggtgcccgtgatataccatgacttcctagtcagcgagattggagctgatattggcgtgcactctatctcctacgaacaattcatggtgccaagcatgatgcaagatagcactgtccgacctcctggaacctcagactctttaataaagacagcagagtcgaggatttttcaaaagccacgagcgaactcagtaggcaagctaccgcccgacaacgtcgatgtaatagcgaggctcatgtctaccttcaacctacacaattttggcttcaaaggaaatgtcgggagtgaatgtatccatgggccgtttataaccctagagcagcttctgctcgagatcgatccgtctatctgctttgatgttgagctcaaatatccgatgttgttcgaagcacgtgattttgaactggacacgtttgcgatggagttaaacacatacctcgacgctatgctcactgttgtgtacaagcacgcaggtaatcgacccatcgtcttcacgtcctttagtccggaattgtgcatcctgttatcaactaagcagcaattatacccggtcatgtttctcactgaatcgggatatatcccgacgcgagatattcgagctatctcattccaagaggccgtccgtttcgcaaggaaatggaatctcgagggtgtagtaactcgctcacagcccattgttgcttcgccgagactagttgaccttgtgaaaagctcaggactgatatgcgcatcctggggagacctgaatgatgacaccgagtgtgcaaaggcacaggcagatgtcaagatagatatgattataaccaaccgtgttggagaagttgtgaagacagttcagccatga

SEQ ID NO: 17303 - protein, 774 aa, Muscodor strobelii
  misc_feature: SGI Peptide ID NO. 565777
  misc_feature (166)..(199): Pfam Id: PF00023 Pfam Desc: Ankyrin repeat
  misc_feature (442)..(767): Pfam Id: PF03009 Pfam Desc: Glycerophosphoryl diester phosphodiesterase family
  misc_feature (9)..(770): NCBI GI: 226284780 Blast Desc: glycerophosphodiester phosphodiesterase GDE1 [Paracoccidioides brasiliensis Pb01]
  misc_feature (8)..(770): NCBI GI: 67515711 Blast Desc: AN0137.2 [Aspergillus nidulans FGSC A4] gi|40746159|gb|EAA65315.1| AN0137.2 [Aspergillus nidulans FGSC A4] gi|259489667|tpe|CBF90127.1| TPA: glycerophosphocholine Gde1,
  misc_feature (8)..(770): NCBI GI: 121713688 Blast Desc: cyclin dependent kinase (Pho85), [Aspergillus clavatus NRRL 1] gi|119402608|gb|EAW13029.1| cyclin dependent kinase (Pho85), [Aspergillus clavatus NRRL 1]
  misc_feature (9)..(770): NCBI GI: 70997487 Blast Desc: glycerophosphocholine phosphodiesterase Gde1 [Aspergillus fumigatus Af293] gi|66851127|gb|EAL91453.1| glycerophosphocholine phosphodiesterase Gde1, [Aspergillus Af293]
  misc_feature (9)..(773): NCBI GI: 189210824 Blast Desc: glycerophosphodiester phosphodiesterase GDE1 [Pyrenophora tritici-repentis Pt-1C-BFP] gi|187977836|gb|EDU44462.1| glycerophosphodiester GDE1 Pt-1C-BFP]
  misc_feature (8)..(770): NCBI GI: 212529246 Blast Desc: glycerophosphocholine phosphodiesterase Gde1, [Penicillium marneffei ATCC 18224] gi|210074178|gb|EEA28265.1| glycerophosphocholine phosphodiesterase Gde1, [Penicillium ATCC
  misc_feature (9)..(765): NCBI GI: 145254846 Blast Desc: An18g03170 [Aspergillus niger] gi|134084361|emb|CAK48701.1| protein product [Aspergillus niger]
  misc_feature (8)..(765): NCBI GI: 255953879 Blast Desc: Pc21g06470 [Penicillium chrysogenum Wisconsin 54-1255] gi|211589403|emb|CAP95544.1| Pc21g06470 [Penicillium chrysogenum Wisconsin 54-1255]
  misc_feature (9)..(770): NCBI GI: 119479013 Blast Desc: cyclin dependent kinase (Pho85), [Neosartorya fischeri NRRL 181] gi|119407689|gb|EAW17638.1| cyclin dependent kinase (Pho85), [Neosartorya fischeri NRRL 181]
  misc_feature (9)..(770): NCBI GI: 226294043 Blast Desc: glycerophosphodiester phosphodiesterase GDE1 [Paracoccidioides brasiliensis Pb18]
  misc_feature (5)..(765): SWISSPROT Homolog: EC 3.1.4.46 Glycerophosphodiester phosphodiesterase
MGTAYLLKALVTRDTSGRTALHYAAEYGMTMICEQYLKWLASNSVVSPQPDTSIILFVDSQGDTPLSLSVSGGHKEVLNVLLAYVKDDGKRGTNGLGELIIELTSLAIRSRRIDIIETLLDHSPRLLKSHPEAPRLLYMASQYGQESIVSRLMTYAGDINYHEPIQGKTPLMIASIYEHTIVVEALLKHPSCDILIQDYAGWTAVDHAAFRGPPSLVKILQGQKKDSSVALGRPSHAIEPPVQRSKSRNVASEDISSETDRDVNHVFVNLGHFDMDKEPSLLKIEAFRKLVAPMQIPESSLTLEITGINCASTRPYLISLPILSDLCNDPLHFTAKDLNTARLLFRVYSSVLPSGSGTQEPSLVGSAVASLKDAREGLGSSLESLERDHTVSLVSSEAFGYNYAGSFTFTFVVSRPFIFEGASPTPLKFNLRRDDVPLVAGHRGLGQNNPNKNRLQLGENTMDSFHAALRQGADILEHRIAMLIYPDIQVTRDLVPVIYHDFLVSEIGADIGVHSISYEQFMVPSMMQDSTVRPPGTSDSLIKTAESRIFQKPRANSVGKLPPDNVDVIARLMSTFNLHNFGFKGNVGSECIHGPFITLEQLLLEIDPSICFDVELKYPMLFEARDFELDTFAMELNTYLDAMLTVVYKHAGNRPIVFTSFSPELCILLSTKQQLYPVMFLTESGYIPTRDIRAISFQEAVRFARKWNLEGVVTRSQPIVASPRLVDLVKSSGLICASWGDLNDDTECAKAQADVKIDMIITNRVGEVVKTVQP

SEQ ID NO: 17304 - DNA, 897 bp, Muscodor strobelii
  misc_feature: SGI EST ID NO. CUFF.40710.0
  misc_feature: Variant of the nucleotide sequence at SEQ ID NO 17302
tgctttgatgttgagctcaaatatccgatgttgttcgaagcacgtgattttgaactggacacgtttgcgatggagttaaacacatacctcgacgctatgctcactgttgtgtacaagcacgcaggtaatcgacccatcgtcttcacgtcctttagtccggaattgtgcatcctgttatcaactaagcagcaattatacccggtcatgtttctcactgaatcgggatatatcccgacgcgagatattcgagctatctcattccaagaggccgtccgtttcgcaaggaaatggaatctcgagggtgtagtaactcgctcacagcccattgttgcttcgccgagactagttgaccttgtgaaaagctcaggactgatatgcgcatcctggggagacctgaatgatgacaccgagtgtgcaaaggcacaggcagatgtcaagatagatatgattataaccaaccgtgttggagaagttgtgaagacagttcagccatgaatagcagcggagaaaaatagcctacaaatgtggttttcgatagaccataatgatcttagactgtcttgcgtcgagcatttatgagaacagaagaagagtagacctcatgttgaagtacctagaacagatacaaatagaaatcgctatgttcggctctgaattggacgctctcaaaatgcttaaagcggtagtctaaaagattaggtattcaaggtaagagtccatctgtctagacctgtcttccgctatctatcttcacgctgccatgtcatctttgtgaccgcatctaaatcaatcttcttgctcgaagttctatagtcttccttgtctctcctctgcttcctcgcctcaggcaagccattgacactccaaagtcccttctcgcaatatcgggcgtccagg

SEQ ID NO: 17305 - DNA, 3201 bp, Muscodor strobelii
  misc_feature: SGI cDNA ID NO. 565778
  misc_feature: Encodes the peptide sequence at SEQ ID NO 17306
atgaagtttggcagagatctcccgtggcatttgattcccaaatgggccaacaattatatcaactataatgaatggaaacatctagcgaagacgaacacgcatcagcttggggaagcgatctatcgtgactcctgcaaagtagacaagctccttaatcgtcaatttgaggcaatttcgcatcgtttgtcggtcttgaatgatcagtacggcattactccagagtcatggcgtcaagagaccctttttcattccgttcccgatttcgaaaagcagaacattaccgcatatctcacggaaatctgtgcgattcttacctctctcaacaactacatcaatgtgacactacaagcagtagatcgtattagctctaagacgagcgatgcatcgtctgagcttgcagtgcttaaggaaacgcttctagcatcaaatgatcggtgcatcagagatatacagagcatcaactccacgcttcagaccctgcaatcaacttggcccatagaggcgaaccatacctctttgttgcttgcaaagtgttatcctactgaggcaaggcatggattgcaggggctagcgcaagctctacaacgagattctgttactgatttgcagacgtggcttcaaatggaacaccgcggtgaccaaacgataccatttgctctgatcaaggcagctgtctcattctcagcctctgggtgtgtatcattcctggtaactcgaatcgaaaaatcggacgatttcgttcacttgtcttcttacaatccgctctcacttcacatacagcatgcattttgccagactgagcaatcccaagccggagtcaatgcctttcgggggctccagatgatcgtcgaaagcatgggtactgcatatttattgaaggcactagtcacgagagacaccagcggccgtactgcgctgcattacgcggctgaatacggtatgaccatgatatgcgaacaatatctcaagtggctggcttcaaattcagtagtctcaccacaacccgatacctcgatcatcctttttgtcgatagtcaaggggatacaccactgtcgcttagcgtcagcgggggacataaggaagtcttgaacgtgcttctagcttacgtaaaggatgatggcaagcgaggcacgaacggacttggagagctcatcatagagctgacttccttagctattcgatcacgacggattgatattatagaaacactcctcgaccactcgccgcggcttttgaaatcacaccctgaggcaccgcgcctactctatatggcttcacagtatggtcaagagtcgatcgtatctcgtttaatgacttatgcaggcgacatcaattatcacgagccaattcaagggaaaacgcctcttatgatagcctcgatttacgagcacactattgttgtagaagctctgttgaaacatccgagctgtgacatacttattcaggactatgcaggctggacagccgtggaccatgctgctttccgagggcctcctagcctcgtcaaaatactacaaggtcagaaaaaagactcttctgtcgcccttggtcgcccgtcgcatgcaatcgagccgccagtccaacgttccaaaagtcgaaacgttgcatctgaagatatttcctcggagactgatcgtgatgtcaaccacgtcttcgtaaaccttggacacttcgatatggataaagagccgtcattattgaagatagaagcctttcgcaaactagttgcgcccatgcagatcccggaaagcagtctaacacttgagataaccggcatcaactgtgcttcgacccgaccctacctgatctcattaccaattctgtccgatctttgcaacgatccactccatttcactgccaaagacctgaacaccgctaggttacttttcagagtttacagctcagtattgccgagcggaagcggtacgcaggagccttcgttagtcggctcagctgtcgcttccctcaaagatgctcgcgaggggctcggaagctccctcgagagccttgagagagatcatactgtctctttggtgtcttcggaggcatttggttataattatgcaggaagctttaccttcacgtttgtcgtctctcgcccattcattttcgaaggcgcaagtccgacacctcttaagtttaatctcagaagagatgatgtaccattggtagcaggtcatcgtgggcttggtcagaataatcccaataaaaatcgtttgcaacttggagaaaacacaatggactcttttcatgcggctctacgtcaaggggcggatattttagaggtacgaatacccttgcaatcattccagctttatcttcagacgcttatccatatacaagttacgagagatttggtgcccgtgatataccatgacttcctagtcagcgagattggagctgatattggcgtgcactctatctcctacgaacaattcatggtgccaagcatgatgcaagatagcactgtccgacctcctggaacctcagactctttaataaagacagcagagtcgaggatttttcaaaagccacgagcgaactcagtaggcaagctaccgcccgacaacgtcgatgtaatagcgaggctcatgtctaccttcaacctacacaattttggcttcaaaggaaatgtcgggagtgaatgtatccatgggccgtttataaccctagagcagcttctgctcgagatcgatccgtctatctgctttgatgttgagctcaaatatccgatgttgttcgaagcacgtgattttgaactggacacgtttgcgatggagttaaacacatacctcgacgctatgctcactgttgtgtacaagcacgcaggtaatcgacccatcgtcttcacgtcctttagtccggaattgtgcatcctgttatcaactaagcagcaattatacccggtcatgtttctcactgaatcgggatatatcccgacgcgagatattcgagctatctcattccaagaggccgtccgtttcgcaaggaaatggaatctcgagggtgtagtaactcgctcacagcccattgttgcttcgccgagactagttgaccttgtgaaaagctcaggactgatatgcgcatcctggggagacctgaatgatgacaccgagtgtgcaaaggcacaggcagatgtcaagatagatatgattataaccaaccgtgttggagaagttgtgaagacagttcagccatga

SEQ ID NO: 17306 - protein, 1066 aa, Muscodor strobelii
  misc_feature: SGI Peptide ID NO. 565778
  misc_feature (451)..(484): Pfam Id: PF00023 Pfam Desc: Ankyrin repeat
  misc_feature (727)..(1059): Pfam Id: PF03009 Pfam Desc: Glycerophosphoryl diester phosphodiesterase family
  misc_feature (780)..(1059): Pfam Id: PF03009 Pfam Desc: Glycerophosphoryl diester phosphodiesterase family
  misc_feature (727)..(762): Pfam Id: PF03009 Pfam Desc: Glycerophosphoryl diester phosphodiesterase family
  misc_feature (1)..(1065): NCBI GI: 189210824 Blast Desc: glycerophosphodiester phosphodiesterase GDE1 [Pyrenophora tritici-repentis Pt-1C-BFP] gi|187977836|gb|EDU44462.1| glycerophosphodiester GDE1 Pt-1C-BFP]
  misc_feature (1)..(1062): NCBI GI: 226284780 Blast Desc: glycerophosphodiester phosphodiesterase GDE1 [Paracoccidioides brasiliensis Pb01]
  misc_feature (1)..(1062): NCBI GI: 67515711 Blast Desc: AN0137.2 [Aspergillus nidulans FGSC A4] gi|40746159|gb|EAA65315.1| AN0137.2 [Aspergillus nidulans FGSC A4] gi|259489667|tpe|CBF90127.1| TPA: glycerophosphocholine Gde1,
  misc_feature (1)..(1057): NCBI GI: 145254846 Blast Desc: An18g03170 [Aspergillus niger] gi|134084361|emb|CAK48701.1| protein product [Aspergillus niger]
  misc_feature (1)..(1057): NCBI GI: 255953879 Blast Desc: Pc21g06470 [Penicillium chrysogenum Wisconsin 54-1255] gi|211589403|emb|CAP95544.1| Pc21g06470 [Penicillium chrysogenum Wisconsin 54-1255]
  misc_feature (1)..(1062): NCBI GI: 121713688 Blast Desc: cyclin dependent kinase (Pho85), [Aspergillus clavatus NRRL 1] gi|119402608|gb|EAW13029.1| cyclin dependent kinase (Pho85), [Aspergillus clavatus NRRL 1]
  misc_feature (1)..(1062): NCBI GI: 226294043 Blast Desc: glycerophosphodiester phosphodiesterase GDE1 [Paracoccidioides brasiliensis Pb18]
  misc_feature (1)..(1065): NCBI GI: 169623598 Blast Desc: SNOG_15042 [Phaeosphaeria nodorum SN15] gi|111056465|gb|EAT77585.1| SNOG_15042 [Phaeosphaeria nodorum SN15]
  misc_feature (1)..(1057): NCBI GI: 238841226 Blast Desc: glycerophosphodiesterase GDE1 [Microsporum canis CBS 113480]
  misc_feature (1)..(1062): NCBI GI: 212529246 Blast Desc: glycerophosphocholine phosphodiesterase Gde1, [Penicillium marneffei ATCC 18224] gi|210074178|gb|EEA28265.1| glycerophosphocholine phosphodiesterase Gde1, [Penicillium ATCC
  misc_feature (290)..(1057): SWISSPROT Homolog: EC 3.1.4.46 Glycerophosphodiester phosphodiesterase
MKFGRDLPWHLIPKWANNYINYNEWKHLAKTNTHQLGEAIYRDSCKVDKLLNRQFEAISHRLSVLNDQYGITPESWRQETLFHSVPDFEKQNITAYLTEICAILTSLNNYINVTLQAVDRISSKTSDASSELAVLKETLLASNDRCIRDIQSINSTLQTLQSTWPIEANHTSLLLAKCYPTEARHGLQGLAQALQRDSVTDLQTWLQMEHRGDQTIPFALIKAAVSFSASGCVSFLVTRIEKSDDFVHLSSYNPLSLHIQHAFCQTEQSQAGVNAFRGLQMIVESMGTAYLLKALVTRDTSGRTALHYAAEYGMTMICEQYLKWLASNSVVSPQPDTSIILFVDSQGDTPLSLSVSGGHKEVLNVLLAYVKDDGKRGTNGLGELIIELTSLAIRSRRIDIIETLLDHSPRLLKSHPEAPRLLYMASQYGQESIVSRLMTYAGDINYHEPIQGKTPLMIASIYEHTIVVEALLKHPSCDILIQDYAGWTAVDHAAFRGPPSLVKILQGQKKDSSVALGRPSHAIEPPVQRSKSRNVASEDISSETDRDVNHVFVNLGHFDMDKEPSLLKIEAFRKLVAPMQIPESSLTLEITGINCASTRPYLISLPILSDLCNDPLHFTAKDLNTARLLFRVYSSVLPSGSGTQEPSLVGSAVASLKDAREGLGSSLESLERDHTVSLVSSEAFGYNYAGSFTFTFVVSRPFIFEGASPTPLKFNLRRDDVPLVAGHRGLGQNNPNKNRLQLGENTMDSFHAALRQGADILEVRIPLQSFQLYLQTLIHIQVTRDLVPVIYHDFLVSEIGADIGVHSISYEQFMVPSMMQDSTVRPPGTSDSLIKTAESRIFQKPRANSVGKLPPDNVDVIARLMSTFNLHNFGFKGNVGSECIHGPFITLEQLLLEIDPSICFDVELKYPMLFEARDFELDTFAMELNTYLDAMLTVVYKHAGNRPIVFTSFSPELCILLSTKQQLYPVMFLTESGYIPTRDIRAISFQEAVRFARKWNLEGVVTRSQPIVASPRLVDLVKSSGLICASWGDLNDDTECAKAQADVKIDMIITNRVGEVVKTVQP

SEQ ID NO: 17307 - DNA, 897 bp, Muscodor strobelii; identical to SEQ ID NO: 17304
  misc_feature: SGI EST ID NO. CUFF.40710.0
  misc_feature: Variant of the nucleotide sequence at SEQ ID NO 17305

SEQ ID NO: 17308 - DNA, 1191 bp, Muscodor strobelii
  misc_feature: SGI cDNA ID NO. 565779
  misc_feature: Encodes the peptide sequence at SEQ ID NO 17309
atggccgatacagatctcgtcgctccgttggtggtggccgccattggtctgttcggcactgttatcactttagtctggggctggtacacgcaaaagcaaaacgacaaacgtcaagatgaaagcgacatacgccaagatgccatcgaccagcgcaacaaggagtatggcatgcaaatgggcgacttgtcgcgaaaacatgacctagaaatgggcagcattgcaagagaacacgaacaaaacatgacgaagtataccaaggacctggaagctaagctagcggccattgagatccaacttaaagaacaacagaagtttcgaaacttaacggagaagtactcacagccacttcttgttgcagcctatgacttgcagcaacggctgttccagctggtggaatatcctatcagtccgcagcatctctcgacagaagaaggtcttgccgatataaagattttctcttgcttcctgctggcacaatatcttgtgtacgcttacattctgcggacaaagactgggtacttgtccttcgctcaaaatgacgatttgaagggcattcgaaatatgatgtacatgatcgaccaggaattggatcaacggcgcgatacagtgggcgatggctacaatatcggagtctggcctgcttcgcgagtcatggttgccgagcgaatgattgtgcctaattcacgacgcgatgtgaatgagatgatggattctggctttggcctagaagtaaaaggatacgatgcattctgctctgaatgggatagcacattcaaggagcctatggcatttttctgcgagtggatcgatattatgctggctggacgcttgaatcagaagcctcatcgagatgcagctctccgcgtactccagcattttctcattgatctcattgcgatgctggatcagaacaagtcctatgttccgcacgaccctaatcggacaccaaaatgtcaatcatcaagcagaggatgcgactgtaagagttgcgacgggtcgaggtttccaagtcttgacgatgccttgaagagccgcctggacgcccgatattgcgagaagggactttggagtgtcaatggcttgcctgaggcgaggaagcagaggagagacaaggaagactatagaacttcgagcaagaagattgatttagatgcggtcacaaagatgacatggcagcgtgaagatagatag

SEQ ID NO: 17309 - protein, 396 aa, Muscodor strobelii
  misc_feature: SGI Peptide ID NO. 565779
  misc_feature (98)..(330): NCBI GI: 145228455 Blast Desc: An01g00920 [Aspergillus niger] gi|134054625|emb|CAK43470.1| protein product [Aspergillus niger]
  misc_feature (98)..(302): NCBI GI: 30024201 Blast Desc: putitive lysogenic protein [Enterobacteria phage P2-EC58]
MADTDLVAPLVVAAIGLFGTVITLVWGWYTQKQNDKRQDESDIRQDAIDQRNKEYGMQMGDLSRKHDLEMGSIAREHEQNMTKYTKDLEAKLAAIEIQLKEQQKFRNLTEKYSQPLLVAAYDLQQRLFQLVEYPISPQHLSTEEGLADIKIFSCFLLAQYLVYAYILRTKTGYLSFAQNDDLKGIRNMMYMIDQELDQRRDTVGDGYNIGVWPASRVMVAERMIVPNSRRDVNEMMDSGFGLEVKGYDAFCSEWDSTFKEPMAFFCEWIDIMLAGRLNQKPHRDAALRVLQHFLIDLIAMLDQNKSYVPHDPNRTPKCQSSSRGCDCKSCDGSRFPSLDDALKSRLDARYCEKGLWSVNGLPEARKQRRDKEDYRTSSKKIDLDAVTKMTWQREDR

SEQ ID NO: 17310 - DNA, 184 bp, Muscodor strobelii
  misc_feature: SGI EST ID NO. CUFF.40713.0
  misc_feature: Variant of the nucleotide sequence at SEQ ID NO 17308
cgccattggtctgttcggcactgttatcactttagtctggggctggtacacgcaaaagcaaaacgacaaacgtcaagatgaaagcgacatacgccaagatgccatcgaccagcgcaacaaggagtatggcatgcaaatgggcgacttgtcgcgaaaacatgacctagaaatgggcagcattgca

SEQ ID NO: 17311 - DNA, 1224 bp, Muscodor strobelii
  misc_feature: SGI cDNA ID NO. 565780
  misc_feature: Encodes the peptide sequence at SEQ ID NO 17312
atgtcgctcacagccttacccccggagctgatggagatggtagtaagggatggcaaactatcaagcgacgatatcaagagcatcaggctcacttgcacttaccttgccgcttactttgaggcacaccttttccaccatgccgtcgtatcgggtcatgagaagcgccgcgacgtattcgagaacattgccaacacgcctcacttggctcgtcacgtttccgaagtcgtctggcacgaagatgacattcatgacaaagacgtctacatggaagaatacgaagtgcaaatcacacgaccgtatgaacaagtgaacgaacaggagcgaaccgaactatcctccagcggcttggtagcttcattctccctcgactggtttctttcaatgctcaacaagttccctcatctgaccagcttgacatcgacgactgctcaccacgatcgtaccaagtctgtattggatcgttacgtgagaagccgatttgacgaaggactggcattcagcggtggctttgtggcctacatccttccagcactgaaagtgcagcgtgacaaggtcacaagcttatccatcaccgatgggaaggaggactccatgctcaacttcttgcgcccaagtgatgcagtagcattcgagtcactcaagtctctacaactctgcctgaactattacatcggcgacacaaatcgaatttcaagattaaaggagtctgtcaccatcttagtagcagccaagaacctgaaacacctcgccctctgttccacgggccccattcaattcaaccacgaatacgaaaagtttctgagttcagctagatcgcttggttgctggccccaattggtatcacttcgtctcgccaagcacactatccacggacccgggagccatttattgccattgatagacgcaagatcgctgaaagttctggagcttgtggactgccaggtgcgattggttgatctagtgaggctacggacgcgaaaagacatcaatttatgctcaataagcatcaaagaagaccagacgcaaatgatgcagcatagcgcaggttctattagggttactgaagctgacgttctttccatcgtgaacactacgtcatccaaccgagcggcagccgatgccgttggcaagcactttccgaacacctcctggactaatgctgccaaaagcaacgtgcttatacattcaacattcaacgattcacgacgttgtcatcatctatga

SEQ ID NO: 17312 - protein, 407 aa, Muscodor strobelii
  misc_feature: SGI Peptide ID NO. 565780
  misc_feature (3)..(284): NCBI GI: 256724288 Blast Desc: expressed protein [Nectria haematococca mpVI 77-13-4]
  misc_feature (2)..(252): NCBI GI: 116179132 Blast Desc: [Chaetomium globosum CBS 148.51] gi|88184491|gb|EAQ91959.1| [Chaetomium globosum CBS 148.51]
  misc_feature (1)..(251): NCBI GI: 171680538 Blast Desc: protein product [Podospora anserina] gi|170939896|emb|CAP65122.1| protein product [Podospora anserina]
MSLTALPPELMEMVVRDGKLSSDDIKSIRLTCTYLAAYFEAHLFHHAVVSGHEKRRDVFENIANTPHLARHVSEVVWHEDDIHDKDVYMEEYEVQITRPYEQVNEQERTELSSSGLVASFSLDWFLSMLNKFPHLTSLTSTTAHHDRTKSVLDRYVRSRFDEGLAFSGGFVAYILPALKVQRDKVTSLSITDGKEDSMLNFLRPSDAVAFESLKSLQLCLNYYIGDTNRISRLKESVTILVAAKNLKHLALCSTGPIQFNHEYEKFLSSARSLGCWPQLVSLRLAKHTIHGPGSHLLPLIDARSLKVLELVDCQVRLVDLVRLRTRKDINLCSISIKEDQTQMMQHSAGSIRVTEADVLSIVNTTSSNRAAADAVGKHFPNTSWTNAAKSNVLIHSTFNDSRRCHHL

SEQ ID NO: 17313 - DNA, 340 bp, Muscodor strobelii
  misc_feature: SGI EST ID NO. CUFF.40722.0
  misc_feature: Variant of the nucleotide sequence at SEQ ID NO 17311
gcctacatccttccagcactgaaagtgcagcgtgacaaggtcacaagcttatccatcaccgatgggaaggaggactccatgctcaacttcttgcgcccaagtgatgcagtagcattcgagtcactcaagtctctacaactctgcctgaactattacatcggcgacacaaatcgaatttcaagattaaaggagtctgtcaccatcttagtagcagccaagaacctgaaacacctcgccctctgttccacgggccccattcaattcaaccacgaatacgaaaagtttctgagttcagctagatcgcttggttgctggccccaattggtatcacttcgtctcg

SEQ ID NO: 17314 - DNA, 444 bp, Muscodor strobelii
  misc_feature: SGI cDNA ID NO. 565781
  misc_feature: Encodes the peptide sequence at SEQ ID NO 17315
atggtccgctgtttctccaagaagaagccgcgataccatcgcgacaaagactgggagccggagcggccactctggtgctctacatcaccacagcttgacttgcagtatcgagggtttgtcacatatccatgtaccgtcgcgactgctcccttcggctacaccacgcctacttcatattacctacctcaagccggctcgtattacacagcctacaacgcagcccagcagggaggcactcagtatttcatcgggtcgcccaccatgctggttgcaggccagcagcctcaagccgtaatgacttaccctcaggcccaaatgacttactacccgtggttcacgccaggacagaatactcaacttccagctcactcgcagatctgtcccgacccgtctcgccacaatctgccgcctcctgctcgcaagattaccaacggggaagattag

SEQ ID NO: 17315 - protein, 147 aa, Muscodor strobelii
  misc_feature: SGI Peptide ID NO. 565781
MVRCFSKKKPRYHRDKDWEPERPLWCSTSPQLDLQYRGFVTYPCTVATAPFGYTTPTSYYLPQAGSYYTAYNAAQQGGTQYFIGSPTMLVAGQQPQAVMTYPQAQMTYYPWFTPGQNTQLPAHSQICPDPSRHNLPPPARKITNGED

SEQ ID NO: 17316 - DNA, 1066 bp, Muscodor strobelii
  misc_feature: SGI EST ID NO. CUFF.40728.0
  misc_feature: Variant of the nucleotide sequence at SEQ ID NO 17314
ctcgttttggccccgccacaagccatctgcaacacaacctatgccctcaacaaagaaaaagacttccaagtgcaccaaaatggtccgctgtttctccaagaagaagccgcgataccatcgcgacaaagactgggagccggagcggccactctggtgctctacatcaccacagcttgacttgcagtatcgagggtttgtcacatatccatgtaccgtcgcgactgctcccttcggctacaccacgcctacttcatattacctacctcaagccggctcgtattacacagcctacaacgcagcccagcagggaggcactcagtatttcatcgggtcgcccaccatgctggttgcaggccagcagcctcaagccgtaatgacttaccctcaggcccaaatgacttactacccgtggttcacgccaggacagaatactcaacttccagctcactcgcagatctgtcccgacccgtctcgccacaatctgccgcctcctgctcgcaagattaccaacggggaagattaggtgatcggaaatgtttggacagactgcgctagggcattaatagtactggtaacagacatgagtcacttttacagagactcttcaacaaatactttcaatacagtaatcgatcattccatccacctctttccaccgatgatacaatcgacattactagggatcggagaggatagacggcccaagacctagtgcccgctttctgtgggtaggcatcggagaggctctgtgttagcgcacttagtctcaaccctgaaagttcgatgtggaccacgaatgacgatatctacgtctctctgtgtatttgggttgcttggtaattgccggtctattacgtgcacaaggagtgcccgagatgggaaacatttacatcggagataggctagtctagtaatgggaatcacttcaagatacttctgagatctatcacgttcgttctatgacgtctaggcacgcgagagcattattcagccgcaatagagtcgtgctgacgcccgcctcctgaatgagagaccttccctcgaataccaggtaagacagatatgt

SEQ ID NO: 17317 - DNA, 3405 bp, Muscodor strobelii
  misc_feature: SGI cDNA ID NO. 565782
  misc_feature: Reduced expression when VOC is produced
  misc_feature: Encodes the peptide sequence at SEQ ID NO 17318
atggaacacgttctcgatgtgagctggatgaaccacgggaaagaccagctaagcaaaaacggtacacgctcgactgcgacggcgcaaactaaccaagacaccaacaacacgtcaaactcaaccgatcaaacgccgaccaaagtcaatggcaacggcaagattactgcttcgtccaccccgtcagctacagcaccaacgtcgtcgccggctgctgtgaacacatcatccccgactcccgtgaaacaaattccacagcgacctggcagaaacagaagctcgtcgacagactccaatggcagcttgacggggacaccaccgcaaaggaggccatcttggttttccaacatatcatcgaaattctcctcatcgcctacagcccatgcacagagtcaagccgcagcttcaaccctcacgtcagagcccgaatccaccgaggacgatgtgacgccgctgccgaagatcacgccgaacaagaatgccgtcttgccgcacgcgacgcgaccaaacggagatgctccctacattccggcaccgcctagaagcgctcagcctgggttcctcggtgtattccggcgattgtcttcgtccaacggtgccatcagtcctggctctagacaaagccatggcctggtcgaaagaaaagtgctgaacgtcgacaagaaacgcgaccgatctcgcctcaacgaattaaaccaagctaagctccgacgggttgcattctgtgtagatgttgaaatcgctccgatgcccaagtatgccgacgacgattcctcgtctaagacaagcacggaaaagctcgacaagaagaaggcgatcgagaaaaacgaaggtcttgctttgaaggaacccaagccgattgacgatgcgaccgaacagaatggcgctgcaaacccctcaaccgaagcctcgccgaaagagccattgaaggaagccagtggcaacaccaatggccaaaaagaggagaatccttccgagcccgccaaagagcagaaaccagagaaggaaatgacgcggaaaaagaaaagaagaagaagagcgaagctgaacctgcgggagactgatatcttgaccaaggttactgcgcagctgcccaagaccacgagcagctgtaccgatggcatcgttgagaagctcgatctcaccggctacttcatgtctctagccgatttgatgacattaggcgactttctcgcggttgtgcccattcgggaggtagtattagaaaattgcgagctcacagacgagggtttacgagtcgtcctggcagggctgcttgcagctcgaaagcccaatgtcaagtatcgcaaaccaactacgaagccagccgatctcgctcctcaaggcggtgttgtcgagcgattggtcctcaaaaacaacaagatcggcgcggatggttggaagcatatatgtctattcatccacatgtgccgttctatcaagtgtttggatctttcgagtctgcctcttcctccagtggctgagctccctaaatcaaacgtggcacaccattttcaccttcacaatggcgggcagcatgcgcttggtccgtttgatgcggcatcattactctcaaagtcgcttgaaagtcgccttgctggtgcggaactcgaactcctcaacatgggtgccaccggactgtcctcgaagcaactaggcatagtagtcgatggaatgctcaaatctggggtctctaggctgggtctgtcacacaacaatcttgacgctgatggagtgcaacacgtcgcaagatatttacgcgaagccaagtgcgaaggtattgatcttggtggaaatgacctgaaagaccacctcgcaacgttggccgaggccatcgacgaaaaggggcaactttgggctctcagtatagccaattgcaacttggatccctcctctctttgcaagatgatgcccaaactgaccaaattaaccaacttcaaattcattgatctttctcacaaccacgccctatttgaaactcagcctagtgcgatcgccgccctgcgcaggtatcttcccaagttggattatctgaagaggctgcatcttgccgatgtctctttatcatcggaacaagctatcgccctcgctgagattctacccgaggctaaatcccttgctcacatcaacattcttgaaaatcctgagttggtccgtctcgcagatgccaggaccgaagacctacaggaagagggttgtgccttatacgcttcgctcttggccgctgtacgagtatcaaagacattggtcaagattgacgtcgacaatcccagccccgaatctggagagctcttgaatgctatcgctaatcgcgtagttgcgtacacaatgcgcaatctgcaagcaattccagacattcgggatgcctctactgaggattcggctccgaaactcgagaagtatcctgatgttcttcgccacttggtcggacacgaagaagattaccctattgaaggagatgacgataccgacttggcgccggacgaggactatgtcattggtggcacggctgtcgtgaaagcgttggcttgcgtccttaagaaccggggcgatgattcgaggcggccgtctggtgaattcgcgcgggatcccgaagacggcgccatgtcgcccacctcaccgcggccacgcatgcactctgctaaagcgaaagacatgtcaaaacatttgctggcaactgcacgaaagattcgtgccagattacagccctcattggccagtgccaaggcgtctgccagtgaggacgtcggcaattatcatcgtcttgttttccttgaccaaacgattgaaggaattatcaagcgctttgaagatgaatttccagatacgcggcagacgggatcttcagaagcaccaggccctgaacgcatcacgcccaaacttccagagattgatacctccgggagtcgtcatgaaattgagaaccctgcattatcggacacagaggatcttgagactgagttgcgctccccatctcgatcaaggtccaactcaatcatctcgcatacgtcgaaggctttcacagacgatgaggcacatgctctacgtattggtcataagttccggcgcagtttcatgtctgcggaacagtttaacgtactgaacagcggagaagagattggagacgatccaagacacgtgcagctggtcactggcctaatggaagagattatggaagatcacgaagatattagaaaacgggtcgaagagaagggagccgtcaaggcattcgaagaagataaggatgagatttggaagcagctgcgggacaaggaccccgcgtactgggacatcttcatcgatagtcagcagaaggcgcgcgctaacatcaaggtcgatccgaatggtgcgaagatcgatcatgctacagaacacgccattgacgatgaggaggccatcgcagattag

SEQ ID NO: 17318 - protein, 1134 aa, Muscodor strobelii
  misc_feature: SGI Peptide ID NO. 565782
  misc_feature (60)..(1134): NCBI GI: 46136987 Blast Desc: FG10009.1 [Gibberella zeae PH-1]
  misc_feature (342)..(1128): NCBI GI: 145612321 Blast Desc: MGG_07047 [Magnaporthe grisea 70-15] gi|145019507|gb|EDK03735.1| MGG_07047 [Magnaporthe grisea 70-15]
  misc_feature (5)..(1127): NCBI GI: 156044422 Blast Desc: SS1G_10314 [Sclerotinia sclerotiorum 1980] gi|154694703|gb|EDN94441.1| SS1G_10314 [Sclerotinia sclerotiorum 1980]
  misc_feature (342)..(1134): NCBI GI: 256731661 Blast Desc: NECHADRAFT_104404 [Nectria haematococca mpVI 77-13-4]
  misc_feature (310)..(1134): NCBI GI: 171694353 Blast Desc: protein product [Podospora anserina] gi|170947125|emb|CAP73930.1| protein product [Podospora anserina]
  misc_feature (61)..(1111): NCBI GI: 154294909 Blast Desc: BC1G_13577 [Botryotinia fuckeliana B05.10] gi|150844535|gb|EDN19728.1| BC1G_13577 [Botryotinia fuckeliana B05.10]
  misc_feature (342)..(1118): NCBI GI: 85100486 Blast Desc: NCU04329 [Neurospora crassa OR74A] gi|28922509|gb|EAA31739.1| [Neurospora crassa OR74A] gi|28950189|emb|CAD71057.1| conserved [Neurospora crassa]
  misc_feature (342)..(1076): NCBI GI: 116197731 Blast Desc: CHGG_07021 [Chaetomium globosum CBS 148.51] gi|88178300|gb|EAQ85768.1| CHGG_07021 [Chaetomium globosum CBS 148.51]
  misc_feature (450)..(1129): NCBI GI: 261355739 Blast Desc: conserved [Verticillium albo-atrum VaMs.102]
  misc_feature (3)..(1108): NCBI GI: 242774976 Blast Desc: cell wall biogenesis protein Mhp1, [Talaromyces stipitatus ATCC 10500] gi|218722171|gb|EED21589.1| cell wall biogenesis protein Mhp1, [Talaromyces stipitatus ATCC 10500]
  misc_feature: Useful for introducing or modulating the production of volatile compounds
MEHVLDVSWMNHGKDQLSKNGTRSTATAQTNQDTNNTSNSTDQTPTKVNGNGKITASSTPSATAPTSSPAAVNTSSPTPVKQIPQRPGRNRSSSTDSNGSLTGTPPQRRPSWFSNISSKFSSSPTAHAQSQAAASTLTSEPESTEDDVTPLPKITPNKNAVLPHATRPNGDAPYIPAPPRSAQPGFLGVFRRLSSSNGAISPGSRQSHGLVERKVLNVDKKRDRSRLNELNQAKLRRVAFCVDVEIAPMPKYADDDSSSKTSTEKLDKKKAIEKNEGLALKEPKPIDDATEQNGAANPSTEASPKEPLKEASGNTNGQKEENPSEPAKEQKPEKEMTRKKKRRRRAKLNLRETDILTKVTAQLPKTTSSCTDGIVEKLDLTGYFMSLADLMTLGDFLAVVPIREVVLENCELTDEGLRVVLAGLLAARKPNVKYRKPTTKPADLAPQGGVVERLVLKNNKIGADGWKHICLFIHMCRSIKCLDLSSLPLPPVAELPKSNVAHHFHLHNGGQHALGPFDAASLLSKSLESRLAGAELELLNMGATGLSSKQLGIVVDGMLKSGVSRLGLSHNNLDADGVQHVARYLREAKCEGIDLGGNDLKDHLATLAEAIDEKGQLWALSIANCNLDPSSLCKMMPKLTKLTNFKFIDLSHNHALFETQPSAIAALRRYLPKLDYLKRLHLADVSLSSEQAIALAEILPEAKSLAHINILENPELVRLADARTEDLQEEGCALYASLLAAVRVSKTLVKIDVDNPSPESGELLNAIANRVVAYTMRNLQAIPDIRDASTEDSAPKLEKYPDVLRHLVGHEEDYPIEGDDDTDLAPDEDYVIGGTAVVKALACVLKNRGDDSRRPSGEFARDPEDGAMSPTSPRPRMHSAKAKDMSKHLLATARKIRARLQPSLASAKASASEDVGNYHRLVFLDQTIEGIIKRFEDEFPDTRQTGSSEAPGPERITPKLPEIDTSGSRHEIENPALSDTEDLETELRSPSRSRSNSIISHTSKAFTDDEAHALRIGHKFRRSFMSAEQFNVLNSGEEIGDDPRHVQLVTGLMEEIMEDHEDIRKRVEEKGAVKAFEEDKDEIWKQLRDKDPAYWDIFIDSQQKARANIKVDPNGAKIDHATEHAIDDEEAIAD

SEQ ID NO: 17319 - DNA, 4977 bp, Muscodor strobelii
  misc_feature: SGI EST ID NO. CUFF.40761.0
  misc_feature: Variant of the nucleotide sequence at SEQ ID NO 17317
atgatctgtcacatctagctcacagctggcattgcgctgaggaagataatgcagtgctgaggatgatactagtagcgtgcaagtcaggtcacagccgagggcaggccagaccgcccagacctccgtaactccaactggtagcagtagtagcacgtccccatccccgtcgatggccgtcatcttccccatttgccccccgctgtcatcatcgtggtctgtgatggaacatgtccacttgctgacctcagctctgcctcatcttcgtccaagcccgaaagttgaaacaccatcgttcatcacatttttgtttgaaaccttcatccaagcactgtatttagcaaatactgctaccagcccatctccattggttcgcgaattatcgcagagtctatcaagaatcattgcggtatattcttgtctcttgcgcactagatctcttaccccattgcagtttgttcatactgcattcaccagtggatatcctcgaattctccctgcatcagcggacccatcgacgaccactcaccaggggcccaatttcatcgtcttgaaagtcacgcactgccaccagacttttcagagcaagctgcatatctagaatagctatatcgagaattaaccatggccgttcaaagtcgagactccaaccaccgctccgctttttgaccatctggtgataattgagactccacattttacgaccccgagcaactcttctgaacccgccactttccccaaccgcactgccagcctcttctgctgtttgtctcaccaagcagcggtataggttcaagatatcttgagcactgcgaggtgtctcgagtgatttgtaaatccagcatatcgaggggctgtcccgagagagcttcgccaacgtctcaccattcctcatagcgccgttggtggtacacgccagggtcgtagcgtgatatcatacctatccactttgtgagacgacgtcgcctacaatcctaggagagcgccaaacactccgtctattgttatatggagagccaaactctgtgctcaaaatggaacacgttctcgatgtgagctggatgaaccacgggaaagaccagctaagcaaaaacggtacacgctcgactgcgacggcgcaaactaaccaagacaccaacaacacgtcaaactcaaccgatcaaacgccgaccaaagtcaatggcaacggcaagattactgcttcgtccaccccgtcagctacagcaccaacgtcgtcgccggctgctgtgaacacatcatccccgactcccgtgaaacaaattccacagcgacctggcagaaacagaagctcgtcgacagactccaatggcagcttgacggggacaccaccgcaaaggaggccatcttggttttccaacatatcatcgaaattctcctcatcgcctacagcccatgcacagagtcaagccgcagcttcaaccctcacgtcagagcccgaatccaccgaggacgatgtgacgccgctgccgaagatcacgccgaacaagaatgccgtcttgccgcacgcgacgcgaccaaacggagatgctccctacattccggcaccgcctagaagcgctcagcctgggttcctcggtgtattccggcgattgtcttcgtccaacggtgccatcagtcctggctctagacaaagccatggcctggtcgaaagaaaagtgctgaacgtcgacaagaaacgcgaccgatctcgcctcaacgaattaaaccaagctaagctccgacgggttgcattctgtgtagatgttgaaatcgctccgatgcccaagtatgccgacgacgattcctcgtctaagacaagcacggaaaagctcgacaagaagaaggcgatcgagaaaaacgaaggtcttgctttgaaggaacccaagccgattgacgatgcgaccgaacagaatggcgctgcaaacccctcaaccgaagcctcgccgaaagagccattgaaggaagccagtggcaacaccaatggccaaaaagaggagaatccttccgagcccgccaaagagcagaaaccagagaaggaaatgacgcggaaaaagaaaagaagaagaagagcgaagctgaacgtaaggctaagaaggaacagaaacggaaagaagctctcgagaaaggagctattcctatggaaatccatcttgacagcgactcttcgacggaggacgtctctgcccctagatccccccggacacagacaacacccacgaccaatcccgggaggatatatcgaagatgttgccagctgcgggagactgatatcttgaccaaggttactgcgcagctgcccaagaccacgagcagctgtaccgatggcatcgttgagaagctcgatctcaccggctacttcatgtctctagccgatttgatgacattaggcgactttctcgcggttgtgcccattcgggaggtagtattagaaaattgcgagctcacagacgagggtttacgagtcgtcctggcagggctgcttgcagctcgaaagcccaatgtcaagtatcgcaaaccaactacgaagccagccgatctcgctcctcaaggcggtgttgtcgagcgattggtcctcaaaaacaacaagatcggcgcggatggttggaagcatatatgtctattcatccacatgtgccgttctatcaagtgtttggatctttcgagtctgcctcttcctccagtggctgagctccctaaatcaaacgtggcacaccattttcaccttcacaatggcgggcagcatgcgcttggtccgtttgatgcggcatcattactctcaaagtcgcttgaaagtcgccttgctggtgcggaactcgaactcctcaacatgggtgccaccggactgtcctcgaagcaactaggcatagtagtcgatggaatgctcaaatctggggtctctaggctgggtctgtcacacaacaatcttgacgctgatggagtgcaacacgtcgcaagatatttacgcgaagccaagtgcgaaggtattgatcttggtggaaatgacctgaaagaccacctcgcaacgttggccgaggccatcgacgaaaaggggcaactttgggctctcagtatagccaattgcaacttggatccctcctctctttgcaagatgatgcccaaactgaccaaattaaccaacttcaaattcattgatctttctcacaaccacgccctatttgaaactcagcctagtgcgatcgccgccctgcgcaggtatcttcccaagttggattatctgaagaggctgcatcttgccgatgtctctttatcatcggaacaagctatcgccctcgctgagattctacccgaggctaaatcccttgctcacatcaacattcttgaaaatcctgagttggtccgtctcgcagatgccaggaccgaagacctacaggaagagggttgtgccttatacgcttcgctcttggccgctgtacgagtatcaaagacattggtcaagattgacgtcgacaatcccagccccgaatctggagagctcttgaatgctatcgctaatcgcgtagttgcgtacacaatgcgcaatctgcaagcaattccagacattcgggatgcctctactgaggattcggctccgaaactcgagaagtatcctgatgttcttcgccacttggtcggacacgaagaagattaccctattgaaggagatgacgataccgacttggcgccggacgaggactatgtcattggtggcacggctgtcgtgaaagcgttggcttgcgtccttaagaaccggggcgatgattcgaggcggccgtctggtgaattcgcgcgggatcccgaagacggcgccatgtcgcccacctcaccgcggccacgcatgcactctgctaaagcgaaagacatgtcaaaacatttgctggcaactgcacgaaagattcgtgccagattacagccctcattggccagtgccaaggcgtctgccagtgaggacgtcggcaattatcatcgtcttgttttccttgaccaaacgattgaaggaattatcaagcgctttgaagatgaatttccagatacgcggcagacgggatcttcagaagcaccaggccctgaacgcatcacgcccaaacttccagagattgatacctccgggagtcgtcatgaaattgagaaccctgcattatcggacacagaggatcttgagactgagttgcgctccccatctcgatcaaggtccaactcaatcatctcgcatacgtcgaaggctttcacagacgatgaggcacatgctctacgtattggtcataagttccggcgcagtttcatgtctgcggaacagtttaacgtactgaacagcggagaagagattggagacgatccaagacacgtgcagctggtcactggcctaatggaagagattatggaagatcacgaagatattagaaaacgggtcgaagagaagggagccgtcaaggcattcgaagaagataaggatgagatttggaagcagctgcgggacaaggaccccgcgtactgggacatcttcatcgatagtcagcagaaggcgcgcgctaacatcaaggtcgatccgaatggtgcgaagatcgatcatgctacagaacacgccattgacgatgaggaggccatcgcagattagtatggtgcagttggcaagaacttaatcatctttgattcgagctggcaacgctgagcttgaactagtggcggcatatggtaatagtagcccaggcgagcgaggctaccgccgctaaccaacataactcgaagcttttctagatgttgatgacaagcaaaagcagatttcataagagtgaattatatagcatgcatacaatgttggcgcatgggtggatggcgccatggccttgctatctcgcatgtggaaaaagggatggcgggcatgacggacaacacactgcatagcgtggcgtttttgggtgtttggtttggatttaggtacatattctgtgcggctgacaatctcaacattacttttgccttcag

SEQ ID NO: 17320 - DNA, 1377 bp, Muscodor strobelii
  misc_feature: SGI cDNA ID NO. 565783
  misc_feature: Encodes the peptide sequence at SEQ ID NO 17321
atggcgcaaccgaaaacggtcacggaagaaggttacgagaaccacggcggaattcgacagggtggcgaggaggcagcgactcgcctaaatatcggcctccacgtggtgatcaacgtatttgggatcgttcacctcgctggtgcaaactacgtcttccaagtcctgacgagtccgacgagggacgagatgacggcggcacacgacaacaagcgatggcttgacatcggcgtatcatctcttcgcaactttgcccacgtctccggatttagggcgacagtaggagctgttgctctactagtcgccattgcaattcaagtaatatctaatgcagtaatttccatcactcaagatggacaagacacatgcgctgtcaacgccagcagctcaacattcctcatttccatcatcctcaacgtcgtgctcgtcttgagcatggcaatcatcttaataatcccatacttcggtccgatcgccacactcggcgacgcagttagaagttttctacagattccagatcactcgactctcaacacattcctaacaagcagacgcgacacacgaaaaggccattggcaacccagcgaggccggatcatacacaccaagagatcactactggttccaatccccttcattcactcgccgagtcctcacattcgcctcatgggtaataatcaccggcccaacagcagcagccctcgcaatcatgctcagcgactcaagcgcaaacatccaaacgcccttcggcaccgccactccttcaacaacatatcttttccacgtaacactaaaaatcacacaagcagcgctcctcgccgcgctcccacaagtgctcctcagcatcctctacctctccatcaacgcaatcctcagcacattcttcctatcccacgaactctcgctcttcgccctcggaccccgacccctccgcgtctcatcgaatccctccggtgcccaaaccaccagtctctacctctcgctcccacgccccgtctcctggtttctcctcgccatcttcgcagctctgagctttgtcctcagccaagccgtcttccctactaccgccgaatctccaagaactcccgcaattggcttcaacccacaagccttggtcatcctacttgtgctcctcgtccttctattcgtcttcgtatttgtgttgagccttcgacggacaacggcatgcttgcataccaacggcgaagccaaaggaaaccctctcgcactccgcggtggatcatgtagtgctgtgatcagtgcacaatgccactactctcgtggtgagggagcgctctggctaggccctgtggcatggggtgttgttgatgggggtcgatgtgcgttctcggggcagcctgttggtgttgtcgaggcttga

SEQ ID NO: 17321 - protein, 458 aa, Muscodor strobelii
  misc_feature: SGI Peptide ID NO. 565783
  misc_feature (20)..(456): NCBI GI: 46136985 Blast Desc: FG10008.1 [Gibberella zeae PH-1]
  misc_feature (18)..(350): NCBI GI: 18376260 Blast Desc: conserved [Neurospora crassa]
  misc_feature (132)..(456): NCBI GI: 256731662 Blast Desc: NECHADRAFT_80253 [Nectria haematococca mpVI 77-13-4]
  misc_feature (156)..(453): NCBI GI: 39971459 Blast Desc: MGG_07045 [Magnaporthe grisea 70-15] gi|145019506|gb|EDK03734.1| MGG_07045 [Magnaporthe grisea 70-15]
  misc_feature (120)..(444): NCBI GI: 171691975 Blast Desc: protein product [Podospora anserina] gi|170945936|emb|CAP72737.1| protein product [Podospora anserina]
  misc_feature (121)..(351): NCBI GI: 116180146 Blast Desc: CHGG_00701 [Chaetomium globosum CBS 148.51] gi|88184998|gb|EAQ92466.1| CHGG_00701 [Chaetomium globosum CBS 148.51]
  misc_feature (122)..(457): NCBI GI: 169766904 Blast Desc: [Aspergillus oryzae RIB40] gi|83765778|dbj|BAE55921.1| protein product [Aspergillus oryzae]
  misc_feature (120)..(453): NCBI GI: 255940860 Blast Desc: Pc16g08800 [Penicillium chrysogenum Wisconsin 54-1255] gi|211585822|emb|CAP93550.1| Pc16g08800 [Penicillium chrysogenum Wisconsin 54-1255]
  misc_feature (119)..(449): NCBI GI: 256723897 Blast Desc: NECHADRAFT_22243 [Nectria haematococca mpVI 77-13-4]
  misc_feature (114)..(454): NCBI GI: 256733357 Blast Desc: NECHADRAFT_67018 [Nectria haematococca mpVI 77-13-4]
MAQPKTVTEEGYENHGGIRQGGEEAATRLNIGLHVVINVFGIVHLAGANYVFQVLTSPTRDEMTAAHDNKRWLDIGVSSLRNFAHVSGFRATVGAVALLVAIAIQVISNAVISITQDGQDTCAVNASSSTFLISIILNVVLVLSMAIILIIPYFGPIATLGDAVRSFLQIPDHSTLNTFLTSRRDTRKGHWQPSEAGSYTPRDHYWFQSPSFTRRVLTFASWVIITGPTAAALAIMLSDSSANIQTPFGTATPSTTYLFHVTLKITQAALLAALPQVLLSILYLSINAILSTFFLSHELSLFALGPRPLRVSSNPSGAQTTSLYLSLPRPVSWFLLAIFAALSFVLSQAVFPTTAESPRTPAIGFNPQALVILLVLLVLLFVFVFVLSLRRTTACLHTNGEAKGNPLALRGGSCSAVISAQCHYSRGEGALWLGPVAWGVVDGGRCAFSGQPVGVVEA

SEQ ID NO: 17322 - DNA, 2857 bp, Muscodor strobelii
  misc_feature: SGI EST ID NO. CUFF.40735.0
  misc_feature: Variant of the nucleotide sequence at SEQ ID NO 17320
aaacgccaatcaaaagtgtatatatgtgcgatcgcagaaatctacccaagatacggcatctaaatgacgccgttcaaaaaagcatgaagagctaaagtagttgtgtatgcagggctgaggatcaccctgactcattggaaggaccattggccatcagcaaaccaatcagcgttacgtttcaagtcgttctacgcggtcgtttccaggcgttgcatgaagaatatttggtgatccctggcgtttttgatgcaactagcagggctatcctggcgcgactcttgcaccactcgtccgaagtccatatcacaacaggccatcactgatgaataggccggctcagatatagggtgagacatggatcttgcgaggtgccgtctcatatcactgccatacaagacgataccatggcccaactatctcccaagctgcgagaagatctcccttctcccccgtttctattcgtctgctctgtgacctatcgctaataatcttgtctgtcgctaacgaaatcttcacggcaacttatatgtctctaatacacaactaatactgtcgatctgccaaagggatggagcagatacggaatgtcgagcggttgtcgagtatccaagaaggcaccgagcatcccaccacggcatcaggtcactcgaggtctcgccttgcctccaaaagctcacgatcgacgctactatggccttttcaccaccgttccggatcggatgcccaatcgacgacactgtcaagcagattcgggaggttacgttcagcgacatttcaatcgagatctctgtttggttttagggacgaggaaacagcaacgatagatcgcagcattgttccagactatgtcatcaacttcatgagaggcgagacgccagaaacgttagcaaggaagaaagaggcaagacaatggggagaaaggagcgtcaccgtcacgccctacacgaaccgggagtcattcgtttcgcatcccgttgagatgggatattactactcctcatcgactaccggtctaactaatggcgcaaccgaaaacggtcacggaagaaggttacgagaaccacggcggaattcgacagggtggcgaggaggtgtgttatataatacgatcttagcgactttgattttcgtggtgggcttagtcggattcgtgttggttatcacaaaaacgaaaaacatctcaggagaactagctatctattcaggggggtgtcaggcagcgactcgcctaaatatcggcctccacgtggtgatcaacgtatttgggatcgttcacctcgctggtgcaaactacgtcttccaagtcctgacgagtccgacgagggacgagatgacggcggcacacgacaacaagcgatggcttgacatcggcgtatcatctcttcgcaactttgcccacgtctccggatttagggcgacagtaggagctgttgctctactagtcgccattgcaattcaagtaatatctaatgcagtaatttccatcactcaagatggacaagacacatgcgctgtcaacgccagcagctcaacattcctcatttccatcatcctcaacgtcgtgctcgtcttgagcatggcaatcatcttaataatcccatacttcggtccgatcgccacactcggcgacgcagttagaagttttctacagattccagatcactcgactctcaacacattcctaacaagcagacgcgacacacgaaaaggccattggcaacccagcgaggccggatcatacacaccaagagatcactactggttccaatccccttcattcactcgccgagtcctcacattcgcctcatgggtaataatcaccggcccaacagcagcagccctcgcaatcatgctcagcgactcaagcgcaaacatccaaacgcccttcggcaccgccactccttcaacaacatatcttttccacgtaacactaaaaatcacacaagcagcgctcctcgccgcgctcccacaagtgctcctcagcatcctctacctctccatcaacgcaatcctcagcacattcttcctatcccacgaactctcgctcttcgccctcggaccccgacccctccgcgtctcatcgaatccctccggtgcccaaaccaccagtctctacctctcgctcccacgccccgtctcctggtttctcctcgccatcttcgcagctctgagctttgtcctcagccaagccgtcttccctactaccgccgaatctccaagaactcccgcaattggcttcaacccacaagccttggtcatcctacttgtgctcctcgtccttctattcgtcttcgtatttgtgttgagccttcgacggacaacggcatgcttgcataccaacggcgaagccaaaggaaaccctctcgcactccgcggtggatcatgtagtgctgtgatcagtgcacaatgccactactctcgtggtgagggagcgctctggctaggccctgtggcatggggtgttgttgatgggggtcgatgtgcgttctcggggcagcctgttggtgttgtcgaggcttgaatctaaacctggaacctgaaaagaaacatgaaaaaagtacaaaaaaatggatacccatgggaatgggaactcgacagagaaactactcgaattatcaggcacggcgtaattaggaaaacggaaccaggactgcgcatagggcgagccatcgagctcttgggtcatattcgagatcgtttcgaggatcgggatcctcaagcttggagtttttgcgtcgattatcggatggctggtcaccatatggtctatacccatttcctaacctatattatatcgtatctatagtcagccagcgcgtttaaaagtgtgcaatgctataacactcatcacgagcca

SEQ ID NO: 17323 - DNA, 1824 bp, Muscodor strobelii
  misc_feature: SGI cDNA ID NO. 565784
  misc_feature: Elevated expression when VOC is produced
  misc_feature: Encodes the peptide sequence at SEQ ID NO 17324
atgaagttggtggaggtggtcgctactctctcccaagtcatcgtattcattccgccattcgtttctctacaccacagcgccgcgtctacaggtagtagcatgcagctcaaaacaaatcacgcatattgggctttgctcctgttgtcacgcatcgttgagactcgggtgatcgttactcgcagcgagtccaatgagtgtcggtcgatccctggagacgagtcttggccgagtgtgtcggcttggaatgccttgaataagaccgtcggcggccagttgatcgctgctgtgcccattggcgctccatgtcatgagtctttcaacggtgtgccgacgtatgatgccgagcaatgtgcaaccctacgaaatacatggttcttcccagagacccatctgccgtcatccagttcgcctatggcttacacatattccaatgacacctgcaacccatggttggctccgacgacatcctgtacaataggctatcaggttgcttacgctatcaatgttacaacaaatgctcacattcaggcggggctccaatttgccaaagcttacaatattcgattagccatccgaaacactggacacgactatcttggccgatcaactggtgctcacgctttagctttgtggacacacaatctcaagactcttgagacgatcacatacaaaggagcagcctatcaagggccagcggtgaaagttggcgctggagtacaggccatcgatgcatatactttcgcttccgcccagaaacttcaggttgtaggtggcaattgtccaaccgtaggacttgctggcggttactcccaaggtggcggccatggccctcttgcctcgaagcatggcttgggcgctgatcaagtagtggagatcgagataatcacggcagacggcaagcttgttactgctaatagcgttacgaatagcgatttgttctgggcagtaagaggaggtggtggtggtaactacggcgtagttatttcggccacggtcaaagcatacccagatacttacgcatctaccggcctcatcacggtcaatgatgatggcacaaataccgacactatatataagttccttcgaagtttccttacggaaacggtccctggactagtcgatgctggtgtatatgccctatttgttatgaccccagtggggttccagctcacaccagctttcggccctggtcttcataaagcagagcttgacaagttgctgcaaccagcaatcgatgaactgaatactttgaacttagagtatgattattcgttgactgaagaaaccacgttcttggctgcctacgaatccttgcctgcaaaatggaacgtatctgactacaacacgggcggacgactagtagctcgagatgtcgttttcagcaagacagatgaggtaattcaagcgatccgcaacattggctcgcaaacgctcttttctggggtctgcttcaatgtcaccaaatctgtatcgtcgcctgatgatgttgcggtcaatcctttcttccgagagtcgttgttcaatgcctttttcggcgttcctatcaactacacagatgacgcagcgaacagggagaccttgaatctcatcaccaatgtgctcacgccaccgttggcggctctgacaccgaatggtggcggagcatacatgaacgaggcagattctcaacaacctgacttccagtctgttttctatggcactcactattctaggctgtccaagattaagagtaaatacgaccctgactcgctcttttacgcaaagacggccgtcggaagtgaggcttgggaagaacagtccgatggtagactttgtcgtacatag

SEQ ID NO: 17324 - protein, 607 aa, Muscodor strobelii
  misc_feature: SGI Peptide ID NO. 565784
  misc_feature (548)..(592): Pfam Id: PF08031 Pfam Desc: Berberine and berberine like
  misc_feature (163)..(305): Pfam Id: PF01565 Pfam Desc: FAD binding domain
  misc_feature (45)..(606): NCBI GI: 154313031 Blast Desc: BC1G_05517 [Botryotinia fuckeliana B05.10] gi|150849602|gb|EDN24795.1| BC1G_05517 [Botryotinia fuckeliana B05.10]
  misc_feature (57)..(606): NCBI GI: 115386510 Blast Desc: ATEG_07110 [Aspergillus terreus NIH2624] gi|114190794|gb|EAU32494.1| ATEG_07110 [Aspergillus terreus NIH2624]
  misc_feature (61)..(605): NCBI GI: 121720152 Blast Desc: FAD binding domain protein [Aspergillus clavatus NRRL 1] gi|119404986|gb|EAW15348.1| FAD binding domain protein [Aspergillus clavatus NRRL 1]
  misc_feature (58)..(606): NCBI GI: 169765902 Blast Desc: [Aspergillus oryzae RIB40] gi|10119790|dbj|BAB13480.1| isoamyl alcohol oxidase [Aspergillus oryzae] gi|83765277|dbj|BAE55420.1| protein product [Aspergillus oryzae]
  misc_feature (65)..(606): NCBI GI: 242765564 Blast Desc: FAD/FMN-containing isoamyl alcohol oxidase MreA [Talaromyces stipitatus ATCC 10500] gi|218724196|gb|EED23613.1| FAD/FMN-containing isoamyl alcohol oxidase MreA [Talaromyces ATCC
  misc_feature (58)..(606): NCBI GI: 238482515 Blast Desc: conserved [Aspergillus flavus NRRL3357] gi|220700546|gb|EED56884.1| conserved [Aspergillus flavus NRRL3357]
  misc_feature (66)..(606): NCBI GI: 212531397 Blast Desc: FAD/FMN-containing isoamyl alcohol oxidase MreA [Penicillium marneffei ATCC 18224] gi|210071219|gb|EEA25308.1| FAD/FMN-containing isoamyl alcohol oxidase MreA [Penicillium ATCC
  misc_feature (57)..(606): NCBI GI: 255949596 Blast Desc: Pc22g16510 [Penicillium chrysogenum Wisconsin 54-1255] gi|211592582|emb|CAP98939.1| Pc22g16510 [Penicillium chrysogenum Wisconsin 54-1255]
  misc_feature (66)..(606): NCBI GI: 70984404 Blast Desc: FAD/FMN-containing isoamyl alcohol oxidase MreA [Aspergillus fumigatus Af293] gi|66845342|gb|EAL85677.1| FAD/FMN-containing isoamyl alcohol oxidase MreA [Aspergillus
  misc_feature (66)..(606): NCBI GI: 159122500 Blast Desc: FAD/FMN-containing isoamyl alcohol oxidase MreA [Aspergillus fumigatus A1163]
  misc_feature: Useful for introducing or modulating the production of volatile compounds
MKLVEVVATLSQVIVFIPPFVSLHHSAASTGSSMQLKTNHAYWALLLLSRIVETRVIVTRSESNECRSIPGDESWPSVSAWNALNKTVGGQLIAAVPIGAPCHESFNGVPTYDAEQCATLRNTWFFPETHLPSSSSPMAYTYSNDTCNPWLAPTTSCTIGYQVAYAINVTTNAHIQAGLQFAKAYNIRLAIRNTGHDYLGRSTGAHALALWTHNLKTLETITYKGAAYQGPAVKVGAGVQAIDAYTFASAQKLQVVGGNCPTVGLAGGYSQGGGHGPLASKHGLGADQVVEIEIITADGKLVTANSVTNSDLFWAVRGGGGGNYGVVISATVKAYPDTYASTGLITVNDDGTNTDTIYKFLRSFLTETVPGLVDAGVYALFVMTPVGFQLTPAFGPGLHKAELDKLLQPAIDELNTLNLEYDYSLTEETTFLAAYESLPAKWNVSDYNTGGRLVARDVVFSKTDEVIQAIRNIGSQTLFSGVCFNVTKSVSSPDDVAVNPFFRESLFNAFFGVPINYTDDAANRETLNLITNVLTPPLAALTPNGGGAYMNEADSQQPDFQSVFYGTHYSRLSKIKSKYDPDSLFYAKTAVGSEAWEEQSDGRLCRT

SEQ ID NO: 17325 - DNA, 2553 bp, Muscodor strobelii
  misc_feature: SGI EST ID NO. CUFF.40758.0
  misc_feature: Variant of the nucleotide sequence at SEQ ID NO 17323
aactaatccaagattctactcaggcccacaatactagcacacgacgctcctttgtgagaaagtggtaaaaacgtgaaggatcgctcgatactacgctaccccaacaaggcgaaggcgcggtatgcaattgtctttcagtaatttcttgcacgggaatagattagcgcgaggtattctaggctacagtctggcgagatgatgtggacgtgcggtatgaattgcagtattgcagtcctcaacagggaaggtttatgggtacggtaccccatgttggtgagaaaatggccagagttgacgcgatcatggcggctaacggcgtgttgttccgtatatacggtgttcacattaccggaatgcttgcactgccatcgtcacaatctgactgagcccagcaaggaagtatcatcagaatccagctaacattagcccttgcgcgagcgctacctcaagatcccaagatgatcaccgaatgctcaattgtaattatggatatagggtggtattttcgtacccaggtctttcatatacgagccgttttcacatgatgaagttggtggaggtggtcgctactctctcccaagtcatcgtattcattccgccattcgtttctctacaccacagcgccgcgtctacaggtagtagcatgcagctcaaaacaaatcacgcatattgggctttgctcctgttgtcacgcatcgttgagactcgggtgatcgttactcgcagcgagtccaatgagtgtcggtcgatccctggagacgagtcttggccgagtgtgtcggcttggaatgccttgaataagaccgtcggcggccagttgatcgctgctgtgcccattggcgctccatgtcatgagtctttcaacggtgtgccgacgtatgatgccgagcaatgtgcaaccctacgaaatacatggttcttcccagagacccatctgccgtcatccagttcgcctatggcttacacatattccaatgacacctgcaacccatggttggctccgacgacatcctgtacaataggctatcaggttgcttacgctatcaatgttacaacaaatgctcacattcaggcggggctccaatttgccaaagcttacaatattcgattagccatccgaaacactggacacgactatcttggccgatcaactggtgctcacgctttagctttgtggacacacaatctcaagactcttgagacgatcacatacaaaggagcagcctatcaagggccagcggtgaaagttggcgctggagtacaggccatcgatgcatatactttcgcttccgcccagaaacttcaggttgtaggtggcaattgtccaaccgtaggacttgctggcggttactcccaaggtggcggccatggccctcttgcctcgaagcatggcttgggcgctgatcaagtagtggagatcgagataatcacggcagacggcaagcttgttactgctaatagcgttacgaatagcgatttgttctgggcagtaagaggaggtggtggtggtaactacggcgtagttatttcggccacggtcaaagcatacccagatacttacgcatctaccggcctcatcacggtcaatgatgatggcacaaataccgacactatatataagttccttcgaagtttccttacggaaacggtccctggactagtcgatgctggtgtatatgccctatttgttatgaccccagtggggttccagctcacaccagctttcggccctggtcttcataaagcagagcttgacaagttgctgcaaccagcaatcgatgaactgaatactttgaacttagagtatgattattcgttgactgaagaaaccacgttcttggctgcctacgaatccttgcctgcaaaatggaacgtatctgactacaacacgggcggacgactagtagctcgagatgtcgttttcagcaagacagatgaggtaattcaagcgatccgcaacattggctcgcaaacgctcttttctggggtctgcttcaatgtcaccaaatctgtatcgtcgcctgatgatgttgcggtcaatcctttcttccgagagtcgttgttcaatgcctttttcggcgttcctatcaactacacagatgacgcagcgaacagggagaccttgaatctcatcaccaatgtgctcacgccaccgttggcggctctgacaccgaatggtggcggagcatacatgaacgaggcagattctcaacaacctgacttccagtctgttttctatggcactcactattctaggctgtccaagattaagagtaaatacgaccctgactcgctcttttacgcaaagacggccgtcggaagtgaggcttgggaagaacagtccgatggtagactttgtcgtacatagaatattgaattcaggcattgcgcagtgaacattctgcccagcagaattttccaatacatcggtcactaaaaatcatacagatgaatagaaccagtagctttatataatccaaggcttatacgaaacctcgttggcttcacgtcgcaatgcgtagcccctgaacattgatcctcccattgagtccc

SEQ ID NO: 17326 - DNA, 1278 bp, Muscodor strobelii
  misc_feature: SGI cDNA ID NO. 565785
  misc_feature: Elevated expression when VOC is produced
  misc_feature: Encodes the peptide sequence at SEQ ID NO 17327
atggagaaacttcacaggcaatatggtgatttcatcagaactgggccatccgagattaccattttcgatcctgaagttttcatggctactgatggaccaaaaacggagtgtatcaaatcggaatggtatgacttattatttccagagagctctctcttgactacgcgagaccgcgcgcttcatgatgaacgacgacgagattggaagatgtgtttcagtccccaagcactcacccatcacttcgcgaagacattaaaacatcttgatcatcttgacaatgccatcgaggctagaatcaaggcaaacgaaccttgtcaaatgcgcgatctattttactggcttggatttgatatcatgggtgattttgtcttcaatcgatcttttgatatgcttacgaatggcgagtggcaccacatggtggtaaatcttcaaagagcactggcattgcttgggccagcgagccctgcgccttggctaatacagctcgcttttcgggtattccctcgaatctatcaaataggagattggttcaagatgactgcttggacacacgtccagatcggtgcacgattgaaagaaggttatgaaaaacagccaactccagaccttgtgcactacctactcgaacagagtgacaaatctcaatcagtggagaccattctgagaatgagaggagatagtctcaatgctatagtggccggaagtgagccaattcctgttgtccttattggcttgtttgcggaactatcacgcaagccagaatggattgaagctatttatcaagagatgcaaggggtggatatcaaagatactaaaacgttaagcgccctaactcatttaaatgcggtcatacaagaggcgttgcgactatatcccgtcttgcccacagcaggctcgcggaaagttggttccaaaggaattatgatcggtggagttttcattccaccgaataccacaatcgttaatccgcgcttcacgattcatagaagagaggactgtttcgagcacggagaggagttcttgcccgagcgatggacaacacatcgcgatatgattcggaatatggctgcctatagtccttggggtacagcccatcacagctgtattgcgcgcgcaatggctatcgatgtgctcagagctacaacagcccgactcattagtagatatcggtttcatcttgcccctggtgagactggtaaacgtgtacttgaagacatgaaagaccaactggcgccgaaccctggccatttgagtcttgtctgtgagttgcggacttag

SEQ ID NO: 17327 - protein, 425 aa, Muscodor strobelii
  misc_feature: SGI Peptide ID NO. 565785
  misc_feature (1)..(420): Pfam Id: PF00067 Pfam Desc: Cytochrome P450
  misc_feature (246)..(420): Pfam Id: PF00067 Pfam Desc: Cytochrome P450
  misc_feature (4)..(424): NCBI GI: 121720148 Blast Desc: benzoate 4-monooxygenase cytochrome P450 [Aspergillus clavatus NRRL 1] gi|119404984|gb|EAW15346.1| benzoate 4-monooxygenase cytochrome P450 [Aspergillus clavatus NRRL 1]
  misc_feature (1)..(425): NCBI GI: 145257250 Blast Desc: An04g02950 [Aspergillus niger] gi|134058574|emb|CAK96461.1| protein product [Aspergillus niger]
  misc_feature (1)..(424): NCBI GI: 171691038 Blast Desc: protein product [Podospora anserina] gi|170945467|emb|CAP71579.1| protein product [Podospora anserina]
  misc_feature (1)..(425): NCBI GI: 242771984 Blast Desc: benzoate 4-monooxygenase cytochrome P450, [Talaromyces stipitatus ATCC 10500] gi|218721570|gb|EED20988.1| benzoate 4-monooxygenase cytochrome P450, [Talaromyces stipitatus ATCC
  misc_feature (14)..(420): NCBI GI: 242805794 Blast Desc: cytochrome P450, [Talaromyces stipitatus ATCC 10500] gi|218715231|gb|EED14653.1| cytochrome P450, [Talaromyces stipitatus ATCC 10500]
  misc_feature (4)..(424): NCBI GI: 121707431 Blast Desc: cytochrome P450 monooxygenase, [Aspergillus clavatus NRRL 1] gi|119399978|gb|EAW10404.1| cytochrome P450 monooxygenase, [Aspergillus clavatus NRRL 1]
  misc_feature (1)..(419): NCBI GI: 119500614 Blast Desc: cytochrome P450 monooxygenase, [Neosartorya fischeri NRRL 181] gi|119415229|gb|EAW25167.1| cytochrome P450 monooxygenase, [Neosartorya fischeri NRRL 181]
  misc_feature (1)..(424): NCBI GI: 212536985 Blast Desc: benzoate 4-monooxygenase cytochrome P450, [Penicillium marneffei ATCC 18224] gi|210068390|gb|EEA22481.1| benzoate 4-monooxygenase cytochrome P450, [Penicillium marneffei ATCC
  misc_feature (1)..(422): NCBI GI: 119189629 Blast Desc: conserved [Coccidioides immitis RS]
  misc_feature (1)..(419): NCBI GI: 159125207 Blast Desc: cytochrome P450 monooxygenase, [Aspergillus fumigatus A1163]
  misc_feature (1)..(398): SWISSPROT Homolog: EC 1.14.13.12 Benzoate 4-monooxygenase
  misc_feature: Useful for introducing or modulating the production of volatile compounds
MEKLHRQYGDFIRTGPSEITIFDPEVFMATDGPKTECIKSEWYDLLFPESSLLTTRDRALHDERRRDWKMCFSPQALTHHFAKTLKHLDHLDNAIEARIKANEPCQMRDLFYWLGFDIMGDFVFNRSFDMLTNGEWHHMVVNLQRALALLGPASPAPWLIQLAFRVFPRIYQIGDWFKMTAWTHVQIGARLKEGYEKQPTPDLVHYLLEQSDKSQSVETILRMRGDSLNAIVAGSEPIPVVLIGLFAELSRKPEWIEAIYQEMQGVDIKDTKTLSALTHLNAVIQEALRLYPVLPTAGSRKVGSKGIMIGGVFIPPNTTIVNPRFTIHRREDCFEHGEEFLPERWTTHRDMIRNMAAYSPWGTAHHSCIARAMAIDVLRATTARLISRYRFHLAPGETGKRVLEDMKDQLAPNPGHLSLVCELRT

SEQ ID NO: 17328 - DNA, 2250 bp, Muscodor strobelii
  misc_feature: SGI EST ID NO. CUFF.40768.1
  misc_feature: Variant of the nucleotide sequence at SEQ ID NO 17326
cgaatcccaataaaaatgagtttcctcttgagcatgaatcaggcattttctaggcttttgttactttgatgagtttcctgtagcaaagagcgacgaaggagacaactgtcttttgcaacatgatagcttctagcccgtggcttgtgtccagcattgccggctcagtgcttgggcttgttgcccatcatgggtttttcattcatggagaatggcatgttcaagcaccaaccattcttatgtcgcatctacttgcctttggatctctatcagcaggcactctcttcttgcaagatcctgtgatgaaccgcttgttcacattgggtctttgtgtcatcagctcttatttgacaacactcctcgctagcattgtggcgtatcggatttggtttcatcctctctcgcgagctggctttcaagggccgttgtatatgcgaacatcgaaactatggcacgtatggcaatgtagacattctacaaatcatctgatcatggagaaacttcacaggcaatatggtgatttcatcagaactgggccatccgagattaccattttcgatcctgaagttttcatggctactgatggaccaaaaacggagtgtatcaaatcggaatggtatgacttattatttccagagagctctctcttgactacgcgagaccgcgcgcttcatgatgaacgacgacgagattggaagatgtgtttcagtccccaagcactcacccatcacttcgcgaagacattaaaacatcttgatcatcttgacaatgccatcgaggctagaatcaaggcaaacgaaccttgtcaaatgcgcgatctattttactggcttggatttgatatcatgggtgattttgtcttcaatcgatcttttgatatgcttacgaatggcgagtggcaccacatggtggtaaatcttcaaagagcactggcattgcttgggccagcgagccctgcgccttggctaatacagctcgcttttcgggtattccctcgaatctatcaaataggagattggttcaagatgactgcttggacacacgtccagatcggtgcacgattgaaagaaggttatgaaaaacagccaactccagaccttgtgcactacctactcgaacagagtgacaaatctcaatcagtggagaccattctgagaatgagaggagatagtctcaatgctatagtggccggaagtgagccaattcctgttgtccttattggcttgtttgcggaactatcacgcaagccagaatggattgaagctatttatcaagagatgcaaggggtggatatcaaagatactaaaacgttaagcgccctaactcatttaaatgcggtcatacaagaggcgttgcgactatatcccgtcttgcccacagcaggctcgcggaaagttggttccaaaggaattatgatcggtggagttttcattccaccgaataccacaatcgttaatccgcgcttcacgattcatagaagagaggactgtttcgagcacggagaggagttcttgcccgagcgatggacaacacatcgcgatatgattcggaatatggctgcctatagtccttggggtacagcccatcacagctgtattgcgcgcgcaatggctatcgatgtgctcagagctacaacagcccgactcattagtagatatcggtttcatcttgcccctggtgagactggtaaacgtgtacttgaagacatgaaagaccaactggcgccgaaccctggccatttgagtcttgtctgtgagttgcggacttagcagtctggtttagataattaagaaattgtccgaattaagctaccgttctaaggacttttgagtgtgtagattggacttggatttgatgttcaagaataacgtctctgaaagaagtcttacgtaatttaccttatttgaagggtgcgcaatatactaaccagagtggactctggtgtatggctacatataacacgcttatgcccactctacgacaaggatcatgagctatgagcttatgtacagcataacttcctatattcgttagcttttttcgactggtcaggaaccagatataatgtactacgttaaccttaagcttgtatagccctgtcgagaagtcaagggtatgatagcttggcagttggtcagtggacaaggcgagtcaggtctgtgttaattgtcaagtatgggactttgctcctgaagccttcccccgcgccagatgggctccggcttgaacgggagcgcttcagaatccttttag

SEQ ID NO: 17329 - DNA, 1647 bp, Muscodor strobelii
  misc_feature: SGI cDNA ID NO. 565786
  misc_feature: Elevated expression when VOC is produced
  misc_feature: Encodes the peptide sequence at SEQ ID NO 17330
atgatagcttctagcccgtggcttgtgtccagcattgccggctcagtgcttgggcttgttgcccatcatgggtttttcattcatggagaatggcatgttcaagcaccaaccattcttatgtcgcatctacttgcctttggatctctatcagcaggcactctcttcttgcaagatcctgtgatgaaccgcttgttcacattgggtctttgtgtcatcagctcttatttgacaacactcctcgctagcattgtggcgtatcggatttggtttcatcctctctcgcgagctggctttcaagggccgttgtatatgcgaacatcgaaactatggcacgtatggcaatgtagacattctacaaatcatctgatcatggagaaacttcacaggcaatatggtgatttcatcagaactgggccatccgagattaccattttcgatcctgaagttttcatggctactgatggaccaaaaacggagtgtatcaaatcggaatggtatgacttattatttccagagagctctctcttgactacgcgagaccgcgcgcttcatgatgaacgacgacgagattggaagatgtgtttcagtccccaagcactcacccatcacttcgcgaagacattaaaacatcttgatcatcttgacaatgccatcgaggctagaatcaaggcaaacgaaccttgtcaaatgcgcgatctattttactggcttggatttgatatcatgggtgattttgtcttcaatcgatcttttgatatgcttacgaatggcgagtggcaccacatggtggtaaatcttcaaagagcactggcattgcttgggccagcgagccctgcgccttggctaatacagctcgcttttcgggtattccctcgaatctatcaaataggagattggttcaagatgactgcttggacacacgtccagatcggtgcacgattgaaagaaggttatgaaaaacagccaactccagaccttgtgcactacctactcgaacagagtgacaaatctcaatcagtggagaccattctgagaatgagaggagatagtctcaatgctatagtggccggaagtgagccaattcctgttgtccttattggcttgtttgcggaactatcacgcaagccagaatggattgaagctatttatcaagagatgcaaggggtggatatcaaagatactaaaacgttaagcgccctaactcatttaaatgcggtcatacaagaggcgttgcgactatatcccgtcttgcccacagcaggctcgcggaaagttggttccaaaggaattatgatcggtggagttttcattccaccgaataccacaatcgttaatccgcgcttcacgattcatagaagagaggactgtttcgagcacggagaggagttcttgcccgagcgatggacaacacatcgcgatatgattcggaatatggctgcctatagtccttggggtacagcccatcacagctgtattgcgcgcgcaatggctatcgatgtgctcagagctacaacagcccgactcattagtagatatcggtttcatcttgcccctggtgagactggtaaacgtgtacttgaagacatgaaagaccaactggcgccgaaccctggccatttgagtcttgtctgtgagttgcggacttag

SEQ ID NO: 17330 - protein, 548 aa, Muscodor strobelii
  misc_feature: SGI Peptide ID NO. 565786
  misc_feature (101)..(543): Pfam Id: PF00067 Pfam Desc: Cytochrome P450
  misc_feature (369)..(543): Pfam Id: PF00067 Pfam Desc: Cytochrome P450
  misc_feature (14)..(547): NCBI GI: 121720148 Blast Desc: benzoate 4-monooxygenase cytochrome P450 [Aspergillus clavatus NRRL 1] gi|119404984|gb|EAW15346.1| benzoate 4-monooxygenase cytochrome P450 [Aspergillus clavatus NRRL 1]
  misc_feature (71)..(548): NCBI GI: 145257250 Blast Desc: An04g02950 [Aspergillus niger] gi|134058574|emb|CAK96461.1| protein product [Aspergillus niger]
  misc_feature (13)..(547): NCBI GI: 171691038 Blast Desc: protein product [Podospora anserina] gi|170945467|emb|CAP71579.1| protein product [Podospora anserina]
  misc_feature (2)..(548): NCBI GI: 242771984 Blast Desc: benzoate 4-monooxygenase cytochrome P450, [Talaromyces stipitatus ATCC 10500] gi|218721570|gb|EED20988.1| benzoate 4-monooxygenase cytochrome P450, [Talaromyces stipitatus ATCC
  misc_feature (7)..(545): NCBI GI: 67541805 Blast Desc: AN7066.2 [Aspergillus nidulans FGSC A4] gi|40742005|gb|EAA61195.1| AN7066.2 [Aspergillus nidulans FGSC A4] gi|259483617|tpe|CBF79154.1| TPA: cytochrome P450, (Eurofung)
  misc_feature (11)..(545): NCBI GI: 119189629 Blast Desc: conserved [Coccidioides immitis RS]
  misc_feature (12)..(548): NCBI GI: 154313035 Blast Desc: BC1G_05519 [Botryotinia fuckeliana B05.10] gi|150849604|gb|EDN24797.1| BC1G_05519 [Botryotinia fuckeliana B05.10]
  misc_feature (15)..(547): NCBI GI: 121707431 Blast Desc: cytochrome P450 monooxygenase, [Aspergillus clavatus NRRL 1] gi|119399978|gb|EAW10404.1| cytochrome P450 monooxygenase, [Aspergillus clavatus NRRL 1]
  misc_feature (11)..(545): NCBI GI: 240111169 Blast Desc: Cytochrome P450 family protein [Coccidioides posadasii C735 delta SOWgp]
  misc_feature (1)..(542): NCBI GI: 242810525 Blast Desc: cytochrome P450, [Talaromyces stipitatus ATCC 10500] gi|218716223|gb|EED15645.1| cytochrome P450, [Talaromyces stipitatus ATCC 10500]
  misc_feature (107)..(497): SWISSPROT Homolog: EC 1.14.13.12 Benzoate 4-monooxygenase
  misc_feature: Useful for introducing or modulating the production of volatile compounds
MIASSPWLVSSIAGSVLGLVAHHGFFIHGEWHVQAPTILMSHLLAFGSLSAGTLFLQDPVMNRLFTLGLCVISSYLTTLLASIVAYRIWFHPLSRAGFQGPLYMRTSKLWHVWQCRHSTNHLIMEKLHRQYGDFIRTGPSEITIFDPEVFMATDGPKTECIKSEWYDLLFPESSLLTTRDRALHDERRRDWKMCFSPQALTHHFAKTLKHLDHLDNAIEARIKANEPCQMRDLFYWLGFDIMGDFVFNRSFDMLTNGEWHHMVVNLQRALALLGPASPAPWLIQLAFRVFPRIYQIGDWFKMTAWTHVQIGARLKEGYEKQPTPDLVHYLLEQSDKSQSVETILRMRGDSLNAIVAGSEPIPVVLIGLFAELSRKPEWIEAIYQEMQGVDIKDTKTLSALTHLNAVIQEALRLYPVLPTAGSRKVGSKGIMIGGVFIPPNTTIVNPRFTIHRREDCFEHGEEFLPERWTTHRDMIRNMAAYSPWGTAHHSCIARAMAIDVLRATTARLISRYRFHLAPGETGKRVLEDMKDQLAPNPGHLSLVCELRT

SEQ ID NO: 17331 - DNA, 2250 bp, Muscodor strobelii; identical to SEQ ID NO: 17328
  misc_feature: SGI EST ID NO. CUFF.40768.1
  misc_feature: Variant of the nucleotide sequence at SEQ ID NO 17329

SEQ ID NO: 17332 - DNA, 240 bp, Muscodor strobelii
  misc_feature: SGI cDNA ID NO. 565787
  misc_feature: Elevated expression when VOC is produced
  misc_feature: Encodes the peptide sequence at SEQ ID NO 17333
atggatcctggcatgattcatacggataactttgacaggacaggtgccacccctgaagcttgtcctatggacacagttcagctacctgctcattttcttgtctggatggcgagccctgaagctgcattcttgaagggacggtgtgcctgggcgaactgggatattgaagagctcaaggcacagaaggagaagtttactcaaggtcttttcatgacgtttggatcaaagggactgccttga

SEQ ID NO: 17333 - protein, 79 aa, Muscodor strobelii
  misc_feature: SGI Peptide ID NO. 565787
  misc_feature (1)..(79): NCBI GI: 121720144 Blast Desc: NADP(+)-dependent dehydrogenase, [Aspergillus clavatus NRRL 1] gi|119404982|gb|EAW15344.1| NADP(+)-dependent dehydrogenase, [Aspergillus clavatus NRRL 1]
  misc_feature (3)..(79): NCBI GI: 156052701 Blast Desc: SS1G_06517 [Sclerotinia sclerotiorum 1980] gi|154704296|gb|EDO04035.1| SS1G_06517 [Sclerotinia sclerotiorum 1980]
  misc_feature (1)..(79): NCBI GI: 154316564 Blast Desc: BC1G_04213 [Botryotinia fuckeliana B05.10] gi|150846013|gb|EDN21206.1| BC1G_04213 [Botryotinia fuckeliana B05.10]
  misc_feature (3)..(78): NCBI GI: 256732342 Blast Desc: NECHADRAFT_41583 [Nectria haematococca mpVI 77-13-4]
  misc_feature (3)..(64): NCBI GI: 261360968 Blast Desc: conserved [Verticillium albo-atrum VaMs.102]
  misc_feature (3)..(79): NCBI GI: 259482602 Blast Desc: TPA: conserved [Aspergillus nidulans FGSC A4]
  misc_feature (1)..(78): NCBI GI: 119193560 Blast Desc: CIMG_01157 [Coccidioides immitis RS]
  misc_feature (3)..(79): NCBI GI: 212544890 Blast Desc: short-chain dehydrogenase, [Penicillium marneffei ATCC 18224] gi|210065568|gb|EEA19662.1| short-chain dehydrogenase, [Penicillium marneffei ATCC 18224]
  misc_feature (1)..(65): NCBI GI: 116207664 Blast Desc: CHGG_03125 [Chaetomium globosum CBS 148.51] gi|88183722|gb|EAQ91190.1| CHGG_03125 [Chaetomium globosum CBS 148.51]
  misc_feature (24)..(79): NCBI GI: 169598826 Blast Desc: SNOG_02219 [Phaeosphaeria nodorum SN15] gi|111069311|gb|EAT90431.1| SNOG_02219 [Phaeosphaeria nodorum SN15]
  misc_feature: Useful for introducing or modulating the production of volatile compounds
MDPGMIHTDNFDRTGATPEACPMDTVQLPAHFLVWMASPEAAFLKGRCAWANWDIEELKAQKEKFTQGLFMTFGSKGLP

SEQ ID NO: 17334 - DNA, 1951 bp, Muscodor strobelii
  misc_feature: SGI EST ID NO. CUFF.40765.0
  misc_feature: Variant of the nucleotide sequence at SEQ ID NO 17332
agcgtttcattccaatgcgacggtagcaatgcaccctgaatcacagaacttcacatgcggttgctaagcagaggatagctaaaacatggtcgacagcatgcaaagaaattaggggactattcaaacttgggacgatgccagtagtttccgttgcaacggcttgacaagttgacacaatcgatatggcttaaatacgtctttcgatcctcgcgtgcgatcctcaagtcttagtcccatagccatcaccaacaattactatttcaaatcagcgtgaccctcattgacccacaagcgaacgctttcgggatgcagcctcctttcccctgcccagttcagacctggcacaatgacacctatgagggtattgcaccgacccgcccagaacttagtgtcgtcggaaagacagtgattattgtgggagggggcagtggcatcggcagagtggcgtttactactgccggggcttctagagtggcgcttgtcggccgcactagcgcgaagttggaagaaacagccgcgaaagtcgaggcgctcggcgattcttcaacgtcggtgcatgtcgcggatgtcacgaaggaagaagagttgagagctgcagctaacgaaatcggagagtgggacatttttgttttcagctctgggtggtgtccggcgccagcatcaattgcttcatccgagcttgcagattggtgggctggtttcgatgtcaatgtgaaggggacatttcttgccttcggaacttgctcaggcgaagatatttgaatttctcgcagctgagaaccccgaaacttttatcgccacgatggatcctggcatgattcatacggataactttgacaggacaggtgccacccctgaagcttgtcctatggacacagttcagctacctgctcattttcttgtctggatggcgagccctgaagctgcattcttgaagggacggtgtgcctgggcgaactgggatattgaagagctcaaggcacagaaggagaagtttactcaaggtcttttcatgacgtttggatcaaagggactgccttgaactactgataattgatttccaaatgtgcgcgcataatgcctctcaacgtgtactatgactcaatgctctgttcactatgtgtctcgaattactcaagattgccaatacatatgtacataaagttctgctaggacaatgcgatctgagattgaacataacggaactctccaccccctctatcacgtaaacctcaatatatctgtttaaagagggtagagagagagaggcagaatcatgcgcccgagttcatgtaagacttagcactattctaagctcctcgcatttcgttacggtatgagagggaccaaaagatcacaattgttggcattatcttgtcggacattgataccgtggcgccgttggatgaaacggaagtccctttagagcccatccgaaaggatcagacatatgtaaaccttcacatgcgcggccgcatccgattcctttaacaggaagaagtcacatatgtcagatccttctcatgctcggcacttggcgcccggagcttaacgtatgatcagataagcttgcatcatcaatatcctgggcaatcggcctcgccttccatgtacctggacctgggactgtgcccgctccctgagaactgcatgccctttgcggcagggtagttggcctcgttgaagggcggaatcttggtgcggtagaagtgccctgatatattacgctttgacccatgaaaggcatacttacggtctccgtcagactgaatactaccttcgggccaggcagatgtcgcatgtaaggtacgggctgcttttaaggtacaaggcctattgatgaaatacctatttgggttacgttgagaaaccctaggacgttgctgttccccacgctgaccgacgaaggcgaagatcagacggctgggataggttagtaccactagggagc

SEQ ID NO: 17335 - DNA, 456 bp, Muscodor strobelii
  misc_feature: SGI cDNA ID NO. 565788
  misc_feature: Elevated expression when VOC is produced
  misc_feature: Encodes the peptide sequence at SEQ ID NO 17336
atgcagcctcctttcccctgcccagttcagacctggcacaatgacacctatgagggtattgcaccgacccgcccagaacttagtgtcgtcggaaagacagtgattattgtgggagggggcagtggcatcggcagagtggcgtttactactgccggggcttctagagtggcgcttgtcggccgcactagcgcgaagttggaagaaacagccgcgaaagtcgaggcgctcggcgattcttcaacgtcggtgcatgtcgcggatgtcacgaaggaagaagagttgagagctgcagctaacgaaatcggagagtgggacatttttgttttcagctctgggtggtgtccggcgccagcatcaattgcttcatccgagcttgcagattggtgggctggtttcgatgtcaatgtgaaggggacatttcttgccttcggaacttgctcaggcgaagatatttga

SEQ ID NO: 17336 - protein, 151 aa, Muscodor strobelii
  misc_feature: SGI Peptide ID NO. 565788
  misc_feature (32)..(150): Pfam Id: PF00106 Pfam Desc: short chain dehydrogenase
  misc_feature (32)..(104): Pfam Id: PF00106 Pfam Desc: short chain dehydrogenase
  misc_feature (1)..(142): NCBI GI: 121720144 Blast Desc: NADP(+)-dependent dehydrogenase, [Aspergillus clavatus NRRL 1] gi|119404982|gb|EAW15344.1| NADP(+)-dependent dehydrogenase, [Aspergillus clavatus NRRL 1]
  misc_feature (1)..(141): NCBI GI: 154316564 Blast Desc: BC1G_04213 [Botryotinia fuckeliana B05.10] gi|150846013|gb|EDN21206.1| BC1G_04213 [Botryotinia fuckeliana B05.10]
  misc_feature (1)..(137): NCBI GI: 156052701 Blast Desc: SS1G_06517 [Sclerotinia sclerotiorum 1980] gi|154704296|gb|EDO04035.1| SS1G_06517 [Sclerotinia sclerotiorum 1980]
  misc_feature (6)..(140): NCBI GI: 256727874 Blast Desc: NECHADRAFT_95296 [Nectria haematococca mpVI 77-13-4]
  misc_feature (4)..(140): NCBI GI: 146216390 Blast Desc: reductase [Fusarium asiaticum]
  misc_feature (9)..(141): NCBI GI: 46117514 Blast Desc: FG04599.1 [Gibberella zeae PH-1]
  misc_feature (4)..(140): NCBI GI: 146216404 Blast Desc: reductase [Fusarium cerealis] gi|146216490|gb|ABQ10447.1| reductase [Fusarium pseudograminearum] gi|146216644|gb|ABQ10524.1| reductase
  misc_feature (4)..(140): NCBI GI: 146216488 Blast Desc: reductase [Gibberella zeae] gi|146216532|gb|ABQ10468.1| reductase [Fusarium pseudograminearum]
  misc_feature (4)..(140): NCBI GI: 146216402 Blast Desc: reductase [Gibberella zeae]
  misc_feature (4)..(140): NCBI GI: 146216420 Blast Desc: reductase [Fusarium cortaderiae]
  misc_feature: Useful for introducing or modulating the production of volatile compounds
MQPPFPCPVQTWHNDTYEGIAPTRPELSVVGKTVIIVGGGSGIGRVAFTTAGASRVALVGRTSAKLEETAAKVEALGDSSTSVHVADVTKEEELRAAANEIGEWDIFVFSSGWCPAPASIASSELADWWAGFDVNVKGTFLAFGTCSGEDI

SEQ ID NO: 17337 - DNA, 1951 bp, Muscodor strobelii; identical to SEQ ID NO: 17334
  misc_feature: SGI EST ID NO. CUFF.40765.0
  misc_feature: Variant of the nucleotide sequence at SEQ ID NO 17335

SEQ ID NO: 17338 - DNA, 927 bp, Muscodor strobelii
  misc_feature: SGI cDNA ID NO. 565789
  misc_feature: Elevated expression when VOC is produced
  misc_feature: Encodes the peptide sequence at SEQ ID NO 17339
atgagtgtgcaggctctttcgaaatcactatgccaaataaaatcgtttctcgacatatcatggggatttgttgaaagtgacatgttcactttcgcaatcccgaacactgcttttggcatactcagcgcctttgcatcaacgatgctggttgatagtcaagtagccccgaacgggacctctcttgccacaatcataagccggttgccttgtgtacttgctttcaacgttgcaaacctcttcgtcttcgacttagcaaatcaaagagctccacaatcagttgcagaagatcgaattaacaaaccatggcgtccgattcctcaaggcaagatcacaatggaacaaacacgtcgccttatgctggtaactataccattggtctcgctgttgaactacatggtcggtgcctggcagcagggggttttcatcattgttctgtcttggatgtataatgacctaggtggcggtgacgaggttttcattcgggagatcattatcgctgttgcatacgggctgttcaatagtggctcgttgtttgttgcaacaggatctagaagtcctcttagcctacttggtcttacttggacggcgatcgtaagtggagtgatcctaacaacgatgcaaattcaagatttgaaagaccagaaaggcgataagacgcgcaatcgcaaaacgattgtactttatcttggggaaaccttttcgagggcgtcagtcgctttcttcgtttgcttctggtcttggatttgcagacaattctggacatcgggtcctttcgtcacgatcttcactacccttgctgccttggtcgttgcagtgcgagttctggtccttcggtctcagaagtcagacgctaggacatggagactttggtgcttctggcatgcttcattgtatgcccttccggtgttcttcatgcaagcaagctag

SEQ ID NO: 17339 - protein, 308 aa, Muscodor strobelii
  misc_feature: SGI Peptide ID NO. 565789
  misc_feature (9)..(301): NCBI GI: 121720150 Blast Desc: conserved [Aspergillus clavatus NRRL 1] gi|119404985|gb|EAW15347.1| conserved [Aspergillus clavatus NRRL 1]
  misc_feature (7)..(303): NCBI GI: 171683724 Blast Desc: protein product [Podospora anserina] gi|170941822|emb|CAP67475.1| protein product [Podospora anserina]
  misc_feature (21)..(302): NCBI GI: 154313037 Blast Desc: BC1G_05520 [Botryotinia fuckeliana B05.10] gi|150849605|gb|EDN24798.1| BC1G_05520 [Botryotinia fuckeliana B05.10]
  misc_feature (64)..(303): NCBI GI: 171678385 Blast Desc: protein product [Podospora anserina] gi|170937262|emb|CAP61919.1| protein product [Podospora anserina]
  misc_feature (21)..(274): NCBI GI: 145237052 Blast Desc: An07g00810 [Aspergillus niger] gi|134075638|emb|CAK39304.1| protein product [Aspergillus niger]
  misc_feature (21)..(266): NCBI GI: 145257245 Blast Desc: An04g02940 [Aspergillus niger] gi|134058573|emb|CAK96460.1| protein product [Aspergillus niger]
  misc_feature (38)..(301): NCBI GI: 169594564 Blast Desc: SNOG_00008 [Phaeosphaeria nodorum SN15] gi|111070383|gb|EAT91503.1| SNOG_00008 [Phaeosphaeria nodorum SN15]
  misc_feature (10)..(301): NCBI GI: 85083377 Blast Desc: NCU05126 [Neurospora crassa OR74A] gi|28881416|emb|CAD70533.1| [Neurospora crassa] gi|28918197|gb|EAA27876.1| [Neurospora crassa OR74A]
  misc_feature (1)..(303): NCBI GI: 119495957 Blast Desc: NFIA_015490 [Neosartorya fischeri NRRL 181] gi|119412915|gb|EAW22856.1| conserved [Neosartorya fischeri NRRL 181]
  misc_feature (1)..(303): NCBI GI: 70995239 Blast Desc: conserved [Aspergillus fumigatus Af293] gi|66850017|gb|EAL90344.1| conserved [Aspergillus fumigatus Af293] gi|159131136|gb|EDP56249.1| conserved [Aspergillus A1163]
  misc_feature: Useful for introducing or modulating the production of volatile compounds
MSVQALSKSLCQIKSFLDISWGFVESDMFTFAIPNTAFGILSAFASTMLVDSQVAPNGTSLATIISRLPCVLAFNVANLFVFDLANQRAPQSVAEDRINKPWRPIPQGKITMEQTRRLMLVTIPLVSLLNYMVGAWQQGVFIIVLSWMYNDLGGGDEVFIREIIIAVAYGLFNSGSLFVATGSRSPLSLLGLTWTAIVSGVILTTMQIQDLKDQKGDKTRNRKTIVLYLGETFSRASVAFFVCFWSWICRQFWTSGPFVTIFTTLAALVVAVRVLVLRSQKSDARTWRLWCFWHASLYALPVFFMQAS

SEQ ID NO: 17340 - DNA, 4452 bp, Muscodor strobelii
  misc_feature: SGI EST ID NO. CUFF.40812.0
  misc_feature: Variant of the nucleotide sequence at SEQ ID NO 17338
tggaaatttcggctctcttgattggcgagaagcctgatccgatagtccttggtgaccataagtatcgcatcttgacgatagacactcgtaccgtggttgacgacgcaaccatgactggcgttgtgatcaacggggatccgaatgttccgtgacccttgaatggtaaggagcatggatataagccctctttatgtaggtacgcatgtatccatcggaatacttcatatctcaccgaaagaatacaaatcacatctaatgggcagttggccacccctgaacatcagtttttggatgttcaacaaacgggatagcttggccttgaatcaagtatgttgtacatactcccgacacaactgtgtgaaggaccttgcaggatgatatccaccagacgagtcccactatggagaataggaagtcgtattttgaacattctgccgaatcacatgtaatggggcgaaggcgtgttctccagatgttggcactcttaacacatgtcggcagtgagcgcgggatgatggattctgaatggagaagaggaaggaggactctggcaaggcgaagacgcaatatcatgttcttaagctgcatggccatatccattctgggcaatgcaggtgatgtcagtgtattctataagccttgaatttacagctcgacaagctattcccagtctatggatctgtaggttcagttcacatcctcaaactctcagcctatctctaagcaccactctcttccacaagatgagtgtgcaggctctttcgaaatcactatgccaaataaaatcgtttctcgacatatcatggggatttgttgaaagtgacatgttcactttcgcaatcccgaacactgcttttggcatactcagcgcctttgcatcaacgatgctggttgatagtcaagtagccccgaacgggacctctcttgccacaatcataagccggttgccttgtgtacttgctttcaacgttgcaaacctcttcgtcttcgacttagcaaatcaaagagctccacaatcagttgcagaagatcgaattaacaaaccatggcgtccgattcctcaaggcaagatcacaatggaacaaacacgtcgccttatgctggtaactataccattggtctcgctgttgaactacatggtcggtgcctggcagcagggggttttcatcattgttctgtcttggatgtataatgacctaggtggcggtgacgaggttttcattcgggagatcattatcgctgttgcatacgggctgttcaatagtggctcgttgtttgttgcaacaggatctagaagtcctcttagcctacttggtcttacttggacggcgatcgtaagtggagtgatcctaacaacgatgcaaattcaagatttgaaagaccagaaaggcgataagacgcgcaatcgcaaaacgattgtactttatcttggggaaaccttttcgagggcgtcagtcgctttcttcgtttgcttctggtcttggatttgcagacaattctggacatcgggtcctttcgtcacgatcttcactacccttgctgccttggtcgttgcagtgcgagttctggtccttcggtctcagaagtcagacgctaggacatggagactttggtgcttctggcatgcttcattgtatgcccttccggtgttcttcatgcaagcaagctaggagtcgtggaaaactgatctttcggaagggtccaagaactgaccgagctgtccaagagtgcgataattaaatttatctagaagggtgagaaaaaaatatacttattcaaagcattataagacattcaagatgtggctcagctgaataccttaatttgtgaattggtatttccggggttcgcaaccctggttgctatgcccacttgctgctaagtcgcgaaataaaaaggacttgtaatagacgcttttagctctaaatcatcgagagtcgtcatttctatatacacaagctgtccataggcttctctcgcttgttgaaatctaatgctaggtttattagcgatattacgctatcagtctcatttcagtagatacatgtcgcccaacaaggtaagtacaagaatatgtcctcaatacccaaaagtccctaccggaatggttgcaccttgtggtgctccgtgactatatcgacagcaggactattagatagtctttcaaactgagcaaagtctgccttcggcagtaacctcaaatgcttcactgccaacagctgtctttccgtagaagacattggtgggatcatacttcttcttgatagatagaagtcggtcatagtttttgccgtaaaacgtttgttgccaatctttctgatttacattggcctcgtttaagtatgcggccccgcctggggtcaatgcctctagcggtggactcaggacatcattgatcatgtcttgcgcggcgacattggctgcgaagttgttatcatcgtattgactaccgtgtaatttagcacctcgacaatttgatctttctgataagacaattacttacgtcccgtagaatgcgaggaatacagagtctcgccatgcagggtgagcagagttagggacggctggaggcttgctcacgtccattgagacaccggcaaaaatagccaagttattaacaatggacttgatcgcgccgactagagatgaagcagagtcttcagtcgatacgagcgactgaggaatgatgcgaccaccgagattaacggctgatatattcatcttcgggttcagagtattataggcatcctggaatgttggaaagtccacttgattgaaagctgttcagtcgattgttagttcgaaatatcggacatatgtgaagagaagtgaatctacataccatactgaatgccgctgttgtcaagtgctgacaatgttgggtgcaagatttctgtgaaacgtgcggcggttccattggggaagtaagtctgcggcagaatgaaattattaccaggtataatcatccaatacagcgtcgcaccagcttccagtgcagtcggcaggttcatcacgaagattcgaatgatatcccaaaatgtgtccgatggctcggcaaagctcaacgtaacggcgcttgtgggcatgttatcatgtagcttgacagtcattgacaagaccgcaccataagtgccaccaccgccaccagaaagcgcccaatataagtcagagttgtgagtcggagttgctgcacggagtttaccatcagatgttacaacttcccattccaagacttgatcagctgcgagaccaaatttggagccaagcggactagttccgccgccctgggtatagccaccagcaatgcccacagtttcgccatctccttcgacgacgacatagccttgcgctcctgcagctttttgagcctctgctgctatcacgccggcgccgatcttcattgctttcccagtgtacgacgaagacctatagtccaagattgttgttcccttcatataatgtgtccatagagctaaagcaccagcgcctgttgacttgcccatgtagtcatgtcctgtgttacgaatgacaaggcggatattatgagtctttgcaaaagctattgtcttctggtagtcggcgacactagaagcattgacagcatattgaacatacgttcctatgacgcactgggcatctcttggggtgaaaggatcacaacttgaattggcaaatattgccgccatgggtgagtgcgtcgtttgttcgtgtagctcagggacaggccagttggcctggacatacgcacatttctcctcatcgtatgagacgccggggaagctatcatggcagacactcgcaagcgggacagtcgctatgaggctgccatgaaccgactgattgagcgcattccagtcggcaggattcggccaacaatcatcgccaggaaagcaacgacatgagccctgagacggttgcgaaaacgcggtccaagccactgctcccgcaatggcgagaacagaggtcagagcgaccattgggagacgatcttttgttggtgatttgtcagccatgatggaagtaaattgagtagtcactttccagccctaatgtgacaatgggatggaaatcctcagatatccaaatcagagggaggaaacttttgaaagtgtcaggactcacgtatcgcgtatcagtatctgcagtgcagcagaatcaaaagtgacgatcgctgttggtcaacgtgcatgtaccaagatacaggaatgagggtcacagcacttcggatggaacctcacacgtgcagctaaggaatctcggttcccattttgtatcattgtcgcattgggggtggtgcctatagccatcttctcgaagcggaaatgaacacaatagttcgtaggattctgaagttggagtcgcttggagtcgcttacagctttgggaagttcgattgcaacgtcgttaggttcgttatgtcttgttcgcaaggagaagaaaagttccccgccg

SEQ ID NO: 17341 - DNA, 1731 bp, Muscodor strobelii
  misc_feature: SGI cDNA ID NO. 565790
  misc_feature: Encodes the peptide sequence at SEQ ID NO 17342
atggctgacaaatcaccaacaaaagatcgtctcccaatggtcgctctgacctctgttctcgccattgcgggagcagtggcttggaccgcgttttcgcaaccgtctcagggctcatgtcgttgctttcctggcgatgattgttggccgaatcctgccgactggaatgcgctcaatcagtcggttcatggcagcctcatagcgactgtcccgcttgcgagtgtctgccatgatagcttccccggcgtctcatacgatgaggagaaatgtgcgtatgtccaggccaactggcctgtccctgagctacacgaacaaacgacgcactcacccatggcggcaatatttgccaattcaagttgtgatcctttcaccccaagagatgcccagtgcgtcataggaacgtatgttcaatatgctgtcaatgcttctagtgtcgccgactaccagaagacaatagcttttgcaaagactcataatatccgccttgtcattcgtaacacaggacatgactacatgggcaagtcaacaggcgctggtgctttagctctatggacacattatatgaagggaacaacaatcttggactataggtcttcgtcgtacactgggaaagcaatgaagatcggcgccggcgtgatagcagcagaggctcaaaaagctgcaggagcgcaaggctatgtcgtcgtcgaaggagatggcgaaactgtgggcattgctggtggctatacccagggcggcggaactagtccgcttggctccaaatttggtctcgcagctgatcaagtcttggaatgggaagttgtaacatctgatggtaaactccgtgcagcaactccgactcacaactctgacttatattgggcgctttctggtggcggtggtggcacttatggtgcggtcttgtcaatgactgtcaagctacatgataacatgcccacaagcgccgttacgttgagctttgccgagccatcggacacattttgggatatcattcgaatcttcgtgatgaacctgccgactgcactggaagctggtgcgacgctgtattggatgattatacctggtaataatttcattctgccgcagacttacttccccaatggaaccgccgcacgtttcacagaaatcttgcacccaacattgtcagcacttgacaacagcggcattcagtatgctttcaatcaagtggactttccaacattccaggatgcctataatactctgaacccgaagatgaatatatcagccgttaatctcggtggtcgcatcattcctcagtcgctcgtatcgactgaagactctgcttcatctctagtcggcgcgatcaagtccattgttaataacttggctatttttgccggtgtctcaatggacgtgagcaagcctccagccgtccctaactctgctcaccctgcatggcgagactctgtattcctcgcattctacgggactcaatacgatgataacaacttcgcagccaatgtcgccgcgcaagacatgatcaatgatgtcctgagtccaccgctagaggcattgaccccaggcggggccgcatacttaaacgaggccaatgtaaatcagaaagattggcaacaaacgttttacggcaaaaactatgaccgacttctatctatcaagaagaagtatgatcccaccaatgtcttctacggaaagacagctgttggcagtgaagcatttgaggttactgccgaaggcagactttgctcagtttga

SEQ ID NO: 17342 - protein, 576 aa, Muscodor strobelii
  misc_feature: SGI Peptide ID NO. 565790
  misc_feature (517)..(561): Pfam Id: PF08031 Pfam Desc: Berberine and berberine like
  misc_feature (135)..(277): Pfam Id: PF01565 Pfam Desc: FAD binding domain
  misc_feature (38)..(576): NCBI GI: 121720152 Blast Desc: FAD binding domain protein [Aspergillus clavatus NRRL 1] gi|119404986|gb|EAW15348.1| FAD binding domain protein [Aspergillus clavatus NRRL 1]
  misc_feature (35)..(574): NCBI GI: 238841646 Blast Desc: 6-hydroxy-D-nicotine oxidase [Microsporum canis CBS 113480]
  misc_feature (13)..(576): NCBI GI: 154313031 Blast Desc: BC1G_05517 [Botryotinia fuckeliana B05.10] gi|150849602|gb|EDN24795.1| BC1G_05517 [Botryotinia fuckeliana B05.10]
  misc_feature (1)..(574): NCBI GI: 255950786 Blast Desc: Pc22g22660 [Penicillium chrysogenum Wisconsin 54-1255] gi|211593177|emb|CAP99554.1| Pc22g22660 [Penicillium chrysogenum Wisconsin 54-1255]
  misc_feature (6)..(576): NCBI GI: 169765902 Blast Desc: [Aspergillus oryzae RIB40] gi|10119790|dbj|BAB13480.1| isoamyl alcohol oxidase [Aspergillus oryzae] gi|83765277|dbj|BAE55420.1| protein product [Aspergillus oryzae]
  misc_feature (39)..(574): NCBI GI: 67524381 Blast Desc: AN2648.2 [Aspergillus nidulans FGSC A4] gi|40743866|gb|EAA63050.1| AN2648.2 [Aspergillus nidulans FGSC A4] gi|259486442|tpe|CBF84282.1| TPA: isoamyl alcohol oxidase,
  misc_feature (6)..(576): NCBI GI: 238482515 Blast Desc: conserved [Aspergillus flavus NRRL3357] gi|220700546|gb|EED56884.1| conserved [Aspergillus flavus NRRL3357]
  misc_feature (38)..(576): NCBI GI: 115386510 Blast Desc: ATEG_07110 [Aspergillus terreus NIH2624] gi|114190794|gb|EAU32494.1| ATEG_07110 [Aspergillus terreus NIH2624]
  misc_feature (33)..(576): NCBI GI: 145250439 Blast Desc: An15g01940 [Aspergillus niger] gi|134082253|emb|CAK42297.1| protein product [Aspergillus niger]
  misc_feature (16)..(575): NCBI GI: 46139359 Blast Desc: FG11194.1 [Gibberella zeae PH-1]
MADKSPTKDRLPMVALTSVLAIAGAVAWTAFSQPSQGSCRCFPGDDCWPNPADWNALNQSVHGSLIATVPLASVCHDSFPGVSYDEEKCAYVQANWPVPELHEQTTHSPMAAIFANSSCDPFTPRDAQCVIGTYVQYAVNASSVADYQKTIAFAKTHNIRLVIRNTGHDYMGKSTGAGALALWTHYMKGTTILDYRSSSYTGKAMKIGAGVIAAEAQKAAGAQGYVVVEGDGETVGIAGGYTQGGGTSPLGSKFGLAADQVLEWEVVTSDGKLRAATPTHNSDLYWALSGGGGGTYGAVLSMTVKLHDNMPTSAVTLSFAEPSDTFWDIIRIFVMNLPTALEAGATLYWMIIPGNNFILPQTYFPNGTAARFTEILHPTLSALDNSGIQYAFNQVDFPTFQDAYNTLNPKMNISAVNLGGRIIPQSLVSTEDSASSLVGAIKSIVNNLAIFAGVSMDVSKPPAVPNSAHPAWRDSVFLAFYGTQYDDNNFAANVAAQDMINDVLSPPLEALTPGGAAYLNEANVNQKDWQQTFYGKNYDRLLSIKKKYDPTNVFYGKTAVGSEAFEVTAEGRLCSV

SEQ ID NO: 17343 - DNA, 3247 bp, Muscodor strobelii
  misc_feature: SGI EST ID NO. CUFF.40813.2
  misc_feature: Variant of the nucleotide sequence at SEQ ID NO 17341
ttttcttctccttgcgaacaagacataacgaacctaacgacgttgcaatcgaacttcccaaagctgtaagcgactccaagcgactccaacttcagaatcctacgaactattgtgttcatttccgcttcgagaagatggctataggcaccacccccaatgcgacaatgatacaaaatgggaaccgagattccttagctgcacgtgtgaggttccatccgaagtgctgtgaccctcattcctgtatcttggtacatgcacgttgaccaacagcgatcgtcacttttgattctgctgcactgcagatactgatacgcgatacgtgagtcctgacactttcaaaagtttcctccctctgatttggatatctgaggatttccatcccattgtcacattagggctggaaagtgactactcaatttacttccatcatggctgacaaatcaccaacaaaagatcgtctcccaatggtcgctctgacctctgttctcgccattgcgggagcagtggcttggaccgcgttttcgcaaccgtctcagggctcatgtcgttgctttcctggcgatgattgttggccgaatcctgccgactggaatgcgctcaatcagtcggttcatggcagcctcatagcgactgtcccgcttgcgagtgtctgccatgatagcttccccggcgtctcatacgatgaggagaaatgtgcgtatgtccaggccaactggcctgtccctgagctacacgaacaaacgacgcactcacccatggcggcaatatttgccaattcaagttgtgatcctttcaccccaagagatgcccagtgcgtcataggaacgtatgttcaatatgctgtcaatgcttctagtgtcgccgactaccagaagacaatagcttttgcaaagactcataatatccgccttgtcattcgtaacacaggacatgactacatgggcaagtcaacaggcgctggtgctttagctctatggacacattatatgaagggaacaacaatcttggactataggtcttcgtcgtacactgggaaagcaatgaagatcggcgccggcgtgatagcagcagaggctcaaaaagctgcaggagcgcaaggctatgtcgtcgtcgaaggagatggcgaaactgtgggcattgctggtggctatacccagggcggcggaactagtccgcttggctccaaatttggtctcgcagctgatcaagtcttggaatgggaagttgtaacatctgatggtaaactccgtgcagcaactccgactcacaactctgacttatattgggcgctttctggtggcggtggtggcacttatggtgcggtcttgtcaatgactgtcaagctacatgataacatgcccacaagcgccgttacgttgagctttgccgagccatcggacacattttgggatatcattcgaatcttcgtgatgaacctgccgactgcactggaagctggtgcgacgctgtattggatgattatacctggtaataatttcattctgccgcagacttacttccccaatggaaccgccgcacgtttcacagaaatcttgcacccaacattgtcagcacttgacaacagcggcattcagtatgctttcaatcaagtggactttccaacattccaggatgcctataatactctgaacccgaagatgaatatatcagccgttaatctcggtggtcgcatcattcctcagtcgctcgtatcgactgaagactctgcttcatctctagtcggcgcgatcaagtccattgttaataacttggctatttttgccggtgtctcaatggacgtgagcaagcctccagccgtccctaactctgctcaccctgcatggcgagactctgtattcctcgcattctacgggactcaatacgatgataacaacttcgcagccaatgtcgccgcgcaagacatgatcaatgatgtcctgagtccaccgctagaggcattgaccccaggcggggccgcatacttaaacgaggccaatgtaaatcagaaagattggcaacaaacgttttacggcaaaaactatgaccgacttctatctatcaagaagaagtatgatcccaccaatgtcttctacggaaagacagctgttggcagtgaagcatttgaggttactgccgaaggcagactttgctcagtttgaaagactatctaatagtcctgctgtcgatatagtcacggagcaccacaaggtgcaaccattccggtagggacttttgggtattgaggacatattcttgtacttaccttgttgggcgacatgtatctactgaaatgagactgatagcgtaatatcgctaataaacctagcattagatttcaacaagcgagagaagcctatggacagcttgtgtatatagaaatgacgactctcgatgatttagagctaaaagcgtctattacaagtcctttttatttcgcgacttagcagcaagtgggcatagcaaccagggttgcgaaccccggaaataccaattcacaaattaaggtattcagctgagccacatcttgaatgtcttataatgctttgaataagtatatttttttctcacccttctagataaatttaattatcgcactcttggacagctcggtcagttcttggacccttccgaaagatcagttttccacgactcctagcttgcttgcatgaagaacaccggaagggcatacaatgaagcatgccagaagcaccaaagtctccatgtcctagcgtctgacttctgagaccgaaggaccagaactcgcactgcaacgaccaaggcagcaagggtagtgaagatcgtgacgaaaggacccgatgtccagaattgtctgcaaatccaagaccagaagcaaacgaagaaagcgactgacgccctcgaaaaggtttccccaagataaagtacaatcgttttgcgattgcgcgtcttatcgcctttctggtctttcaaatcttgaatttgcatcgttgttaggatcactccacttacgatcgccgtccaagtaagaccaagtaggctaagaggacttctagatcctgttgcaacaaacaacgagccactattgaacagcccgtatgcaacagcgataatgatctcccgaatgaaaacctcgtcaccgccacctaggtcattatacatccaagacagaacaatgatgaaaaccccctgctgccaggcaccgaccatgtagttcaacagcgagaccaatggtatagttaccagcataaggcgacgtgtttgttccact

SEQ ID NO: 17344 - DNA, 1131 bp, Muscodor strobelii
  misc_feature: SGI cDNA ID NO. 565791
  misc_feature: Encodes the peptide sequence at SEQ ID NO 17345
atggcgtctgttacgcaaggcggtattgacttgatcatttggacaattgtcttcactttgctcgatattgcttttgttatacttcgcttttatgctgctcgtttgatcggtcgtggagtcttagcggatgaccacttcatcctagtggcgcttgcgagcacgctggccttggacggtgtagtcgtatgggcagtcttctatggccacattggcaatcataccctcgatcttggtggcgaagaaatcacgattgccctaaaaacgattcccgccgcctatgttacgtggactacggcgactgcagcattcaagctgtcagtattattgttttatcgacgtgtcttcgccatcaagaccgtgaaattactatcgtacgtcttgatgggcttgactgttgcctactgggtttcatttctcgtggttttcctaaccacatgcacgcccgacatttcccagctttgggtaatgaggccagatggattctgtcgagacttgaacatcggtcagctaggttctgtcagtacgaatcttgctctcgatgttttcgtcattattctgccaatgcccttcttgtggggactgcagatgcgtacccgtaacaagcttgccgtcacattgattttcagtcttggtttcatcacgattggaatcatgatatggaggatagtcgatcttgtcgagaccaagaatggagacttcatctaccacgaacctactctggccttaactactacgcttgagctatggctctgtatcatcattgcttgcgttcctactctcggtcccgtggccaagaagcatctcgccccaaccattgccaaattgacgactcgtttctctagcggcggcactcctaaggatacaccccgaagtattgtcactttcggacgattgggtggccgtgttcgcaaaaactacgcatcaatgacctatggaagtcaagagcgacttgacgaaaatcttgaatcgggtggctatgattgggatagcccgaagttccgagaggatgcacgtaccgctacgaacataacctctaacacccgtggtcaagagctccgtacactgccgccgccaaatgcgatacatgtacaacaaaggatccaaactcacgagtcacctcgctttaactga

SEQ ID NO: 17345 - protein, 376 aa, Muscodor strobelii
  misc_feature: SGI Peptide ID NO. 565791
  misc_feature (3)..(324): NCBI GI: 145257262 Blast Desc: An04g02990 [Aspergillus niger] gi|134058578|emb|CAK96465.1| protein product [Aspergillus niger]
  misc_feature (3)..(370): NCBI GI: 121720146 Blast Desc: ACLA_060120 [Aspergillus clavatus NRRL 1] gi|119404983|gb|EAW15345.1| ACLA_060120 [Aspergillus clavatus NRRL 1]
  misc_feature (55)..(313): NCBI GI: 171678387 Blast Desc: protein product [Podospora anserina] gi|170937263|emb|CAP61920.1| protein product [Podospora anserina]
  misc_feature (8)..(265): NCBI GI: 154313039 Blast Desc: BC1G_05521 [Botryotinia fuckeliana B05.10] gi|150849606|gb|EDN24799.1| BC1G_05521 [Botryotinia fuckeliana B05.10]
  misc_feature (55)..(212): NCBI GI: 154316043 Blast Desc: BC1G_03606 [Botryotinia fuckeliana B05.10] gi|150846393|gb|EDN21586.1| BC1G_03606 [Botryotinia fuckeliana B05.10]
  misc_feature (7)..(324): NCBI GI: 238840245 Blast Desc: integral membrane protein [Microsporum canis CBS 113480]
  misc_feature (18)..(299): NCBI GI: 67541837 Blast Desc: AN7082.2 [Aspergillus nidulans FGSC A4] gi|40742021|gb|EAA61211.1| AN7082.2 [Aspergillus nidulans FGSC A4]
  misc_feature (18)..(359): NCBI GI: 259483599 Blast Desc: TPA: conserved [Aspergillus nidulans FGSC A4]
  misc_feature (1)..(372): NCBI GI: 212533581 Blast Desc: integral membrane protein [Penicillium marneffei ATCC 18224] gi|210072311|gb|EEA26400.1| integral membrane protein [Penicillium marneffei ATCC 18224]
  misc_feature (5)..(345): NCBI GI: 146324405 Blast Desc: integral membrane protein [Aspergillus fumigatus Af293] gi|129557230|gb|EAL88635.2| integral membrane protein, [Aspergillus fumigatus Af293] gi|159124233|gb|EDP49351.1| A1163]
MASVTQGGIDLIIWTIVFTLLDIAFVILRFYAARLIGRGVLADDHFILVALASTLALDGVVVWAVFYGHIGNHTLDLGGEEITIALKTIPAAYVTWTTATAAFKLSVLLFYRRVFAIKTVKLLSYVLMGLTVAYWVSFLVVFLTTCTPDISQLWVMRPDGFCRDLNIGQLGSVSTNLALDVFVIILPMPFLWGLQMRTRNKLAVTLIFSLGFITIGIMIWRIVDLVETKNGDFIYHEPTLALTTTLELWLCIIIACVPTLGPVAKKHLAPTIAKLTTRFSSGGTPKDTPRSIVTFGRLGGRVRKNYASMTYGSQERLDENLESGGYDWDSPKFREDARTATNITSNTRGQELRTLPPPNAIHVQQRIQTHESPRFN

SEQ ID NO: 17346 - DNA, 1883 bp, Muscodor strobelii
  misc_feature: SGI EST ID NO. CUFF.40770.0
  misc_feature: Variant of the nucleotide sequence at SEQ ID NO 17344
tcggtctttgctgcagaattgcggaatcgctgatcacccccccctatttgcattatcttgttaccgctgggtttgaaaatgggccatctgtcgcaatgaacttcccactcgatatgtgcaagtggcggagtgagcattccccttcatctttagcatttctcaaacccgcaaaatggcgtctgttacgcaaggcggtattgacttgatcatttggacaattgtcttcactttgctcgatattgcttttgttatacttcgcttttatgctgctcgtttgatcggtcgtggagtcttagcggatgaccacttcatcctagtggcgcttgcgagcacgctggccttggacggtgtagtcgtatgggcagtcttctatggccacattggcaatcataccctcgatcttggtggcgaagaaatcacgattgccctaaaaacgattcccgccgcctatgttacgtggactacggcgactgcagcattcaagctgtcagtattattgttttatcgacgtgtcttcgccatcaagaccgtgaaattactatcgtacgtcttgatgggcttgactgttgcctactgggtttcatttctcgtggttttcctaaccacatgcacgcccgacatttcccagctttgggtaatgaggccagatggattctgtcgagacttgaacatcggtcagctaggttctgtcagtacgaatcttgctctcgatgttttcgtcattattctgccaatgcccttcttgtggggactgcagatgcgtacccgtaacaagcttgccgtcacattgattttcagtcttggtttcatcacgattggaatcatgatatggaggatagtcgatcttgtcgagaccaagaatggagacttcatctaccacgaacctactctggccttaactactacgcttgagctatggctctgtatcatcattgcttgcgttcctactctcggtcccgtggccaagaagcatctcgccccaaccattgccaaattgacgactcgtttctctagcggcggcactcctaaggatacaccccgaagtattgtcactttcggacgattgggtggccgtgttcgcaaaaactacgcatcaatgacctatggaagtcaagagcgacttgacgaaaatcttgaatcgggtggctatgattgggatagcccgaagttccgagaggatgcacgtaccgctacgaacataacctctaacacccgtggtcaagagctccgtacactgccgccgccaaatgcgatacatgtacaacaaaggatccaaactcacgagtcacctcgctttaactgaatgactctaaaggcacggctgttagtcagggcgacttcgtgtcagtcattagggttaagaacaaatgtatgatagagcttctttatgtaatctgagcagtaaaggcggtacctatttgtacgcaatattgcgtgaccgacttcttacatacgaggtagcatacctatagttctagctaccctaatgatgacgcttggcctactttctcaccgcggcggggtacgtggactccctcactcggggaatgtgcagcgtgtcactgtctcccactgttttcggcagtgtcacgacggaattggcatagctgcgagcactctgaacattaagttaaacacgcaagagaatgatatatgtccggttttgatggtgaacgaatcatactggtcaaacccgactatcaccgaacttactattgatgatcaactgccttgtatctcctatgctattactataatcccatgcttttctggtactctactaattttgtaagtcgtatacctgccgatctgctgatttatgtctctctcttactgacagccctcgtaaacagtccctgtacctaatatccgagacaatatcc

SEQ ID NO: 17347 - DNA, 6399 bp, Muscodor strobelii
  misc_feature: SGI cDNA ID NO. 565792
  misc_feature: Encodes the peptide sequence at SEQ ID NO 17348
atgccaaaccaaacatcagaagacagagctattggccatggaacgccgaacaaaaggcaaagactcatccgcgagacttctatcgacaccgactcgtccgcggacgcttcccatcaccaccgtgacggaaaccacaaaacgaatcgcttcgaaggcaatcgaatacaaggcagtggaaactctaatgtcggtagagatatcatcattccaaactcctgcagtgcagcaagtaagagcagtgaggatggaaaggctgaaatactactcgagtcattgcgattcgaacaaatggacgcaagacaaatgagtgtcaaggaagcaatcggccgcacatgtcgatggttccttaagtcatcgtgttatgccaattggtcaagaaaagagaatcgggacatcgcccacaacttcctttggatcaagggaaagcctggagcgggaaaatctactctaatgaagttcctgttaaaggagctgcagacccaaatgcgcaaagcaaaagacgatgacatcttattatccttcttcttcaatgctcgaggcgttgacctagagaagtcgacaatcggtctatacagatctctcctggtacaacttcttgagtcgcgtactgatctgcaatgggtactgaataatatccggatcggacacatctggactattgaatctctcaagcagattttggaagaagcactacagagcattgatgataccaccatcgtatgtctaatcgatgcgctcgacgaatgcgacgaagcgcagattcgcgatatggtctcattcttcagcgacttaggtatagctcaagaacggctccgtatctgctttgcaagccggcattatcctcagattagcattcgaacaggactgagccttatccttgaggaccaaatcggccatggagaggacatcgcaaattacttgaacacagcactacacattagacgcgatagtagtcttgcagaccaagttcgcggcgagcttcaagagaaggcgtctggtgtatttatgtggatcgttctcgtggtggatatcctgaataaagaatatgatgccgggcgtgagcattctcttctcaaacgtatccaacaactaccaaagggtctccatgatttattcctcgacatactaacccgcgacgaatacaacggtcaaggcttgcttctttgcattcagtgggtcttatttgcacgacagcctctctcgcctaagcaactgtacttcgctatgctttctggtcttgaacctgagaacttagtccaatgccacatggatagtctctctgaggacagcatcaggcggtacatcctccacaactccaaaggtttagctgagttcccacagctcaagaacccgaaaatacagttcattcatgtactcgtccggacatttctgttaatagataatggtattgggagaatatggcctgaactctcaccaaatgttctcggtcaaagtcatgatactttgaaacaatgctgttcgaactatatcgatcagtatacagtcaaggatgtcaatgcacgtcctcccaagttgataaccgagaaatatccatttctagagtatgcaaagatagggattctgcagcacgccgaacaggcagagacctacggagtaagccaacgtgactttctgtccgactttcctctagtcagatggatcaaactgcataatgccttacaggagcatgtttcacgtcattattccatacgaaccagtctattctacattttggcagaagctaacttaccagcattgatccgtgtacatgcaaacggacagtcttgttttgaagtagaggaggcacgatatggactcccaatcctcgctgcgtgtgcgctcaaaagtagttatacgatacatactatcctggaagttgaggccgcaagaatatcaggcttctcctttgaacaattctgtaagaactttgacttgatggcagataaagacttctacgctatctctggcgtagacttcaatttcaacaccaaacgggatcggtggcaccagattgttaaatttggtagtgagaaagtgtcgttattctatcttgccacaaaacagttcgatattcattctgaaaaatcggaaatgggtactattttgatgtctgcggtggagagtggatggagtacattcgttgaggagctgataaagaggggtgccaacattcagtttgtcaacgctcaagggctcacgccactacacatggcggcaaaaactgaatggatcgatattgtcaaaattttcatcgaatacggttctgatgtgctcgctgctgacgaagaaggggcgacgccactccatttcgctacaagcaccggaaacttaagcgtcatccaactcttgatcaaaaacggctccaacatactgagtgctaagaaagatggatctacaccgttgcatatagctatagaatccgactttctcgatgtagctcagctgctcttacaatacggcgcggaggtttggattactgacaaaaatggacttacggcattacaccgggcttcaataacaggcagtctgaaattgtttaaactgctcatccaaaatggagctgacgtggcagctgaagataatgatggacgcaccccattacacgaggcttcaagacacgggcatacaaagattgccaagcatctcattgaaattggagctagattgtgggctttcgacaaatatggcgcaatcccgttacactatgccatgtcaagaagtcatgtcgacgtagcgcaactgctagttctgagcggcgtcgaagtctttgatattgatggatctaccgccaagccattacaggcagtcttactctgcctactgcagaatcaaaggaccgataacggatcgacagctcctacaagcaactgggtttcaccgttcccagccacgggtgataaatatcaagacacggttcagattttgattgactgcggcgctcttgtagaaatcaaagacgacgctggtcgaacaccgttatcatgggccgctgaggcaggccatgttgggatagtactgctcctcattcaaaagggcgctgatattaactcgagagataacactggctatacaccgctgcaatgggcagaagaaagggggcatactgacacagtagagttgctacagagattctatgtttccagtagtcgaaacgagcacttgaaagccgagacttctactgactcgggctacggcacactggagaacgagttcaaacggataggccctgggaattttagcgactcagcttcttctgaagaaatggcatcccgatttgtggacgcgattttcgatgatgacgctgagacggagtactcgacgacaacgagtgttttaggtcaagacgcctaccctgtggatgagttgcttcgagcaggactcttcgtgacgctgctatcttcatacacagaaggcggagtatacgatgatgaaatccagaaggacgaaaattttttccaaacgtggcgagaaggcgtggatcacacagtcgatcctgatgagcctcaaaatagcgaagaaatcgaaaacaaaagcggtgacgaagcctcggagccgagcgactctgaagacgatgatactgaaaccctgaggcattatgaagaggcggttctagcgagtcctgctcacgattggctcctcgcaagtctgggaagagagatcggattaacgcgagcggagccatgcgttatggacgagattagccagactatcttaagatctctatgtcgtactgggaaattcactcgtaaaaccgcgcttcccaatttccaagtatcttttgagcttgactgggacctctctacgttcttgtccgaacaatttggaagggaagtcgacggaacactaggctctgctattactctaacaggatctctcgaaaacgcccaagcattaccatgtagagcttatctgcagcaaacttggccatcaagcggcaagcatatggtggagcttctcgacagcctacttacgaattcaagaagatacaaagaatgtacacttccggaccagacagttctcagcgtccagcgttcagggaccaaactcaccactttagtggacggtagccgtagtgctgttgcagagatcggagagcagctcgcttggatctctgctgctctcaggctctcgccaaacttcaaagctgatggaacttacatctcgtacaacgaagcccctagttcaatgatggtcgagagcatagactttgacgctattatgaactcaagacatattgtcgggtggtgtctgagagcgcaattctacacaggaacgaataaggctccctatcccgtcaaaaagccagatctcgatcctccaaatgaacactgttctcttcacggacttaggatacaatccggtaaagtgttcgaaaagcctcataatttcttgataggagataaagaaaaacctctacatatgcagtatgatgagggactacatcgccagaagcttggccgactcaaggaccaatacgtgaatctatgggatgtcgaaacacaaagaggatggctagtgaatggcattagcgccttattacatctcttacgagctcgtttggcagatatcttcgaggatgatgatcgcaggcccgagttagtagaaccaccagagacagaacggtatagtgctggctggcctttcgatttcctgaagagtcagagtaacatggtaatggagatctacgcctgcgaatatccaggagagaaccgcccattcaggatgcttgaccaaaccaaccttctataccaagcgttggaaattttgattgagtatcaaaagaaggtccggctttctgagaaacaagaatcgcgcaagtatctgtctggttgggcttttcacgatctggctgtggaaagctccaatctcgctccttatgcaattactctacccgaagtagggagaagttggattgactttgcaagagctatctctgcagtgactctatttggcagagacttcggcgagttgatctgctcgcatgatccttgtaaaacatggtcgagagtgccacagggatcattctttctcaccacaagcggaaaggtcctcaaaaaaatcatgagcagtgcagggaactcgtctggtcgaccttggaagcttagcgacaatatagtgtggcataaccccactgcatcatgcaattgcgccggacatcaagacagcaatcacgcagataacattcaggtcctgcttccgaaaggattctctaaagaagcgtttcaaaagccaagtttcgaagagccaaccgataactctgcgtttatctttgggttcaaccctcaatcaaggtggcactggcgagattttggggaccctatcaaatctacgtctttcacttcggcggatatgctcgagcacgtaagcttcgtgagtgacagtgcgattgggtctgagcccgcgatatctgacagctatgtgcggttaagatcatatgatgaatacactgtggcaatactatgccctttacctaaggaaggcgcagcaatgagtaccctgttcgaccactttcacggaaagcgagacggctacaccctcggctcgataggtgaacacaacgttgtcctcggttatttaccattagagtccggcaatactgcttctgcattggctgcgttaaagttgaaagaggagttcgagaacatcaaatttggtctattagttggcattggagggggtataccatcctctgcgaatgatgtacgtcttggtgatattgtcgtaggggtgcctcaaaacgaacaccccggcgtcattcaattaggacgcggaaaggacttggacaacaacacgttccaaaggactggctgtcttcctaaaccaccgcaacttctacgaagttcagtgtcgtctctcatcaatgatagacagctaggaagtaagcttagccagctcatcgagaaggtgagcaaatgtgagcgaaaatatcaatatccagggcagcaattcgatgtctttacatcagcttcttgcagtcactgcattggtcaatgtattgacaaagcaagtcacataccagtcaggccgccacgcccatcggacctgccggttgtccatcttgggctcatcggatctggtgatacagtcatcagagatgcaaggaagagagataaactagcaaggcaatatggcattatttgcgttgaaatggaagcagcaggtgtcttagacagcgaggtcccatttctcgttattcggggcatttccgactacgcagattctaaaaaaggtgacaaatggcatgactatgcatcgctgactgcggcggtgtttgccagaatactccttgataaggtaacaggagcaaatggtaccagcagaagcggttggaatgcttctaagaggaatcactcccagagcgattcgtctgatcgtaacgtgagaagaaggacctcgtaa

SEQ ID NO: 17348 - protein, 2132 aa, Muscodor strobelii
  misc_feature: SGI Peptide ID NO. 565792
  misc_feature (988)..(1020): Pfam Id: PF00023 Pfam Desc: Ankyrin repeat
  misc_feature (829)..(861): Pfam Id: PF00023 Pfam Desc: Ankyrin repeat
  misc_feature (862)..(894): Pfam Id: PF00023 Pfam Desc: Ankyrin repeat
  misc_feature (796)..(828): Pfam Id: PF00023 Pfam Desc: Ankyrin repeat
  misc_feature (730)..(762): Pfam Id: PF00023 Pfam Desc: Ankyrin repeat
  misc_feature (763)..(795): Pfam Id: PF00023 Pfam Desc: Ankyrin repeat
  misc_feature (895)..(927): Pfam Id: PF00023 Pfam Desc: Ankyrin repeat
  misc_feature (88)..(1041): NCBI GI: 70990006 Blast Desc: Pfs, NACHT and Ankyrin domain protein [Aspergillus fumigatus Af293] gi|66847484|gb|EAL87814.1| Pfs, NACHT and Ankyrin domain protein [Aspergillus fumigatus Af293]
  misc_feature (65)..(805): NCBI GI: 159124773 Blast Desc: Pfs, NB-ARC and Ankyrin domain protein [Aspergillus fumigatus A1163]
  misc_feature (65)..(805): NCBI GI: 70983830 Blast Desc: Pfs, NB-ARC and Ankyrin domain protein [Aspergillus fumigatus Af293] gi|66845067|gb|EAL85403.1| Pfs, NB-ARC and Ankyrin domain protein [Aspergillus fumigatus Af293]
  misc_feature (82)..(926): NCBI GI: 115433911 Blast Desc: conserved [Aspergillus terreus NIH2624] gi|114189944|gb|EAU31644.1| conserved [Aspergillus terreus NIH2624]
  misc_feature (88)..(882): NCBI GI: 169608167 Blast Desc: SNOG_07152 [Phaeosphaeria nodorum SN15] gi|111064683|gb|EAT85803.1| SNOG_07152 [Phaeosphaeria nodorum SN15]
  misc_feature (86)..(933): NCBI GI: 238496907 Blast Desc: Pfs, NACHT and Ankyrin domain protein [Aspergillus flavus NRRL3357] gi|220694569|gb|EED50913.1| Pfs, NACHT and Ankyrin domain protein [Aspergillus flavus NRRL3357]
  misc_feature (86)..(921): NCBI GI: 169774533 Blast Desc: [Aspergillus oryzae RIB40] gi|83769597|dbj|BAE59732.1| protein product [Aspergillus oryzae]
  misc_feature (88)..(1059): NCBI GI: 145254107 Blast Desc: An18g00540 [Aspergillus niger] gi|134084101|emb|CAK43130.1| protein product [Aspergillus niger]
  misc_feature (121)..(922): NCBI GI: 119473587 Blast Desc: Pfs, NACHT and Ankyrin domain protein [Neosartorya fischeri NRRL 181] gi|119406822|gb|EAW16772.1| Pfs, NACHT and Ankyrin domain protein [Neosartorya fischeri NRRL 181]
  misc_feature (257)..(1048): NCBI GI: 238483193 Blast Desc: ankyrin, [Aspergillus flavus NRRL3357] gi|220700885|gb|EED57223.1| ankyrin, [Aspergillus flavus NRRL3357]
MPNQTSEDRAIGHGTPNKRQRLIRETSIDTDSSADASHHHRDGNHKTNRFEGNRIQGSGNSNVGRDIIIPNSCSAASKSSEDGKAEILLESLRFEQMDARQMSVKEAIGRTCRWFLKSSCYANWSRKENRDIAHNFLWIKGKPGAGKSTLMKFLLKELQTQMRKAKDDDILLSFFFNARGVDLEKSTIGLYRSLLVQLLESRTDLQWVLNNIRIGHIWTIESLKQILEEALQSIDDTTIVCLIDALDECDEAQIRDMVSFFSDLGIAQERLRICFASRHYPQISIRTGLSLILEDQIGHGEDIANYLNTALHIRRDSSLADQVRGELQEKASGVFMWIVLVVDILNKEYDAGREHSLLKRIQQLPKGLHDLFLDILTRDEYNGQGLLLCIQWVLFARQPLSPKQLYFAMLSGLEPENLVQCHMDSLSEDSIRRYILHNSKGLAEFPQLKNPKIQFIHVLVRTFLLIDNGIGRIWPELSPNVLGQSHDTLKQCCSNYIDQYTVKDVNARPPKLITEKYPFLEYAKIGILQHAEQAETYGVSQRDFLSDFPLVRWIKLHNALQEHVSRHYSIRTSLFYILAEANLPALIRVHANGQSCFEVEEARYGLPILAACALKSSYTIHTILEVEAARISGFSFEQFCKNFDLMADKDFYAISGVDFNFNTKRDRWHQIVKFGSEKVSLFYLATKQFDIHSEKSEMGTILMSAVESGWSTFVEELIKRGANIQFVNAQGLTPLHMAAKTEWIDIVKIFIEYGSDVLAADEEGATPLHFATSTGNLSVIQLLIKNGSNILSAKKDGSTPLHIAIESDFLDVAQLLLQYGAEVWITDKNGLTALHRASITGSLKLFKLLIQNGADVAAEDNDGRTPLHEASRHGHTKIAKHLIEIGARLWAFDKYGAIPLHYAMSRSHVDVAQLLVLSGVEVFDIDGSTAKPLQAVLLCLLQNQRTDNGSTAPTSNWVSPFPATGDKYQDTVQILIDCGALVEIKDDAGRTPLSWAAEAGHVGIVLLLIQKGADINSRDNTGYTPLQWAEERGHTDTVELLQRFYVSSSRNEHLKAETSTDSGYGTLENEFKRIGPGNFSDSASSEEMASRFVDAIFDDDAETEYSTTTSVLGQDAYPVDELLRAGLFVTLLSSYTEGGVYDDEIQKDENFFQTWREGVDHTVDPDEPQNSEEIENKSGDEASEPSDSEDDDTETLRHYEEAVLASPAHDWLLASLGREIGLTRAEPCVMDEISQTILRSLCRTGKFTRKTALPNFQVSFELDWDLSTFLSEQFGREVDGTLGSAITLTGSLENAQALPCRAYLQQTWPSSGKHMVELLDSLLTNSRRYKECTLPDQTVLSVQRSGTKLTTLVDGSRSAVAEIGEQLAWISAALRLSPNFKADGTYISYNEAPSSMMVESIDFDAIMNSRHIVGWCLRAQFYTGTNKAPYPVKKPDLDPPNEHCSLHGLRIQSGKVFEKPHNFLIGDKEKPLHMQYDEGLHRQKLGRLKDQYVNLWDVETQRGWLVNGISALLHLLRARLADIFEDDDRRPELVEPPETERYSAGWPFDFLKSQSNMVMEIYACEYPGENRPFRMLDQTNLLYQALEILIEYQKKVRLSEKQESRKYLSGWAFHDLAVESSNLAPYAITLPEVGRSWIDFARAISAVTLFGRDFGELICSHDPCKTWSRVPQGSFFLTTSGKVLKKIMSSAGNSSGRPWKLSDNIVWHNPTASCNCAGHQDSNHADNIQVLLPKGFSKEAFQKPSFEEPTDNSAFIFGFNPQSRWHWRDFGDPIKSTSFTSADMLEHVSFVSDSAIGSEPAISDSYVRLRSYDEYTVAILCPLPKEGAAMSTLFDHFHGKRDGYTLGSIGEHNVVLGYLPLESGNTASALAALKLKEEFENIKFGLLVGIGGGIPSSANDVRLGDIVVGVPQNEHPGVIQLGRGKDLDNNTFQRTGCLPKPPQLLRSSVSSLINDRQLGSKLSQLIEKVSKCERKYQYPGQQFDVFTSASCSHCIGQCIDKASHIPVRPPRPSDLPVVHLGLIGSGDTVIRDARKRDKLARQYGIICVEMEAAGVLDSEVPFLVIRGISDYADSKKGDKWHDYASLTAAVFARILLDKVTGANGTSRSGWNASKRNHSQSDSSDRNVRRRTS

SEQ ID NO: 17349 - DNA, 1012 bp, Muscodor strobelii
  misc_feature: SGI EST ID NO. CUFF.40786.0
  misc_feature: Variant of the nucleotide sequence at SEQ ID NO 17347
ctcgggctacggcacactggagaacgagttcaaacggataggccctgggaattttagcgactcagcttcttctgaagaaatggcatcccgatttgtggacgcgattttcgatgatgacgctgagacggagtactcgacgacaacgagtgttttaggtcaagacgcctaccctgtggatgagttggttggcgctttgctgcgagggatagacatagagagcgtaaatgatcaagcgcggcatcgcgtgtcgatagttcttccgggacttttgaagttatttacggaacgattagcaaacatagcttcgagcaggactcttcgtgacgctgctatcttcatacacagaaggcggagcgagatctctctatctttcacccgctctcttgcacaagagcctcaaaaatcaccatctggtcatttcttagtatacgatgatgaaatccagaaggacgaaaattttttccaaacgtggcgagaaggcgtggatcacacagtcgatcctgatgagcctcaaaatagcgaagaaatcgaaaacaaaagcggtgacgaagcctcggagccgagcgactctgaagacgatgatactgaaaccctgaggcattatgaagaggcggttctagcgagtcctgctcacgattggctcctcgcaagtctgggaagagagatcggattaacgcgagcggagccatgcgttatggacgagattagccagactatcttaagatctctatgtcgtactgggaaattcactcgtaaaaccgcgcttcccaatttccaagtatcttttgagcttgactgggacctctctacgttcttgtccgaacaatttggaagggaagtcgacggaacactaggctctgctattactctaacaggatctctcgaaaacgcccaagcattaccatgtagagcttatctgcagcaaacttggccatcaagcggcaagcatatggtggagcttctcgacagcctacttacgaattcaagaagatacaaagaatgtacgtttggg

SEQ ID NO: 17350 - DNA, 1059 bp, Muscodor strobelii
  misc_feature: SGI cDNA ID NO. 565793
  misc_feature: Encodes the peptide sequence at SEQ ID NO 17351
atgataagctacatagactatacagtcgcaatagtctgcgctctcgaatttgagacgagcgcagtccgttatatgctggacgaacaacatcaaggtctaccgagagcgacaggagactccaacgactacattctcggcaagctatccggtcacaacaccgttattgcttatctccctggcacacaaggtaaaagtgcggctgcaattgttgcttcgaatcttgaacgaacattcccctgtattgcatggcggtttttgtcaggcattggtggaggtgtgcctgaggacaacgacatccgcttaggcgatgtcgttgtaagcatgcctgaagggcgacatggaggcgtagtacaatatgatctcgggaaagacgtcgatggtagcttccaattgaagggcttcctctctgcaccacccccggagttgagaagcgcggtcttaaagatgaagtcggaccattggcttcaagacaacaaagtcgaacagtacatctcctcgatgcttcagaaaggctctcgtctcaagatctatcaacggcctgttcctgctacagatgtactattctcatcggattatcagcacgttccaagtagaaagcgcgcatgcgagaactgtgatcaagagcagcatgcaattgagagacctgaccgagaggaaacgggctcaatgattcactacggactcattgcttcaggtgatagggtcatgagaagcgcgataaagaggaactccgaagtggagagtctgggcgataacattctttgtttcgagatggaagctgcagggctgtcaaccaacttgccctatcttgtcattcgcggcatttctgactacgcggactcacacaagaacgatgcttggcaacattacgcagccgcagcggccgccgcgtgcactaaagaggtcttgacttatctagttccaaacgcgccagctcgtgagaacgacagcgacaactcgaatgggccaggccggagtgccagtttcaagggaaatggcattcaacatcttggatccggtactttctctgtgggtagggatatcaatattggtagatga

SEQ ID NO: 17351 - protein, 352 aa, Muscodor strobelii
  misc_feature: SGI Peptide ID NO. 565793
  misc_feature (6)..(352): NCBI GI: 116180744 Blast Desc: CHGG_01000 [Chaetomium globosum CBS 148.51] gi|88185297|gb|EAQ92765.1| CHGG_01000 [Chaetomium globosum CBS 148.51]
  misc_feature (2)..(305): NCBI GI: 115397207 Blast Desc: conserved [Aspergillus terreus NIH2624] gi|114192386|gb|EAU34086.1| conserved [Aspergillus terreus NIH2624]
  misc_feature (2)..(317): NCBI GI: 67903248 Blast Desc: AN8611.2 [Aspergillus nidulans FGSC A4] gi|40741455|gb|EAA60645.1| AN8611.2 [Aspergillus nidulans FGSC A4] gi|259483172|tpe|CBF78331.1| TPA: conserved [Aspergillus FGSC
  misc_feature (2)..(303): NCBI GI: 119483782 Blast Desc: tetratricopeptide repeat domain protein [Neosartorya fischeri NRRL 181] gi|119409950|gb|EAW19897.1| tetratricopeptide repeat domain protein [Neosartorya fischeri NRRL 181]
  misc_feature (2)..(303): NCBI GI: 169780732 Blast Desc: [Aspergillus oryzae RIB40] gi|83773570|dbj|BAE63697.1| protein product [Aspergillus oryzae]
  misc_feature (6)..(314): NCBI GI: 169780220 Blast Desc: [Aspergillus oryzae RIB40] gi|83773314|dbj|BAE63441.1| protein product [Aspergillus oryzae]
  misc_feature (6)..(314): NCBI GI: 238505693 Blast Desc: Pfs domain protein [Aspergillus flavus NRRL3357] gi|220690172|gb|EED46522.1| Pfs domain protein [Aspergillus flavus NRRL3357]
  misc_feature (6)..(306): NCBI GI: 212529334 Blast Desc: ankyrin repeat-containing protein, [Penicillium marneffei ATCC 18224] gi|210074222|gb|EEA28309.1| ankyrin repeat-containing protein, [Penicillium marneffei ATCC 18224]
  misc_feature (2)..(303): NCBI GI: 115400745 Blast Desc: conserved [Aspergillus terreus NIH2624] gi|114191627|gb|EAU33327.1| conserved [Aspergillus terreus NIH2624]
  misc_feature (6)..(315): NCBI GI: 145236789 Blast Desc: An06g02210 [Aspergillus niger] gi|134075503|emb|CAK48064.1| protein product [Aspergillus niger]
MISYIDYTVAIVCALEFETSAVRYMLDEQHQGLPRATGDSNDYILGKLSGHNTVIAYLPGTQGKSAAAIVASNLERTFPCIAWRFLSGIGGGVPEDNDIRLGDVVVSMPEGRHGGVVQYDLGKDVDGSFQLKGFLSAPPPELRSAVLKMKSDHWLQDNKVEQYISSMLQKGSRLKIYQRPVPATDVLFSSDYQHVPSRKRACENCDQEQHAIERPDREETGSMIHYGLIASGDRVMRSAIKRNSEVESLGDNILCFEMEAAGLSTNLPYLVIRGISDYADSHKNDAWQHYAAAAAAACTKEVLTYLVPNAPARENDSDNSNGPGRSASFKGNGIQHLGSGTFSVGRDINIGR

SEQ ID NO: 17352 - DNA, 3019 bp, Muscodor strobelii
  misc_feature: SGI EST ID NO. CUFF.40800.0
  misc_feature: Variant of the nucleotide sequence at SEQ ID NO 17350
tcaaggtctagtcaggcaacgctagtcgttgtgttggatggcggtggctgtgcgcgagggaaatctgccttgccgatcaaaaaacacagttgatcttggtctcgcgtagatacaagtactgtttatcgacactgtctggcgttacgtgtgctttcttcaatcgacgctttcgcaaggacttcgagatgaggaaagaaaacggtttgtcacgaggcccgagagtcagagagctagccattgggcgccatgcagcccgacgagttaaggaagctgatgcaacggtacctcagctctgatgatttgtggctgtacgtgcatgatcaatacagccgaaattttgcttcatcctcagcatttcttcattcaaagtatgtcatcaggtccttattcaatctcgcatatcgtcagtctgcggctccgtgtctggtcatctgcggttgacggaactatacggacaaaatgataagctacatagactatacagtcgcaatagtctgcgctctcgaatttgagacgagcgcagtccgttatatgctggacgaacaacatcaaggtctaccgagagcgacaggagactccaacgactacattctcggcaagctatccggtcacaacaccgttattgcttatctccctggcacacaaggtaaaagtgcggctgcaattgttgcttcgaatcttgaacgaacattcccctgtattgcatggcggtttttgtcaggcattggtggaggtgtgcctgaggacaacgacatccgcttaggcgatgtcgttgtaagcatgcctgaagggcgacatggaggcgtagtacaatatgatctcgggaaagacgtcgatggtagcttccaattgaagggcttcctctctgcaccacccccggagttgagaagcgcggtcttaaagatgaagtcggaccattggcttcaagacaacaaagtcgaacagtacatctcctcgatgcttcagaaaggctctcgtctcaagatctatcaacggcctgttcctgctacagatgtactattctcatcggattatcagcacgttccaagtagaaagcgcgcatgcgagaactgtgatcaagagcagcatgcaattgagagacctgaccgagaggaaacgggctcaatgattcactacggactcattgcttcaggtgatagggtcatgagaagcgcgataaagaggaactccgaagtggagagtctgggcgataacattctttgtttcgagatggaagctgcagggctgtcaaccaacttgccctatcttgtcattcgcggcatttctgactacgcggactcacacaagaacgatgcttggcaacattacgcagccgcagcggccgccgcgtgcactaaagaggtcttgacttatctagttccaaacgcgccagctcgtgagaacgacagcgacaactcgaatgggccaggccggagtgccagtttcaagggaaatggcattcaacatcttggatccggtactttctctgtgggtagggatatcaatattggtagatgaagcgtatcattggcataacgtttcccgtacgccctgtccgaagtattggcgcatgatagggctttctcattacacagcgcgcactacaagtcagaaacgaatctaccgcgactgctaatcttgcaatggtctacgcaacgcatgagctaaccctcgcttttcatccataaggttgaatggagacgtgtgtcacatgacttcagatctctcggaggtaaacaccgtgacactgcaatgattacaaatagaacaacatagcaaagtcttatcatctggaaagcgataaaagatactcgatcaagatcaatgattgatagagtccgccgacacatagccgacatcttcgcccacggctatgctaaggtaatgtaacatgagtggctttaagagtaacgcatttcctcgcttcagggatggggctttggacaatcaaaagcctggcagtatcggggcaacgttaatgggcgttctacaacttacaagatgatgtgaaagcgcatcgaaatatgccaagcttaattgcttcttctgacaccgatacagagtcaggctgtcgatggacctcaagaaaggtcggaaaacgcgcaacattgcatataccagtaatgcacaaacattttcgcgacaccgtagccatacattgcgacgaccggacagaactacctactgcaatgccgtagagcatctggttgggtatgcgagggccgcagagaacttgactctaattggtcgccgggctggacctgtggcaccaattgatgaaccgagccgggaggcctcctcaacgagacagtgcagtagtatgcgtgcggcagaaatggaaaatccagtgggggccgtcttcactgaatgacgcagcctcgtcagtctatttcactcttgatggtgtgcatgagacgtgaagcggtcctggaagccgatgccgcttgtgcgagaagcgagagtaagccatgccattcaaccttggcgaagttaagccggcgtggtgtttcgaaacatgatcgaccagagcaccgcggcatacctggggtggatctgtggaggtcgagatccggtgtggtaggtcaacacgtcaaagtccattagttcggttggctcccagagttcggtaaaatttttcgtttccccgtcgcgctcctgccacgtgccgcgttcgcttctctgtcctctgccttttcagactctggtggtgttgtgtggggtatgaaacggtgtcgagacccctgcttttatacttgatccatcatgtcctcaggcggcaaggtgaaatattcgatgagtcgccatgccgctttttctctctcgtcttcaccataaagttgccaaagccacaggagcagacagacgggggaacgtggcagtcttataaagaagggtggagatctggcggcagtctcgcgtctgtttcgtgtcattgtcgcgtgctacggcgcattgccgacgcgtctccacagcgggatactaggcttgccagccactgatttttcagcactgcagctac

SEQ ID NO: 17353 - DNA, 1280 bp, Muscodor strobelii
  misc_feature: SGI cDNA ID NO. 565794
  misc_feature: Reduced expression when VOC is produced
  misc_feature: Encodes the peptide sequence at SEQ ID NO 17354
atggcctacgagccgcgtggggatcatggcggaggaggacatgaaggcggatttgtgagagctagaggacgtcgccctgtgaccgactatggctccacgatggcaagatggatgcgcgaccgcaaaccacgtttccaagactcatcttaccgggactcagaacggccaagcatgagcttcatcgttgatatgcttccacctttagcgagagtgaccaagcctgcagacacagtgcctacaaaacatctacactcatcacaaaacaagattaaacaccctgttaacgttgtacgatggacaccagaagggcgaaggctattaacagcatcaagtagtggcgagttcacactatggaatggaaccgggttcaattttgaaacgatcatgcaggcacatgatgttgcgattcgaacactagcatactctcacagcgacgactggctactctcagctgatcatgacggtattataaaatattggcagcccaacttcaataatgtccaagtcatacagggacattctgatcctattcgagatattgcgttcagcccgaacgattccaagttcgtcaccgcctcagacgactcaactctgaagatcttcgatttcgcattgggaagtgcagaatctacgctgcagggacacggctgggatgcaaagagctgtgactggcatccgactaaagggctcatagtatctggctcgaaagatcatctcgtgaaattatgggatcccaggacacagcgatgtctcacgaccctccatggacacaagaacaacataacgaagaccatgttcgaacgcgtgatgggcaattgccttgccacatcagcacgtgaccaaaccgcccgagtgtttgacatacgtatgatgcgagatgtctgtctaatcaggggccacgagaaagatatctcgacattgacatggcacccgatacattctaatctacttagtacaggaggcaacgacggctctttgaaccattacctcttggatgaaccaaatactccagccggccaggctgcgaatggcgccgtgtacgagagtgcagatccgaagatagccccagctcaaagcatctacccagcccacaagatcccctttgcacacgacttcgccatctggtccctcgactggcatccactaggtcatatcctagcatcgggctccaacgataggctcaccagattttggactcgtggccggcctggagatctagatgtgtctcaagacagataccatattggcgaagcggcagccgaagcacaaggcactgacgg

SEQ ID NO: 17354 - protein, 426 aa, Muscodor strobelii
  misc_feature: SGI Peptide ID NO. 565794
  misc_feature (164)..(202): Pfam Id: PF00400 Pfam Desc: WD domain, G-beta repeat
  misc_feature (206)..(244): Pfam Id: PF00400 Pfam Desc: WD domain, G-beta repeat
  misc_feature (361)..(399): Pfam Id: PF00400 Pfam Desc: WD domain, G-beta repeat
  misc_feature (248)..(287): Pfam Id: PF00400 Pfam Desc: WD domain, G-beta repeat
  misc_feature (123)..(161): Pfam Id: PF00400 Pfam Desc: WD domain, G-beta repeat
  misc_feature (11)..(425): NCBI GI: 156032985 Blast Desc: SS1G_13568 [Sclerotinia sclerotiorum 1980] gi|154698971|gb|EDN98709.1| SS1G_13568 [Sclerotinia sclerotiorum 1980]
  misc_feature (1)..(425): NCBI GI: 46124619 Blast Desc: FG06687.1 [Gibberella zeae PH-1] gi|126330618|sp|Q4I7X1.1|PFS2_GIBZE RecName: Full=Polyadenylation factor subunit 2
  misc_feature (20)..(425): NCBI GI: 116192049 Blast Desc: CHGG_05742 [Chaetomium globosum CBS 148.51] gi|88181655|gb|EAQ89123.1| CHGG_05742 [Chaetomium globosum CBS 148.51]
  misc_feature (20)..(425): NCBI GI: 164428768 Blast Desc: protein PFS2 [Neurospora crassa OR74A] gi|189031712|sp|Q7RY68.2|PFS2_NEUCR RecName: Full=Polyadenylation factor subunit 2 gi|157072271|gb|EAA27788.2| protein PFS2 crassa
  misc_feature (26)..(425): NCBI GI: 171686800 Blast Desc: protein product [Podospora anserina] gi|170943361|emb|CAP69014.1| protein product [Podospora anserina]
  misc_feature (17)..(425): NCBI GI: 256732822 Blast Desc: NECHADRAFT_38892 [Nectria haematococca mpVI 77-13-4]
  misc_feature (1)..(425): NCBI GI: 261360249 Blast Desc: polyadenylation factor subunit 2 [Verticillium albo-atrum VaMs.102]
  misc_feature (1)..(425): NCBI GI: 159129264 Blast Desc: WD repeat protein [Aspergillus fumigatus A1163]
  misc_feature (14)..(425): NCBI GI: 115442984 Blast Desc: conserved [Aspergillus terreus NIH2624] gi|114188168|gb|EAU29868.1| conserved [Aspergillus terreus NIH2624]
  misc_feature (14)..(425): NCBI GI: 169783944 Blast Desc: [Aspergillus oryzae RIB40] gi|110816549|sp|Q2TZG4.1|PFS2_ASPOR RecName: Full=Polyadenylation factor subunit 2 gi|83775178|dbj|BAE65301.1| protein product
  misc_feature (94)..(326): SWISSPROT Homolog: EC 2.7.11.1 Non-specific serine/threonine protein kinase
  misc_feature: Useful for introducing or modulating the production of volatile compounds
MAYEPRGDHGGGGHEGGFVRARGRRPVTDYGSTMARWMRDRKPRFQDSSYRDSERPSMSFIVDMLPPLARVTKPADTVPTKHLHSSQNKIKHPVNVVRWTPEGRRLLTASSSGEFTLWNGTGFNFETIMQAHDVAIRTLAYSHSDDWLLSADHDGIIKYWQPNFNNVQVIQGHSDPIRDIAFSPNDSKFVTASDDSTLKIFDFALGSAESTLQGHGWDAKSCDWHPTKGLIVSGSKDHLVKLWDPRTQRCLTTLHGHKNNITKTMFERVMGNCLATSARDQTARVFDIRMMRDVCLIRGHEKDISTLTWHPIHSNLLSTGGNDGSLNHYLLDEPNTPAGQAANGAVYESADPKIAPAQSIYPAHKIPFAHDFAIWSLDWHPLGHILASGSNDRLTRFWTRGRPGDLDVSQDRYHIGEAAAEAQGTD

SEQ ID NO: 17355 - DNA, 1579 bp, Muscodor strobelii
  misc_feature: SGI EST ID NO. CUFF.40807.0
  misc_feature: Variant of the nucleotide sequence at SEQ ID NO 17353
cacggaggcagtgacccactcacccgagctttggaacttctagtgacttcaggtcccactaacccatgcacgctgagagacccactaaaacatcgcaagagcaccatcttcaactcgtgctaagggcgcatgcaacaccaagtatctcatgacctcgtgatctctaagaatctactgtatctcagcaggttgaggcgattgcgccgcctctttagaattctatacgacaaccgaaacctcggggctgaccacacatttgttctcttgagactgaagaaaggagacccgcctcaccagccgcgatggcctacgagccgcgtggggatcatggcggaggaggacatgaaggcggatttgtgagagctagaggacgtcgccctgtgaccgactatggctccacgatggcaagatggatgcgcgaccgcaaaccacgtttccaagactcatcttaccgggactcagaacggccaagcatgagcttcatcgttgatatgcttccacctttagcgagagtgaccaagcctgcagacacagtgcctacaaaacatctacactcatcacaaaacaagattaaacaccctgttaacgttgtacgatggacaccagaagggcgaaggctattaacagcatcaagtagtggcgagttcacactatggaatggaaccgggttcaattttgaaacgatcatgcaggcacatgatgttgcgattcgaacactagcatactctcacagcgacgactggctactctcagctgatcatgacggtattataaaatattggcagcccaacttcaataatgtccaagtcatacagggacattctgatcctattcgagatattgcgttcagcccgaacgattccaagttcgtcaccgcctcagacgactcaactctgaagatcttcgatttcgcattgggaagtgcagaatctacgctgcagggacacggctgggatgcaaagagctgtgactggcatccgactaaagggctcatagtatctggctcgaaagatcatctcgtgaaattatgggatcccaggacacagcgatgtctcacgaccctccatggacacaagaacaacataacgaagaccatgttcgaacgcgtgatgggcaattgccttgccacatcagcacgtgaccaaaccgcccgagtgtttgacatacgtatgatgcgagatgtctgtctaatcaggggccacgagaaagatatctcgacattgacatggcacccgatacattctaatctacttagtacaggaggcaacgacggctctttgaaccattacctcttggatgaaccaaatactccagccggccaggctgcgaatggcgccgtgtacgagagtgcagatccgaagatagccccagctcaaagcatctacccagcccacaagatcccctttgcacacgacttcgccatctggtccctcgactggcatccactaggtcatatcctagcatcgggctccaacgataggctcaccagattttggactcgtggccggcctggagatctagatgtgtctcaagacagataccatattggcgaagcggcagccgaagcacaaggcactga

SEQ ID NO: 17356 - DNA, 894 bp, Muscodor strobelii
  misc_feature: SGI cDNA ID NO. 565795
  misc_feature: Encodes the peptide sequence at SEQ ID NO 17357
atgaaggtcatctcttatgccctcacaaaccgagacttgcgccatgcctatctccatcctgtgaaaggtgaactcgccgcattgcccgagatatacgcctcttgtccttaccccgagaacattaccatgagcaatctaacctacttttggtgggcaccgacgctcgtctaccagccagtctatccccgaacggagaacattcggtggatttttgtgctcaaacgacttggcgaggtggcttgtctcagcgtattcatctggttttgcagcgcccaatacgcggcgccggtcctttggaactctctcgacaagatgcactcccttgaccttgtgtccatagttgagagactcctgaagttgtcgactatctctctcatcatttggcttgctggcttctttgctcttttccagtctgcgctcaatgctttggcggaagtcatgcggtttggagaccgttcattctatgacgattggtggaattcgggagggctaggagaatactggcgcacgtggaacaagcctgtctatcagttcatgagaagacatattttctcgccgctagttggcagaggatataaagtgacgactgccagcattatcgtttttcttgtctcggcgatactacacgagcttctggttggtgtgccgactaaaaacatcatcggcgtggcattctttggcatgctcattcaaattcccttgatattagccacgagaccattggagcagatgaagagtgcaaatggcaagttgattggcaacaccatcttttgggtctctttcacgattttagggcagccatttgcagcattgatttatttctatgcatggcaggccaaatatggatctgtttcgaggagactggcggcgggtgaaccaattgtcatgagctag

SEQ ID NO: 17357 - protein, 297 aa, Muscodor strobelii
  misc_feature: SGI Peptide ID NO. 565795
  misc_feature (13)..(274): Pfam Id: PF03062 Pfam Desc: MBOAT family
  misc_feature (112)..(211): Pfam Id: PF03062 Pfam Desc: MBOAT family
  misc_feature (1)..(287): NCBI GI: 171686798 Blast Desc: protein product [Podospora anserina] gi|170943360|emb|CAP69013.1| protein product [Podospora anserina]
  misc_feature (1)..(286): NCBI GI: 85082953 Blast Desc: NCU00035 [Neurospora crassa OR74A] gi|28918105|gb|EAA27786.1| NCU00035 [Neurospora crassa OR74A]
  misc_feature (1)..(286): NCBI GI: 116192051 Blast Desc: CHGG_05743 [Chaetomium globosum CBS 148.51] gi|88181656|gb|EAQ89124.1| CHGG_05743 [Chaetomium globosum CBS 148.51]
  misc_feature (1)..(286): NCBI GI: 39939828 Blast Desc: MGG_05326 [Magnaporthe grisea 70-15] gi|145010387|gb|EDJ95043.1| MGG_05326 [Magnaporthe grisea 70-15]
  misc_feature (1)..(289): NCBI GI: 256733280 Blast Desc: [Nectria haematococca mpVI 77-13-4]
  misc_feature (1)..(285): NCBI GI: 46124621 Blast Desc: FG06688.1 [Gibberella zeae PH-1]
  misc_feature (1)..(288): NCBI GI: 154301501 Blast Desc: BC1G_10420 [Botryotinia fuckeliana B05.10] gi|150856160|gb|EDN31352.1| BC1G_10420 [Botryotinia fuckeliana B05.10]
  misc_feature (1)..(287): NCBI GI: 156032983 Blast Desc: SS1G_13567 [Sclerotinia sclerotiorum 1980] gi|154698970|gb|EDN98708.1| SS1G_13567 [Sclerotinia sclerotiorum 1980]
  misc_feature (28)..(293): NCBI GI: 261360248 Blast Desc: diacylglycerol O-acyltransferase [Verticillium albo-atrum VaMs.102]
  misc_feature (1)..(283): NCBI GI: 225678886 Blast Desc: diacylglycerol acyltransferase DGAT1 [Paracoccidioides brasiliensis Pb03]
  misc_feature (1)..(274): SWISSPROT Homolog: EC 2.3.1.20 Diacylglycerol O-acyltransferase
MKVISYALTNRDLRHAYLHPVKGELAALPEIYASCPYPENITMSNLTYFWWAPTLVYQPVYPRTENIRWIFVLKRLGEVACLSVFIWFCSAQYAAPVLWNSLDKMHSLDLVSIVERLLKLSTISLIIWLAGFFALFQSALNALAEVMRFGDRSFYDDWWNSGGLGEYWRTWNKPVYQFMRRHIFSPLVGRGYKVTTASIIVFLVSAILHELLVGVPTKNIIGVAFFGMLIQIPLILATRPLEQMKSANGKLIGNTIFWVSFTILGQPFAALIYFYAWQAKYGSVSRRLAAGEPIVMS

SEQ ID NO: 17358 - DNA, 2805 bp, Muscodor strobelii
  misc_feature: SGI EST ID NO. CUFF.40847.1
  misc_feature: Variant of the nucleotide sequence at SEQ ID NO 17356
cgagctcagagagttttctgccaatgttacaaaaactcctcacctcggaattaattccaggcgaccttgaaattttacgccactgcatctgagatgcaaaacactgctgtcccaccaacatcggccctatgactaaatgtcacattcctctcgaactaacaacgtctaagccgcgtcaagaacaatcaacaatgaatccgcaaatcagcagtttctactttgaatacaattgtataggttctgaaatccagagcaatgttagaagtttatagtctatagtctagttatctggtcctcatgcaatacgagtcaggacagagccgcttttaaaggttgaacggtctgctttacttgcattgtgctttgaccggggtaaatttggtatgccaacatgcaggtcgtatcgaatgccagagtcgacctgcatgcagatcggccaatcggcatcacccaaaggtccatgagatacttattattctgctacatcgactgatatcgagccaaaaacgcattcttgcaccagactaccttgtcctagtcttctcaggtattgcagctaaaaggtgaacaccctaggtttgccgtagcttgttgatgtttgtcgcgatccccgtggccgtcgtggattagatttctcaacccctccatgccagcctgctgctcaccttttcttctcttacaccgcgttaaacgcacctttggagagtttctgggaattgggaattgagaattggcttcaacgacacgataattcgtaatccccttaactcatcagctccgtgttctaggcttccttgaccttcttatctattcgacttcaggtgcgaacgggagctcgaactcaatcgcctaaagcgatctacccagtgtaaacttaatcctcgttctgagggacgacccgatccccttcgtcacctccggccgaatttggttctttcaaaggctcccataccttgctgctccatcgcagacattcaattgctgtcaatgtacaatattttgagataccagatagctcggtagctcttgtaaccccattggcgaaagtctttcttccgtcgagcgtcacctcgacgtcatcgcaatcatggattcggccaccagcaccagcttggaaacaaccacaacatcccccgcttccattcgacggaagggcgagacgacacaattatcgtctggagatagccaaaactcagcgaagagcaatggaaatggaccatcattcattattaggagatatcgccatgtcgcagctatccattccaaagctcgcccgtcgactttgagccatgacacgcaagtttccgcgagttttgttgggttccgaaatctcatggtcattgtattgggtaaaaatccgcacacatcttcttcgacggctattctaacctagagcagtggtgggaaatctgagactcgtaattgagaacatgcaaaagtatggcaatctaatatgtataacgtgccacgatttcagacaacgagacgtcttagtcggcctactcttatacatcctcgtcccttgccatcttttcattgcatacctttttgaatggcttgccgcaaggaaagcacggtcttcgagggcactggcgactgctagaggcggttcgacaagcccgacagtagaccaacaagctgtatttcagtcgacatggtcgagcattcgaagagctcacttactaaacgcaacattggctcttgcagtcaacagctgggccgtttactatcatatccatcacccattaattggtaccataacagaattgcacataatcatcgtttacatgaaggtcatctcttatgccctcacaaaccgagacttgcgccatgcctatctccatcctgtgaaaggtgaactcgccgcattgcccgagatatacgcctcttgtccttaccccgagaacattaccatgagcaatctaacctacttttggtgggcaccgacgctcgtctaccagccagtctatccccgaacggagaacattcggtggatttttgtgctcaaacgacttggcgaggtggcttgtctcagcgtattcatctggttttgcagcgcccaatacgcggcgccggtcctttggaactctctcgacaagatgcactcccttgaccttgtgtccatagttgagagactcctgaagttgtcgactatctctctcatcatttggcttgctggcttctttgctcttttccagtctgcgctcaatgctttggcggaagtcatgcggtttggagaccgttcattctatgacgattggtggaattcgggagggctaggagaatactggcgcacgtggaacaagcctgtctatcagttcatgagaagacatattttctcgccgctagttggcagaggatataaagtgacgactgccagcattatcgtttttcttgtctcggcgatactacacgagcttctggttggtgtgccgactaaaaacatcatcggcgtggcattctttggcatgctcattcaaattcccttgatattagccacgagaccattggagcagatgaagagtgcaaatggcaagttgattggcaacaccatcttttgggtctctttcacgattttagggcagccatttgcagcattgatttatttctatgcatggcaggccaaatatggatctgtttcgaggagactggcggcgggtgaaccaattgtcatgagctagaagaaatgacggacgccactctgccttgctgttgagaaactgtcaaaattatagaatcttatgtgcttatgtaacaaaattagaatgtagtcgcaagaatccaagcatcattgtgaccatactg

SEQ ID NO: 17359 - DNA, 1818 bp, Muscodor strobelii
  misc_feature: SGI cDNA ID NO. 565796
  misc_feature: Encodes the peptide sequence at SEQ ID NO 17360
atggcgccctcaacacgccgccaacccttcctctcccgcatcctccccttcaacccatcgacaacgcccctccaagccgcgacatatctcctcggaatctccctattcagcatatccttcctcgtgttcctgaacagcgccatatccttcgtcatcacagacctgatcggggtcaagacgggtgtaggggatatagtagggacgctcggattcgtggacgaaatcgttgcgctgatcgcctgtccactatggggattgctgagcgatcgactgggggtgagatgggttgcggttttgggatatgcggttattgcgattagtcttgtggtttttgtgcaggctagggctgtgtatcctagtcttgtgcttgcgaggatcctttttgcggttggtgctacggcggcggcgactatggttactgctattttgccggtgcttactgatgatgagggggctaaggaggaacgtgaggaggtagagggggaagaaggggagggtggtgaggatgggtcgatgcctagtcagagtcatcagccgcgggggagtgttgcgcatagctttgagagcgatgcgactattacgcctgagaacttcagtcgttctatctctgcgtctgagacgagagattttgcggcacggggttgccggattctgaataatgtcgatccctctcctgcgaatgcaaagggccgcaaaccgtctacgctcgctggatatgttgggttattcacgggctgtggtgcgctcgtcgctttggtcttattcctgcctctccctacgcaattcagtaagaaagagggtgtcacactcgcagaagctgtaacagatagtttctacgtcgtggccgtcgttgcgctcttcgttgcgatattcgtgttctttggacttcggggattgaaaggggaggaagataaaggctggaggatgctcttcggtctcaagcaacattcttcttcacaatcctcccagcaacatgacacgaatgcgaaatcaacacgccctttaccatacagacacctcctcatctcatccctaaagctcggcgcaacagatccgcatattgcgctcggctacctcggcggtttcgtcgcgcgcgccagcacagttgcgatatccctatttcttccgttgtatgttaacgagtatttcatgtctcagaggttctgccagggatcgccacatgatccgagcccggagcttaagaaggaatgccgggctgcttatgtcctcgcctcggcgctgagcggtgttgcgcaacttattgcgttgttgtgcgctcctatctttggatacgtgagtgcgagaaggtggaagggcgttaatatgggtgttgctgttgcagccagtttgggcgtcgtggggtactgcgtctttcctagtctgacgagcccggaattcaaagatgttgagggtaggggaggtagtccggccgtgttcgcggttgttgccctgctgggcatcagtcagattggcgcgattgtctgctcgcttggatcgcttggaaggggagttctcggcgaagatgtggttatcggttcatcggccggagatgagggagagaacgaagcactgttgggaacaggcgcaagagagaagaagatttcacgtgtccagctcaagggctcagttgcgggtgtctactcatggtgtggtggtgctgcgatcctactcctcacgaaactcggaggttatctcttcgacgtcttgtcgacaggggcgccgttctatatgatggctgtatttaatgctgtcttgcttgttgcgagcctaggcattgattttggtaggattgtgaaggatactaggagaagtgcatga

SEQ ID NO: 17360 - protein, 605 aa, Muscodor strobelii
  misc_feature: SGI Peptide ID NO. 565796
  misc_feature (35)..(559): Pfam Id: PF07690 Pfam Desc: Major Facilitator Superfamily
  misc_feature (10)..(603): NCBI GI: 261360266 Blast Desc: conserved [Verticillium albo-atrum VaMs.102]
  misc_feature (11)..(596): NCBI GI: 46124583 Blast Desc: FG06669.1 [Gibberella zeae PH-1]
  misc_feature (15)..(602): NCBI GI: 39939862 Blast Desc: MGG_05309 [Magnaporthe grisea 70-15] gi|145010405|gb|EDJ95061.1| MGG_05309 [Magnaporthe grisea 70-15]
  misc_feature (8)..(596): NCBI GI: 256732832 Blast Desc: [Nectria haematococca mpVI 77-13-4]
  misc_feature (1)..(603): NCBI GI: 164428954 Blast Desc: NCU00226 [Neurospora crassa OR74A] gi|157072350|gb|EAA28461.2| conserved [Neurospora crassa OR74A]
  misc_feature (24)..(604): NCBI GI: 242799277 Blast Desc: MFS transporter, [Talaromyces stipitatus ATCC 10500] gi|218716690|gb|EED16111.1| MFS transporter, [Talaromyces stipitatus ATCC 10500]
  misc_feature (20)..(593): NCBI GI: 189202816 Blast Desc: conserved [Pyrenophora tritici-repentis Pt-1C-BFP] gi|187984843|gb|EDU50331.1| conserved [Pyrenophora tritici-repentis Pt-1C-BFP]
  misc_feature (70)..(596): NCBI GI: 156051408 Blast Desc: SS1G_07111 [Sclerotinia sclerotiorum 1980] gi|154704889|gb|EDO04628.1| SS1G_07111 [Sclerotinia sclerotiorum 1980]
  misc_feature (15)..(592): NCBI GI: 169594968 Blast Desc: SNOG_00216 [Phaeosphaeria nodorum SN15] gi|160700983|gb|EAT91711.2| SNOG_00216 [Phaeosphaeria nodorum SN15]
  misc_feature (4)..(591): NCBI GI: 212541250 Blast Desc: MFS transporter, [Penicillium marneffei ATCC 18224] gi|210068079|gb|EEA22171.1| MFS transporter, [Penicillium marneffei ATCC 18224]
MAPSTRRQPFLSRILPFNPSTTPLQAATYLLGISLFSISFLVFLNSAISFVITDLIGVKTGVGDIVGTLGFVDEIVALIACPLWGLLSDRLGVRWVAVLGYAVIAISLVVFVQARAVYPSLVLARILFAVGATAAATMVTAILPVLTDDEGAKEEREEVEGEEGEGGEDGSMPSQSHQPRGSVAHSFESDATITPENFSRSISASETRDFAARGCRILNNVDPSPANAKGRKPSTLAGYVGLFTGCGALVALVLFLPLPTQFSKKEGVTLAEAVTDSFYVVAVVALFVAIFVFFGLRGLKGEEDKGWRMLFGLKQHSSSQSSQQHDTNAKSTRPLPYRHLLISSLKLGATDPHIALGYLGGFVARASTVAISLFLPLYVNEYFMSQRFCQGSPHDPSPELKKECRAAYVLASALSGVAQLIALLCAPIFGYVSARRWKGVNMGVAVAASLGVVGYCVFPSLTSPEFKDVEGRGGSPAVFAVVALLGISQIGAIVCSLGSLGRGVLGEDVVIGSSAGDEGENEALLGTGAREKKISRVQLKGSVAGVYSWCGGAAILLLTKLGGYLFDVLSTGAPFYMMAVFNAVLLVASLGIDFGRIVKDTRRSA

SEQ ID NO: 17361 - DNA, 2370 bp, Muscodor strobelii
  misc_feature: SGI EST ID NO. CUFF.40828.0
  misc_feature: Variant of the nucleotide sequence at SEQ ID NO 17359
acctcgattagtgacctgtgtaatattaacttttcctgtccgttattacatataatagtccatcatatatccatctactcttcttcttgacccccatacctggcaagctctttgatcaatgcgacttgtcaattgcaagatgcatacttgaagatgtgaacaccccactacgactgctagactgacggaccggatatcgcggtgctccgacttcaactacgtattcgatctccattgcgcgcgcgtgccgaggccagtcgcaacacgacctccgcgaacaattgttccccctccggcgtcgccaacgacaactgataatcccatcgacggttgagtgcgaccaggcaaaacgaaaccaaccagcatggcgccctcaacacgccgccaacccttcctctcccgcatcctccccttcaacccatcgacaacgcccctccaagccgcgacatatctcctcggaatctccctattcagcatatccttcctcgtgttcctgaacagcgccatatccttcgtcatcacagacctgatcggggtcaagacgggtgtaggggatatagtagggacgctcggattcgtggacgaaatcgttgcgctgatcgcctgtccactatggggattgctgagcgatcgactgggggtgagatgggttgcggttttgggatatgcggttattgcgattagtcttgtggtttttgtgcaggctagggctgtgtatcctagtcttgtgcttgcgaggatcctttttgcggttggtgctacggcggcggcgactatggttactgctattttgccggtgcttactgatgatgagggggctaaggaggaacgtgaggaggtagagggggaagaaggggagggtggtgaggatgggtcgatgcctagtcagagtcatcagccgcgggggagtgttgcgcatagctttgagagcgatgcgactattacgcctgagaacttcagtcgttctatctctgcgtctgagacgagagattttgcggcacggggttgccggattctgaataatgtcgatccctctcctgcgaatgcaaagggccgcaaaccgtctacgctcgctggatatgttgggttattcacgggctgtggtgcgctcgtcgctttggtcttattcctgcctctccctacgcaattcagtaagaaagagggtgtcacactcgcagaagctgtaacagatagtttctacgtcgtggccgtcgttgcgctcttcgttgcgatattcgtgttctttggacttcggggattgaaaggggaggaagataaaggctggaggatgctcttcggtctcaagcaacattcttcttcacaatcctcccagcaacatgacacgaatgcgaaatcaacacgccctttaccatacagacacctcctcatctcatccctaaagctcggcgcaacagatccgcatattgcgctcggctacctcggcggtttcgtcgcgcgcgccagcacagttgcgatatccctatttcttccgttgtatgttaacgagtatttcatgtctcagaggttctgccagggatcgccacatgatccgagcccggagcttaagaaggaatgccgggctgcttatgtcctcgcctcggcgctgagcggtgttgcgcaacttattgcgttgttgtgcgctcctatctttggatacgtgagtgcgagaaggtggaagggcgttaatatgggtgttgctgttgcagccagtttgggcgtcgtggggtactgcgtctttcctagtctgacgagcccggaattcaaagatgttgagggtaggggaggtagtccggccgtgttcgcggttgttgccctgctgggcatcagtcagattggcgcgattgtctgctcgcttggatcgcttggaaggggagttctcggcgaagatgtggttatcggttcatcggccggagatgagggagagaacgaagcactgttgggaacaggcgcaagagagaagaagatttcacgtgtccagctcaagggctcagttgcgggtgtctactcatggtgtggtggtgctgcgatcctactcctcacgaaactcggaggttatctcttcgacgtcttgtcgacaggggcgccgttctatatgatggctgtatttaatgctgtcttgcttgttgcgagcctaggcattgattttggtaggattgtgaaggatactaggagaagtgcatgagtaaaggttgttcatataccagacggcaaatcactgtgtataccttatattctctatgtttaatatcggagtatatatgggtttgacattcgtctctttcttgcgtaaacaaccgtgcaggtgttgttattgcgtagatgtcagtagtgggcaggtgctgaggtacatagggctcgacaatgtagtgg

SEQ ID NO: 17362 - DNA, 894 bp, Muscodor strobelii
  misc_feature: SGI cDNA ID NO. 565797
  misc_feature: Encodes the peptide sequence at SEQ ID NO 17363
atgctcttcggtctcaagcaacattcttcttcacaatcctcccagcaacatgacacgaatgcgaaatcaacacgccctttaccatacagacacctcctcatctcatccctaaagctcggcgcaacagatccgcatattgcgctcggctacctcggcggtttcgtcgcgcgcgccagcacagttgcgatatccctatttcttccgttgtatgttaacgagtatttcatgtctcagaggttctgccagggatcgccacatgatccgagcccggagcttaagaaggaatgccgggctgcttatgtcctcgcctcggcgctgagcggtgttgcgcaacttattgcgttgttgtgcgctcctatctttggatacgtgagtgcgagaaggtggaagggcgttaatatgggtgttgctgttgcagccagtttgggcgtcgtggggtactgcgtctttcctagtctgacgagcccggaattcaaagatgttgagggtaggggaggtagtccggccgtgttcgcggttgttgccctgctgggcatcagtcagattggcgcgattgtctgctcgcttggatcgcttggaaggggagttctcggcgaagatgtggttatcggttcatcggccggagatgagggagagaacgaagcactgttgggaacaggcgcaagagagaagaagatttcacgtgtccagctcaagggctcagttgcgggtgtctactcatggtgtggtggtgctgcgatcctactcctcacgaaactcggaggttatctcttcgacgtcttgtcgacaggggcgccgttctatatgatggctgtatttaatgctgtcttgcttgttgcgagcctaggcattgattttggtaggattgtgaaggatactaggagaagtgcatga

SEQ ID NO: 17363 - protein, 297 aa, Muscodor strobelii
  misc_feature: SGI Peptide ID NO. 565797
  misc_feature (1)..(295): NCBI GI: 261360266 Blast Desc: conserved [Verticillium albo-atrum VaMs.102]
  misc_feature (25)..(294): NCBI GI: 39939862 Blast Desc: MGG_05309 [Magnaporthe grisea 70-15] gi|145010405|gb|EDJ95061.1| MGG_05309 [Magnaporthe grisea 70-15]
  misc_feature (2)..(295): NCBI GI: 164428954 Blast Desc: NCU00226 [Neurospora crassa OR74A] gi|157072350|gb|EAA28461.2| conserved [Neurospora crassa OR74A]
  misc_feature (1)..(288): NCBI GI: 46124583 Blast Desc: FG06669.1 [Gibberella zeae PH-1]
  misc_feature (52)..(295): NCBI GI: 116208192 Blast Desc: CHGG_03389 [Chaetomium globosum CBS 148.51] gi|88183986|gb|EAQ91454.1| CHGG_03389 [Chaetomium globosum CBS 148.51]
  misc_feature (1)..(288): NCBI GI: 256732832 Blast Desc: [Nectria haematococca mpVI 77-13-4]
  misc_feature (8)..(283): NCBI GI: 156051408 Blast Desc: SS1G_07111 [Sclerotinia sclerotiorum 1980] gi|154704889|gb|EDO04628.1| SS1G_07111 [Sclerotinia sclerotiorum 1980]
  misc_feature (21)..(213): NCBI GI: 171685598 Blast Desc: protein product [Podospora anserina] gi|170942760|emb|CAP68413.1| protein product [Podospora anserina]
  misc_feature (4)..(284): NCBI GI: 169594968 Blast Desc: SNOG_00216 [Phaeosphaeria nodorum SN15] gi|160700983|gb|EAT91711.2| SNOG_00216 [Phaeosphaeria nodorum SN15]
  misc_feature (6)..(290): NCBI GI: 121719793 Blast Desc: MFS transporter, [Aspergillus clavatus NRRL 1] gi|119404807|gb|EAW15169.1| MFS transporter, [Aspergillus clavatus NRRL 1]
MLFGLKQHSSSQSSQQHDTNAKSTRPLPYRHLLISSLKLGATDPHIALGYLGGFVARASTVAISLFLPLYVNEYFMSQRFCQGSPHDPSPELKKECRAAYVLASALSGVAQLIALLCAPIFGYVSARRWKGVNMGVAVAASLGVVGYCVFPSLTSPEFKDVEGRGGSPAVFAVVALLGISQIGAIVCSLGSLGRGVLGEDVVIGSSAGDEGENEALLGTGAREKKISRVQLKGSVAGVYSWCGGAAILLLTKLGGYLFDVLSTGAPFYMMAVFNAVLLVASLGIDFGRIVKDTRRSA

SEQ ID NO: 17364 - DNA, 2370 bp, Muscodor strobelii; identical to SEQ ID NO: 17361
  misc_feature: SGI EST ID NO. CUFF.40828.0
  misc_feature: Variant of the nucleotide sequence at SEQ ID NO 17362

SEQ ID NO: 17365 - DNA, 2085 bp, Muscodor strobelii
  misc_feature: SGI cDNA ID NO. 565798
  misc_feature: Reduced expression when VOC is produced
  misc_feature: Encodes the peptide sequence at SEQ ID NO 17366
atgaagggtatcttcacctccaaaaaatctcccaagaagcagccctctggcgacgaccttgagcctccgccagcgtcgccgccaccctacggcgcacacacttcttcatcccaacaccgccccgcaccctcccattcagcctctctgcggtcggagtcttcatcacccctcaaacccccgaccggcgcctccaggtctcccgtcaagaaagattccccggtcaagaaatctacccgccccgcacccgcatcgcctacttctcacaaccagcgagagccacccaaggcgaaaccctcgaggtcttttggcagctcctcacggcgcaacaagcacgaccctaacactcatcccctcaatcttccgccagaggagcgtaagcgcatctctgcccagtacaacatgagtcagcggaactcattcgacaagatggatgtcgacaaggaaaactcggcagagcctccatcctctcctccgccggctccccagcagcagagctcattcgctgtccccatcagctcacctacaaacggcaccaagcctacgaccaacggcgaaggcccagctccccctccacaccggtctaacccttccagccctgtcgccgacgatgcagagcaagctgagggattcaagtctctggggaataaatccttcaaagagaagcaatataagaaggccattgctgaatatactaaggccattgagttgatgccggactccgcaacctatttgagtaatcgtgctgcagcatacatgtcagacgcacaatacgaaaaggccttggatgattgctcaagagctgttgatcttgaccctcaaaatgctaaatttctgctgcgtcttgctcgaatttacaccaacttgggtcgtccagatgaagccatgacgacgttcagccgaattcaacctcctgcctcagcaaaagacatggctgccgccagagaaatgcaacaccatttcagagcagctcaaagtgcactagaaagcagcagtggatctatggtcctccatgcccttgaccaagctgaaaagctacttgcacctggtgctatgcggcctcgtaaatggcaattgatgcgaggaaacgcccacctcaaaatgggaggcgtcaactcactcggcgaagcacagaacctggccatgtccttgctcaggcagaacagccaagaccctgaggccctggtgctgcgtggccgcgccctgtatgcccagggtgagaatgataaggccatacaacactttcgcaaagctttgagtggcgaccccgactttagagatgctgtgaaatggctgcggacagtacagaaactcgaccgtatgaaggaagagggcaatactgactacaaagccggacggtggcaagctgcgtttgacaaatactcgtcggctttagaagtcgatccgtcaaacagaggcaccaactccaaacttctacagaaccgtgctctttgccggctgaagcttaagcagtacgacgaggccattgctgactgcgagcgcgccatcagccttgatccttcctacatgaaggctcgcaagacgaaggcaaatgcatatgggcaggccgagaagtgggaagatgctgtacgcgagtggaagaaaatctcagagctcgaccctgaagatcgtactattgcgaaagaaatccgcaaggccgagatagaactcaagaagagccaacgaaaggactactacaagatcctgggtgtttccaaagatgctgacgacaacaccatcaagaaggcataccgcaaactggctatcgtccaccatcccgacaagaaccgagatgacgagcaagccgctgagcgtttcaaggacattggagaagcctatgagaccttgagcgaccctcagaagcgtgcccggtacgacagtggcgaggatttgattgacccctcggaaatgttcggtggcggcggcggtatgggtggtatggccggcggcattgacccggagatcttgttcagcatgatgaacggaggtgcctcgttcggtggaggcggtggaggcttccccggaggcggcttcggcggtggtcgccaacgagcccaggggttccctggtggctttcacttcggctga

SEQ ID NO: 17366 - protein, 694 aa, Muscodor strobelii
  misc_feature: SGI Peptide ID NO. 565798
  misc_feature (475)..(508): Pfam Id: PF00515 Pfam Desc: Tetratricopeptide repeat
  misc_feature (241)..(274): Pfam Id: PF00515 Pfam Desc: Tetratricopeptide repeat
  misc_feature (391)..(424): Pfam Id: PF00515 Pfam Desc: Tetratricopeptide repeat
  misc_feature (207)..(240): Pfam Id: PF00515 Pfam Desc: Tetratricopeptide repeat
  misc_feature (475)..(508): Pfam Id: PF07719 Pfam Desc: Tetratricopeptide repeat
  misc_feature (391)..(424): Pfam Id: PF07719 Pfam Desc: Tetratricopeptide repeat
  misc_feature (241)..(274): Pfam Id: PF07719 Pfam Desc: Tetratricopeptide repeat
  misc_feature (207)..(240): Pfam Id: PF07719 Pfam Desc: Tetratricopeptide repeat
  misc_feature (563)..(625): Pfam Id: PF00226 Pfam Desc: DnaJ domain
  misc_feature (95)..(658): NCBI GI: 261360260 Blast Desc: small glutamine-rich tetratricopeptide repeat-containing protein A [Verticillium albo-atrum VaMs.102]
  misc_feature (110)..(659): NCBI GI: 85081220 Blast Desc: NCU00170 [Neurospora crassa OR74A] gi|28917756|gb|EAA27447.1| conserved [Neurospora crassa OR74A]
  misc_feature (51)..(657): NCBI GI: 116191789 Blast Desc: CHGG_05612 [Chaetomium globosum CBS 148.51] gi|88181525|gb|EAQ88993.1| CHGG_05612 [Chaetomium globosum CBS 148.51]
  misc_feature (59)..(659): NCBI GI: 171687018 Blast Desc: protein product [Podospora anserina] gi|170943470|emb|CAP69123.1| protein product [Podospora anserina]
  misc_feature (98)..(693): NCBI GI: 46124601 Blast Desc: FG06678.1 [Gibberella zeae PH-1]
  misc_feature (91)..(693): NCBI GI: 145601929 Blast Desc: MGG_05319 [Magnaporthe grisea 70-15] gi|145010394|gb|EDJ95050.1| MGG_05319 [Magnaporthe grisea 70-15]
  misc_feature (105)..(693): NCBI GI: 256732828 Blast Desc: [Nectria haematococca mpVI 77-13-4]
  misc_feature (108)..(693): NCBI GI: 156051856 Blast Desc: SS1G_07335 [Sclerotinia sclerotiorum 1980] gi|154705113|gb|EDO04852.1| SS1G_07335 [Sclerotinia sclerotiorum 1980]
  misc_feature (68)..(693): NCBI GI: 154315370 Blast Desc: BC1G_04724 [Botryotinia fuckeliana B05.10] gi|150847687|gb|EDN22880.1| BC1G_04724 [Botryotinia fuckeliana B05.10]
  misc_feature (110)..(659): NCBI GI: 189188548 Blast Desc: DNAJ domain containing protein [Pyrenophora tritici-repentis Pt-1C-BFP] gi|187972219|gb|EDU39718.1| DNAJ domain containing protein [Pyrenophora tritici-repentis
  misc_feature: Useful for introducing or modulating the production of volatile compounds
MKGIFTSKKSPKKQPSGDDLEPPPASPPPYGAHTSSSQHRPAPSHSASLRSESSSPLKPPTGASRSPVKKDSPVKKSTRPAPASPTSHNQREPPKAKPSRSFGSSSRRNKHDPNTHPLNLPPEERKRISAQYNMSQRNSFDKMDVDKENSAEPPSSPPPAPQQQSSFAVPISSPTNGTKPTTNGEGPAPPPHRSNPSSPVADDAEQAEGFKSLGNKSFKEKQYKKAIAEYTKAIELMPDSATYLSNRAAAYMSDAQYEKALDDCSRAVDLDPQNAKFLLRLARIYTNLGRPDEAMTTFSRIQPPASAKDMAAAREMQHHFRAAQSALESSSGSMVLHALDQAEKLLAPGAMRPRKWQLMRGNAHLKMGGVNSLGEAQNLAMSLLRQNSQDPEALVLRGRALYAQGENDKAIQHFRKALSGDPDFRDAVKWLRTVQKLDRMKEEGNTDYKAGRWQAAFDKYSSALEVDPSNRGTNSKLLQNRALCRLKLKQYDEAIADCERAISLDPSYMKARKTKANAYGQAEKWEDAVREWKKISELDPEDRTIAKEIRKAEIELKKSQRKDYYKILGVSKDADDNTIKKAYRKLAIVHHPDKNRDDEQAAERFKDIGEAYETLSDPQKRARYDSGEDLIDPSEMFGGGGGMGGMAGGIDPEILFSMMNGGASFGGGGGGFPGGGFGGGRQRAQGFPGGFHFG

SEQ ID NO: 17367 - DNA, 3903 bp, Muscodor strobelii
  misc_feature: SGI EST ID NO. CUFF.41018.0
  misc_feature: Variant of the nucleotide sequence at SEQ ID NO 17365
ccatcgtgtatttcccagccagacaattttatacatgatgtctgaagctctctgcctatcacattctgcttttgtgcacgtcggctgtgtagttgctctgtgctttgtgctatgctctgtgctgtgcgaattgtgcctctgtatcctgtggtttttcttggagggggctgataaatcgtgggcctcttcctcgagtctcatcttcatccctcttggacaaggaaatctgtaccgtctgtcatatttctctcttcgataaagtaatagatcctctatacacagaactccaccaatcttcctcacggtgtccaccccgaagcttcctggctatccgaaaggagccttgagttcattgatactctgttctgtccttcgggcgcattgcgtacgatcttccgctcctgcttagcgcaaagaagcaggagacaccccaaaagccccaaccgacttgtgtcaactgttcctcagccagaccagatcgaaacagaggccctcgacctcaactgtatcgagtccgtttgcttgctgttgctcaaacagcctggacatatcaatacggagcgcggctgttagtctgtcgcacagcccggccaaacaggcagaggtgacgaaaccaccacaagccagccagatcagtgtcaccagggcggagtgactgttttcaactcaaccagcaacagtgtccatattcaacccaacatcgggcgcacattgatcacaaccagtttcctcctcttctcttcctcttgcgacctgcatgtagtacacggaataaggttcgctagagaaaggacgtttgggggctaggaggttcagttcaagtcgtatatatttctggaacattctttcacttctgaggaagtcgcaggtacagggatccgagcacttgtcttgttatccgacaacggctttttgagacattgtagtgagcagagccacatagcctgtcgccagtctattaccgtcagctagactctgcaggccgcctggcgttaagtattactcggcacagcattatctctgcgtttgcccgtcgcccgtcacaaccctggcttcccgttactgggcttcgccgtcagctccagcacccacagccaccaccaccagtgcccacattgctgtcgccgggctttttagcacgctgccaatcgctagcagctactgtgccgccgcctatcaaatcttctgaaagtctctataaccttcggctccaggactaggatcccggaccacacgaataattccaatgaagggtatcttcacctccaaaaaatctcccaagaagcagccctctggcgacgaccttgagcctccgccagcgtcgccgccaccctacggcgcacacacttcttcatcccaacaccgccccgcaccctcccattcagcctctctgcggtcggagtcttcatcacccctcaaacccccgaccggcgcctccaggtctcccgtcaagaaagattccccggtcaagaaatctacccgccccgcacccgcatcgcctacttctcacaaccagcgagagccacccaaggcgaaaccctcgaggtcttttggcagctcctcacggcgcaacaagcacgaccctaacactcatcccctcaatcttccgccagaggagcgtaagcgcatctctgcccagtacaacatgagtcagcggaactcattcgacaagatggatgtcgacaaggaaaactcggcagagcctccatcctctcctccgccggctccccagcagcagagctcattcgctgtccccatcagctcacctacaaacggcaccaagcctacgaccaacggcgaaggcccagctccccctccacaccggtctaacccttccagccctgtcgccgacgatgcagagcaagctgagggattcaagtctctggggaataaatccttcaaagagaagcaatataagaaggccattgctgaatatactaagggtaatggtgttgaattctgtctttttttcagtatgactaatacgctttgcagccattgagttgatgccggactccgcaacctatttgagtaatcgtgctgcagcatacatgtcagacgcacaatacgaaaaggccttggatgattgctcaagagctgttgatcttgaccctcaaaatgctaaatttctgctgcgtcttgctcgaatttacaccaacttgggtcgtccagatgaagccatgacgacgttcagccgaattcaacctcctgcctcagcaaaagacatggctgccgccagagaaatgcaacaccatttcagagcagctcaaagtgcactagaaagcagcagtggatctatggtcctccatgcccttgaccaagctgaaaagctacttgcacctggtgctatgcggcctcgtaaatggcaattgatgcgaggaaacgcccacctcaaaatgggaggcgtcaactcactcggcgaagcacagaacctggccatgtccttgctcaggcagaacagccaagaccctgaggccctggtgctgcgtggccgcgccctgtatgcccagggtgagaatgataaggccatacaacactttcgcaaagctttgagtggcgaccccgactttagagatgctgtgaaatggctgcggacagtacagaaactcgaccgtatgaaggaagagggcaatactgactacaaagccggacggtggcaagctgcgtttgacaaatactcgtcggctttagaagtcgatccgtcaaacagaggcaccaactccaaacttctacagaaccgtgctctttgccggctgaagcttaagcagtacgacgaggccattgctgactgcgagcgcgccatcagccttgatccttcctacatgaaggctcgcaagacgaaggcaaatgcatatgggcaggccgagaagtgggaagatgctgtacgcgagtggaagaaaatctcagagctcgaccctgaagatcgtactattgcgaaagaaatccgcaaggccgagatagaactcaagaagagccaacgaaaggactactacaagatcctgggtgtttccaaagatgctgacgacaacaccatcaagaaggcataccgcaaactggctatcgtccaccatcccgacaagaaccgagatgacgagcaagccgctgagcgtttcaaggacattggagaagcctatgagaccttgagcgaccctcagaagcgtgcccggtacgacagtggcgaggatttgattgacccctcggaaatgttcggtggcggcggcggtatgggtggtatggccggcggcattgacccggagatcttgttcagcatgatgaacggaggtgcctcgttcggtggaggcggtggaggcttccccggaggcggcttcggcggtggtcgccaacgagcccaggggttccctggtggctttcacttcggctgacaaccaggctcagagggaagagaccagggcgagcacgaagatactgatgttcacgacggggacgagaccaagagcgaagatgaaaggcggccctgggaaaatgcgcgagacagccctacgaatgtgaacgacaaaattcgtcgctttcgatggggtgtgatggcgatggcggctgcattcatcatgctgccatcggagctcgctgctacacttctcatattgtatatctgcattgtatttgcaagatcctcaggcacctcgcgaggtatcctgtgaaagaggagatggtttcagcaaatagaccactacgcatttccggcgtttgatagacaacatcatatttcgactttggaagttgaagatcagatgacaatcctcgacggcaaacattagggagccttaagaaagagcgacgagaagggaaaagtcatctttcttcactcttagttaggattgcacatagactcaacaatggataaatactgattaaaacacatgctctccctcttttcgatctcgc

SEQ ID NO: 17368 - DNA, 876 bp, Muscodor strobelii
  misc_feature: SGI cDNA ID NO. 565799
  misc_feature: Encodes the peptide sequence at SEQ ID NO 17369
atgccatcgggatataaaccctctcccttaagctacggctcaccgcgcgcctcaccattccgcagaccagagtcgccttcatcaccacttgcaaacagacagaccacgccgacaccgtcgccgactaaggcgcctggcgcagggcattcaactcacacaccgtcgaaattctcgagcgcgacgccgacacaggatagccagtctcgaacaccacgctggcagccctccacggcatctacagccatagcctcttcgcagtcgctcggttcgcctgttcagatgtcttctcgtgcgccacctgcgacttcgcaccagcccgttggccatggaaacgcgctgtcacaactacagcccgcgcaggttcgcgtgctgcgtgacagtttccagatcttagatagagacggcgatggagccgtgaatcgggaggacgtggctgatatggtggcacaattaggtctccccgcaaacccctccgacatatcaccattctttcccccaggtggtccccaaactctcaccctcgccgccttcctgaactccatcgcaacaaccctagccgccctctcaccctcctccgaacttctctccgctttctcggcctttgatgacgacgatagcgggcagattgacgtagcagaactacgtgatgcgctattacacactgcgccggaagatggcgagcggtctttgaccccgggtgaagtcgacaagatcatcgccggctttagcggacgacgagcgtttagcaagagtagtatgggcttgggcgcacacaggggaaagggtgaggtgtttagatatcaggattttgtgaattctataaacgggagtaatggggctgctgagcagcatgctaatgaggcttcggaatcgtga

SEQ ID NO: 17369 - protein, 291 aa, Muscodor strobelii
  misc_feature: SGI Peptide ID NO. 565799
  misc_feature (123)..(151): Pfam Id: PF00036 Pfam Desc: EF hand
  misc_feature (193)..(221): Pfam Id: PF00036 Pfam Desc: EF hand
  misc_feature (3)..(291): NCBI GI: 261360258 Blast Desc: conserved [Verticillium albo-atrum VaMs.102]
  misc_feature (5)..(291): NCBI GI: 171687020 Blast Desc: protein product [Podospora anserina] gi|170943471|emb|CAP69124.1| protein product [Podospora anserina]
  misc_feature (1)..(283): NCBI GI: 46124603 Blast Desc: FG06679.1 [Gibberella zeae PH-1]
  misc_feature (110)..(288): NCBI GI: 85079674 Blast Desc: NCU00171 [Neurospora crassa OR74A] gi|28917457|gb|EAA27158.1| [Neurospora crassa OR74A]
  misc_feature (1)..(280): NCBI GI: 156051794 Blast Desc: SS1G_07304 [Sclerotinia sclerotiorum 1980] gi|154705082|gb|EDO04821.1| SS1G_07304 [Sclerotinia sclerotiorum 1980]
  misc_feature (5)..(282): NCBI GI: 242804316 Blast Desc: calmodulin, [Talaromyces stipitatus ATCC 10500] gi|218717695|gb|EED17116.1| calmodulin, [Talaromyces stipitatus ATCC 10500]
  misc_feature (5)..(277): NCBI GI: 226287441 Blast Desc: conserved [Paracoccidioides brasiliensis Pb18]
  misc_feature (5)..(289): NCBI GI: 255951340 Blast Desc: Pc22g25520 [Penicillium chrysogenum Wisconsin 54-1255] gi|211593454|emb|CAP99840.1| Pc22g25520 [Penicillium chrysogenum Wisconsin 54-1255]
  misc_feature (5)..(282): NCBI GI: 212539514 Blast Desc: calmodulin, [Penicillium marneffei ATCC 18224] gi|210067211|gb|EEA21303.1| calmodulin, [Penicillium marneffei ATCC 18224]
  misc_feature (5)..(287): NCBI GI: 261196400 Blast Desc: calmodulin [Ajellomyces dermatitidis SLH14081] gi|239595848|gb|EEQ78429.1| calmodulin [Ajellomyces dermatitidis SLH14081]
MPSGYKPSPLSYGSPRASPFRRPESPSSPLANRQTTPTPSPTKAPGAGHSTHTPSKFSSATPTQDSQSRTPRWQPSTASTAIASSQSLGSPVQMSSRAPPATSHQPVGHGNALSQLQPAQVRVLRDSFQILDRDGDGAVNREDVADMVAQLGLPANPSDISPFFPPGGPQTLTLAAFLNSIATTLAALSPSSELLSAFSAFDDDDSGQIDVAELRDALLHTAPEDGERSLTPGEVDKIIAGFSGRRAFSKSSMGLGAHRGKGEVFRYQDFVNSINGSNGAAEQHANEASES

SEQ ID NO: 17370 - DNA, 1491 bp, Muscodor strobelii
  misc_feature: SGI EST ID NO. CUFF.40820.0
  misc_feature: Variant of the nucleotide sequence at SEQ ID NO 17368
gcgaaatcaacccacccgagcaccctactatctattagcgaacgtcatttcactggttacaagttgcaatctgattgaaacacaattctgcgtacaattggaactctgcataatttcgcattccccatcaccgatgaagtgactccgtagagcatttgaagccagcacgtcacagcatctctctttgtttacattcagatctacacctgatcagcttaggcaggacaagttgcgacaatggccatgccatcgggatataaaccctctcccttaagctacggctcaccgcgcgcctcaccattccgcagaccagagtcgccttcatcaccacttgcaaacagacagaccacgccgacaccgtcgccgactaaggcgcctggcgcagggcattcaactcacacaccgtcgaaattctcgagcgcgacgccgacacaggatagccagtctcgaacaccacgctggcagccctccacggcatctacagccatagcctcttcgcagtcgctcggttcgcctgttcagatgtcttctcgtgcgccacctgcgacttcgcaccagcccgttggccatggaaacgcgctgtcacaactacagcccgcgcaggttcgcgtgctgcgtgacagtttccagatcttagatagagacggcgatggagccgtgaatcgggaggacgtggctgatatggtggcacaattaggtctccccgcaaacccctccgacatatcaccattctttcccccaggtggtccccaaactctcaccctcgccgccttcctgaactccatcgcaacaaccctagccgccctctcaccctcctccgaacttctctccgctttctcggcctttgatgacgacgatagcgggcagattgacgtagcagaactacgtgatgcgctattacacactgcgccggaagatggcgagcggtctttgaccccgggtgaagtcgacaagatcatcgccggctttagcggacgacgagcgtttagcaagagtagtatgggcttgggcgcacacaggggaaagggtgaggtgtttagatatcaggattttgtgaattctataaacgggagtaatggggctgctgagcagcatgctaatgaggcttcggaatcgtgagtattggtatggataactgttttgagatgttgaactaggcatgggataagggctaagcatacggaggacattgttatggatcatgagcttgggatggcgttgagttgtggcattgagttgagtcttatgattaggtatgctgtaccgaatactttgtctcgtcaagagataattgaaaagagattagcatggctaatagttaagtctattcctggcatgaggtgcccgcgctagatcatagctcttggtattttaatcgtgacgatttgctacgttggctagaactttggggccgcatttcaatcgcaatggatgggcatagtacacaaacttgacagatgcccataacctaacttcggagcacttataaat

SEQ ID NO: 17371 - DNA, 1740 bp, Muscodor strobelii
  misc_feature: SGI cDNA ID NO. 565800
  misc_feature: Encodes the peptide sequence at SEQ ID NO 17372
atgggttggtccgctcttggagacgaaccgctgagtgctacgacgacatggcaaccaccgcccaacgaacgaggatcctatatgattctatcgagctgtatcttgaccctggtgttatgcgtatggacagctatgcatctcaacatacccccgcccaagactcgaacccttccatggaatagcgatggccagcccaggcgaaaatcagccaagcttcaagaagaatcaggcttttcgatcaactgggcaaagtttaaatacgttgttcttgcattagtcatgccggaagtcatcactgccacggctttcgtgcaatggatggaacagcggactctccttaaattcatcaatgacgaaactggtctgggcatcagcaacgactcagataagaaccggactcgtaaaccagacgatgtcgagactggcattaagaaagatgacagtcggttaggcagacaacagcctacctggacagccacacattgctggtacgcagtaatgggcgggtttgttgtagatatggaaggagatggatgcgaaatgttcccttttccaaaccagctgacacgcttgactctgactacgcgtggagtacgactactagcaagggaccatccgctcgcctttccttccatcccggcctccgaaattatcgataagagcaagtccactgcgttacagaaggccattgtctgttttcaggccttatggttctgtgtcaacgtgataggaaggctagcccaaggcttgcctctgaccgtgcttgagctccacacagcagcgcattgtgtttgcactctcttaacttacatcttttggtggggaaagccattagatatcatggaaccaacatatctctctctggcggacgatgagactgggaagacggttgcacgcatgtgtctggagagccgtgtgggtgagtatgcggatcgcgagaaagccgtttatgagaacacgaatattttcaagcgagagattgcaacatttgccaacaaattaccggccgttgcacctattgacgagtacccaaaaatggccattcattccgggctaacctttggcactatttttgtcgatatcatgcattaccctcgcccttcccggtcaatcaagatatactatgcaaaggaccagcaattggttaaaacggttgccgacgtaaaggctgccggcatacgcgacctgaacattctactgaagttgcatcgtctagctgagaatcaattgcaagagactggattggaacagtttgaacgcacctggtcctcgcgcaattgggtgacgcaatcggcatccaacgttgagattaatctcgatctccttttagatctacctctacccagtttcttcgtagcgtgtgccatctatgcagccctccacgctacggcttggaacggaccatttggctcgcgcgctgagctgtatctctggcggatgggtgtgctcgcgtttattcctctctttctttgggcgctgatcattgggctggttactttgtgggtgaatgatctgagagacatattgaaagagaaatggaaaaacatcccgaagccgataaacttcatgagccacagcgtcgccctctggcatcattggcacccggaagaaacatatttttggacctttctaacgggaaggacattcctcgttgtcgaagctcttcttgcacttcctcattctcctgaaaaggtgtttgtccagccaagttggtctacttacttccctcactttgcttga

SEQ ID NO: 17372 - protein, 579 aa, Muscodor strobelii
  misc_feature: SGI Peptide ID NO. 565800
  misc_feature (3)..(306): NCBI GI: 256728202 Blast Desc: NECHADRAFT_87751 [Nectria haematococca mpVI 77-13-4]
  misc_feature (7)..(579): NCBI GI: 169607032 Blast Desc: SNOG_06569 [Phaeosphaeria nodorum SN15] gi|111065280|gb|EAT86400.1| SNOG_06569 [Phaeosphaeria nodorum SN15]
  misc_feature (1)..(578): NCBI GI: 145609029 Blast Desc: MGG_09092 [Magnaporthe grisea 70-15] gi|145016487|gb|EDK00917.1| MGG_09092 [Magnaporthe grisea 70-15]
  misc_feature (14)..(320): NCBI GI: 156065601 Blast Desc: SS1G_00811 [Sclerotinia sclerotiorum 1980] gi|154691670|gb|EDN91408.1| SS1G_00811 [Sclerotinia sclerotiorum 1980]
  misc_feature (12)..(341): NCBI GI: 85083396 Blast Desc: NCU05131 [Neurospora crassa OR74A] gi|28881421|emb|CAD70538.1| [Neurospora crassa] gi|28918202|gb|EAA27881.1| [Neurospora crassa OR74A]
  misc_feature (7)..(578): NCBI GI: 258569983 Blast Desc: [Uncinocarpus reesii 1704] gi|237904065|gb|EEP78466.1| [Uncinocarpus reesii 1704]
  misc_feature (22)..(483): NCBI GI: 189203335 Blast Desc: conserved [Pyrenophora tritici-repentis Pt-1C-BFP] gi|187985102|gb|EDU50590.1| conserved [Pyrenophora tritici-repentis Pt-1C-BFP]
  misc_feature (16)..(293): NCBI GI: 256723328 Blast Desc: NECHADRAFT_51906 [Nectria haematococca mpVI 77-13-4]
  misc_feature (10)..(460): NCBI GI: 145234855 Blast Desc: An03g01740 [Aspergillus niger] gi|134057750|emb|CAK38147.1| protein product [Aspergillus niger]
  misc_feature (17)..(290): NCBI GI: 85107849 Blast Desc: NCU07946 [Neurospora crassa OR74A] gi|28924068|gb|EAA33226.1| [Neurospora crassa OR74A]
MGWSALGDEPLSATTTWQPPPNERGSYMILSSCILTLVLCVWTAMHLNIPPPKTRTLPWNSDGQPRRKSAKLQEESGFSINWAKFKYVVLALVMPEVITATAFVQWMEQRTLLKFINDETGLGISNDSDKNRTRKPDDVETGIKKDDSRLGRQQPTWTATHCWYAVMGGFVVDMEGDGCEMFPFPNQLTRLTLTTRGVRLLARDHPLAFPSIPASEIIDKSKSTALQKAIVCFQALWFCVNVIGRLAQGLPLTVLELHTAAHCVCTLLTYIFWWGKPLDIMEPTYLSLADDETGKTVARMCLESRVGEYADREKAVYENTNIFKREIATFANKLPAVAPIDEYPKMAIHSGLTFGTIFVDIMHYPRPSRSIKIYYAKDQQLVKTVADVKAAGIRDLNILLKLHRLAENQLQETGLEQFERTWSSRNWVTQSASNVEINLDLLLDLPLPSFFVACAIYAALHATAWNGPFGSRAELYLWRMGVLAFIPLFLWALIIGLVTLWVNDLRDILKEKWKNIPKPINFMSHSVALWHHWHPEETYFWTFLTGRTFLVVEALLALPHSPEKVFVQPSWSTYFPHFA

SEQ ID NO: 17373 - DNA, 1695 bp, Muscodor strobelii
  misc_feature: SGI cDNA ID NO. 565801
  misc_feature: Elevated expression when VOC is produced
  misc_feature: Encodes the peptide sequence at SEQ ID NO 17374
atgtctgccgtacccgaaagcaacgccggcccgtccggtggtgagagctccacctccaacggtaccacgccggcgccctctacctctaccacaacccctaaccagtccacaccagcagtccagcaggatgactctctcacctgtaaatggtctggctgcaatgacaaattcactactgccgagaccctttatgatcatatctgtgagaagcatgttggtcgcaagagcacaaacaatctgaatctccagtgccagtggggaacttgccgcatcacgacagtgaagcgcgaccacatcacgtctcacattcgggttcatgttcccttaaagcctcacaagtgtgacttttgcggcaagtcattcaagcgacctcaggatctcaagaaacatgtcaagactcatgctgatgactctgtcattgttcgatctcctgagcaccacggaggcatggctggtggctatcgaggaccaggcaaaccaacttctagctactatgatcataatggccagatgcgtactaacgcggcagcttttggtcagccgcctcatccagccacgcacggtagcggttactaccagcaccatcatgcacctgctccctcctttggcgctgcccctatgtactaccccatgagtggacgcggtgatcatattggctatcacgcttccgcaggctatgacggccgcgccggcaagcgatccatggaagtgatgaatgacttcctgactgatgccaagcgccgacaagttgaccctacatcataccatcaagtcagccagagactcgttcctctccatggtgctttgcctatccatagccaatctcttgccaccgaatacctgcccgccccggctgtcgtctctgtggatggtcacggtggtcatgcaccttaccagcattacgccttgccatccatgcctggagctcgtaccaagagtgaccttctccagatcgatcaaatgttggagagcatgcagagcactgtgtatgagaattcgaaccaggccgtgtcaccttacctcccagtcaatgtgcgccacagccagtctcctcctcaggctccccctcctcaagctcatgccctggcatccactgcctactcggccgcacatgccgcttcacccctgactgctgtatcctcacaccatggtaccccagcgatgacacctccttcaagctcagtgtcatacacgtctggccattctccattgagcgcctcatcgcccggattctctccttccagccgccacagctcaacagcgtctggcctctaccccactcttccttctgtgacttctggctaccctggccaatcggccacctcaactctaggccccagctttgaccaagaccctcgccgtcgctattctggaagcatgcttcagcgcgcaagtgccggtcctcgacctgcccacgagcgcgaaggctcccacacgcccaaggctgtcgaggcatcggcagtcagctcgccctcagccgagtctgacttagaggcacgtgagcgtgaggaccaggcgtatgaggtctggctagagaatgtgcggactattgagtatcttagagagtatgtggctcatcgtcttcgacataaggattacgagatggatagccctggctctagctcatccatggacactgactctcctactcgcccgccttcgcagccggcataccccgcccttcctctttcctag

SEQ ID NO: 17374 - protein, 564 aa, Muscodor strobelii
  misc_feature: SGI Peptide ID NO. 565801
  misc_feature (112)..(134): Pfam Id: PF00096 Pfam Desc: Zinc finger, C2H2 type
  misc_feature (23)..(563): NCBI GI: 149930356 Blast Desc: zinc finger transcription regulator Pac1 [Glomerella cingulata]
  misc_feature (23)..(563): NCBI GI: 188504070 Blast Desc: pH-response transcription factor [Glomerella cingulata]
  misc_feature (23)..(547): NCBI GI: 256732808 Blast Desc: NECHADRAFT_60425 [Nectria haematococca mpVI 77-13-4]
  misc_feature (19)..(559): NCBI GI: 73921552 Blast Desc: PACC_GIBFU RecName: Full=pH-response transcription factor pacC/RIM101 gi|24430365|emb|CAD55803.1| transcription factor PACC [Gibberella fujikuroi]
  misc_feature (23)..(533): NCBI GI: 119699022 Blast Desc: pH-responsive PacC/RIM1 [Glomerella acutata]
  misc_feature (19)..(559): NCBI GI: 73921550 Blast Desc: PACC_FUSOX RecName: Full=pH-response transcription factor pacC/RIM101 gi|30142038|gb|AAM95700.1| pH transcription factor [Fusarium oxysporum]
  misc_feature (43)..(559): NCBI GI: 73921553 Blast Desc: PACC_GIBMO RecName: Full=pH-response transcription factor pacC/RIM101 gi|29150633|gb|AAO64251.1| pH regulatory protein [Gibberella moniliformis]
  misc_feature (40)..(533): NCBI GI: 73921545 Blast Desc: PACC_CEPAC RecName: Full=pH-response transcription factor pacC/RIM101 gi|14132803|emb|CAC38840.1| transcription factor [Acremonium chrysogenum]
  misc_feature (25)..(561): NCBI GI: 55669161 Blast Desc: transcription regulator PAC1 [Botryotinia fuckeliana]
  misc_feature (23)..(563): NCBI GI: 118131867 Blast Desc: transcription factor PacC [Hypocrea lixii]
  misc_feature: Useful for introducing or modulating the production of volatile compounds
MSAVPESNAGPSGGESSTSNGTTPAPSTSTTTPNQSTPAVQQDDSLTCKWSGCNDKFTTAETLYDHICEKHVGRKSTNNLNLQCQWGTCRITTVKRDHITSHIRVHVPLKPHKCDFCGKSFKRPQDLKKHVKTHADDSVIVRSPEHHGGMAGGYRGPGKPTSSYYDHNGQMRTNAAAFGQPPHPATHGSGYYQHHHAPAPSFGAAPMYYPMSGRGDHIGYHASAGYDGRAGKRSMEVMNDFLTDAKRRQVDPTSYHQVSQRLVPLHGALPIHSQSLATEYLPAPAVVSVDGHGGHAPYQHYALPSMPGARTKSDLLQIDQMLESMQSTVYENSNQAVSPYLPVNVRHSQSPPQAPPPQAHALASTAYSAAHAASPLTAVSSHHGTPAMTPPSSSVSYTSGHSPLSASSPGFSPSSRHSSTASGLYPTLPSVTSGYPGQSATSTLGPSFDQDPRRRYSGSMLQRASAGPRPAHEREGSHTPKAVEASAVSSPSAESDLEAREREDQAYEVWLENVRTIEYLREYVAHRLRHKDYEMDSPGSSSSMDTDSPTRPPSQPAYPALPLS

SEQ ID NO: 17375 - DNA, 2698 bp, Muscodor strobelii
  misc_feature: SGI EST ID NO. CUFF.40932.0
  misc_feature: Variant of the nucleotide sequence at SEQ ID NO 17373
aaaatgcaaaaagtcgggggcagagcaggagcatgtctgcgcgcacatcgagacaatcagtaattgccaagccaagccaagttacgccaagctcttggcattgacttggcagtttcttggcttgtttgtcgcggaagaggaggaacgactctgactttgtcgggtgacgcgggcaaagcgcaagtaccgtgctgacaggaataccaacaccttcatcaccccctccattgtagccaatcacagaaaccgtactgctacaccccgacggcgacaagacccattgccaagcattgccaagagtttccgcctgggcttcgccaaggtctaatcgccataataaggagaagcaagtgcgcctgatttacataaactcgcccgttcgctcatctggcccgatcgaatccaactgtctcgttttccttcctgctggaactcactactgcccgttggaagaaacggctttcgaatctgcctttgtttgctatactcctgtacaaatttgttgttcgtctgtcttgtttgcttgtctggccattcagcgaactaagtcactgttttatccatttttctctctcctttgggcctagctccaagagtgctgtccaatcccaagcattaactctcttcaagcccaagcttgtccactggcgccaagccttggtgtctacaatcacccggcagagtctcggtactttcagcctccggccttcggacctttcttccacgtctttcacgtgactactgccaatctagcgcttaactctccgacctcggactcggacgcggacttggcatcatcatgtctgccgtacccgaaagcaacgccggcccgtccggtggtgagagctccacctccaacggtaccacgccggcgccctctacctctaccacaacccctaaccagtccacaccagcagtccagcaggatgactctctcacctgtaaatggtctggctgcaatgacaaattcactactgccgagaccctttatgatcatatctgtgagaagcatgttggtcgcaagagcacaaacaatctgaatctccagtgccagtggggaacttgccgcatcacgacagtgaagcgcgaccacatcacgtctcacattcgggttcatgttcccttaaagcctcacaagtgtgacttttgcggcaagtcattcaagcgacctcaggatctcaagaaacatgtcaagactcatgctgatgactctgtcattgttcgatctcctgagcaccacggaggcatggctggtggctatcgaggaccaggcaaaccaacttctagctactatgatcataatggccagatgcgtactaacgcggcagcttttggtcagccgcctcatccagccacgcacggtagcggttactaccagcaccatcatgcacctgctccctcctttggcgctgcccctatgtactaccccatgagtggacgcggtgatcatattggctatcacgcttccgcaggctatgacggccgcgccggcaagcgatccatggaagtgatgaatgacttcctgactgatgccaagcgccgacaagttgaccctacatcataccatcaagtcagccagagactcgttcctctccatggtgctttgcctatccatagccaatctcttgccaccgaatacctgcccgccccggctgtcgtctctgtggatggtcacggtggtcatgcaccttaccagcattacgccttgccatccatgcctggagctcgtaccaagagtgaccttctccagatcgatcaaatgttggagagcatgcagagcactgtgtatgagaattcgaaccaggccgtgtcaccttacctcccagtcaatgtgcgccacagccagtctcctcctcaggctccccctcctcaagctcatgccctggcatccactgcctactcggccgcacatgccgcttcacccctgactgctgtatcctcacaccatggtaccccagcgatgacacctccttcaagctcagtgtcatacacgtctggccattctccattgagcgcctcatcgcccggattctctccttccagccgccacagctcaacagcgtctggcctctaccccactcttccttctgtgacttctggctaccctggccaatcggccacctcaactctaggccccagctttgaccaagaccctcgccgtcgctattctggaagcatgcttcagcgcgcaagtgccggtcctcgacctgcccacgagcgcgaaggctcccacacgcccaaggctgtcgaggcatcggcagtcagctcgccctcagccgagtctgacttagaggcacgtgagcgtgaggaccaggcgtatgaggtctggctagagaatgtgcggactattgagtatcttagagagtatgtggctcatcgtcttcgacataaggattacgagatggatagccctggctctagctcatccatggacactgactctcctactcgcccgccttcgcagccggcataccccgcccttcctctttcctagtgtattctacggttttaggcactggttccgggtttcttctttgttatggtggcgttgtctcctcgtcctccgtggtgttatagctatcggaccctgtcaggtggaacttgtttgactcaaagaggtcaaaaacaatgtatttcatacagtagccaaaataaatgagtcatcttcataccatcagtgcatagtaaacgggcggag

SEQ ID NO: 17376 - DNA, 1086 bp, Muscodor strobelii
  misc_feature: SGI cDNA ID NO. 565802
  misc_feature: Encodes the peptide sequence at SEQ ID NO 17377
atggcatctgctgctgctgctgctgctgctgctcgcgatatcccgaagacgacccaggctggccgagacaccttagctggtgtagcgcccacccgggacggccctgtgacaggcactcaacctcttcccactcctcccaactccatctccccggctctcaacgggctcaaggcccagttccagaaggccaggctcgactccatcgactccgatctcgacctccacgaggacaacgccgcccgcgcccctgtatcctcgtccttcgaggctgcaggcgacatcaccccttctctgctggccaagttccacctgcccgagatcctgcttggccatggtcccttagccatccgccacatcatgggctacctgacgacatcggtccccggcttcgcgggcatccctcctcccaaggcacgaaggctcgtagttgcggcgctcgagggacgtggccagggccacgccactgagaccgctggcggagtcaatggcgatgttcagttcgagaaagtgggctggggtcgctggagcgcaaagcacaagggccaccgttctcgcagcaccggctcccgacgatcatcccccgacaggcgcaggagcccatatcccactggcattcccatcacgcacagcggaggtcttaaggtcagccgagcccggctcaacgctcgcgccgctagcaacggcaactcggagtccccatcccacgatgatcgatacggaaacacgctggaaaacgaggcggataacatgtccctcgactctctcgatcgaccaggctccgcgtcctgctcagaagccccagatgctaatgacgtagtcatgaacgataactccgaggatgagaccgacgacgaggactggggcgccgtgggagccgctgctctgcgggccgcgtcttactcgacaccccaagggggcctttccagtcgcccttataacactggaggctaccgatccttttcatctaacacccggatgctccgtgagcctcgactggataacattgaccttgacgcactcgccgcctcctccgatgctcaagagcgcgaagcgattcaggctctccttcaactcagatctgtataa

SEQ ID NO: 17377 - protein, 361 aa, Muscodor strobelii
  misc_feature: SGI Peptide ID NO. 565802
  misc_feature (5)..(361): NCBI GI: 46124675 Blast Desc: FG06715.1 [Gibberella zeae PH-1]
  misc_feature (5)..(361): NCBI GI: 256732807 Blast Desc: NECHADRAFT_100218 [Nectria haematococca mpVI 77-13-4]
  misc_feature (5)..(361): NCBI GI: 116192153 Blast Desc: CHGG_05794 [Chaetomium globosum CBS 148.51] gi|88181707|gb|EAQ89175.1| CHGG_05794 [Chaetomium globosum CBS 148.51]
  misc_feature (5)..(361): NCBI GI: 145614354 Blast Desc: MGG_10153 [Magnaporthe grisea 70-15] gi|145021291|gb|EDK05420.1| MGG_10153 [Magnaporthe grisea 70-15]
  misc_feature (12)..(361): NCBI GI: 261360318 Blast Desc: conserved [Verticillium albo-atrum VaMs.102]
  misc_feature (5)..(361): NCBI GI: 171686714 Blast Desc: protein product [Podospora anserina] gi|170943318|emb|CAP68971.1| protein product [Podospora anserina]
  misc_feature (5)..(361): NCBI GI: 164428824 Blast Desc: NCU00083 [Neurospora crassa OR74A] gi|157072296|gb|EAA27157.2| conserved [Neurospora crassa OR74A]
  misc_feature (5)..(361): NCBI GI: 154315226 Blast Desc: BC1G_04652 [Botryotinia fuckeliana B05.10] gi|150847615|gb|EDN22808.1| BC1G_04652 [Botryotinia fuckeliana B05.10]
  misc_feature (1)..(361): NCBI GI: 259481350 Blast Desc: TPA: conserved [Aspergillus nidulans FGSC A4]
  misc_feature (1)..(361): NCBI GI: 67527367 Blast Desc: AN4062.2 [Aspergillus nidulans FGSC A4] gi|40739760|gb|EAA58950.1| AN4062.2 [Aspergillus nidulans FGSC A4]
MASAAAAAAAARDIPKTTQAGRDTLAGVAPTRDGPVTGTQPLPTPPNSISPALNGLKAQFQKARLDSIDSDLDLHEDNAARAPVSSSFEAAGDITPSLLAKFHLPEILLGHGPLAIRHIMGYLTTSVPGFAGIPPPKARRLVVAALEGRGQGHATETAGGVNGDVQFEKVGWGRWSAKHKGHRSRSTGSRRSSPDRRRSPYPTGIPITHSGGLKVSRARLNARAASNGNSESPSHDDRYGNTLENEADNMSLDSLDRPGSASCSEAPDANDVVMNDNSEDETDDEDWGAVGAAALRAASYSTPQGGLSSRPYNTGGYRSFSSNTRMLREPRLDNIDLDALAASSDAQEREAIQALLQLRSV

SEQ ID NO: 17378 - DNA, 7323 bp, Muscodor strobelii
  misc_feature: SGI EST ID NO. CUFF.41028.1
  misc_feature: Variant of the nucleotide sequence at SEQ ID NO 17376
tctccatcactgagtatgattaacactaacagatcgaaggcacatactgaatgcttcacgcaatctcgtcaatcttgatgagaagcaggtcaatgccgttgcttcgcgtattgagctagatctgagaatcgggtttgccttcacccgtttcctcacaaccaacctgaggagtcttggtggtccacttcaggaattactgcttagctatggctcatgtcaatttccaaccctgggcttcgttgtggatcgttactttcgagtaagaaacttcaaacctgagcctttctggagcatcaagatcatgcacaaacgtgaaggtattgatgtcaacttcggctgggcccgcaatcgactctttgaccgagcaacagtcgtcatactctacgagcgatgcctagaggcgaagaaagtcaaagttaccaaggtccaagagaaacccacgaagagatggaaacctttgccgttaactacagttgagttacagaaaatggccactagatttttgcggatgactggtcaacaggcgatggacactgctgaacacctttacaataaaggtttcatcagttatccaagaacggagaccgacaggttcgaccctggtatgaatctgcgtggactagtacaaaaacaaacccagtctcaggcttggggcacttttgcccaggggctggtcaatgggggcttccaacaaccaagacaaggacgaaacgatgataaagcgcatccaccgatccatcccataacgtttgccgcacctgaggctctaaacgacacagagagaagaatctatgaatttgtgacgaggcggtttctagcttgctgctctgaagacgccaaaggcgttgccaccgatgtggacatcgtatatggcgatgaatcgttccacgctcatggagttgttgtcctagaacgaaattacctcgatgtttatgtatacgataagtggacgggcagtgtacagcttcctaaattcaccgttggcgagacttttgagccaacagaagctctcatgaccgaagggaagactgtcgcgcctaactacctcaccgaggcagacttgatagcgcttatggacgctaacggcatcggcacagatgccacgatggcagaacacatccaaaagattcaggacagggactatgtccgcacagtgcctagatcagggcgttcagaagacaatgatgatccggcagaagagagtcaacccgcaagaggaggacgaggcgggcgttctactcgcggtggccgaggaggaggccgaggagcaggtaacagcggccgaggaggagtgaaagagttcattccaaccaaactcggcgtcgccctcatcgaaggcttcgatagaatgaactttgagacaagtctcggcaaaccatttctgcgtaaagaaatggagctcaagatgaaggctatttgtgatggccgaacgacgaaagaggccgttcttaacgaaagtatcgatcaataccgacacgtttatatgcagtctcaagaaaagctcggcgttctcaaatcggtgagccatgtattgtgtctccaattactcaaaccactaatatgcctgtaggcttgtcgacagtatgtatttcagaacggagcttagaggctatcagagtatgaaccagaagagtattcgtgttgcaccaacgacttgtgctcttgatatttacacacgataatggcttcacgtcctagatacccaattggcaagagaaacagggtatgtctagagttgatggtgagaggtaatagtttaaaactccgacaatccgcgtttgtgagcagctatctctattccttcttcaccatcacatcactggatgttttctgggcagaaataccaacggcagttcacccggctagcatacgccttgctaattattgtcggcaagaggacaatggtgttcacgagtcagatagtggaatggagccattcgaagcattgattcccagccagtctcatcatccacatgtcgcgctccgcagcagacactaaatccatcacgacggtgtgtatgcaaccgcttctccacctacgctagactttgaggcagcacatcgtcgggaaggtctcccatcgccctatctaaaaaacgtggggaaatggccgtggctgatggggtctactatggcatcttgttttattccctcgcggcggggtaaacttgcaagggccaacaacagagatcgaaaagcagatgcaacctgcaacccctcattgccgagaacctcgcctgcaaatcatcttcctgcctgtgttaccggaacacagaaatcacgcagccgaaacatacttggtcggtagtcgcctcgcctactcggctcttatcacgattctgaacgacatttgattatgagggccttggtgttgcgtcgcccaaccctagtagttagcggcggaaacacggaatgtcgcatacgcggagtattaattacatagtcgtgggccaaatgatcgacattcatgctttgagttgcatgtgaggctggcttaagttgtgaaatcagaacacgaagcagaccaatcacaactagggcagtgatcaacgtgtgaaccaacactagttggccggatactacgaaatacagaatctcaagcacatgtgttcctgaagcagccgtaattgtatagctcgagaaccgaggcctataacagaaacggacgcgtcaattgattaccatcatcacacgctgtaggtcgtatcgacacccgaaaattcccagcgaaggctgcttcactgcaatggagtcaatctgaaaccttgcgtatcacttatcaattagtgaacctcttgatatcagatatctcgaacatgaatattacagcccaaactctgatacatagtctgcgttcaatatcgatcaatagttgcagtcatcaacaaataggatacgtgggttcgaaaatgtgtacctacatgctatcgtggtccgaaacttaaaagcccacagccacgatgaaacttggcacttggttctagtgaactcgacgggtgctgcgtgacccatctcggattcttagaaatggtgtacagtctggaaattggtcgaagcccgaagtcaattacgcccacaccctctttgcattggctggccgtctcacagaatcttggaatttagcttccagtacggagtacccatatgtacaatgtccatggacgatccgcatcagtatgttgaagtctcccgaacccgcaacgcaatgcagccgacgtcatcctctagaatcgcattgcatgctctatgatctctcacaatgccaaaatcaagcaaggaaacagcaaaggggtagtaagggcaattgtcgcaccgcaagcaacagtgctggagggcaattgagagaagcggtgcttgtaggacttatcgccctatcacacgctgttctctgttcatgacacatgaatcccgccttacaagtccaagttcccaagcccctgttagatcgtgctggatactggcacccagcgacagcggatgataaggcatgcgaccttcctggaagatctcattcgtttccccaaaggttactatgcgaagcacaatagcaccgaaagtcgctcatatgcgactcatcgaattgatccattggaagaatctttttcattccaagcgggcaccagtcaacgaatgcagcgaaggagtcgtcaccagtaagccaacatctgcatctgccatcagacagagttggaaatattagaggcagtgaatgtagtgattttgtgggaagacttattattagtaggggcgatagcaggattcagctggcattcggggcttgggcaataagcgaccgatatttgttctcagctcgtctgatacactgatgatcaccggcgggactgggctctcgaacactgacaaatggccggaccaaaccccctactaacgtaatctcacccaagctgactcttcttcaatgaatgtctcacgggtttcactctcccagcaacgccatcgccagcaatgtccgtctgtaaatcattcctgatattacactaccaccacaaataagaattgaacaaatactgtattccccatcatagtaaggcagtatgcttagcgaacgagctaagggctaacacctactgtccggtcctctccatgccagactcatttcaacattagcatttggtacccaacttatctcgattcttcgaatgtccccacggtgttttattagacacgcccagttgattgctattaatacaccctctttctcccggtgcccgtgcttgcccgaatgcagagagggccccatagttgaaatgacccaatcaaaggcagtccctgtgaagcgtgatgcctattctgaacacgcgcacacaccaaagagggcgacacaatgagagagacacgcaccccctgcaacgctacgacgctaagtggttccttgtcacgaggtacacccgggggctagcagacaagtgcgttccggcgtggtggtcagccagtggacgggagtatcctgtacctgcacctcgccattgcaggccacacacatgcaacacacaacacaccagagggcggcgagagcagggtagcgcacttgcacttgaacaccctacagtacacttgcattgtgattacaggctacagcacggataacctgctggtcatgcttgcagcgccggagcaaatcaagtaaaatgatgtgtcgccgcaccggtttccaggcctgttccttctctccccatcaacaacagaaacaacaatacaaagcactgcacctctaaccaaagagtcttcttgtcacagtcaagatcatcgcgccagcgttgccagccagccagcccacccatcctctctttgtcatcgctttcactagttgagaccagagacctcgcccctgcccgttgccactgctactgcctatcagtgcctacttcggacctgtgctattgacacaatcccaagtcccagacttccaatatggcaaccatggcatctgctgctgctgctgctgctgctgctcgcgatatcccgaagacgacccaggctggccgagacaccttagctggtgtagcgcccacccgggacggccctgtgacaggcactcaacctcttcccactcctcccaactccatctccccggctctcaacgggctcaaggcccagttccagaaggccaggctcgactccatcgactccgatctcgacctccacgaggacaacgccgcccgcgcccctgtatcctcgtccttcgaggctgcaggcgacatcaccccttctctgctggccaagttccacctgcccgagatcctgcttggccatggtcccttagccatccgccacatcatgggctacctgacgacatcggtccccggcttcgcgggcatccctcctcccaaggcacgaaggctcgtagttgcggcgctcgagggacgtggccagggccacgccactgagaccgctggcggagtcaatggcgatgttcagttcgagaaagtgggctggggtcgctggagcgcaaagcacaagggccaccgttctcgcagcaccggctcccgacgatcatcccccgacaggcgcaggagcccatatcccactggcattcccatcacgcacagcggaggtcttaaggtcagccgagcccggctcaacgctcgcgccgctagcaacggcaactcggagtccccatcccacgatgatcgatacggaaacacgctggaaaacgaggcggataacatgtccctcgactctctcgatcgaccaggctccgcgtcctgctcagaagccccagatgctaatgacgtagtcatgaacgataactccgaggatgagaccgacgacgaggactggggcgccgtgggagccgctgctctgcgggccgcgtcttactcgacaccccaagggggcctttccagtcgcccttataacactggaggctaccgatccttttcatctaacacccggatgctccgtgagcctcgactggataacattgaccttgacgcactcgccgcctcctccgatgctcaagagcgcgaagcgattcaggctctccttcaactcagatctgtataattatcatgcatgcgcggcgttttgaggttcctacattttgaaacaatttccctggttggtaggattggtcggatgtgtttttgtcacccacattggtcgatgcgcggcgttgtctcggcgttcgactatctggcatctctcgtgttcgcgagatttttgctttggttggctttgtggaatgaatgccagcaacaccttgagctctaatggagacggctccgctcccaaccctactatcttacaccccttttgctatttggcatctcgtcaaccctggaggcggactacagcctttactttcaggaacctttcaatgttccgtacttgtacgacgtcacgacttttcttggcagcaggttgtcaatttgatcgtctcacttgcagccagcggaatcacattaaccttgagcttttgacgaatacatttcttgagctcggttataaggaattcccactggcactttttcgaaaaactcatattataccccctttgcattgtatatactcgttcctgtcacacctgctctttttgccacaagatatccctcttcaacaagaactgcgggcatctatctcgtactgctataaaaaactgagcaagctacggattttgcgctgcattttttgacatatctctatacctttaataatcgacacgaattgacggaacgaaatgggaagaaagggcacagttgtgcttgatagatggatgggtggtttttggcatgtggtcactggatcatgcttacttgcctaggccgaggaggaataaaagaaaagtggctgatcgctgtcgctggtttgagcttcggtttgctcaactctatatatcatatctcttgctctatgacgcctcttctacaatgttgtagcatacaatggagtgaagagaggagagcgaggaaagaaaaaccacaacccccctctttttttgaggatgcatttggatgaaggcttatgcctcatcctatgaatgagaacttcgttcatccgtctcaaaaccaatgtctgcttctaactcacgatgtgactttctctgaataatatcgtgatattggtgtgtatggtatgcttgttggctagctgtatgtgacataagacgctgttgtgtcattgcgcatccgacactggagacggattggatgcagggaggtcagaacttattaaccttatcgtaaatcctgcgcgccggtccgtaagcattatgagcattaaagtgtggtgtggttttatgtaggggctttatgtaggggctgatgctgatggtgattacgtgaggcggttgttccgtgcgtt

SEQ ID NO: 17379 - DNA, 1935 bp, Muscodor strobelii
  misc_feature: SGI cDNA ID NO. 565803
  misc_feature: Elevated expression when VOC is produced
  misc_feature: Encodes the peptide sequence at SEQ ID NO 17380
atgagagtgctttgtgtggccgagaaaccgtcaatttcgaaggcagtagctggtcacctttccggtggccagatgcagacacataatacacctgacaagtatatcaagaattatgtttttgattatgatttcgggcacccctggggcaggtgccaggttactatgacggcagttctcggtcatctcaccaccgccgagtttcctccagattacaagaattggagccatccgcctccagatcgtctgtttgatgcacctgtgaatgtcgtcgtcgctaacgacaaggtcaagatcgcagaaaacatcgaaaaacaagcgcgctatgccaatgctctctgcatatggacagactgtgatagggaaggcgagcatatcggccatgaaatacgccaggcagcgacgaaggggaaccatcgaaggcacatactgaatgcttcacgcaatctcgtcaatcttgatgagaagcaggtcaatgccgttgcttcgcgtattgagctagatctgagaatcgggtttgccttcacccgtttcctcacaaccaacctgaggagtcttggtggtccacttcaggaattactgcttagctatggctcatgtcaatttccaaccctgggcttcgttgtggatcgttactttcgagtaagaaacttcaaacctgagcctttctggagcatcaagatcatgcacaaacgtgaaggtattgatgtcaacttcggctgggcccgcaatcgactctttgaccgagcaacagtcgtcatactctacgagcgatgcctagaggcgaagaaagtcaaagttaccaaggtccaagagaaacccacgaagagatggaaacctttgccgttaactacagttgagttacagaaaatggccactagatttttgcggatgactggtcaacaggcgatggacactgctgaacacctttacaataaaggtttcatcagttatccaagaacggagaccgacaggttcgaccctggtatgaatctgcgtggactagtacaaaaacaaacccagtctcaggcttggggcacttttgcccaggggctggtcaatgggggcttccaacaaccaagacaaggacgaaacgatgataaagcgcatccaccgatccatcccataacgtttgccgcacctgaggctctaaacgacacagagagaagaatctatgaatttgtgacgaggcggtttctagcttgctgctctgaagacgccaaaggcgttgccaccgatgtggacatcgtatatggcgatgaatcgttccacgctcatggagttgttgtcctagaacgaaattacctcgatgtttatgtatacgataagtggacgggcagtgtacagcttcctaaattcaccgttggcgagacttttgagccaacagaagctctcatgaccgaagggaagactgtcgcgcctaactacctcaccgaggcagacttgatagcgcttatggacgctaacggcatcggcacagatgccacgatggcagaacacatccaaaagattcaggacagggactatgtccgcacagtgcctagatcagggcgttcagaagacaatgatgatccggcagaagagagtcaacccgcaagaggaggacgaggcgggcgttctactcgcggtggccgaggaggaggccgaggagcaggtaacagcggccgaggaggagtgaaagagttcattccaaccaaactcggcgtcgccctcatcgaaggcttcgatagaatgaactttgagacaagtctcggcaaaccatttctgcgtaaagaaatggagctcaagatgaaggctatttgtgatggccgaacgacgaaagaggccgttcttaacgaaagtatcgatcaataccgacacgtttatatgcagtctcaagaaaagctcggcgttctcaaatcggcttgtcgacagtatgtatttcagaacggagcttag

SEQ ID NO: 17380 - protein, 644 aa, Muscodor strobelii
  misc_feature: SGI Peptide ID NO. 565803
  misc_feature (2)..(148): Pfam Id: PF01751 Pfam Desc: Toprim domain
  misc_feature (149)..(599): Pfam Id: PF01131 Pfam Desc: DNA topoisomerase
  misc_feature (149)..(514): Pfam Id: PF01131 Pfam Desc: DNA topoisomerase
  misc_feature (1)..(640): NCBI GI: 46124677 Blast Desc: FG06716.1 [Gibberella zeae PH-1]
  misc_feature (2)..(633): NCBI GI: 171686712 Blast Desc: protein product [Podospora anserina] gi|170943317|emb|CAP68970.1| protein product [Podospora anserina]
  misc_feature (2)..(635): NCBI GI: 145614352 Blast Desc: MGG_11342 [Magnaporthe grisea 70-15] gi|145021290|gb|EDK05419.1| MGG_11342 [Magnaporthe grisea 70-15]
  misc_feature (34)..(643): NCBI GI: 164428822 Blast Desc: NCU00081 [Neurospora crassa OR74A] gi|157072295|gb|EAA27155.2| NCU00081 [Neurospora crassa OR74A]
  misc_feature (2)..(644): NCBI GI: 156037882 Blast Desc: SS1G_12655 [Sclerotinia sclerotiorum 1980] gi|154698063|gb|EDN97801.1| SS1G_12655 [Sclerotinia sclerotiorum 1980]
  misc_feature (1)..(640): NCBI GI: 261360319 Blast Desc: DNA topoisomerase [Verticillium albo-atrum VaMs.102]
  misc_feature (2)..(633): NCBI GI: 116192151 Blast Desc: CHGG_05793 [Chaetomium globosum CBS 148.51] gi|88181706|gb|EAQ89174.1| CHGG_05793 [Chaetomium globosum CBS 148.51]
  misc_feature (2)..(642): NCBI GI: 226293455 Blast Desc: DNA topoisomerase [Paracoccidioides brasiliensis Pb18]
  misc_feature (2)..(643): NCBI GI: 239608834 Blast Desc: DNA topoisomerase III [Ajellomyces dermatitidis ER-3]
  misc_feature (2)..(643): NCBI GI: 261203873 Blast Desc: DNA topoisomerase III [Ajellomyces dermatitidis SLH14081] gi|239586935|gb|EEQ69578.1| DNA topoisomerase III [Ajellomyces dermatitidis SLH14081]
  misc_feature (1)..(643): SWISSPROT Homolog: EC 5.99.1.2 DNA topoisomerase
  misc_feature: Useful for introducing or modulating the production of volatile compounds
MRVLCVAEKPSISKAVAGHLSGGQMQTHNTPDKYIKNYVFDYDFGHPWGRCQVTMTAVLGHLTTAEFPPDYKNWSHPPPDRLFDAPVNVVVANDKVKIAENIEKQARYANALCIWTDCDREGEHIGHEIRQAATKGNHRRHILNASRNLVNLDEKQVNAVASRIELDLRIGFAFTRFLTTNLRSLGGPLQELLLSYGSCQFPTLGFVVDRYFRVRNFKPEPFWSIKIMHKREGIDVNFGWARNRLFDRATVVILYERCLEAKKVKVTKVQEKPTKRWKPLPLTTVELQKMATRFLRMTGQQAMDTAEHLYNKGFISYPRTETDRFDPGMNLRGLVQKQTQSQAWGTFAQGLVNGGFQQPRQGRNDDKAHPPIHPITFAAPEALNDTERRIYEFVTRRFLACCSEDAKGVATDVDIVYGDESFHAHGVVVLERNYLDVYVYDKWTGSVQLPKFTVGETFEPTEALMTEGKTVAPNYLTEADLIALMDANGIGTDATMAEHIQKIQDRDYVRTVPRSGRSEDNDDPAEESQPARGGRGGRSTRGGRGGGRGAGNSGRGGVKEFIPTKLGVALIEGFDRMNFETSLGKPFLRKEMELKMKAICDGRTTKEAVLNESIDQYRHVYMQSQEKLGVLKSACRQYVFQNGA

SEQ ID NO: 17381 - DNA, 7323 bp, Muscodor strobelii; identical to SEQ ID NO: 17378
  misc_feature: SGI EST ID NO. CUFF.41028.1
  misc_feature: Variant of the nucleotide sequence at SEQ ID NO 17379

SEQ ID NO: 17382 - DNA, 1068 bp, Muscodor strobelii
  misc_feature: SGI cDNA ID NO. 565804
  misc_feature: Elevated expression when VOC is produced
  misc_feature: Encodes the peptide sequence at SEQ ID NO 17383
atggctctccccgccattaaatctctcccggattgcgccgaatatgccaaggtcgttgagccctttctgccacagctctacgatctgccagccagggtcgtcgatactattgcgaagcgcgattcgctaattcagctctatgctgagacaaatcccctaatttctggccttggtttctctatctttctcggtggcatatttctcattgcttccgaggtgaatcgcaactactcgcaggtcgaccgcttctggagcttgttgcctgctttctataatgtccatttttcgatctgggcgcatctgaatgatctaccaagtcaaagagttgatttgattacggcctggagccttgtgtggagtgttcgcttgacattcaactactggcgcaaaggcggttatgagattggatctgaggattacagatgggagatcatccgaggctactgccatcctgtaatcttcgctatcttcaacgctacctttatctctttcatacagagtgtcttgctatttctgctggctgcaccaacctacattgttctcctggcctcgaaaatcgagcctcagattggcgcggccgacgtattttttgctagcgttgaactcgctctcgttttgtcggaatggttcagcgaccagcagcaatgggactttcagacggctaagaaagagtataagaagacggcaaaggttcccaagggatgcggcttcactcaagagcagcttgaccgcggtttcatcacaactgggctgtgggcgtactgtcgtcacccgaacttcacagcagaacaaactatctggtttgttctgtaccagcacgcctgctattcgggcaatgtgctctattgctgggctgcagttggacccttgttcttgatcaacctgttccaaggctcgacttggcttactgagttgcttactgctggaaagtatcccgagtacaagcattaccagaagcaagttggtatgcagatcccaagcctgcgtccttataaccctcaggctgtcacccctaagatcattcgtaccagcgatttggataagcgagagaaggcgaagaagaaataa

SEQ ID NO: 17383 - protein, 355 aa, Muscodor strobelii
  misc_feature: SGI Peptide ID NO. 565804
  misc_feature (66)..(321): Pfam Id: PF06966 Pfam Desc: Domain of function (DUF1295)
  misc_feature (1)..(355): NCBI GI: 171686710 Blast Desc: protein product [Podospora anserina] gi|170943316|emb|CAP68969.1| protein product [Podospora anserina]
  misc_feature (1)..(355): NCBI GI: 116192149 Blast Desc: CHGG_05792 [Chaetomium globosum CBS 148.51] gi|88181705|gb|EAQ89173.1| CHGG_05792 [Chaetomium globosum CBS 148.51]
  misc_feature (1)..(355): NCBI GI: 256733269 Blast Desc: NECHADRAFT_68672 [Nectria haematococca mpVI 77-13-4]
  misc_feature (1)..(346): NCBI GI: 39969087 Blast Desc: MGG_10154 [Magnaporthe grisea 70-15] gi|145021288|gb|EDK05417.1| MGG_10154 [Magnaporthe grisea 70-15]
  misc_feature (1)..(354): NCBI GI: 46124679 Blast Desc: FG06717.1 [Gibberella zeae PH-1]
  misc_feature (1)..(329): NCBI GI: 189188222 Blast Desc: PTRG_00117 [Pyrenophora tritici-repentis Pt-1C-BFP] gi|187972056|gb|EDU39555.1| PTRG_00117 [Pyrenophora tritici-repentis Pt-1C-BFP]
  misc_feature (2)..(335): NCBI GI: 169622902 Blast Desc: SNOG_14676 [Phaeosphaeria nodorum SN15] gi|111056748|gb|EAT77868.1| SNOG_14676 [Phaeosphaeria nodorum SN15]
  misc_feature (2)..(353): NCBI GI: 261360320 Blast Desc: conserved [Verticillium albo-atrum VaMs.102]
  misc_feature (1)..(326): NCBI GI: 238840851 Blast Desc: DUF1295 domain-containing protein [Microsporum canis CBS 113480]
  misc_feature (1)..(355): NCBI GI: 154315222 Blast Desc: BC1G_04650 [Botryotinia fuckeliana B05.10] gi|150847613|gb|EDN22806.1| BC1G_04650 [Botryotinia fuckeliana B05.10]
  misc_feature: Useful for introducing or modulating the production of volatile compounds
MALPAIKSLPDCAEYAKVVEPFLPQLYDLPARVVDTIAKRDSLIQLYAETNPLISGLGFSIFLGGIFLIASEVNRNYSQVDRFWSLLPAFYNVHFSIWAHLNDLPSQRVDLITAWSLVWSVRLTFNYWRKGGYEIGSEDYRWEIIRGYCHPVIFAIFNATFISFIQSVLLFLLAAPTYIVLLASKIEPQIGAADVFFASVELALVLSEWFSDQQQWDFQTAKKEYKKTAKVPKGCGFTQEQLDRGFITTGLWAYCRHPNFTAEQTIWFVLYQHACYSGNVLYCWAAVGPLFLINLFQGSTWLTELLTAGKYPEYKHYQKQVGMQIPSLRPYNPQAVTPKIIRTSDLDKREKAKKK

SEQ ID NO: 17384 - DNA, 1685 bp, Muscodor strobelii
  misc_feature: SGI EST ID NO. CUFF.40862.0
  misc_feature: Variant of the nucleotide sequence at SEQ ID NO 17382
cgcattttgggcgggtctgcaatgtggaattgtgatctagaaatccatgacgtccttctcttttaagcccgccacaaagaaagctgcgtattttgcttctgctgtacataactgacgatcgttgtttcgcttgctttaatacgaacaattcccactcaattctgtgagatggtagattgtccactccagttgtaaataggtacgcatatctactccgaagtcaagatggctctccccgccattaaatctctcccggattgcgccgaatatgccaaggtcgttgagccctttctgccacagctctacgatctgccagccagggtcgtcgatactattgcgaagcgcgattcgctaattcagctctatgctgagacaaatcccctaatttctggccttggtttctctatctttctcggtggcatatttctcattgcttccgaggtgaatcgcaactactcgcaggtcgaccgcttctggagcttgttgcctgctttctataatgtccatttttcgatctgggcgcatctgaatgatctaccaagtcaaagagttgatttgattacggcctggagccttgtgtggagtgttcgcttgacattcaactactggcgcaaaggcggttatgagattggatctgaggattacagatgggagatcatccgaggctactgccatcctgtaatcttcgctatcttcaacgctacctttatctctttcatacagagtgtcttgctatttctgctggctgcaccaacctacattgttctcctggcctcgaaaatcgagcctcagattggcgcggccgacgtattttttgctagcgttgaactcgctctcgttttgtcggaatggttcagcgaccagcagcaatgggactttcagacggctaagaaagagtataagaagacggcaaaggttcccaagggatgcggcttcactcaagagcagcttgaccgcggtttcatcacaactgggctgtgggcgtactgtcgtcacccgaacttcacagcagaacaaactatctggtttgttctgtaccagcacgcctgctattcgggcaatgtgctctattgctgggctgcagttggacccttgttcttgatcaacctgttccaaggctcgacttggcttactgagttgcttactgctggaaagtatcccgagtacaagcattaccagaagcaagttggtatgcagatcccaagcctgcgtccttataaccctcaggctgtcacccctaagatcattcgtaccagcgatttggataagcgagagaaggcgaagaagaaataaataaatgtccatcatcagccgagacttctgatatggaccattcaaaatatcgtaactggtcttattcggatatccagttcttaatgtcatattctatgctgacagtgggcctacgcaactgttttgtatcactgagtatttagacgttaccaaaatgatgagaggaaaattttaggaaagtaactcagataaaacaggaagagagcgcaagcaagggaatgcagggatatgagaagggttgatgaaagaatgtagagaatgacttatatgtagtcatccttataatatgtactccacgcgttggagatgctgtagaggaattcgagatcgagtcgcagccacaagtagtaccttacatttctaatcaattcaaggtcttttacactctgcaa

SEQ ID NO: 17385 - DNA, 1074 bp, Muscodor strobelii
  misc_feature: SGI cDNA ID NO. 565805
  misc_feature: Encodes the peptide sequence at SEQ ID NO 17386
atggctctccccgccattaaatctctcccggattgcgccgaatatgccaaggtcgttgagccctttctgccacagctctacgatctgccagccagggtcgtcgatactattgcgaagcgcgattcgctaattcagctctatgctgagacaaatcccctaatttctggccttggtttctctatctttctcggtggcatatttctcattgcttccgaggtgaatcgcaactactcgcaggtcgaccgcttctggagcttgttgcctgctttctataatgtccatttttcgatctgggcgcatctgaatgatctaccaagtcaaagagttgatttgattacggcctggagccttgtgtggaccttgcaggttcgcttgacattcaactactggcgcaaaggcggttatgagattggatctgaggattacagatgggagatcatccgaggctactgccatcctgtaatcttcgctatcttcaacgctacctttatctctttcatacagagtgtcttgctatttctgctggctgcaccaacctacattgttctcctggcctcgaaaatcgagcctcagattggcgcggccgacgtattttttgctagcgttgaactcgctctcgttttgtcggaatggttcagcgaccagcagcaatgggactttcagacggctaagaaagagtataagaagacggcaaaggttcccaagggatgcggcttcactcaagagcagcttgaccgcggtttcatcacaactgggctgtgggcgtactgtcgtcacccgaacttcacagcagaacaaactatctggtttgttctgtaccagcacgcctgctattcgggcaatgtgctctattgctgggctgcagttggacccttgttcttgatcaacctgttccaaggctcgacttggcttactgagttgcttactgctggaaagtatcccgagtacaagcattaccagaagcaagttggtatgcagatcccaagcctgcgtccttataaccctcaggctgtcacccctaagatcattcgtaccagcgatttggataagcgagagaaggcgaagaagaaataa

SEQ ID NO: 17386 - protein, 357 aa, Muscodor strobelii
  misc_feature: SGI Peptide ID NO. 565805
  misc_feature (66)..(323): Pfam Id: PF06966 Pfam Desc: Domain of function (DUF1295)
  misc_feature (1)..(357): NCBI GI: 171686710 Blast Desc: protein product [Podospora anserina] gi|170943316|emb|CAP68969.1| protein product [Podospora anserina]
  misc_feature (1)..(357): NCBI GI: 116192149 Blast Desc: CHGG_05792 [Chaetomium globosum CBS 148.51] gi|88181705|gb|EAQ89173.1| CHGG_05792 [Chaetomium globosum CBS 148.51]
  misc_feature (1)..(357): NCBI GI: 256733269 Blast Desc: NECHADRAFT_68672 [Nectria haematococca mpVI 77-13-4]
  misc_feature (1)..(348): NCBI GI: 39969087 Blast Desc: MGG_10154 [Magnaporthe grisea 70-15] gi|145021288|gb|EDK05417.1| MGG_10154 [Magnaporthe grisea 70-15]
  misc_feature (1)..(356): NCBI GI: 46124679 Blast Desc: FG06717.1 [Gibberella zeae PH-1]
  misc_feature (1)..(331): NCBI GI: 189188222 Blast Desc: PTRG_00117 [Pyrenophora tritici-repentis Pt-1C-BFP] gi|187972056|gb|EDU39555.1| PTRG_00117 [Pyrenophora tritici-repentis Pt-1C-BFP]
  misc_feature (2)..(337): NCBI GI: 169622902 Blast Desc: SNOG_14676 [Phaeosphaeria nodorum SN15] gi|111056748|gb|EAT77868.1| SNOG_14676 [Phaeosphaeria nodorum SN15]
  misc_feature (2)..(355): NCBI GI: 261360320 Blast Desc: conserved [Verticillium albo-atrum VaMs.102]
  misc_feature (1)..(328): NCBI GI: 238840851 Blast Desc: DUF1295 domain-containing protein [Microsporum canis CBS 113480]
  misc_feature (1)..(357): NCBI GI: 154315222 Blast Desc: BC1G_04650 [Botryotinia fuckeliana B05.10] gi|150847613|gb|EDN22806.1| BC1G_04650 [Botryotinia fuckeliana B05.10]
MALPAIKSLPDCAEYAKVVEPFLPQLYDLPARVVDTIAKRDSLIQLYAETNPLISGLGFSIFLGGIFLIASEVNRNYSQVDRFWSLLPAFYNVHFSIWAHLNDLPSQRVDLITAWSLVWTLQVRLTFNYWRKGGYEIGSEDYRWEIIRGYCHPVIFAIFNATFISFIQSVLLFLLAAPTYIVLLASKIEPQIGAADVFFASVELALVLSEWFSDQQQWDFQTAKKEYKKTAKVPKGCGFTQEQLDRGFITTGLWAYCRHPNFTAEQTIWFVLYQHACYSGNVLYCWAAVGPLFLINLFQGSTWLTELLTAGKYPEYKHYQKQVGMQIPSLRPYNPQAVTPKIIRTSDLDKREKAKKK

SEQ ID NO: 17387 - DNA, 1685 bp, Muscodor strobelii; identical to SEQ ID NO: 17384
  misc_feature: SGI EST ID NO. CUFF.40862.0
  misc_feature: Variant of the nucleotide sequence at SEQ ID NO 17385

SEQ ID NO: 17388 - DNA, 546 bp, Muscodor strobelii
  misc_feature: SGI cDNA ID NO. 565806
  misc_feature: Encodes the peptide sequence at SEQ ID NO 17389
atgtctctcgccttctctccagcaccgtaccatatcctctcatacggggcgctgtttgggacgcaattcttccatactttcatcaactcgatactttcgttcaaagttcttgagcgaccacagtttgccattctgcagcgtgccgttttcccggcgtattttggtattcaagccgcagcgcctgttgtattggctttgacgtaccctggaggtggtctccggtctcccctactctcatcagggctgagtggcgtgttgcatccgacgaatcgatggaccgttctcgtgcctctgaccacggcttttgtgactgggctggcgaatctcgtttacttcctgcctgagacaaataaggtcaccgcccaacgaagacagcaagaaatcaaagatggcaaacagagctgggataaagcgccacattctaaggagatgaccgcattgaacaagaagttcgggaaactacatggcatctcttcattgttcaatctcgtaacattggttgctacagttgtttatggtgtggatctttcttctaggatccagtag

SEQ ID NO: 17389 - protein, 181 aa, Muscodor strobelii
  misc_feature: SGI Peptide ID NO. 565806
  misc_feature (1)..(181): NCBI GI: 156051444 Blast Desc: SS1G_07129 [Sclerotinia sclerotiorum 1980] gi|154704907|gb|EDO04646.1| SS1G_07129 [Sclerotinia sclerotiorum 1980]
  misc_feature (2)..(181): NCBI GI: 39969091 Blast Desc: MGG_10156 [Magnaporthe grisea 70-15] gi|145021286|gb|EDK05415.1| MGG_10156 [Magnaporthe grisea 70-15]
  misc_feature (1)..(181): NCBI GI: 154301926 Blast Desc: BC1G_10200 [Botryotinia fuckeliana B05.10] gi|150855592|gb|EDN30784.1| BC1G_10200 [Botryotinia fuckeliana B05.10]
  misc_feature (5)..(180): NCBI GI: 171686706 Blast Desc: protein product [Podospora anserina] gi|170943314|emb|CAP68967.1| protein product [Podospora anserina]
  misc_feature (5)..(181): NCBI GI: 255942517 Blast Desc: Pc18g01830 [Penicillium chrysogenum Wisconsin 54-1255] gi|211586760|emb|CAP94407.1| Pc18g01830 [Penicillium chrysogenum Wisconsin 54-1255]
  misc_feature (6)..(180): NCBI GI: 121710656 Blast Desc: conserved [Aspergillus clavatus NRRL 1] gi|119401094|gb|EAW11518.1| conserved [Aspergillus clavatus NRRL 1]
  misc_feature (8)..(181): NCBI GI: 238840857 Blast Desc: conserved [Microsporum canis CBS 113480]
  misc_feature (6)..(180): NCBI GI: 119498149 Blast Desc: NFIA_035030 [Neosartorya fischeri NRRL 181] gi|119413996|gb|EAW23935.1| conserved [Neosartorya fischeri NRRL 181]
  misc_feature (8)..(180): NCBI GI: 119194857 Blast Desc: CIMG_01803 [Coccidioides immitis RS] gi|240105128|gb|EER23321.1| CPC735_046910 [Coccidioides posadasii C735 delta SOWgp]
  misc_feature (2)..(180): NCBI GI: 256732805 Blast Desc: NECHADRAFT_102585 [Nectria haematococca mpVI 77-13-4]
MSLAFSPAPYHILSYGALFGTQFFHTFINSILSFKVLERPQFAILQRAVFPAYFGIQAAAPVVLALTYPGGGLRSPLLSSGLSGVLHPTNRWTVLVPLTTAFVTGLANLVYFLPETNKVTAQRRQQEIKDGKQSWDKAPHSKEMTALNKKFGKLHGISSLFNLVTLVATVVYGVDLSSRIQ

SEQ ID NO: 17390 - DNA, 835 bp, Muscodor strobelii
  misc_feature: SGI EST ID NO. CUFF.40869.0
  misc_feature: Variant of the nucleotide sequence at SEQ ID NO 17388
cttttgcatacacctaactgattagaattgttctcaattgattctcactcttcccgtcaacatactacttacattacgtccatgcttctagtctttaatttgtgaattctgcaaacatgtctctcgccttctctccagcaccgtaccatatcctctcatacggggcgctgtttgggacgcaattcttccatactttcatcaactcgatactttcgttcaaagttcttgagcgaccacagtttgccattctgcagcgtgccgttttcccggcgtattttggtattcaagccgcagcgcctgttgtattggctttgacgtaccctggaggtggtctccggtctcccctactctcatcagggctgagtggcgtgttgcatccgacgaatcgatggaccgttctcgtgcctctgaccacggcttttgtgactgggctggcgaatctcgtttacttcctgcctgagacaaataaggtcaccgcccaacgaagacagcaagaaatcaaagatggcaaacagagctgggataaagcgccacattctaaggagatgaccgcattgaacaagaagttcgggaaactacatggcatctcttcattgttcaatctcgtaacattggttgctacagttgtttatggtgtggatctttcttctaggatccagtagggtattgacggtcaagcaatgctccgatttgatcgcagatctctcaagaacacgctgttgtatgtgtacactgattgtatgaggtggttcgaatttcattatgtcataattgttatgatgaaacctgcagtgattaccttttcaagcctcaagtattcgtgtagtgttgtccg

SEQ ID NO: 17391 - DNA, 2211 bp, Muscodor strobelii
  misc_feature: SGI cDNA ID NO. 565807
  misc_feature: Encodes the peptide sequence at SEQ ID NO 17392
atggcagacaaggaagcaacaatgtatatcatcgacctagggtcatcgatgaagactgtccacactcgtgacaaggtcttcgatccggaaggcatcaagcaagacaacaagacagaagtatcaaatctcgactggagtatgcgctatgtctgggacaagatatcgcacactgtcgcggcgtcgagaaaaacatggaatgttggcgtgattggattgcggacggatgagaccaatcatggtctagaagacgtggaagaagaggaatacagccatatatccattcttcaagatctgggacctatgacgatgagagaccttgcgagtctgcgtggccgtattgcaactagcgatacggaatacggtgactgtatttctgccattgtcgtcgcgatcgagatgatcaacaagctttgtaagaagctcaagtacaaccgcaagatagttctggttacggacggagaaggaccattggaggccaacgatgtcgatgacatatcggaacaactcaaggactctaatatccatctcactgtattaggagtcgactttgatgacgcagaatttggcttcaaggaagaggataaatctgaactcaaacaacaaaacgaaggcattctcagaaatttagttgaaaaatgcgacggggtgttcggtacaataaaagaagcaattgacgagcttgagaccccaagactgaaaacagtcagagcgtacaagacttacgatggacagcttacccttggagatccggaaaaacatccagatgctatgagcatcagtgttgagcgctacttcaagacacacaaagcgaccgtgccgtctgcgagcaatgttgtaacgaaggagccggatgaggatcattcagcgggtgatggcgatgcaatgcaaggtgttgagtcggcgacagaatttgctgcagtcaagaatgctcgcacgtacaaggtcaatgatcctagcgctcccggaggcaaacgtgatgtcgagttcgaagatctcgccaaggggtatgaatacggcagtactgcagttcatatcagcgaatctgagtttaatatcaccaagctggaaactggcaagagtttcagcattgtgggtttcatcaatcaggaaaagtatgaacctttcattaatatgggcgagactggtattacggttgcccaaaagttaaacgacgcagcagcattgaagctatcgtccctgattcattcactgcacgaattggacagttatgcaatcgcaagaatggtggtcaaagatggaaaagagccaatacttctacttcttgcgcctcatattgaacaagactttgaatgcctgtatgacgttcagcttccgttcgcagaggacgtcagaaattatcgattcccgccattgggccgagtaatcacagttcaaggcaatacaattaccgaaaaccaccgaaacctaccgtccgaggttcttcaagacgcaatggacgactacgtagatgccatggacatatcttcatgggataaagatgatgatggtaatcaaacactggagtatgctgcaatagaagacctttattgtcccccaatacaccgcataaatcaggttgtccgacatcgagccacatatccagaccagcctttgccggatgtgccacctattcttctcaaatattcccatgcccctgccgagttacagaagaatgctcagtctgagctcgaagatctcatcgacaaagccagcgtgaagaaagtgccagagaaagcagtgggccgaaaaggcaagacaaagccgaagccgatatctggtctcgatatcgatgctcttctacaactccccgagaataaacgaggtccgattaatcctgataatgcaatccctgagttcaaacaaaaggtagacaacgccgatgaccaagacaccgtcgaggatgctatgaagcaaatgggtaccatcatccgcgatcttgtcacaaactgcttcggcgatagagaatacggtcgcgcgattgagtacatcggcgtgctaagagagactgcgatcgactacgagtttccagacttattcaacaaattcgtcaaggatttcaagacgcgattgctctctggtgcgctgggcggctcgcggagagagttgtggttcatgttcaagagagtgaaactgggcttgattgacaacaaaacttctgagcactctaaagtcacgccggatgaggcggcagagttctatcaaatgaagtga

SEQ ID NO: 17392 - protein, 736 aa, Muscodor strobelii
  misc_feature: SGI Peptide ID NO. 565807
  misc_feature (245)..(485): Pfam Id: PF02735 Pfam Desc: Ku70/Ku80 beta-barrel domain
  misc_feature (6)..(227): Pfam Id: PF03731 Pfam Desc: Ku70/Ku80 N-terminal alpha/beta domain
  misc_feature (608)..(734): Pfam Id: PF08785 Pfam Desc: Ku C terminal domain like
  misc_feature (311)..(459): Pfam Id: PF02735 Pfam Desc: Ku70/Ku80 beta-barrel domain
  misc_feature (6)..(185): Pfam Id: PF03731 Pfam Desc: Ku70/Ku80 N-terminal alpha/beta domain
  misc_feature (630)..(733): Pfam Id: PF08785 Pfam Desc: Ku C terminal domain like
  misc_feature (1)..(736): NCBI GI: 261360326 Blast Desc: Ku80 [Verticillium albo-atrum VaMs.102]
  misc_feature (1)..(729): NCBI GI: 116192145 Blast Desc: CHGG_05790 [Chaetomium globosum CBS 148.51] gi|121786374|sp|Q2H6C5.1|KU80_CHAGB RecName: Full=ATP-dependent DNA helicase II subunit 2; AltName: Full=ATP-dependent DNA II CBS
  misc_feature (1)..(736): NCBI GI: 256733268 Blast Desc: [Nectria haematococca mpVI 77-13-4]
  misc_feature (1)..(734): NCBI GI: 161789042 Blast Desc: [Nectria haematococca mpVI 77-13-4]
  misc_feature (1)..(732): NCBI GI: 46124687 Blast Desc: FG06721.1 [Gibberella zeae PH-1]
  misc_feature (1)..(736): NCBI GI: 212542997 Blast Desc: Ku family DNA helicase, [Penicillium marneffei ATCC 18224] gi|210066560|gb|EEA20653.1| Ku family DNA helicase, [Penicillium marneffei ATCC 18224]
  misc_feature (1)..(734): NCBI GI: 145614348 Blast Desc: MGG_10157 [Magnaporthe grisea 70-15] gi|145021285|gb|EDK05414.1| MGG_10157 [Magnaporthe grisea 70-15]
  misc_feature (1)..(732): NCBI GI: 212542999 Blast Desc: Ku family DNA helicase, [Penicillium marneffei ATCC 18224] gi|210066561|gb|EEA20654.1| Ku family DNA helicase, [Penicillium marneffei ATCC 18224]
  misc_feature (1)..(736): NCBI GI: 261203883 Blast Desc: protein Ku80 [Ajellomyces dermatitidis SLH14081] gi|239586940|gb|EEQ69583.1| protein Ku80 [Ajellomyces dermatitidis SLH14081] gi|239608829|gb|EEQ85816.1| protein Ku80
  misc_feature (1)..(736): NCBI GI: 225560795 Blast Desc: conserved [Ajellomyces capsulatus G186AR]
MADKEATMYIIDLGSSMKTVHTRDKVFDPEGIKQDNKTEVSNLDWSMRYVWDKISHTVAASRKTWNVGVIGLRTDETNHGLEDVEEEEYSHISILQDLGPMTMRDLASLRGRIATSDTEYGDCISAIVVAIEMINKLCKKLKYNRKIVLVTDGEGPLEANDVDDISEQLKDSNIHLTVLGVDFDDAEFGFKEEDKSELKQQNEGILRNLVEKCDGVFGTIKEAIDELETPRLKTVRAYKTYDGQLTLGDPEKHPDAMSISVERYFKTHKATVPSASNVVTKEPDEDHSAGDGDAMQGVESATEFAAVKNARTYKVNDPSAPGGKRDVEFEDLAKGYEYGSTAVHISESEFNITKLETGKSFSIVGFINQEKYEPFINMGETGITVAQKLNDAAALKLSSLIHSLHELDSYAIARMVVKDGKEPILLLLAPHIEQDFECLYDVQLPFAEDVRNYRFPPLGRVITVQGNTITENHRNLPSEVLQDAMDDYVDAMDISSWDKDDDGNQTLEYAAIEDLYCPPIHRINQVVRHRATYPDQPLPDVPPILLKYSHAPAELQKNAQSELEDLIDKASVKKVPEKAVGRKGKTKPKPISGLDIDALLQLPENKRGPINPDNAIPEFKQKVDNADDQDTVEDAMKQMGTIIRDLVTNCFGDREYGRAIEYIGVLRETAIDYEFPDLFNKFVKDFKTRLLSGALGGSRRELWFMFKRVKLGLIDNKTSEHSKVTPDEAAEFYQMK

SEQ ID NO: 17393 - DNA, 3152 bp, Muscodor strobelii
  misc_feature: SGI EST ID NO. CUFF.40889.0
  misc_feature: Variant of the nucleotide sequence at SEQ ID NO 17391
tccgggtagtggatccgtgctaaagaatagcttaccttggccaatttaaggagctatggccaactgacttcacagtggagtaagtccctacagtcaagctaacaacgcccatttaacggacatcacgtgctgtcgcgtctgcctgctcacgtccgcccttgtaagttgcaattgagtcggttcgttgcgcgcttcaggcagctatcgcggtggggagacggagttatgtgaaaaccagcttgttcgctctttcttctcatagaaatgaggtgctcttctacaatttgtcctgactcactttctattcagagcctgcattcgatttctgtcttacagcaacgtccagcatggcagacaaggaagcaacaatgtatatcatcgacctagggtcatcgatgaagactgtccacactcgtgacaaggtcttcgatccggaaggcatcaagcaagacaacaagacagaagtatcaaatctcgactggagtatgcgctatgtctgggacaagatatcgcacactgtcgcggcgtcgagaaaaacatggaatgttggcgtgattggattgcggacggatgagaccaatcatggtctagaagacgtggaagaagaggaatacagccatatatccattcttcaagatctgggacctatgacgatgagagaccttgcgagtctgcgtggccgtattgcaactagcgatacggaatacggtgactgtatttctgccattgtcgtcgcgatcgagatgatcaacaagctttgtaagaagctcaagtacaaccgcaagatagttctggttacggacggagaaggaccattggaggccaacgatgtcgatgacatatcggaacaactcaaggactctaatatccatctcactgtattaggagtcgactttgatgacgcagaatttggcttcaaggaagaggataaatctgaactcaaacaacaaaacgaaggcattctcagaaatttagttgaaaaatgcgacggggtgttcggtacaataaaagaagcaattgacgagcttgagaccccaagactgaaaacagtcagagcgtacaagacttacgatggacagcttacccttggagatccggaaaaacatccagatgctatgagcatcagtgttgagcgctacttcaagacacacaaagcgaccgtgccgtctgcgagcaatgttgtaacgaaggagccggatgaggatcattcagcgggtgatggcgatgcaatgcaaggtgttgagtcggcgacagaatttgctgcagtcaagaatgctcgcacgtacaaggtcaatgatcctagcgctcccggaggcaaacgtgatgtcgagttcgaagatctcgccaaggggtatgaatacggcagtactgcagttcatatcagcgaatctgagtttaatatcaccaagctggaaactggcaagagtttcagcattgtgggtttcatcaatcaggaaaagtatgaacctttcattaatatgggcgagactggtattacggttgcccaaaagttaaacgacgcagcagcattgaagctatcgtccctgattcattcactgcacgaattggacagttatgcaatcgcaagaatggtggtcaaagatggaaaagagccaatacttctacttcttgcgcctcatattgaacaagactttgaatgcctgtatgacgttcagcttccgttcgcagaggacgtcagaaattatcgattcccgccattgggccgagtaatcacagttcaaggcaatacaattaccgaaaaccaccgaaacctaccgtccgaggttcttcaagacgcaatggacgactacgtagatgccatggacatatcttcatgggataaagatgatgatggtaatcaaacactggagtatgctgcaatagaagacctttattgtcccccaatacaccgcataaatcaggttgtccgacatcgagccacatatccagaccagcctttgccggatgtgccacctattcttctcaaatattcccatgcccctgccgagttacagaagaatgctcagtctgagctcgaagatctcatcgacaaagccagcgtgaagaaagtgccagagaaagcagtgggccgaaaaggcaagacaaagccgaagccgatatctggtctcgatatcgatgctcttctacaactccccgagaataaacgaggtccgattaatcctgataatgcaatccctgagttcaaacaaaaggtagacaacgccgatgaccaagacaccgtcgaggatgctatgaagcaaatgggtaccatcatccgcgatcttgtcacaaactgcttcggcgatagagaatacggtcgcgcgattgagtacatcggcgtgctaagagagactgcgatcgactacgagtttccagacttattcaacaaattcgtcaaggatttcaagacgcgattgctctctggtgcgctgggcggctcgcggagagagttgtggttcatgttcaagagagtgaaactgggcttgattgacaacaaaacttctgagcactctaaagtcacgccggatgaggcggcagagttctatcaaatgaagtgatccccacagctttgatcgtctctatcatgtaccatcattcgcctaagaaaatattgcgttcggtggtggatatcggcgtttcgggggcttcggtctaaggcctgaaagacttcttattcgggataatcatagttcacaacgatcctagaaatgtgagaataaagccgcaaaagcgcggcatcattctagaagttgctggtgttgcggagctctctgcaaatagggtatgaatagttttgtgatagccctacttcaatcaggaacatgtcacaaagggactatagtctagatgaaaatgctttgccgctaaattgctgcgcgacgtctccagatttataagagaatgaagatatagcctagtggtgttaccattgcataccacaatgccattgagatatccgttcaaaaagtctgtcaccatacaagcagtgtaagataagcatgaaagtcaacatttgttactaactcaacgcctaatttcttgtcctaagtatttcctggcacaatggatgaaactaattcaaggaatgcagacgatgccatcactcttctcgagtctctctgctcaactatcccgataccacctgctgtgcg

SEQ ID NO: 17394 - DNA, 930 bp, Muscodor strobelii
  misc_feature: SGI cDNA ID NO. 565808
  misc_feature: Encodes the peptide sequence at SEQ ID NO 17395
atggcacccaaattccaaagagaagccaacacgcccgagcctggcgtttggggtcaagatgtcgtgaagatcagagcatccggaggaaaacgagtctttcatgtccatgctcgtctcttggggcatatgtccaagtatttccgaacggcgctcaatagcagtttcgaggaggctcagacgctcgatttcactctcacagagcattgcgacgacacaattctcaccatgttcacagcttgggtctaccgacgatgcattgtgcacgacatggttgttaaagctagcggcgcagccaaccaaaacattcccaccgaaacttatgtgaagggttggctattcggcgattatattggcgctgcagacttccagaatactctgatgtatgtgatttacgatcaccgaagttgcttgtggcctttcaacatcatcgccgatttttggcatggtataccggtggattctgcactcgacagcctgtttttcgagacgttctgcgagcaaatttcccgttcgacgaaggctggacatgaacgtgacctactgaagggaatggagaagtttccatcccacgtagagccggcgctggtccgtcgcctgttgcataaagagatcactggtaattggaacccaacagattataagttgagcaagagcagagaaccctactatctgctggactggatggatgtgggcgatttcctcgtcgagaaagaggatgcaaaggagattgcgagcggaaagaaagaggatgacgatattcagttcgacagtgatgctcctatgagaggggacatcaagccacatggatcccgacaacgctcggcttacggagctccgctcaaaagaaagataagtttcaacgaggacgggactcttgttgccggccctagacggaggttgaggtcgaggttgttgcggaacgacatttaa

SEQ ID NO: 17395 - protein, 309 aa, Muscodor strobelii
  misc_feature: SGI Peptide ID NO. 565808
  misc_feature (18)..(184): NCBI GI: 169603894 Blast Desc: SNOG_04956 [Phaeosphaeria nodorum SN15] gi|111066227|gb|EAT87347.1| SNOG_04956 [Phaeosphaeria nodorum SN15]
  misc_feature (1)..(123): NCBI GI: 169604436 Blast Desc: SNOG_05231 [Phaeosphaeria nodorum SN15] gi|160706568|gb|EAT87622.2| SNOG_05231 [Phaeosphaeria nodorum SN15]
MAPKFQREANTPEPGVWGQDVVKIRASGGKRVFHVHARLLGHMSKYFRTALNSSFEEAQTLDFTLTEHCDDTILTMFTAWVYRRCIVHDMVVKASGAANQNIPTETYVKGWLFGDYIGAADFQNTLMYVIYDHRSCLWPFNIIADFWHGIPVDSALDSLFFETFCEQISRSTKAGHERDLLKGMEKFPSHVEPALVRRLLHKEITGNWNPTDYKLSKSREPYYLLDWMDVGDFLVEKEDAKEIASGKKEDDDIQFDSDAPMRGDIKPHGSRQRSAYGAPLKRKISFNEDGTLVAGPRRRLRSRLLRNDI

SEQ ID NO: 17396 - DNA, 882 bp, Muscodor strobelii
  misc_feature: SGI cDNA ID NO. 565809
  misc_feature: Encodes the peptide sequence at SEQ ID NO 17397
atgccgcgcaacttcaagagagaggaacgaactccgcagcccagccaatggggtcacgaagttgtcatattcgaaacaaacctcccactcagacgttactccattcatgccaagctcctggctcacttctctacgtttgcacgaagcgagctcaacagccacttccaagagggaacaatctatgacttcactttcgatgacttccatttccctcacaacgtcaatcattttgacagtacgacgctattgaacttcatcacttggatctatcaacgaagcaccgtcgaagagtgcgactacgacatttgcgaacaaagtttcgtgaagtctcagaatattgcagatgttgtggctagttggctctttggcttcgagattggcgcagcagactttcagaatgacatgatgaagatcatcttccgcagaatgggcgagctttggtcccaacatataatagaacactgttggtcgagtctgcctgttgactctgcgcttgatcagatgttcttcgatgcgttttgccgggccatctcacgctcacactacactcaggagcacttcgtgcaaagggccatcgacaaacttccagagcatactatggaaaaattggttcgccgcttggcacataagagcgtgacaggtcgatgggatcccaatgataacggcgacggtgacgatgacgacgagccatacaatccctgggcttggctcagagtcaatgactacatggtcgaagtcgaggagtggcaggaacaagaagctgacagcgaagaccaagatgatgaaatcatctacgaagaagaagagactgatgaagtcgaggagatcggtgacgaagacgagaacacaatggacgaagatatggaggacgaggagctttaa

SEQ ID NO: 17397 - protein, 293 aa, Muscodor strobelii
  misc_feature: SGI Peptide ID NO. 565809
  misc_feature (23)..(207): NCBI GI: 189195644 Blast Desc: conserved [Pyrenophora tritici-repentis Pt-1C-BFP] gi|187980039|gb|EDU46665.1| conserved [Pyrenophora tritici-repentis Pt-1C-BFP]
MPRNFKREERTPQPSQWGHEVVIFETNLPLRRYSIHAKLLAHFSTFARSELNSHFQEGTIYDFTFDDFHFPHNVNHFDSTTLLNFITWIYQRSTVEECDYDICEQSFVKSQNIADVVASWLFGFEIGAADFQNDMMKIIFRRMGELWSQHIIEHCWSSLPVDSALDQMFFDAFCRAISRSHYTQEHFVQRAIDKLPEHTMEKLVRRLAHKSVTGRWDPNDNGDGDDDDEPYNPWAWLRVNDYMVEVEEWQEQEADSEDQDDEIIYEEEETDEVEEIGDEDENTMDEDMEDEEL

SEQ ID NO: 17398 - DNA, 780 bp, Muscodor strobelii
  misc_feature: SGI cDNA ID NO. 565810
  misc_feature: Encodes the peptide sequence at SEQ ID NO 17399
atgaagcgcaagttcgagaggcatcagtctcctcctggagccagattatggggcactgaaatggttacgctgaaagctgctacaggggacaaaaatttcagcattcatgccgagttactgacacattattcggtttatttccgcaaggcactgaacagcgggtttgaggagagtcggacttatagcttcacactcaccgagcattgcgacgattctgtgttgacgctgtttacgacatggatttacgcccgcggtacttccgcaacgtctgactacgatagttgtaatcaaccgtacctgacggagtgtcgggtcttcgatctctcgcgatcttggctctttggtgattacattggcgccgcggacttccaaaacgatctgatgaaagtcattttcatgaattactggcgattgcttcagcatggaaggagcgagaccagttatctggagagaatttggcagaatatacccgaaggctctgctcttgacaggttgtgtatcgaagttgcctgctacgcgatcggtcgtaaaagcagagacggatatctgagcgaagataggttgattaagagggtcttcgaatatccagagcgcgtgcgatcagtactgatccggcgtatgatgcacatgatcaaggtcggacgatgggacccaaacgatgatggctccggagatacgcctgaagatctttggagctggcttaaagtcgagcactttctggtgcaaactgagagccaggcagagcaagagaataagaggcagagagctggggagaaataa

SEQ ID NO: 17399 - protein, 259 aa, Muscodor strobelii
  misc_feature: SGI Peptide ID NO. 565810
  misc_feature (20)..(171): NCBI GI: 169604436 Blast Desc: SNOG_05231 [Phaeosphaeria nodorum SN15] gi|160706568|gb|EAT87622.2| SNOG_05231 [Phaeosphaeria nodorum SN15]
  misc_feature (23)..(171): NCBI GI: 169604232 Blast Desc: SNOG_05128 [Phaeosphaeria nodorum SN15] gi|111066399|gb|EAT87519.1| SNOG_05128 [Phaeosphaeria nodorum SN15]
  misc_feature (12)..(223): NCBI GI: 169616782 Blast Desc: SNOG_11566 [Phaeosphaeria nodorum SN15] gi|111060154|gb|EAT81274.1| SNOG_11566 [Phaeosphaeria nodorum SN15]
  misc_feature (14)..(90): NCBI GI: 154293826 Blast Desc: [Botryotinia fuckeliana B05.10] gi|150845214|gb|EDN20407.1| [Botryotinia fuckeliana B05.10]
MKRKFERHQSPPGARLWGTEMVTLKAATGDKNFSIHAELLTHYSVYFRKALNSGFEESRTYSFTLTEHCDDSVLTLFTTWIYARGTSATSDYDSCNQPYLTECRVFDLSRSWLFGDYIGAADFQNDLMKVIFMNYWRLLQHGRSETSYLERIWQNIPEGSALDRLCIEVACYAIGRKSRDGYLSEDRLIKRVFEYPERVRSVLIRRMMHMIKVGRWDPNDDGSGDTPEDLWSWLKVEHFLVQTESQAEQENKRQRAGEK

SEQ ID NO: 17400 - DNA, 705 bp, Muscodor strobelii
  misc_feature: SGI cDNA ID NO. 565811
  misc_feature: Encodes the peptide sequence at SEQ ID NO 17401
atggagccaaaattcaaggatgaggtcgatctcaccgagcctggtgactggggtcctgagattgtagcaatcagggcttctggggggaacaagactttccacatttcagcacgtctagtagcgtccatctccacgtatttccgggctgcacttaatagcaccttccaagaagccacgacttacgacttcacactttcagagcactgtgacgatacgactctgacaattttcacaacctggatccatgcgcagaccataagcaaccacatcgcatacgacattctggagtcctccttcgtagaggaaccagtttcacacattgtgcgagcttggctcttcggggactatatcggcgcagcaagttttcagaatgacatgatgctagtgatgtcagacaaaccgcgcagactatgggtccagaacgtgctagagaacttctggtcgcttgtgcccatcaactccaagcttgaccttttattcatcgatgttctcggtcgcgcaatgtgcgacaaagaggtgaatatcagctatgcagatctaaaagccagggtcgaaggatcttatcctgcgcacgtatgggaagagttgacgcgttgcatgatacataggctccaaagtggacgttggcctcggcaagacagcttcgaagacatcgataaatacggccttcggtacttcatggataattttgcctattcggtctga

SEQ ID NO: 17401 - protein, 234 aa, Muscodor strobelii
  misc_feature: SGI Peptide ID NO. 565811
MEPKFKDEVDLTEPGDWGPEIVAIRASGGNKTFHISARLVASISTYFRAALNSTFQEATTYDFTLSEHCDDTTLTIFTTWIHAQTISNHIAYDILESSFVEEPVSHIVRAWLFGDYIGAASFQNDMMLVMSDKPRRLWVQNVLENFWSLVPINSKLDLLFIDVLGRAMCDKEVNISYADLKARVEGSYPAHVWEELTRCMIHRLQSGRWPRQDSFEDIDKYGLRYFMDNFAYSV

SEQ ID NO: 17402 - DNA, 1701 bp, Muscodor strobelii
  misc_feature: SGI cDNA ID NO. 565812
  misc_feature: Encodes the peptide sequence at SEQ ID NO 17403
atggggtcacgccttgatctaccggctttcgatgaaagcgacgatgagcttgtcacttcgatgggtgcaagcgcaatggccgggtggttatctccttctgccttgcctctttacaacgacgacagtactgaggtcactgactcagaggatgcaacttcggaaagcgccgaattatctacaattgatgtgtacaagcctttggacttgaacatcggagatgctcccgatgcgacggtcacctttgtgccgttcagattgatcaagaagtacccgcacatgtacgtcggcagaacgaatcaaaagagagcgtatgactatttcaaggataccttgcttacggactgcatctgggacatattcgtgcaacatgacccagccccagccagaaacccgctgctgctcatccccacgagtcaatttgagcaatacctccagactttcaacaagaagttcgagaagcagctttgcattcccgaaggtagcggcaaaaatgattttcatctcacattcggcgagtccggtacgccacgccccagatatctgggaagagtcgagagcgcggaggatttggacaacctgaagccattgatcttgacaatgtcgagtgccgacctaagtggactgtcgcctacctgtcttcaagagtataaagacaagatggacaagatctacgcctctctgaagggcagtcctgagaagctggcaagaagggcagaaagacaagcccagaagaaagcagacaagtacaagaactggagccgtatggtaaagcgtgtgcagcaatacttgggtcttcgccagccgagactggaacagttctctacacaggatccaacccaggagtggaacgtcaatgtcgcgccaaaattcaagcccagagactccgtacgatttgtctgtgtcgacgttgaggcttacgaacgaaataacgacatcgtcacggaattcggattcgccatcctcgatactgaggacgtcgaggatatagcccccggagaccgaggtatagaatggttccccatgatcgaggcccaccacatcagaatcgaggagtactcgtacatgaggaacaccgaattcgttcaagggtgtcccgaatcattcaatttcgggacatctgcgatggtatccatcaacaacatcaatggagtgattggacaactactcggggatcaagattccaaggacaagagaccagttgtcctggtgggtcatgatctccctcaggatatcaagtacctgagcaaagtcggctacaacccgcacggagaaccatgtctcgtcatcgatgaaatcgacaccaagagcatgttccagcgactcgagcgatatcccaatggtcgtagcctagacacggtgtgcggtgtgcttgagatccctggatacaattaccacaatgctgggaatgatgctgtctatacgctgcgcgccatgatttccatggctatcaaacggaccgtcgagggttcagacaagaaggaagacataataggcggtgacgagtggacagatggagagatggtcgacggcggcgaagcctatcgatcagtccctctggtacagcaagcagctgcagctcaacctacaagtgagactgaagtccttgcctcaggaactggcttgtacattacaactcgcaagacgctagcttccgtggtaaggtacggcaaagtagggaaactcgggtcaaagggggcgtag

SEQ ID NO: 17403 - protein, 566 aa, Muscodor strobelii
  misc_feature: SGI Peptide ID NO. 565812
  misc_feature (44)..(534): NCBI GI: 146762535 Blast Desc: QDE-2-interacting protein [Neurospora crassa]
  misc_feature (54)..(540): NCBI GI: 116192143 Blast Desc: CHGG_05789 [Chaetomium globosum CBS 148.51] gi|88181702|gb|EAQ89170.1| CHGG_05789 [Chaetomium globosum CBS 148.51]
  misc_feature (63)..(488): NCBI GI: 171686692 Blast Desc: protein product [Podospora anserina] gi|170943307|emb|CAP68960.1| protein product [Podospora anserina]
  misc_feature (44)..(534): NCBI GI: 164428815 Blast Desc: NCU00076 [Neurospora crassa OR74A] gi|157072292|gb|EAA27150.2| [Neurospora crassa OR74A]
  misc_feature (81)..(482): NCBI GI: 39969095 Blast Desc: MGG_10158 [Magnaporthe grisea 70-15] gi|145021284|gb|EDK05413.1| MGG_10158 [Magnaporthe grisea 70-15]
  misc_feature (69)..(509): NCBI GI: 46124689 Blast Desc: FG06722.1 [Gibberella zeae PH-1]
  misc_feature (57)..(488): NCBI GI: 156051558 Blast Desc: SS1G_07186 [Sclerotinia sclerotiorum 1980] gi|154704964|gb|EDO04703.1| SS1G_07186 [Sclerotinia sclerotiorum 1980]
  misc_feature (76)..(494): NCBI GI: 256733267 Blast Desc: NECHADRAFT_79381 [Nectria haematococca mpVI 77-13-4]
  misc_feature (39)..(509): NCBI GI: 261360327 Blast Desc: QDE-2-interacting protein [Verticillium albo-atrum VaMs.102]
  misc_feature (39)..(484): NCBI GI: 189195532 Blast Desc: conserved [Pyrenophora tritici-repentis Pt-1C-BFP] gi|187979983|gb|EDU46609.1| conserved [Pyrenophora tritici-repentis Pt-1C-BFP]
MGSRLDLPAFDESDDELVTSMGASAMAGWLSPSALPLYNDDSTEVTDSEDATSESAELSTIDVYKPLDLNIGDAPDATVTFVPFRLIKKYPHMYVGRTNQKRAYDYFKDTLLTDCIWDIFVQHDPAPARNPLLLIPTSQFEQYLQTFNKKFEKQLCIPEGSGKNDFHLTFGESGTPRPRYLGRVESAEDLDNLKPLILTMSSADLSGLSPTCLQEYKDKMDKIYASLKGSPEKLARRAERQAQKKADKYKNWSRMVKRVQQYLGLRQPRLEQFSTQDPTQEWNVNVAPKFKPRDSVRFVCVDVEAYERNNDIVTEFGFAILDTEDVEDIAPGDRGIEWFPMIEAHHIRIEEYSYMRNTEFVQGCPESFNFGTSAMVSINNINGVIGQLLGDQDSKDKRPVVLVGHDLPQDIKYLSKVGYNPHGEPCLVIDEIDTKSMFQRLERYPNGRSLDTVCGVLEIPGYNYHNAGNDAVYTLRAMISMAIKRTVEGSDKKEDIIGGDEWTDGEMVDGGEAYRSVPLVQQAAAAQPTSETEVLASGTGLYITTRKTLASVVRYGKVGKLGSKGA

SEQ ID NO: 17404 - DNA, 263 bp, Muscodor strobelii
  misc_feature: SGI EST ID NO. CUFF.40895.0
  misc_feature: Variant of the nucleotide sequence at SEQ ID NO 17402
ctcccatcataaatcaattgtgaatgttccgctcaaacggcttaaattgattgccccaaattcaaatccggtgtccctctttctcgacagcaacgacgcttctcaacggcttcctcaacattatggggtcacgccttgatctaccggctttcgatgaaagcgacgatgagcttgtcacttcgatgggtgcaagcgcaatggccgggtggttatctccttctgccttgcctctttacaacgacgacagtactgaggtcactgac

SEQ ID NO: 17405 - DNA, 429 bp, Muscodor strobelii
  misc_feature: SGI cDNA ID NO. 565813
  misc_feature: Reduced expression when VOC is produced
  misc_feature: Encodes the peptide sequence at SEQ ID NO 17406
atggaacttcaacgatccagttctgccgcccattgcatcgcattaccaaacttccgcattaccatcaccgaacttgccaacaatcatttctacaatcaatacaaatccgccatgtctctcttagcatatgcaggcggtgctgctgtcgccgcttttcttggtcgcgcaggacttgtagcatggcgaagatcacgaggcggcgttggcgcgatgggcaaggcattctataagggaggattcgagcagcgcatgaccaagaaagaggcatcgctcattctggcgcttaacgagcgctccataacgaaagacaaagtccgcaaagctcatagaacgctcatgctcatgaaccaccccgatcgaggcggaagcccatacctcgccacgaagatcaacgaggcaaaagagctcctagaaaaacagggcagctag

SEQ ID NO: 17406 - protein, 142 aa, Muscodor strobelii
  misc_feature: SGI Peptide ID NO. 565813
  misc_feature (88)..(142): Pfam Id: PF00226 Pfam Desc: DnaJ domain
  misc_feature (97)..(137): Pfam Id: PF00226 Pfam Desc: DnaJ domain
  misc_feature (39)..(142): NCBI GI: 261360328 Blast Desc: mitochondrial import inner membrane translocase subunit tim-14 [Verticillium albo-atrum VaMs.102]
  misc_feature (52)..(141): NCBI GI: 46124691 Blast Desc: FG06723.1 [Gibberella zeae PH-1] gi|83305916|sp|Q4I7T5.1|TIM14_GIBZE RecName: Full=Mitochondrial import inner membrane translocase subunit TIM14; AltName: motor
  misc_feature (52)..(139): NCBI GI: 85079621 Blast Desc: NCU00075 [Neurospora crassa OR74A] gi|74613769|sp|Q7RX75.1|TIM14_NEUCR RecName: Full=Mitochondrial import inner membrane translocase subunit tim-14; AltName: motor
  misc_feature (35)..(142): NCBI GI: 171686716 Blast Desc: protein product [Podospora anserina] gi|170943319|emb|CAP68972.1| protein product [Podospora anserina]
  misc_feature (38)..(140): NCBI GI: 145238258 Blast Desc: An07g07020 [Aspergillus niger] gi|134076259|emb|CAK39544.1| protein product [Aspergillus niger]
  misc_feature (55)..(142): NCBI GI: 39969097 Blast Desc: conserved [Magnaporthe grisea 70-15] gi|145021283|gb|EDK05412.1| conserved [Magnaporthe grisea 70-15]
  misc_feature (52)..(140): NCBI GI: 116192141 Blast Desc: conserved [Chaetomium globosum CBS 148.51] gi|88181701|gb|EAQ89169.1| conserved [Chaetomium globosum CBS 148.51]
  misc_feature (39)..(140): NCBI GI: 154275440 Blast Desc: mitochondrial import inner membrane translocase subunit tim-14 [Ajellomyces capsulatus NAm1] gi|150415011|gb|EDN10373.1| mitochondrial import inner membrane
  misc_feature (52)..(140): NCBI GI: 256732804 Blast Desc: NECHADRAFT_79380 [Nectria haematococca mpVI 77-13-4]
  misc_feature (39)..(139): NCBI GI: 261197341 Blast Desc: mitochondrial import inner membrane translocase subunit tim-14 [Ajellomyces dermatitidis SLH14081] gi|239595703|gb|EEQ78284.1| mitochondrial import inner membrane
  misc_feature: Useful for introducing or modulating the production of volatile compounds
MELQRSSSAAHCIALPNFRITITELANNHFYNQYKSAMSLLAYAGGAAVAAFLGRAGLVAWRRSRGGVGAMGKAFYKGGFEQRMTKKEASLILALNERSITKDKVRKAHRTLMLMNHPDRGGSPYLATKINEAKELLEKQGS

SEQ ID NO: 17407 - DNA, 1392 bp, Muscodor strobelii
  misc_feature: SGI EST ID NO. CUFF.40963.1
  misc_feature: Variant of the nucleotide sequence at SEQ ID NO 17405
cggcgttcctcccatgtggtcgaaaattggtataacagtgacgaatctcccaggtccatctgaacaaagattccttccatttgggcaagtagagccgcactgagctgctatcaaattcgtggctggaccctggaaacaatcgccatccatcctgctggagctgtcgcatacgcattgtcgccatgtctgaggcattacagatttcgaaagaaaaactagagactcacctcatcttggcagtcggacgcgctttgtcggcgcaactgagtcggctaggttgtttgttgtgagcttcagcgacttcacggtctcagcgtagaggagctactaagtaaagggcagtggcagaattgtagtggcggtggggtggccattctgccgacgcccaaaaaattgcaccgcctactctattcagctagttcatccgctgattagataagactaatgccttctcaaggtacaatggaacttcaacgatccagttctgccgcccattgcatcgcattaccaaacttccgcattaccatcaccgaacttgccaacaatcatttctacaatcaatacaaatccgccatgtctctcttagcatatgcaggcggtgctgctgtcgccgcttttcttggtcgcgcaggacttgtagcatggcgaagatcacgaggcggcgttggcgcgatgggcaaggcattctataagggaggattcgagcagcgcatgaccaagaaagaggcatcgctcattctggcgcttaacgagcgctccataacgaaagacaaagtccgcaaagctcatagaacgctcatgctcatgaaccaccccgatcgaggcggaagcccatacctcgccacgaagatcaacgaggcaaaagagctcctagaaaaacagggcagctaggcgcggcgggcctacatcaaactacacataccgaactcaactatcacatatatcaacgacccgagtgctgagtggataggggaagggaataacgagagagcagggcttataccaacatctgtacaatataatcacggcatttcatggagcgatggcgtttcttcgataggtttacagatggatttattccggcgggcgatgtcctagagagacagagctcttgctagactgtataaaaatcaacgcgcacgcactttcagctctccataccagtccatcttcacctacgccccctttgacccgagtttccctactttgccgtaccttaccacggaagctagcgtcttgcgagttgtaatgtacaagccagttcctgaggcaaggactagttgttgttctgttgcaacttctgctgtagtcgcgaggcagaatcatttaccaatgaattacctcccgttgcgctgaattttgtttagtcttacgaaaatatgataattcaag

SEQ ID NO: 17408 - DNA, 597 bp, Muscodor strobelii
  misc_feature: SGI cDNA ID NO. 565814
  misc_feature: Encodes the peptide sequence at SEQ ID NO 17409
atgagggttgaaacatgctacttctgctctcgtccagcttaccccggaaagggaatgcagtttgttagaaatgacggcaaagcattccggttctgtcggtcaaagtgccacaagaatttcaagatgaagaggaaccctcgcaagctgggttggaccaaggcctatcgcaaagcggctggcaaggagatgaccgtcgactccacacttcagttcgcacagcgccgcaatgtcccggtccgatacaaccgcgagctttgggagaagaccatgcaggccatgtcacgcatccaggaaatcagacagaagcgcgagagagttcactacaagagacgcatggccggcaagcgtgcccgcgagctcgccgtcgacaagaagctggtcgagacgcacagccatctgctcccccgtatgcgtggcagcgaaaagagacgtctcttggagcaaggtgttacttcggaggagatccagagaatggaggaaactcttactccggagaaggccaaggttctcggcaaggagaagattcgacagagactacgtgtcgatggtggagtcgagtatatccccgacgatggtatggatgtggattcggaatag

SEQ ID NO: 17409 - protein, 198 aa, Muscodor strobelii
  misc_feature: SGI Peptide ID NO. 565814
  misc_feature (1)..(71): Pfam Id: PF01246 Pfam Desc: Ribosomal protein L24e
  misc_feature (1)..(190): NCBI GI: 116194364 Blast Desc: CHGG_03780 [Chaetomium globosum CBS 148.51] gi|88179693|gb|EAQ87161.1| CHGG_03780 [Chaetomium globosum CBS 148.51]
  misc_feature (1)..(191): NCBI GI: 171683623 Blast Desc: protein product [Podospora anserina] gi|170941771|emb|CAP67425.1| protein product [Podospora anserina]
  misc_feature (1)..(194): NCBI GI: 154289965 Blast Desc: 60S ribosomal protein L24 [Botryotinia fuckeliana B05.10] gi|150848516|gb|EDN23709.1| 60S ribosomal protein L24 [Botryotinia fuckeliana B05.10]
  misc_feature (10)..(176): NCBI GI: 46124693 Blast Desc: FG06724.1 [Gibberella zeae PH-1]
  misc_feature (1)..(196): NCBI GI: 115391815 Blast Desc: ribosome biogenesis protein RLP24 [Aspergillus terreus NIH2624] gi|114194336|gb|EAU36036.1| ribosome biogenesis protein RLP24 [Aspergillus terreus NIH2624]
  misc_feature (1)..(194): NCBI GI: 256734876 Blast Desc: NECHADRAFT_102406 [Nectria haematococca mpVI 77-13-4]
  misc_feature (22)..(190): NCBI GI: 164429214 Blast Desc: ribosome biogenesis protein RLP24 [Neurospora crassa OR74A] gi|157072985|gb|EAA32763.2| ribosome biogenesis protein RLP24 [Neurospora crassa OR74A]
  misc_feature (1)..(196): NCBI GI: 189188276 Blast Desc: ribosome biogenesis protein RLP24 [Pyrenophora tritici-repentis Pt-1C-BFP] gi|187972083|gb|EDU39582.1| ribosome biogenesis protein RLP24 [Pyrenophora tritici-repentis Pt-1C-BFP]
  misc_feature (1)..(196): NCBI GI: 169622834 Blast Desc: SNOG_14641 [Phaeosphaeria nodorum SN15] gi|111056713|gb|EAT77833.1| SNOG_14641 [Phaeosphaeria nodorum SN15]
  misc_feature (1)..(144): NCBI GI: 260948054 Blast Desc: CLUG_01783 [Clavispora lusitaniae ATCC 42720] gi|238848196|gb|EEQ37660.1| CLUG_01783 [Clavispora lusitaniae ATCC 42720]
MRVETCYFCSRPAYPGKGMQFVRNDGKAFRFCRSKCHKNFKMKRNPRKLGWTKAYRKAAGKEMTVDSTLQFAQRRNVPVRYNRELWEKTMQAMSRIQEIRQKRERVHYKRRMAGKRARELAVDKKLVETHSHLLPRMRGSEKRRLLEQGVTSEEIQRMEETLTPEKAKVLGKEKIRQRLRVDGGVEYIPDDGMDVDSE

SEQ ID NO: 17410 - DNA, 3314 bp, Muscodor strobelii
  misc_feature: SGI EST ID NO. CUFF.40962.0
  misc_feature: Variant of the nucleotide sequence at SEQ ID NO 17408
cttgaattatcatattttcgtaagactaaacaaaattcagcgcaacgggaggtaattcattggtaaatgattctgcctcgcgactacagcagaagttgcaacagaacaacaactagtccttgcctcaggaactggcttgtacattacaactcgcaagacgctagcttccgtggtaaggtacggcaaagtagggaaactcgggtcaaagggggcgtaggtgaagatggactggtatggagagctgaaagtgcgtgcgcgttgatttttatacagtctagcaagagctctgtctctctaggacatcgcccgccggaataaatccatctgtaaacctatcgaagaaacgccatcgctccatgaaatgccgtgattatattgtacagatgttggtataagccctgctctctcgttattcccttcccctatccactcagcactcgggtcgttgatatatgtgatagttgagttcggtatgtgtagtttgatgtaggcccgccgcgcctagctgccctgtttttctaggagctcttttgcctcgttgatcttcgtggcgaggtatgggcttccgcctcgatcggggtggttcatgagcatgagcgttctatgagctttgcggactttgtctttcgttatggagcgctcgctgtgggactattagtggattgtgtctgtggccaaatattccagatgagatcgtacttaagcgccagaatgagcgatgcctctttcttggtcatgcgctgctcgaatcctcccttatagaatgccttgcccatcgcgccaacgccgcctcgtgatcttcgccatgctacaagtcctgcgcgaccctatatttggattatcagagagtgatttcaaacccgggtttggagtgaaggaaggaggaaaagtgtagcaattgtacatctaatacgtacaagaaaagcggcgacagcagcaccgcctgcatatgctaagagagacatggcggatttgtattgattgtagaaatgattgttggcaagttcggtgatggtaatgcggaagtttggtaatgcgatgcaatgggcggcagaactggatcgttgaagttccattgtaccttgagaaggcattagtcttatctaatcagcggatgaactagctgaatagagtaggcggtgcaattttttgggcgtcggcagaatggccaccccaccgccactacaattctgccactgccctttacttagtagctcctctacgctgagaccgtgaagtcgctgaagctcacaacaaacaacctagccgactcagttgcgccgacaaagcgcgtccgactgccaagatgagggttgaaacatgctacttctgctctcgtccagcttaccccggaaagggaatgcagtttgttagaaatgacggcaaagcattccggttctgtcggtcaaagtgccacaagaatttcaagatgaagaggaaccctcgcaagctgggttggaccaaggcctatcgcaaagcggctggcaaggagatgaccgtcgactccacacttcagttcgcacagcgccgcaatgtcccggtccgatacaaccgcgagctttgggagaagaccatgcaggccatgtcacgcatccaggaaatcagacagaagcgcgagagagttcactacaagagacgcatggccggcaagcgtgcccgcgagctcgccgtcgacaagaagctggtcgagacgcacagccatctgctcccccgtatgcgtggcagcgaaaagagacgtctcttggagcaaggtgttacttcggaggagatccagagaatggaggaaactcttactccggagaaggccaaggttctcggcaaggagaagattcgacagagactacgtgtcgatggtggagtcgagtatatccccgacgatggtatggatgtggattcggaatagatctggttgttgcttctgtgcggctattcggtaggccttgcgtgatgagtggctgggaaaaatcatggcgtctcttgggttttgactgcatgcggcatgtcctggcgttcggggtactaaaggcttttgaggtaaagacgatagatctgcctaccttctgctcggtatgaaatttcccgatcattcccttatgccagattagtttcacgtgttcagtgatgtctgtgctgtccacttatagtacattatgaccccctatcgaagtatggcacccacgaaataacctgaataatggcctcctccaggtctgacttccaaagcaaagcctatagtggatttatcccaatctgcaaataaaattatgaggcgaaatgaattaaggaattagatcatggcatccattaactccataccaagaactccctactcgagacgctccctagatcacatatactctttagttccaatcacgttcataattattatcgcctatcacacacactctcccatcatacaaaattcatcatcctaattacactcagcccctaaacctccccatcctcatcaggtctccgtccccttccaggagcatgtaaatgatggatcctcggaggcggcggcaggctatcacgtatctcctgcacaattcccgcgtcaagagcagctttccgcttagcttcttgttcagctttcgcgcgttgtacctcttcgctttcccctgttgcccaattacccgcgccgcctcgtcctgtgtgtgttgggcgggctgctggagctgctttgggtgctattgaagatgttgcaggtgaagttgtgggtagtgttgatgcggaagtgaagttccctgcgccgcctcgcccagagcgggtgtaccctgtgcttgtgtttggggttgatgttgaggtagggactgtgcttgtatcgtctccgggctgtgagacgggcttttgggcttctatgtcctgtgttttggggtgggtgttagtttggtggacggttgtgaatacgagatatgcttgatttagagcgatgtaaagctttaggggcttcatttcgaatttacgtaatgactggagagagacaaacctctgtattctgcttcgtcgccgcatctacgacgtccttttgggagtaaaagttccccgcgccaccccgccctgtgcggtggtatacgtcggacatagttcagtatctatcgcgttgtgagatggttcatgagctttggttaaagaaggacagatgtattttcgatcttgctttcgatgacttgcaagtagcgtgaatgtgttttccgcttcactctataatgtcgcagcctgattgatagtagtttcaagtcatgccttgcgccatgacctaccctgaaagatcaagtctcgatccccgaggttgatttttatgctatctcgac

SEQ ID NO: 17411 - DNA, 513 bp, Muscodor strobelii
  misc_feature: SGI cDNA ID NO. 565815
  misc_feature: Encodes the peptide sequence at SEQ ID NO 17412
atgtccgacgtataccaccgcacagggcggggtggcgcggggaacttttactcccaaaaggacgtcgtagatgcggcgacgaagcagaatacagaggacatagaagcccaaaagcccgtctcacagcccggagacgatacaagcacagtccctacctcaacatcaaccccaaacacaagcacagggtacacccgctctgggcgaggcggcgcagggaacttcacttccgcatcaacactacccacaacttcacctgcaacatcttcaatagcacccaaagcagctccagcagcccgcccaacacacacaggacgaggcggcgcgggtaattgggcaacaggggaaagcgaagaggtacaacgcgcgaaagctgaacaagaagctaagcggaaagctgctcttgacgcgggaattgtgcaggagatacgtgatagcctgccgccgcctccgaggatccatcatttacatgctcctggaaggggacggagacctgatgaggatggggaggtttag

SEQ ID NO: 17412 - protein, 170 aa, Muscodor strobelii
  misc_feature: SGI Peptide ID NO. 565815
  misc_feature (3)..(158): NCBI GI: 171686718 Blast Desc: protein product [Podospora anserina] gi|170943320|emb|CAP68973.1| protein product [Podospora anserina]
  misc_feature (3)..(139): NCBI GI: 154290753 Blast Desc: [Botryotinia fuckeliana B05.10] gi|150847412|gb|EDN22605.1| [Botryotinia fuckeliana B05.10]
  misc_feature (3)..(154): NCBI GI: 256732803 Blast Desc: NECHADRAFT_102584 [Nectria haematococca mpVI 77-13-4]
  misc_feature (3)..(131): NCBI GI: 156051888 Blast Desc: [Sclerotinia sclerotiorum 1980] gi|154705129|gb|EDO04868.1| [Sclerotinia sclerotiorum 1980]
  misc_feature (2)..(154): NCBI GI: 85079616 Blast Desc: NCU00074 [Neurospora crassa OR74A] gi|28917446|gb|EAA27148.1| [Neurospora crassa OR74A]
  misc_feature (3)..(154): NCBI GI: 46124697 Blast Desc: FG06726.1 [Gibberella zeae PH-1]
  misc_feature (9)..(150): NCBI GI: 189188172 Blast Desc: conserved [Pyrenophora tritici-repentis Pt-1C-BFP] gi|187972031|gb|EDU39530.1| conserved [Pyrenophora tritici-repentis Pt-1C-BFP]
  misc_feature (47)..(146): NCBI GI: 85101938 Blast Desc: NCU04249 [Neurospora crassa OR74A] gi|16944610|emb|CAD11379.1| [Neurospora crassa] gi|28922782|gb|EAA32004.1| NCU04249 [Neurospora crassa OR74A]
  misc_feature (6)..(121): NCBI GI: 68489956 Blast Desc: CaO19.8704 [Candida albicans SC5314] gi|68489999|ref|XP_711159.1| CaO19.1107 [Candida albicans SC5314] gi|46432439|gb|EAK91920.1| CaO19.1107 [Candida albicans SC5314]
  misc_feature (9)..(136): NCBI GI: 169617125 Blast Desc: SNOG_11738 [Phaeosphaeria nodorum SN15] gi|111059662|gb|EAT80782.1| SNOG_11738 [Phaeosphaeria nodorum SN15]
MSDVYHRTGRGGAGNFYSQKDVVDAATKQNTEDIEAQKPVSQPGDDTSTVPTSTSTPNTSTGYTRSGRGGAGNFTSASTLPTTSPATSSIAPKAAPAARPTHTGRGGAGNWATGESEEVQRAKAEQEAKRKAALDAGIVQEIRDSLPPPPRIHHLHAPGRGRRPDEDGEV

SEQ ID NO: 17413 - DNA, 1854 bp, Muscodor strobelii
  misc_feature: SGI EST ID NO. CUFF.40963.2
  misc_feature: Variant of the nucleotide sequence at SEQ ID NO 17411
gtcgagatagcataaaaatcaacctcggggatcgagacttgatctttcagggtaggtcatggcgcaaggcatgacttgaaactactatcaatcaggctgcgacattatagagtgaagcggaaaacacattcacgctacttgcaagtcatcgaaagcaagatcgaaaatacatctgtccttctttaaccaaagctcatgaaccatctcacaacgcgatagatactgaactatgtccgacgtataccaccgcacagggcggggtggcgcggggaacttttactcccaaaaggacgtcgtagatgcggcgacgaagcagaatacagaggacatagaagcccaaaagcccgtctcacagcccggagacgatacaagcacagtccctacctcaacatcaaccccaaacacaagcacagggtacacccgctctgggcgaggcggcgcagggaacttcacttccgcatcaacactacccacaacttcacctgcaacatcttcaatagcacccaaagcagctccagcagcccgcccaacacacacaggacgaggcggcgcgggtaattgggcaacaggggaaagcgaagaggtacaacgcgcgaaagctgaacaagaagctaagcggaaagctgctcttgacgcgggaattgtgcaggagatacgtgatagcctgccgccgcctccgaggatccatcatttacatgctcctggaaggggacggagacctgatgaggatggggaggtttaggggctgagtgtaattaggatgatgaattttgtatgatgggagagtgtgtgtgataggcgataataattatgaacgtgattggaactaaagagtatatgtgatctagggagcgtctcgagtagggagttcttggtatggagttaatggatgccatgatctaattccttaattcatttcgcctcataattttatttgcagattgggataaatccactataggctttgctttggaagtcagacctggaggaggccattattcaggttatttcgtgggtgccatacttcgatagggggtcataatgtactataagtggacagcacagacatcactgaacacgtgaaactaatctggcataagggaatgatcgggaaatttcataccgagcagaaggtaggcagatctatcgtctttacctcaaaagcctttagtaccccgaacgccaggacatgccgcatgcagtcaaaacccaagagacgccatgatttttcccagccactcatcacgcaaggcctaccgaatagccgcacagaagcaacaaccagatctattccgaatccacatccataccatcgtcggggatatactcgactccaccatcgacacgtagtctctgtcgaatcttctccttgccgagaaccttggccttctccggagtaagagtttcctccattctctggatctcctccgaagtaacaccttgctccaagagacgtctcttttcgctgccacgcatacgggggagcagatggctgtgcgtctcgaccagcttcttgtcgacggcgagctcgcgggcacgcttgccggccatgcgtctcttgtagtgaactctctcgcgcttctgtctgatttcctggatgcgtgacatggcctgcatggtcttctcccaaagctcgcggttgtatcggaccgggacattgcggcgctgtgcgaactgaagtgtggagtcgacggtcatctccttgccagcctagggatgcctcattagtactgtgaccatgaaccacgacatggatgatacttaccgctttgcgataggccttggtccaacccagcttgcgagggttcctcttcatcttgaaattcttgtggcctagcatctactgtcagttcc

SEQ ID NO: 17414 - DNA, 678 bp, Muscodor strobelii
  misc_feature: SGI cDNA ID NO. 565816
  misc_feature: Encodes the peptide sequence at SEQ ID NO 17415
atgaacaataatgacgcggccaccccgccggaatcggctagggatccagccagtgagacggagtcaacatcgccgacggcatccgggtactcagaacaccaagatgggcgcagctctgtagacactacccctccgccacagggagacgggttcaccgggtaccgagatctcgcaaagcgatacagcaacggaagcaactactcgcgatcctaccaatccgctgcttcaggctcattccttcctggaagcctacctaaccgcaatggcttcagtcacaaccggcacgggagcacggaccgccgtccagtgtcgtccgggttgaacaactccggccaggacgaccgtgatctggcggcggcggtcgagctgctcagctgcagcaccgggagcaatggaggcaaccgggactcccgacttccggaggacgcccctccggttcctccgctgcctgcccaatatctcgagcaagcagcgttcggcggcactagcttcatgaacagctatcggcagatgcaaatgccagagagcttcaccagaggtcctgtgcgccaaacgcaagacgtcaggatggaggacagcgagggtagtaccgtggacgacgaggaagaggagcgtcgctcacgggcgcgcagcagcgaagaggatgatgacatgctctttggacgcatggaggaatga

SEQ ID NO: 17415 - protein, 225 aa, Muscodor strobelii
  misc_feature: SGI Peptide ID NO. 565816
  misc_feature (1)..(225): NCBI GI: 256733265 Blast Desc: NECHADRAFT_79377 [Nectria haematococca mpVI 77-13-4]
  misc_feature (11)..(225): NCBI GI: 116192137 Blast Desc: CHGG_05786 [Chaetomium globosum CBS 148.51] gi|88181699|gb|EAQ89167.1| CHGG_05786 [Chaetomium globosum CBS 148.51]
  misc_feature (1)..(225): NCBI GI: 171686720 Blast Desc: protein product [Podospora anserina] gi|170943321|emb|CAP68974.1| protein product [Podospora anserina]
  misc_feature (4)..(225): NCBI GI: 261360331 Blast Desc: conserved [Verticillium albo-atrum VaMs.102]
  misc_feature (1)..(225): NCBI GI: 164428811 Blast Desc: NCU00073 [Neurospora crassa OR74A] gi|157072291|gb|EAA27147.2| conserved [Neurospora crassa OR74A]
  misc_feature (1)..(224): NCBI GI: 145614344 Blast Desc: MGG_10162 [Magnaporthe grisea 70-15] gi|145021280|gb|EDK05409.1| MGG_10162 [Magnaporthe grisea 70-15]
  misc_feature (1)..(225): NCBI GI: 240104991 Blast Desc: CPC735_045540 [Coccidioides posadasii C735 delta SOWgp]
  misc_feature (1)..(225): NCBI GI: 119195201 Blast Desc: CIMG_01975 [Coccidioides immitis RS]
  misc_feature (1)..(225): NCBI GI: 156051884 Blast Desc: SS1G_07349 [Sclerotinia sclerotiorum 1980] gi|154705127|gb|EDO04866.1| SS1G_07349 [Sclerotinia sclerotiorum 1980]
  misc_feature (1)..(225): NCBI GI: 258566377 Blast Desc: [Uncinocarpus reesii 1704] gi|237907634|gb|EEP82035.1| [Uncinocarpus reesii 1704]
MNNNDAATPPESARDPASETESTSPTASGYSEHQDGRSSVDTTPPPQGDGFTGYRDLAKRYSNGSNYSRSYQSAASGSFLPGSLPNRNGFSHNRHGSTDRRPVSSGLNNSGQDDRDLAAAVELLSCSTGSNGGNRDSRLPEDAPPVPPLPAQYLEQAAFGGTSFMNSYRQMQMPESFTRGPVRQTQDVRMEDSEGSTVDDEEEERRSRARSSEEDDDMLFGRMEE

SEQ ID NO: 17416 - DNA, 2333 bp, Muscodor strobelii
  misc_feature: SGI EST ID NO. CUFF.40959.1
  misc_feature: Variant of the nucleotide sequence at SEQ ID NO 17414
caagcctcaagggatattttttgggtttcccagaaaaataattattttttttggccagcttctctcttggtcctgcgttccaatcatctcgctcttccacaatccacatagcccttgtccagtcaacctccaccagcacaccacccacttaccacaccacacactacttacactacactgcattcccaacaagcacatactcctcgctctgctcagctttgctttctgcttttcttgctctcgtacgctgctctgcctcatgcccgctgtctacgatactcgcctgtaactgttttgttggttctgtgacccaagtgttcgacaatggcctcttctaaggaaatgcaaacctcgacgaggccattgatccagcaccgccagtctatttcctcgggctctactgtcatggcttctagtcgtccgtcctcgcattcccgcaccaattccagcaccctatccgctttgtccagcgcccaccgtgtaacccgtcgaaagagcatgaccaacccaaccgccaatgccgctgccgttgccgctgtggccgccgcgctgcaagagcaggaggccggtgacaagatcgccgccttgcccatcaccatcaacgctcgccgcagcaccatttccaaaccctccaccgcccgatccgccctcgctgggagtctgccttcgcctccagcgagcctgccgtcccaccggttcgtcatgaacacgaagatggaggcgcaggagagcgcaattgacgacgactccaacgacatgtcggctgatgacgctgaagacgggcttcagaaagcccggattcgacgcgctagcgacgggcagccgctcaccaaggaaggcaagaagagcggccgcgtggagcttcgctgtgataagtgcgggaaaggatacaagcatagcagctgcttgaccaagcatttgtgtgtgcccattttctttcccattgcccttcacatatactccagcatggttgatgggtggttggttgctgtaccgcggcaccgttggcggctccaaaccctagactgcaccgtcgaaacttagcttgcacgtgtgacctgtattgacgataagccttgttaggtgggaacatactcccgagtggtcatacacatccaagctgcttatctctaagcatcaacaagtacagctacttgaagctgcctctgtactagtgaccatgaacaataatgacgcggccaccccgccggaatcggctagggatccagccagtgagacggagtcaacatcgccgacggcatccgggtactcagaacaccaagatgggcgcagctctgtagacactacccctccgccacagggagacgggttcaccgggtaccgagatctcgcaaagcgatacagcaacggaagcaactactcgcgatcctaccaatccgctgcttcaggctcattccttcctggaagcctacctaaccgcaatggcttcagtcacaaccggcacgggagcacggaccgccgtccagtgtcgtccgggttgaacaactccggccaggacgaccgtgatctggcggcggcggtcgagctgctcagctgcagcaccgggagcaatggaggcaaccgggactcccgacttccggaggacgcccctccggttcctccgctgcctgcccaatatctcgagcaagcagcgttcggcggcactagcttcatgaacagctatcggcagatgcaaatgccagagagcttcaccagaggtcctgtgcgccaaacgcaagacgtcaggatggaggacagcgagggtagtaccgtggacgacgaggaagaggagcgtcgctcacgggcgcgcagcagcgaagaggatgatgacatgctctttggacgcatggaggaatgagttgattaatgggtgatgacgtggtgatgcgacggaatgatgcatggctctgacaacttttcttttcttttgtaccacaaacacttatagcggcttgtaaatgaggtggttccgctccgccgccgaacctcagcaccgaagagtggactcgtttcctgtgtcaaccgggagcagagcagccacgaggttaaagtgaggatcggaggggcgtcgagtgaacaccggtacacatggcgaatggcgattattggcaaaggaagcacaacgctggaattggtagcataccttgagttacggacaccgtgactccatacttggacccaaggcactcatttggtctttaggaatgaaacttcattcgaaacacactgggctcgaagaataatgacatttgatgtgcaagacgcggctgtcctcaagctagacatcgctgtacaatacccaatttagggactgctgctctggctgatatttg

SEQ ID NO: 17417 - DNA, 1290 bp, Muscodor strobelii
  misc_feature: SGI cDNA ID NO. 565817
  misc_feature: Reduced expression when VOC is produced
  misc_feature: Encodes the peptide sequence at SEQ ID NO 17418
atggcttctagtcgtccgtcctcgcattcccgcaccaattccagcaccctatccgctttgtccagcgcccaccgtgtaacccgtcgaaagagcatgaccaacccaaccgccaatgccgctgccgttgccgctgtggccgccgcgctgcaagagcaggaggccggtgacaagatcgccgccttgcccatcaccatcaacgctcgccgcagcaccatttccaaaccctccaccgcccgatccgccctcgctgggagtctgccttcgcctccagcgagcctgccgtcccaccggttcgtcatgaacacgaagatggaggcgcaggagagcgcaattgacgacgactccaacgacatgtcggctgatgacgctgaagacgggcttcagaaagcccggattcgacgcgctagcgacgggcagccgctcaccaaggaaggcaagaagagcggccgcgtggagcttcgctgtgataagtgcgggaaaggatacaagcatagcagctgcttgaccaagcatttgtgggaacatactcccgagtggtcatacacatccaagctgcttatctctaagcatcaacaagtacagctacttgaagctgcctctgtactagtgaccatgaacaataatgacgcggccaccccgccggaatcggctagggatccagccagtgagacggagtcaacatcgccgacggcatccgggtactcagaacaccaagatgggcgcagctctgtagacactacccctccgccacagggagacgggttcaccgggtaccgagatctcgcaaagcgatacagcaacggaagcaactactcgcgatcctaccaatccgctgcttcaggctcattccttcctggaagcctacctaaccgcaatggcttcagtcacaaccggcacgggagcacggaccgccgtccagtgtcgtccgggttgaacaactccggccaggacgaccgtgatctggcggcggcggtcgagctgctcagctgcagcaccgggagcaatggaggcaaccgggactcccgacttccggaggacgcccctccggttcctccgctgcctgcccaatatctcgagcaagcagcgttcggcggcactagcttcatgaacagctatcggcagatgcaaatgccagagagcttcaccagaggtcctgtgcgccaaacgcaagacgtcaggatggaggacagcgagggtagtaccgtggacgacgaggaagaggagcgtcgctcacgggcgcgcagcagcgaagaggatgatgacatgctctttggacgcatggaggaatga

SEQ ID NO: 17418 - protein, 429 aa, Muscodor strobelii
  misc_feature: SGI Peptide ID NO. 565817
  misc_feature (8)..(429): NCBI GI: 116192137 Blast Desc: CHGG_05786 [Chaetomium globosum CBS 148.51] gi|88181699|gb|EAQ89167.1| CHGG_05786 [Chaetomium globosum CBS 148.51]
  misc_feature (8)..(429): NCBI GI: 171686720 Blast Desc: protein product [Podospora anserina] gi|170943321|emb|CAP68974.1| protein product [Podospora anserina]
  misc_feature (8)..(429): NCBI GI: 256733265 Blast Desc: NECHADRAFT_79377 [Nectria haematococca mpVI 77-13-4]
  misc_feature (9)..(429): NCBI GI: 164428811 Blast Desc: NCU00073 [Neurospora crassa OR74A] gi|157072291|gb|EAA27147.2| conserved [Neurospora crassa OR74A]
  misc_feature (8)..(429): NCBI GI: 261360331 Blast Desc: conserved [Verticillium albo-atrum VaMs.102]
  misc_feature (54)..(428): NCBI GI: 145614344 Blast Desc: MGG_10162 [Magnaporthe grisea 70-15] gi|145021280|gb|EDK05409.1| MGG_10162 [Magnaporthe grisea 70-15]
  misc_feature (8)..(429): NCBI GI: 156051884 Blast Desc: SS1G_07349 [Sclerotinia sclerotiorum 1980] gi|154705127|gb|EDO04866.1| SS1G_07349 [Sclerotinia sclerotiorum 1980]
  misc_feature (63)..(429): NCBI GI: 154290747 Blast Desc: BC1G_15571 [Botryotinia fuckeliana B05.10] gi|150847409|gb|EDN22602.1| BC1G_15571 [Botryotinia fuckeliana B05.10]
  misc_feature (10)..(429): NCBI GI: 169617283 Blast Desc: SNOG_11819 [Phaeosphaeria nodorum SN15] gi|160703378|gb|EAT80863.2| SNOG_11819 [Phaeosphaeria nodorum SN15]
  misc_feature (129)..(429): NCBI GI: 240104991 Blast Desc: CPC735_045540 [Coccidioides posadasii C735 delta SOWgp]
  misc_feature: Useful for introducing or modulating the production of volatile compounds
MASSRPSSHSRTNSSTLSALSSAHRVTRRKSMTNPTANAAAVAAVAAALQEQEAGDKIAALPITINARRSTISKPSTARSALAGSLPSPPASLPSHRFVMNTKMEAQESAIDDDSNDMSADDAEDGLQKARIRRASDGQPLTKEGKKSGRVELRCDKCGKGYKHSSCLTKHLWEHTPEWSYTSKLLISKHQQVQLLEAASVLVTMNNNDAATPPESARDPASETESTSPTASGYSEHQDGRSSVDTTPPPQGDGFTGYRDLAKRYSNGSNYSRSYQSAASGSFLPGSLPNRNGFSHNRHGSTDRRPVSSGLNNSGQDDRDLAAAVELLSCSTGSNGGNRDSRLPEDAPPVPPLPAQYLEQAAFGGTSFMNSYRQMQMPESFTRGPVRQTQDVRMEDSEGSTVDDEEEERRSRARSSEEDDDMLFGRMEE

SEQ ID NO: 17419 - DNA, 2257 bp, Muscodor strobelii
  misc_feature: SGI EST ID NO. CUFF.40959.0
  misc_feature: Variant of the nucleotide sequence at SEQ ID NO 17417
caagcctcaagggatattttttgggtttcccagaaaaataattattttttttggccagcttctctcttggtcctgcgttccaatcatctcgctcttccacaatccacatagcccttgtccagtcaacctccaccagcacaccacccacttaccacaccacacactacttacactacactgcattcccaacaagcacatactcctcgctctgctcagctttgctttctgcttttcttgctctcgtacgctgctctgcctcatgcccgctgtctacgatactcgcctgtaactgttttgttggttctgtgacccaagtgttcgacaatggcctcttctaaggtgaatactcatcggcaacggtgcccacctagcttagcacccagaatagagcggcctcgctgatcacagtcatgttgaaccacacaggaaatgcaaacctcgacgaggccattgatccagcaccgccagtctatttcctcgggctctactgtcatggcttctagtcgtccgtcctcgcattcccgcaccaattccagcaccctatccgctttgtccagcgcccaccgtgtaacccgtcgaaagagcatgaccaacccaaccgccaatgccgctgccgttgccgctgtggccgccgcgctgcaagagcaggaggccggtgacaagatcgccgccttgcccatcaccatcaacgctcgccgcagcaccatttccaaaccctccaccgcccgatccgccctcgctgggagtctgccttcgcctccagcgagcctgccgtcccaccggttcgtcatgaacacgaagatggaggcgcaggagagcgcaattgacgacgactccaacgacatgtcggctgatgacgctgaagacgggcttcagaaagcccggattcgacgcgctagcgacgggcagccgctcaccaaggaaggcaagaagagcggccgcgtggagcttcgctgtgataagtgcgggaaaggatacaagcatagcagctgcttgaccaagcatttgtgggaacatactcccgagtggtcatacacatccaagctgcttatctctaagcatcaacaagtacagctacttgaagctgcctctgtactagtgaccatgaacaataatgacgcggccaccccgccggaatcggctagggatccagccagtgagacggagtcaacatcgccgacggcatccgggtactcagaacaccaagatgggcgcagctctgtagacactacccctccgccacagggagacgggttcaccgggtaccgagatctcgcaaagcgatacagcaacggaagcaactactcgcgatcctaccaatccgctgcttcaggctcattccttcctggaagcctacctaaccgcaatggcttcagtcacaaccggcacgggagcacggaccgccgtccagtgtcgtccgggttgaacaactccggccaggacgaccgtgatctggcggcggcggtcgagctgctcagctgcagcaccgggagcaatggaggcaaccgggactcccgacttccggaggacgcccctccggttcctccgctgcctgcccaatatctcgagcaagcagcgttcggcggcactagcttcatgaacagctatcggcagatgcaaatgccagagagcttcaccagaggtcctgtgcgccaaacgcaagacgtcaggatggaggacagcgagggtagtaccgtggacgacgaggaagaggagcgtcgctcacgggcgcgcagcagcgaagaggatgatgacatgctctttggacgcatggaggaatgagttgattaatgggtgatgacgtggtgatgcgacggaatgatgcatggctctgacaacttttcttttcttttgtaccacaaacacttatagcggcttgtaaatgaggtggttccgctccgccgccgaacctcagcaccgaagagtggactcgtttcctgtgtcaaccgggagcagagcagccacgaggttaaagtgaggatcggaggggcgtcgagtgaacaccggtacacatggcgaatggcgattattggcaaaggaagcacaacgctggaattggtagcataccttgagttacggacaccgtgactccatacttggacccaaggcactcatttggtctttaggaatgaaacttcattcgaaacacactgggctcgaagaataatgacatttgatgtgcaagacgcggctgtcctcaagctagacatcgctgtacaatacccaatttagggactgctgctctggctgatatttg

SEQ ID NO: 17420 - DNA, 1371 bp, Muscodor strobelii
  misc_feature: SGI cDNA ID NO. 565818
  misc_feature: Elevated expression when VOC is produced
  misc_feature: Encodes the peptide sequence at SEQ ID NO 17421
atggcctcttctaaggaaatgcaaacctcgacgaggccattgatccagcaccgccagtctatttcctcgggctctactgtcatggcttctagtcgtccgtcctcgcattcccgcaccaattccagcaccctatccgctttgtccagcgcccaccgtgtaacccgtcgaaagagcatgaccaacccaaccgccaatgccgctgccgttgccgctgtggccgccgcgctgcaagagcaggaggccggtgacaagatcgccgccttgcccatcaccatcaacgctcgccgcagcaccatttccaaaccctccaccgcccgatccgccctcgctgggagtctgccttcgcctccagcgagcctgccgtcccaccggttcgtcatgaacacgaagatggaggcgcaggagagcgcaattgacgacgactccaacgacatgtcggctgatgacgctgaagacgggcttcagaaagcccggattcgacgcgctagcgacgggcagccgctcaccaaggaaggcaagaagagcggccgcgtggagcttcgctgtgataagtgcgggaaaggatacaagcatagcagctgcttgaccaagcatttgtgggaacatactcccgagtggtcatacacatccaagctgcttatctctaagcatcaacaagtacagctacttgaagctgcctctgtactagtgaccatgaacaataatgacgcggccaccccgccggaatcggctagggatccagccagtgagacggagtcaacatcgccgacggcatccgggtactcagaacaccaagatgggcgcagctctgtagacactacccctccgccacagggagacgggttcaccgggtaccgagatctcgcaaagcgatacagcaacggaagcaactactcgcgatcctaccaatccgctgcttcaggctcattccttcctggaagcctacctaaccgcaatggcttcagtcacaaccggcacgggagcacggaccgccgtccagtgtcgtccgggttgaacaactccggccaggacgaccgtgatctggcggcggcggtcgagctgctcagctgcagcaccgggagcaatggaggcaaccgggactcccgacttccggaggacgcccctccggttcctccgctgcctgcccaatatctcgagcaagcagcgttcggcggcactagcttcatgaacagctatcggcagatgcaaatgccagagagcttcaccagaggtcctgtgcgccaaacgcaagacgtcaggatggaggacagcgagggtagtaccgtggacgacgaggaagaggagcgtcgctcacgggcgcgcagcagcgaagaggatgatgacatgctctttggacgcatggaggaatga

SEQ ID NO: 17421 - protein, 456 aa, Muscodor strobelii
  misc_feature: SGI Peptide ID NO. 565818
  misc_feature (1)..(456): NCBI GI: 116192137 Blast Desc: CHGG_05786 [Chaetomium globosum CBS 148.51] gi|88181699|gb|EAQ89167.1| CHGG_05786 [Chaetomium globosum CBS 148.51]
  misc_feature (5)..(456): NCBI GI: 171686720 Blast Desc: protein product [Podospora anserina] gi|170943321|emb|CAP68974.1| protein product [Podospora anserina]
  misc_feature (35)..(456): NCBI GI: 256733265 Blast Desc: NECHADRAFT_79377 [Nectria haematococca mpVI 77-13-4]
  misc_feature (7)..(456): NCBI GI: 164428811 Blast Desc: NCU00073 [Neurospora crassa OR74A] gi|157072291|gb|EAA27147.2| conserved [Neurospora crassa OR74A]
  misc_feature (1)..(456): NCBI GI: 261360331 Blast Desc: conserved [Verticillium albo-atrum VaMs.102]
  misc_feature (81)..(455): NCBI GI: 145614344 Blast Desc: MGG_10162 [Magnaporthe grisea 70-15] gi|145021280|gb|EDK05409.1| MGG_10162 [Magnaporthe grisea 70-15]
  misc_feature (1)..(456): NCBI GI: 156051884 Blast Desc: SS1G_07349 [Sclerotinia sclerotiorum 1980] gi|154705127|gb|EDO04866.1| SS1G_07349 [Sclerotinia sclerotiorum 1980]
  misc_feature (10)..(456): NCBI GI: 169617283 Blast Desc: SNOG_11819 [Phaeosphaeria nodorum SN15] gi|160703378|gb|EAT80863.2| SNOG_11819 [Phaeosphaeria nodorum SN15]
  misc_feature (90)..(456): NCBI GI: 154290747 Blast Desc: BC1G_15571 [Botryotinia fuckeliana B05.10] gi|150847409|gb|EDN22602.1| BC1G_15571 [Botryotinia fuckeliana B05.10]
  misc_feature (156)..(456): NCBI GI: 240104991 Blast Desc: CPC735_045540 [Coccidioides posadasii C735 delta SOWgp]
  misc_feature: Useful for introducing or modulating the production of volatile compounds
MASSKEMQTSTRPLIQHRQSISSGSTVMASSRPSSHSRTNSSTLSALSSAHRVTRRKSMTNPTANAAAVAAVAAALQEQEAGDKIAALPITINARRSTISKPSTARSALAGSLPSPPASLPSHRFVMNTKMEAQESAIDDDSNDMSADDAEDGLQKARIRRASDGQPLTKEGKKSGRVELRCDKCGKGYKHSSCLTKHLWEHTPEWSYTSKLLISKHQQVQLLEAASVLVTMNNNDAATPPESARDPASETESTSPTASGYSEHQDGRSSVDTTPPPQGDGFTGYRDLAKRYSNGSNYSRSYQSAASGSFLPGSLPNRNGFSHNRHGSTDRRPVSSGLNNSGQDDRDLAAAVELLSCSTGSNGGNRDSRLPEDAPPVPPLPAQYLEQAAFGGTSFMNSYRQMQMPESFTRGPVRQTQDVRMEDSEGSTVDDEEEERRSRARSSEEDDDMLFGRMEE

SEQ ID NO: 17422 - DNA, 2333 bp, Muscodor strobelii; identical to SEQ ID NO: 17416
  misc_feature: SGI EST ID NO. CUFF.40959.1
  misc_feature: Variant of the nucleotide sequence at SEQ ID NO 17420

SEQ ID NO: 17423 - DNA, 1155 bp, Muscodor strobelii
  misc_feature: SGI cDNA ID NO. 565819
  misc_feature: Reduced expression when VOC is produced
  misc_feature: Encodes the peptide sequence at SEQ ID NO 17424
atgccgccaacgatgcgcacgagacgacagggcaaagctgctgcggcagcggcggctgtcaagaaggaagaggaagcatcgccgtctgcatctcccgtaccggcaccggttgcggctgctgttgaggcgaagcctgaacctgctgttgaaaatgcgccgccttcgtctccttctcatacggtcgtcaagatcgcaaagatcgaagactcgactgtggtgtcgcagcccacaccgacgccgcgatctttaatcccgaagcccgcgcagttcccgctcgtcgcaattctgagcatggttatctcgaccgttggcacctcgcttgtgtggcctctgacgaaaggcgtgctcgcggcgcatgcgcggcctatcacttcgtggcctgaacttgttgctatcatcggctggcgagtgtttgagctaggactcggctggtttggcaattacgacggttacgacatcacagctctgaacctcctcacccacgggcctcctctctatctcctattcgcgcactacgacaccccagctctccccatcctcttgaccctctccgtcgagacaatcgcaacctacgttccctggcacttcatgcgctccctatctcgcgctcacgcgagacccgccaccgcaaccaacgccgacatcctaaccgacacgcccatcacgctcctcacgaccctactcgcaggagcaatctatagtgtagccttgctcttcgcatacgcgacgtacctgccccaatacctcgtcgtctacttcaacgatttaccgtctgtcgtacgggcgcacgatactaactacatcggtctgctgcccgtgacgctcgggcttgggttcgcggcccgcgtcttcatcttcacacctgctgcttctgcgggacgtactgaagcagatgcgaagaatgaggcgtttgaccccgtgaaagcgagcttgaaggatacggtttggtggaatgtctggggttggagcactcaggcaaaagttggcattaggcgcacggcgctgctgtgtgctgcgaccgggttcaatacctttttgcagactagacttacggttatgggggttgagactgcgggtgcggttgcgtggagtagtgtttgggtgctggcgagtgctgttactgggcttgcgcttggggctgttggtagtgtctag

SEQ ID NO: 17424 - protein, 384 aa, Muscodor strobelii
  misc_feature: SGI Peptide ID NO. 565819
  misc_feature (78)..(380): NCBI GI: 156051882 Blast Desc: SS1G_07348 [Sclerotinia sclerotiorum 1980] gi|154705126|gb|EDO04865.1| SS1G_07348 [Sclerotinia sclerotiorum 1980]
  misc_feature (27)..(384): NCBI GI: 85079608 Blast Desc: NCU00072 [Neurospora crassa OR74A] gi|28917444|gb|EAA27146.1| [Neurospora crassa OR74A]
  misc_feature (74)..(382): NCBI GI: 256733264 Blast Desc: NECHADRAFT_79376 [Nectria haematococca mpVI 77-13-4]
  misc_feature (73)..(382): NCBI GI: 46124699 Blast Desc: FG06727.1 [Gibberella zeae PH-1]
  misc_feature (3)..(382): NCBI GI: 261360332 Blast Desc: conserved [Verticillium albo-atrum VaMs.102]
  misc_feature (55)..(384): NCBI GI: 116192135 Blast Desc: CHGG_05785 [Chaetomium globosum CBS 148.51] gi|88181698|gb|EAQ89166.1| CHGG_05785 [Chaetomium globosum CBS 148.51]
  misc_feature (140)..(384): NCBI GI: 171686722 Blast Desc: protein product [Podospora anserina] gi|170943322|emb|CAP68975.1| protein product [Podospora anserina]
  misc_feature (60)..(384): NCBI GI: 119491771 Blast Desc: NFIA_066470 [Neosartorya fischeri NRRL 181] gi|119411540|gb|EAW21483.1| conserved [Neosartorya fischeri NRRL 181]
  misc_feature (84)..(384): NCBI GI: 70999648 Blast Desc: conserved [Aspergillus fumigatus Af293] gi|66852178|gb|EAL92503.1| conserved [Aspergillus fumigatus Af293] gi|159127554|gb|EDP52669.1| conserved [Aspergillus A1163]
  misc_feature (84)..(384): NCBI GI: 67537482 Blast Desc: AN4911.2 [Aspergillus nidulans FGSC A4] gi|40741799|gb|EAA60989.1| AN4911.2 [Aspergillus nidulans FGSC A4] gi|259482221|tpe|CBF76496.1| TPA: conserved [Aspergillus FGSC
  misc_feature: Useful for introducing or modulating the production of volatile compounds
MPPTMRTRRQGKAAAAAAAVKKEEEASPSASPVPAPVAAAVEAKPEPAVENAPPSSPSHTVVKIAKIEDSTVVSQPTPTPRSLIPKPAQFPLVAILSMVISTVGTSLVWPLTKGVLAAHARPITSWPELVAIIGWRVFELGLGWFGNYDGYDITALNLLTHGPPLYLLFAHYDTPALPILLTLSVETIATYVPWHFMRSLSRAHARPATATNADILTDTPITLLTTLLAGAIYSVALLFAYATYLPQYLVVYFNDLPSVVRAHDTNYIGLLPVTLGLGFAARVFIFTPAASAGRTEADAKNEAFDPVKASLKDTVWWNVWGWSTQAKVGIRRTALLCAATGFNTFLQTRLTVMGVETAGAVAWSSVWVLASAVTGLALGAVGSV

SEQ ID NO: 17425 - DNA, 1819 bp, Muscodor strobelii
  misc_feature: SGI EST ID NO. CUFF.40953.1
  misc_feature: Variant of the nucleotide sequence at SEQ ID NO 17423
agctttagcgctgcaacgatcgggcaataacatcatcgagcctcaggtcattacatagctgttgaaaaattgtcgggcagctttcaactcatttcctgtcatcgcccatacaccatttctgtctccttgcacttcacattgtctggcgcattgttcttgttatctactctgttcggcacttcatcccttcgcagttcttgtctccctcgattacgcttagacacttcgtactagatctcatcaacaagacagatgccgccaacgatgcgcacgagacgacagggcaaagctgctgcggcagcggcggctgtcaagaaggaagaggaagcatcgccgtctgcatctcccgtaccggcaccggttgcggctgctgttgaggcgaagcctgaacctgctgttgaaaatgcgccgccttcgtctccttctcatacggtcgtcaagatcgcaaagatcgaagactcgactgtggtgtcgcagcccacaccgacgccgcgatctttaatcccgaagcccgcgcagttcccgctcgtcgcaattctgagcatggttatctcgaccgttggcacctcgcttgtgtggcctctgacgaaaggcgtgctcgcggcgcatgcgcggcctatcacttcgtggcctgaacttgttgctatcatcggctggcgagtgtttgagctaggactcggctggtttggcaattacgacggttacgacatcacagctctgaacctcctcacccacgggcctcctctctatctcctattcgcgcactacgacaccccagctctccccatcctcttgaccctctccgtcgagacaatcgcaacctacgttccctggcacttcatgcgctccctatctcgcgctcacgcgagacccgccaccgcaaccaacgccgacatcctaaccgacacgcccatcacgctcctcacgaccctactcgcaggagcaatctatagtgtagccttgctcttcgcatacgcgacgtacctgccccaatacctcgtcgtctacttcaacgatttaccgtctgtcgtacgggcgcacgatactaactacatcggtctgctgcccgtgacgctcgggcttgggttcgcggcccgcgtcttcatcttcacacctgctgcttctgcgggacgtactgaagcagatgcgaagaatgaggcgtttgaccccgtgaaagcgagcttgaaggatacggtttggtggaatgtctggggttggagcactcaggcaaaagttggcattaggcgcacggcgctgctgtgtgctgcgaccgggttcaatacctttttgcagactagacttacggttatgggggttgagactgcgggtgcggttgcgtggagtagtgtttgggtgctggcgagtgctgttactgggcttgcgcttggggctgttggtagtgtctagggggtggaaatgtgttaggggagaagggagatgtatgggttggattggagggcgtttcggacgggacaactttgagcgtctgttcttcatgttatgggcatgatgtcttgcagatgaggaactgggtcggtctggtttggattcactgtggcagattcagtcatggctactgcaactactaccatacgtgtaaaatgttcactaatgtctgtttcagaacttcgcggagttgcgtcagatggtgaaattgatgttaaaaatgtaatgacgaaacatgtgatacctccatactgtgtcctctgtagatataagctttcgtggtgatcttatagtccaagctcatgacatataggcaaggtcattattgacttcaagctcttgtggaactcatctctgcaacttggtatttcaa

SEQ ID NO: 17426 - DNA, 2802 bp, Muscodor strobelii
  misc_feature: SGI cDNA ID NO. 565820
  misc_feature: Encodes the peptide sequence at SEQ ID NO 17427
atggcgaccgcaacagagcctcacggcgccagtcgcggggaggtcgacagagatggtgatatcaccatgtcccaggattccgtgcctcaacctatggatcccgtcatagagagtgtcgcgaatgccagtgccggccttgagacgctcaaaatacgtgctgaccctgcggatccggatgcccaggccaccgtcacagacttcctcgacttcaccgagtatctcccggccgacatcaacagatccctcaccttgattggcaagcttgatgccaactaccacgaggcttctatccgactccacgacctcactgacacctggcgcaagctgcccaccctgcccctcgatcagcgacctgacccagtccagctgcgggctgacatctctgagaacctcgaccgcactgtcacctctcgcacctatgcccgagacgaggcggtccggaaccatgagaacatcactaagcactacaatcgcgtccagaacatcttatctaaattgatggacatgcgcgacaactggcccacagccgaagaacaagagctccagaagagccccgtccagtccaagtcgcctcagcatacgcgcacccccaaaatcacccttcgcacggacaaccacggccagaaagtgcgacagcccccgcgcatcactgttcctggcgaagtgcttgctccctacgaggtcgacttcaacacttacgacgactttagcgaagactcctccgaggacgagatctccgtctcgccaccccgaaccactaccgcgcagaatccccggattaagcttgtaaatcagcccaagacaccaaaacagaagttacccaagccaccacgaccctcccgcccctctatgagccgcgagaacatgccgcccgtagagtcgaccagcaccgccctggcgaaacttcgtccgccgcccgagaatgccgtcattggcagtcccgacgccccctggcttcagcttacccagtgggagcttgctaagcttagaaagcggatgaaaaagaattctgcgtggatacccagctctacgatgatcaaccgagaacttaaaaatgtcggccggggtctcgatgagtacagaactgccaagaaaacagcagaggaagaaggcaagcccttcgaggccgtcctaccggccctcgtgaccgacgccgagtcgggcaagcagcatccgcccgaaggtgctatcagtgccgattccatgactgcggatgaggtacaacttagcaatcggggcatgaagctcaatgaagctaagaagctcaaacgcgagactctggcccgacaggctgccgaggaggcagaggagtcagccaggaaaatggaagagacggctagaagctttttcaacgatgaagcatcgccatccgtggctggcagctctcatgacagcaaacccaaggagatggacaagcccaaggaggtctcgacatcacagaatgggcagagcaacgggaaagccgcaagctcaagtaagtccaaagcaactaagcggaagcgcgactcctcgtctgcaactccggtcgctgcagagaagcctccaggagccgagagtcagccccagaatcagacaccgcaaccatcggcccctgctacgcaaccagagaatgcagagaaatccgagaaaccgccggccaagcgtaccaaaacggagacacctatcccacctcctcagctcacgccaagacctctttcggttcctcctcaggctcccgctccggcttcaactcccgcagtcgcggttgagactcccgttcctgttcccaagctgggtaggaccatcatcacatccaagacgccagtcccggtgccggtgccggccaaggctccttcagagtcctctattgtggctgcaaggacggctacgtcgtctggacagacaagtccagctccgccctccactgtcactactactaccatccctaccaaacctcctgcagagactcctgttccccctcctgtcaagacctccactacacctattctccctcctactcgagatatccccaaacgcgagacccggcagaacttacagccggttgcagctaatcccaaacagcctactactacatctcgtggcaatacaccggtgtccattccggcacctgagccgcctcagccacctcaggctccgcagcctccgcaacctccgcaacctccgccgccacaacctcaatcttcaatggttaccagacgacctgtgtcgcgtggaaaagcggcgagtcaagaaccgcctcctactctcgccatggatcgaccccgacgtgcgagtactgccagaaatactcctgcaccggaaacccgtcaacccagcaagcgtgctaagcgacctgcaccaggcgttgttacaaccagctccggcggtactagtgctatcggcaagcgcaaggcagctccccgcaagaaggctcgcggcaatcccaagaaagacaagggcgcgaaccatcaacccgagccggagcctgaatttgagatcgaggtggacgacgatggcaatgtcatcgatccggatgagccgagatactgcctctgcaatcgcgtcagctttggcactatgataaattgcgacaacaccgatgtgagaccaaaatctaacaatccgtctaatcaacagaagaaaaagaagaaggcgctgactttgacgcaaaaccagggttgtgagaaggagtggttccacctcgaatgtgttggcctctcggagatcccggcgcgtacaacgaagtggtattgccctgcatgccgcattctgttgaatctcggagagcgtggagaggtcacatcgcgtggagtgaagatgtga

SEQ ID NO: 17427 - protein, 933 aa, Muscodor strobelii
  misc_feature: SGI Peptide ID NO. 565820
  misc_feature (842)..(917): Pfam Id: PF00628 Pfam Desc: PHD-finger
  misc_feature (886)..(917): Pfam Id: PF00628 Pfam Desc: PHD-finger
  misc_feature (20)..(932): NCBI GI: 261360333 Blast Desc: conserved [Verticillium albo-atrum VaMs.102]
  misc_feature (16)..(925): NCBI GI: 46124703 Blast Desc: FG06729.1 [Gibberella zeae PH-1]
  misc_feature (1)..(933): NCBI GI: 39969107 Blast Desc: MGG_10164 [Magnaporthe grisea 70-15] gi|145021278|gb|EDK05407.1| MGG_10164 [Magnaporthe grisea 70-15]
  misc_feature (27)..(861): NCBI GI: 171686726 Blast Desc: protein product [Podospora anserina] gi|170943324|emb|CAP68977.1| protein product [Podospora anserina]
  misc_feature (46)..(767): NCBI GI: 116192131 Blast Desc: CHGG_05783 [Chaetomium globosum CBS 148.51] gi|88181696|gb|EAQ89164.1| CHGG_05783 [Chaetomium globosum CBS 148.51]
  misc_feature (1)..(677): NCBI GI: 256733262 Blast Desc: NECHADRAFT_79374 [Nectria haematococca mpVI 77-13-4]
  misc_feature (34)..(609): NCBI GI: 85079600 Blast Desc: NCU00070 [Neurospora crassa OR74A] gi|28917442|gb|EAA27144.1| [Neurospora crassa OR74A]
  misc_feature (36)..(412): NCBI GI: 154290741 Blast Desc: BC1G_15568 [Botryotinia fuckeliana B05.10] gi|150847406|gb|EDN22599.1| BC1G_15568 [Botryotinia fuckeliana B05.10]
  misc_feature (51)..(457): NCBI GI: 154276304 Blast Desc: conserved [Ajellomyces capsulatus NAm1] gi|150414070|gb|EDN09435.1| conserved [Ajellomyces capsulatus NAm1]
  misc_feature (51)..(457): NCBI GI: 225555857 Blast Desc: conserved [Ajellomyces capsulatus G186AR]
MATATEPHGASRGEVDRDGDITMSQDSVPQPMDPVIESVANASAGLETLKIRADPADPDAQATVTDFLDFTEYLPADINRSLTLIGKLDANYHEASIRLHDLTDTWRKLPTLPLDQRPDPVQLRADISENLDRTVTSRTYARDEAVRNHENITKHYNRVQNILSKLMDMRDNWPTAEEQELQKSPVQSKSPQHTRTPKITLRTDNHGQKVRQPPRITVPGEVLAPYEVDFNTYDDFSEDSSEDEISVSPPRTTTAQNPRIKLVNQPKTPKQKLPKPPRPSRPSMSRENMPPVESTSTALAKLRPPPENAVIGSPDAPWLQLTQWELAKLRKRMKKNSAWIPSSTMINRELKNVGRGLDEYRTAKKTAEEEGKPFEAVLPALVTDAESGKQHPPEGAISADSMTADEVQLSNRGMKLNEAKKLKRETLARQAAEEAEESARKMEETARSFFNDEASPSVAGSSHDSKPKEMDKPKEVSTSQNGQSNGKAASSSKSKATKRKRDSSSATPVAAEKPPGAESQPQNQTPQPSAPATQPENAEKSEKPPAKRTKTETPIPPPQLTPRPLSVPPQAPAPASTPAVAVETPVPVPKLGRTIITSKTPVPVPVPAKAPSESSIVAARTATSSGQTSPAPPSTVTTTTIPTKPPAETPVPPPVKTSTTPILPPTRDIPKRETRQNLQPVAANPKQPTTTSRGNTPVSIPAPEPPQPPQAPQPPQPPQPPPPQPQSSMVTRRPVSRGKAASQEPPPTLAMDRPRRASTARNTPAPETRQPSKRAKRPAPGVVTTSSGGTSAIGKRKAAPRKKARGNPKKDKGANHQPEPEPEFEIEVDDDGNVIDPDEPRYCLCNRVSFGTMINCDNTDVRPKSNNPSNQQKKKKKALTLTQNQGCEKEWFHLECVGLSEIPARTTKWYCPACRILLNLGERGEVTSRGVKM

SEQ ID NO: 17428 - DNA, 3479 bp, Muscodor strobelii
  misc_feature: SGI EST ID NO. CUFF.40947.0
  misc_feature: Variant of the nucleotide sequence at SEQ ID NO 17426
caaacgcgctagtgcatctcaacaacgcggcatcagctcgcagctccaacatcacaactgctaccaggtaaatcgcatcgctttctgtccacgtctgccgaaagcatagacggcgcccatcaccgctccaaaccttgcgcacaaggcgcaataccgtcgtcactcttgcatcaccgttgacatgaatatgcccacagacaagcaactgcgctggtagttgcacggatccaccatggcgaccgcaacagagcctcacggcgccagtcgcggggaggtcgacagagatggtgatatcaccatgtcccaggattccgtgcctcaacctatggatcccgtcatagagagtgtcgcgaatgccagtgccggccttgagacgctcaaaatacgtgctgaccctgcggatccggatgcccaggccaccgtcacagacttcctcgacttcaccgagtatctcccggccgacatcaacagatccctcaccttgattggcaagcttgatgccaactaccacgaggcttctatccgactccacgacctcactgacacctggcgcaagctgcccaccctgcccctcgatcagcgacctgacccagtccagctgcgggctgacatctctgagaacctcgaccgcactgtcacctctcgcacctatgcccgagacgaggcggtccggaaccatgagaacatcactaagcactacaatcgcgtccagaacatcttatctaaattgatggacatgcgcgacaactggcccacagccgaagaacaagagctccagaagagccccgtccagtccaagtcgcctcagcatacgcgcacccccaaaatcacccttcgcacggacaaccacggccagaaagtgcgacagcccccgcgcatcactgttcctggcgaagtgcttgctccctacgaggtcgacttcaacacttacgacgactttagcgaagactcctccgaggacgagatctccgtctcgccaccccgaaccactaccgcgcagaatccccggattaagcttgtaaatcagcccaagacaccaaaacagaagttacccaagccaccacgaccctcccgcccctctatgagccgcgagaacatgccgcccgtagagtcgaccagcaccgccctggcgaaacttcgtccgccgcccgagaatgccgtcattggcagtcccgacgccccctggcttcagcttacccagtgggagcttgctaagcttagaaagcggatgaaaaagaattctgcgtggatacccagctctacgatgatcaaccgagaacttaaaaatgtcggccggggtctcgatgagtacagaactgccaagaaaacagcagaggaagaaggcaagcccttcgaggccgtcctaccggccctcgtgaccgacgccgagtcgggcaagcagcatccgcccgaaggtgctatcagtgccgattccatgactgcggatgaggtacaacttagcaatcggggcatgaagctcaatgaagctaagaagctcaaacgcgagactctggcccgacaggctgccgaggaggcagaggagtcagccaggaaaatggaagagacggctagaagctttttcaacgatgaagcatcgccatccgtggctggcagctctcatgacagcaaacccaaggagatggacaagcccaaggaggtctcgacatcacagaatgggcagagcaacgggaaagccgcaagctcaagtaagtccaaagcaactaagcggaagcgcgactcctcgtctgcaactccggtcgctgcagagaagcctccaggagccgagagtcagccccagaatcagacaccgcaaccatcggcccctgctacgcaaccagagaatgcagagaaatccgagaaaccgccggccaagcgtaccaaaacggagacacctatcccacctcctcagctcacgccaagacctctttcggttcctcctcaggctcccgctccggcttcaactcccgcagtcgcggttgagactcccgttcctgttcccaagctgggtaggaccatcatcacatccaagacgccagtcccggtgccggtgccggccaaggctccttcagagtcctctattgtggctgcaaggacggctacgtcgtctggacagacaagtccagctccgccctccactgtcactactactaccatccctaccaaacctcctgcagagactcctgttccccctcctgtcaagacctccactacacctattctccctcctactcgagatatccccaaacgcgagacccggcagaacttacagccggttgcagctaatcccaaacagcctactactacatctcgtggcaatacaccggtgtccattccggcacctgagccgcctcagccacctcaggctccgcagcctccgcaacctccgcaacctccgccgccacaacctcaatcttcaatggttaccagacgacctgtgtcgcgtggaaaagcggcgagtcaagaaccgcctcctactctcgccatggatcgaccccgacgtgcgagtactgccagaaatactcctgcaccggaaacccgtcaacccagcaagcgtgctaagcgacctgcaccaggcgttgttacaaccagctccggcggtactagtgctatcggcaagcgcaaggcagctccccgcaagaaggctcgcggcaatcccaagaaagacaagggcgcgaaccatcaacccgagccggagcctgaatttgagatcgaggtggacgacgatggcaatgtcatcgatccggatgagccgagatactgcctctgcaatcgcgtcagctttggcactatgataaattgcgacaacaccgatggttgtgagaaggagtggttccacctcgaatgtgttggcctctcggagatcccggcgcgtacaacgaagtggtattgccctgcatgccgcattctgttgaatctcggagagcgtggagaggtcacatcgcgtggagtgaagatgtgaagggtgtttgcgcattcgtgcgcttcggagggtgtcagcttgaagagcaggctttgtatgaattatattatggaatggcttcgagatgatgagtacgttcatccttggccttggggcgttttcggttcgatctatctttgcaggcatgcttcacctacctgcccagtggaaaggagtttgacgatgattcactggctagttcggatcggagtatggaaatgagcgcgagggagtctggtcattgcgggtgcgctttaggaataggcgttctagggagtggcctgtcgatacaatcttcacggtcgcattgtaattgtggctcttcgtatggctcttcaatgctttccaagagatagctagctgtccagatcaagcaagaaggtgaggtcattgagcaaggagagtcagagttactgtggagggagccgctaagtaggtaggggatccagataggatccagataggatccatatagagacagactagacaagctagctgttcaatcaatggtgtgccatat

SEQ ID NO: 17429 - DNA, 2727 bp, Muscodor strobelii
  misc_feature: SGI cDNA ID NO. 565821
  misc_feature: Encodes the peptide sequence at SEQ ID NO 17430
atggcgaccgcaacagagcctcacggcgccagtcgcggggaggtcgacagagatggtgatatcaccatgtcccaggattccgtgcctcaacctatggatcccgtcatagagagtgtcgcgaatgccagtgccggccttgagacgctcaaaatacgtgctgaccctgcggatccggatgcccaggccaccgtcacagacttcctcgacttcaccgagtatctcccggccgacatcaacagatccctcaccttgattggcaagcttgatgccaactaccacgaggcttctatccgactccacgacctcactgacacctggcgcaagctgcccaccctgcccctcgatcagcgacctgacccagtccagctgcgggctgacatctctgagaacctcgaccgcactgtcacctctcgcacctatgcccgagacgaggcggtccggaaccatgagaacatcactaagcactacaatcgcgtccagaacatcttatctaaattgatggacatgcgcgacaactggcccacagccgaagaacaagagctccagaagagccccgtccagtccaagtcgcctcagcatacgcgcacccccaaaatcacccttcgcacggacaaccacggccagaaagtgcgacagcccccgcgcatcactgttcctggcgaagtgcttgctccctacgaggtcgacttcaacacttacgacgactttagcgaagactcctccgaggacgagatctccgtctcgccaccccgaaccactaccgcgcagaatccccggattaagcttgtaaatcagcccaagacaccaaaacagaagttacccaagccaccacgaccctcccgcccctctatgagccgcgagaacatgccgcccgtagagtcgaccagcaccgccctggcgaaacttcgtccgccgcccgagaatgccgtcattggcagtcccgacgccccctggcttcagcttacccagtgggagcttgctaagcttagaaagcggatgaaaaagaattctgcgtggatacccagctctacgatgatcaaccgagaacttaaaaatgtcggccggggtctcgatgagtacagaactgccaagaaaacagcagaggaagaaggcaagcccttcgaggccgtcctaccggccctcgtgaccgacgccgagtcgggcaagcagcatccgcccgaaggtgctatcagtgccgattccatgactgcggatgaggtacaacttagcaatcggggcatgaagctcaatgaagctaagaagctcaaacgcgagactctggcccgacaggctgccgaggaggcagaggagtcagccaggaaaatggaagagacggctagaagctttttcaacgatgaagcatcgccatccgtggctggcagctctcatgacagcaaacccaaggagatggacaagcccaaggaggtctcgacatcacagaatgggcagagcaacgggaaagccgcaagctcaagtaagtccaaagcaactaagcggaagcgcgactcctcgtctgcaactccggtcgctgcagagaagcctccaggagccgagagtcagccccagaatcagacaccgcaaccatcggcccctgctacgcaaccagagaatgcagagaaatccgagaaaccgccggccaagcgtaccaaaacggagacacctatcccacctcctcagctcacgccaagacctctttcggttcctcctcaggctcccgctccggcttcaactcccgcagtcgcggttgagactcccgttcctgttcccaagctgggtaggaccatcatcacatccaagacgccagtcccggtgccggtgccggccaaggctccttcagagtcctctattgtggctgcaaggacggctacgtcgtctggacagacaagtccagctccgccctccactgtcactactactaccatccctaccaaacctcctgcagagactcctgttccccctcctgtcaagacctccactacacctattctccctcctactcgagatatccccaaacgcgagacccggcagaacttacagccggttgcagctaatcccaaacagcctactactacatctcgtggcaatacaccggtgtccattccggcacctgagccgcctcagccacctcaggctccgcagcctccgcaacctccgcaacctccgccgccacaacctcaatcttcaatggttaccagacgacctgtgtcgcgtggaaaagcggcgagtcaagaaccgcctcctactctcgccatggatcgaccccgacgtgcgagtactgccagaaatactcctgcaccggaaacccgtcaacccagcaagcgtgctaagcgacctgcaccaggcgttgttacaaccagctccggcggtactagtgctatcggcaagcgcaaggcagctccccgcaagaaggctcgcggcaatcccaagaaagacaagggcgcgaaccatcaacccgagccggagcctgaatttgagatcgaggtggacgacgatggcaatgtcatcgatccggatgagccgagatactgcctctgcaatcgcgtcagctttggcactatgataaattgcgacaacaccgatggttgtgagaaggagtggttccacctcgaatgtgttggcctctcggagatcccggcgcgtacaacgaagtggtattgccctgcatgccgcattctgttgaatctcggagagcgtggagaggtcacatcgcgtggagtgaagatgtga

SEQ ID NO: 17430 - protein, 908 aa, Muscodor strobelii
  misc_feature: SGI Peptide ID NO. 565821
  misc_feature (842)..(892): Pfam Id: PF00628 Pfam Desc: PHD-finger
  misc_feature (20)..(907): NCBI GI: 261360333 Blast Desc: conserved [Verticillium albo-atrum VaMs.102]
  misc_feature (16)..(900): NCBI GI: 46124703 Blast Desc: FG06729.1 [Gibberella zeae PH-1]
  misc_feature (1)..(908): NCBI GI: 39969107 Blast Desc: MGG_10164 [Magnaporthe grisea 70-15] gi|145021278|gb|EDK05407.1| MGG_10164 [Magnaporthe grisea 70-15]
  misc_feature (27)..(907): NCBI GI: 171686726 Blast Desc: protein product [Podospora anserina] gi|170943324|emb|CAP68977.1| protein product [Podospora anserina]
  misc_feature (46)..(767): NCBI GI: 116192131 Blast Desc: CHGG_05783 [Chaetomium globosum CBS 148.51] gi|88181696|gb|EAQ89164.1| CHGG_05783 [Chaetomium globosum CBS 148.51]
  misc_feature (1)..(675): NCBI GI: 256733262 Blast Desc: NECHADRAFT_79374 [Nectria haematococca mpVI 77-13-4]
  misc_feature (34)..(609): NCBI GI: 85079600 Blast Desc: NCU00070 [Neurospora crassa OR74A] gi|28917442|gb|EAA27144.1| [Neurospora crassa OR74A]
  misc_feature (36)..(412): NCBI GI: 154290741 Blast Desc: BC1G_15568 [Botryotinia fuckeliana B05.10] gi|150847406|gb|EDN22599.1| BC1G_15568 [Botryotinia fuckeliana B05.10]
  misc_feature (51)..(457): NCBI GI: 225555857 Blast Desc: conserved [Ajellomyces capsulatus G186AR]
  misc_feature (51)..(457): NCBI GI: 154276304 Blast Desc: conserved [Ajellomyces capsulatus NAm1] gi|150414070|gb|EDN09435.1| conserved [Ajellomyces capsulatus NAm1]
MATATEPHGASRGEVDRDGDITMSQDSVPQPMDPVIESVANASAGLETLKIRADPADPDAQATVTDFLDFTEYLPADINRSLTLIGKLDANYHEASIRLHDLTDTWRKLPTLPLDQRPDPVQLRADISENLDRTVTSRTYARDEAVRNHENITKHYNRVQNILSKLMDMRDNWPTAEEQELQKSPVQSKSPQHTRTPKITLRTDNHGQKVRQPPRITVPGEVLAPYEVDFNTYDDFSEDSSEDEISVSPPRTTTAQNPRIKLVNQPKTPKQKLPKPPRPSRPSMSRENMPPVESTSTALAKLRPPPENAVIGSPDAPWLQLTQWELAKLRKRMKKNSAWIPSSTMINRELKNVGRGLDEYRTAKKTAEEEGKPFEAVLPALVTDAESGKQHPPEGAISADSMTADEVQLSNRGMKLNEAKKLKRETLARQAAEEAEESARKMEETARSFFNDEASPSVAGSSHDSKPKEMDKPKEVSTSQNGQSNGKAASSSKSKATKRKRDSSSATPVAAEKPPGAESQPQNQTPQPSAPATQPENAEKSEKPPAKRTKTETPIPPPQLTPRPLSVPPQAPAPASTPAVAVETPVPVPKLGRTIITSKTPVPVPVPAKAPSESSIVAARTATSSGQTSPAPPSTVTTTTIPTKPPAETPVPPPVKTSTTPILPPTRDIPKRETRQNLQPVAANPKQPTTTSRGNTPVSIPAPEPPQPPQAPQPPQPPQPPPPQPQSSMVTRRPVSRGKAASQEPPPTLAMDRPRRASTARNTPAPETRQPSKRAKRPAPGVVTTSSGGTSAIGKRKAAPRKKARGNPKKDKGANHQPEPEPEFEIEVDDDGNVIDPDEPRYCLCNRVSFGTMINCDNTDGCEKEWFHLECVGLSEIPARTTKWYCPACRILLNLGERGEVTSRGVKM

SEQ ID NO: 17431 - DNA, 3479 bp, Muscodor strobelii; identical to SEQ ID NO: 17428
  misc_feature: SGI EST ID NO. CUFF.40947.0
  misc_feature: Variant of the nucleotide sequence at SEQ ID NO 17429

SEQ ID NO: 17432 - DNA, 474 bp, Muscodor strobelii
  misc_feature: SGI cDNA ID NO. 565822
  misc_feature: Encodes the peptide sequence at SEQ ID NO 17433
atggattattctcgcttcagaattaaaatttccaaagccatattcccaacggacggcacagaagtagacgagagagtgaagttattcatcgcgacattctacgaaacctcagacgactcggcgaaaaacgaagaatggcttgagtatttcgcgcctgacgcgacgcttattatgggggacaagatctcgtctggtattgaggagattcgtgagtttcgcaagagtatgtgggagaatgtcagatacagagcacacaggccggacacgatgttcccattctcatcactttcggaacctaccgacgagaatcccgagccggaatgctcatatatgattcatggggtgctcgacttgggtctgaagaatggtgatatgagaacagcgcattgggcggctagggcgacgctgaaagatattgagggagatttgaaatatacgcagtatcaggtttatcttcatgtcctggcgtcctga

SEQ ID NO: 17433 - protein, 157 aa, Muscodor strobelii
  misc_feature: SGI Peptide ID NO. 565822
  misc_feature (18)..(152): NCBI GI: 154289979 Blast Desc: BC1G_15890 [Botryotinia fuckeliana B05.10] gi|150848523|gb|EDN23716.1| BC1G_15890 [Botryotinia fuckeliana B05.10]
  misc_feature (10)..(152): NCBI GI: 169617297 Blast Desc: SNOG_11826 [Phaeosphaeria nodorum SN15] gi|111059750|gb|EAT80870.1| SNOG_11826 [Phaeosphaeria nodorum SN15]
  misc_feature (21)..(152): NCBI GI: 189188496 Blast Desc: conserved [Pyrenophora tritici-repentis Pt-1C-BFP] gi|187972193|gb|EDU39692.1| conserved [Pyrenophora tritici-repentis Pt-1C-BFP]
  misc_feature (14)..(153): NCBI GI: 116192129 Blast Desc: [Chaetomium globosum CBS 148.51] gi|88181695|gb|EAQ89163.1| [Chaetomium globosum CBS 148.51]
  misc_feature (29)..(157): NCBI GI: 256727788 Blast Desc: NECHADRAFT_62507 [Nectria haematococca mpVI 77-13-4]
  misc_feature (12)..(152): NCBI GI: 156051898 Blast Desc: [Sclerotinia sclerotiorum 1980] gi|154705134|gb|EDO04873.1| [Sclerotinia sclerotiorum 1980]
  misc_feature (29)..(155): NCBI GI: 119193847 Blast Desc: CIMG_01298 [Coccidioides immitis RS]
  misc_feature (29)..(154): NCBI GI: 240105550 Blast Desc: Fungal specific transcription factor, [Coccidioides posadasii C735 delta SOWgp]
  misc_feature (16)..(157): NCBI GI: 46133845 Blast Desc: FG09062.1 [Gibberella zeae PH-1]
  misc_feature (23)..(153): NCBI GI: 46125667 Blast Desc: FG07211.1 [Gibberella zeae PH-1]
MDYSRFRIKISKAIFPTDGTEVDERVKLFIATFYETSDDSAKNEEWLEYFAPDATLIMGDKISSGIEEIREFRKSMWENVRYRAHRPDTMFPFSSLSEPTDENPEPECSYMIHGVLDLGLKNGDMRTAHWAARATLKDIEGDLKYTQYQVYLHVLAS

SEQ ID NO: 17434 - DNA, 1956 bp, Muscodor strobelii
  misc_feature: SGI EST ID NO. CUFF.40993.1
  misc_feature: Variant of the nucleotide sequence at SEQ ID NO 17432
gctggatacgcacgcatttcgtacgtatttcggataaggactaacacgctatagacaagaagcttgctcccgacataaagacgataagacttaatgcgacgcatcattgcattgtagaaaacacgcgtagggcacacgtaacacgacgggaacgcatgaatcaacttgacattagattagcattgcagtcctggcccgggaccgggatgggccgtgcaaaggtcggagcaagtatatctacctagtggtgagcacgacatcggggtttaaaaacgtttctgctcttcttttcttcgttgatagtggtgcttagatgtgtccatgatacatccatcgcgtttggggttttgattgatatccacggccggtattagctggtttctattcttccccgttcaacgtcagtcggatattgattgcccgggacgggttctaagcggtgaagatggattattctcgtaagtaacacgtctctacgagccacgttgctggacgaacatccagcccagcttcagaattaaaatttccaaagccatattcccaacggacggcacagaagtagacgagagagtgaagttattcatcgcgacattctacgaaacctcagacgactcggcgaaaaacgaagaatggcttgagtatttcgcgcctgacgcgacgcttattatgggggacaagatctcgtctggtattgaggagattcgtgagtttcgcaagagtatgtgggagaatgtcagatacagagcacacaggccggacacgatgttcccattctcatcactttcggaacctaccgacgagaatcccgagccggaatgctcatatatgattcatggggtgctcgacttgggtctgaagaatggtgatatgagaacagcgcattgggcggctagggcgacgctgaaagatattgagggagatttgaaatatacgcagtatcaggtttatcttcatgtcctggcgtcctgaatagaggtgtgatgagaagtctttaggctcacatgacttcaagattggtggcgaagcccagagcatatctagttattacctcatctttggctcagcatcgtttattgagggtaaggggaatgtgttcgtagggctaagccaagcatcgtggccatggggcgtggcacatcagctgacttgtgtcagtctcttagtgagtccgatgcgtgccgctgtcacgttcgatacacttgactcggagtactcggcgatgacagatacttgccagccacgtatttgcagctacactacgagtttcgtggctctagatattgtgtcaatgaatgacgttaatgaatggcgaacatagctcaaatcgaatatcttgaattgttccagtcagaccgggtgcaacggataaggcagaaaaggcatgatgaatcatccggagggcacagtagcgaacacggtgttgaaatgaagggtcatcggtttgttgggcctttccttgcttccagatctttgatcacggaagcatgatggaagcttactcgatgcctgaacccttattattggcttcatagtgggcgagtaaacttgatcagttggtttcgcatttagcagggattaccgaggtatctttgccatgccttgaatccgcaccttgcagctgccgctccgtgaaaagcgatgacgcagcggcgcatcgttgaaatgctcctcgctgaagaatgcgatgtctcatagacataattccgcatccggcatcactcttcgtcagttaaagtcagtctgtcggtcgtcttagtagtctcccgctgatcacagtatctgcttgagagctgacaggctcaacaatgcctgcccctcatctttgtatctccatcgtcaacccctctctggagttgggtctggttagttggggttactaaaacgaggaccatctggataagactaggactggggtctctgttcattccggaccaacagatagcgtgacgattgccg

SEQ ID NO: 17435 - DNA, 3435 bp, Muscodor strobelii
  misc_feature: SGI cDNA ID NO. 565823
  misc_feature: Encodes the peptide sequence at SEQ ID NO 17436
atgcccggttcgtcctcccacgacgcgtctccgacgtcagactcctccctctccgccaccaaggcacgcggtaaaaagaagaacaagaagcttactggggtcgagtctccaggttcaaagaagaaggacaagaatgccaaagatggtggtggggttgtggccgcggtgaccaagcatggaaccaagttcactagcagcagcagtgacagcgtggcaaacgatgttctgccccctgattcagactcccctttattccagtcgccgaacctcaagccagccatgcccgcatcgattcccatgaacggccggccatctatgtcaccacacttagaccctatctcagcgacttcgatctcagctggcacagctcacagcgctaatgactggactaaagcgatggggccactggctggttctccctccaacttgatcagtatcatgggcgactcaccacccacacaaccatcatcgtacgaagacccgaggggcttgtcgtatacctggggtgtccagcaacagcagcagcgctatgctaataacaacgcgtactctgcttcgccaccaaatagacgacccttgagtttccacaaggagttctatcctgcgagcgacctgcgttctcaggcatcttcgcctcctggtgtccgaaggagttcgatgcactcaccgtttgcagctcctcgagttacgggtgttccacctctaccacatcaagctcaagctcacttctacggggctccggacgttgacttcgacatgcatgccaagactggcttgaaagctggtgagcgaggatactactttggctttgactcacttccacggcctaagggcgcacttacatctaataccgaccatgtcgtgttagctggctacgaaggcgggctcaatgtgtatagtgtaggtaagaaaggtgtggatgtacttgctagcctgaaaggactgcgaggaggagtcattaatgcaaagatacttccttgggctgctggatcagatccatcgggcatgttccctttggtagcggtcgtggtccacggtcctgttattccttcgaatgcccctgaaattgctgtggaaacgggcttcgaccatccctcgagtcctcgaatggatggcacgaacactccgcagtccgataatcatcaacggcaaggtggtcagggcaaggcgattcccatcattgaggcttaccaaacctcagttgaggtatactcattgggaaccaaccgactagttgatgtcctgcttcaagcgccacaaacccctatcaagacctccgttacaagcccagtattcaggagtcctccgcccactggatcttttcagataagtaccggagatggtaatgtggttgtgtcttcgggcaccacaggcgagtgttgggtttatcgtcaaatatctcatgagcaggatcctggctatcagttcacttgtgttggcaaaatctggacaagcttgcaacagagtctcaaaggcgatgccacaccagaagatgaaggaagcccggcaccgaaaccgccacgaaaacgcccacaaatgcccatagtctctgtcaacgggagatggctcgcatactgtcctccggctgcatcatcacaaatcgctctcaacgcatacatacccgtccccgtggaaggtaaagcgccaggattagcgacgctgacttcacccgtactacctaatgagagttcggaagttgaccagccgatctccgatggagtcatgaaccggatcatgagagaaacgactcaagaattcattcatggagcccgctgggttgggaaacagggaatgtcgctgtggaacaattattggaagactggccagcagcccgctccgagacaggcgactgtaggctcgccaccatggggttcaaattatcctacaagagctgactctccacaatttcccccaacgtacggtgtctcggggcaggccgttactaaggagccgggacttgtttctatagtcgacctatacagtttggcgaactccggtgcagttcaccctatcacgactttcaagacgccactcggctgtagcttcctgtctttcgctcctacaggattatcgctgttcacagcaagcagtaaaggagacgtccagactgtctgggatttgatgcgcatccagcacaccaaatcatccccacttcaaaattcacagccaaataatggacatgctacccgagttcgccaaattgcccaattttcgcgcatgactgtcgctcgcatagttgatgttgcttgggcccagcctaatggagaacgagctgccatggtgaccgaaaggggcactgtacaccttttagacatgcctcccagcgctttcagctggcctcctcctcgccggcgtactgccaattccgaaggtgctggtggagcatccgagcacccaccatcagctgtttccattgcatcgaatgcgctcagctctgcatacggggcaacaaggccactaattactcgtcaacgacgggccaactcaaattcaacttcacaaggctcgtcaacgatcatggatcatgcgagttacggcggaaaggttcttgccgcaggaattagtcattcactgggcaatgcggggaccgccatcaaccatttgcgccatactggagagaatcgtgttagcttacccttgagaaacatgtcggcgggcatttcgtgcgctatgtggattactggcaggaaacatcatactctcttcgtcgttggtgacggcttggtcaggatgtttcccagcaagagtcgccagcccagctttaggaaagaagggccacggactcgtggaaataagcatactgacttcaagctgagagacttgcctgacgatttgatcgcccaatcagtcaagcagatgattgatcctgtagatgaacttgacttggcgaaccaaggtcatgatggaagcaacacattggtgctccatcccagaccacgttccgtcgattccgaccacagtccggaggccgcaattccacaggctgaaatagagtcaaacgcaccttaccagccattccacactgatagacgagttggccttcacgtgtatcgagaaggtggtgacgctgggttgtcaagtgtcatacaacacatggagtcggttacactggatgttgcgcccaaaaggggaaaacaacgccaaccgaagtcgaacggtacccaggcttgggctttcgggcagcctataagcaccatcaagctagacctcggcttgccaccggtagtggatgaggatatcagcaacagcatcgatgatcaccgagccctgcccgtctcggctatggagcgagtcttgcaagtcggtgagaacgacgagcagattgtagtgacgacccgccgacggcgaggtggcgaccgcgctcctaacgccgacgaagatggatttttcgaggatgactgtgaagtgcttgattttgctgaccaacgagtatga

SEQ ID NO: 17436 - protein, 1144 aa, Muscodor strobelii
  misc_feature: SGI Peptide ID NO. 565823
  misc_feature (36)..(1144): NCBI GI: 46125669 Blast Desc: FG07212.1 [Gibberella zeae PH-1]
  misc_feature (37)..(1144): NCBI GI: 116192127 Blast Desc: CHGG_05781 [Chaetomium globosum CBS 148.51] gi|88181694|gb|EAQ89162.1| CHGG_05781 [Chaetomium globosum CBS 148.51]
  misc_feature (39)..(1144): NCBI GI: 171686698 Blast Desc: protein product [Podospora anserina] gi|170943310|emb|CAP68963.1| protein product [Podospora anserina]
  misc_feature (107)..(1144): NCBI GI: 164428807 Blast Desc: NCU00068 [Neurospora crassa OR74A] gi|157072289|gb|EAA27142.2| [Neurospora crassa OR74A]
  misc_feature (37)..(1144): NCBI GI: 261360335 Blast Desc: conserved [Verticillium albo-atrum VaMs.102]
  misc_feature (107)..(1144): NCBI GI: 154315210 Blast Desc: BC1G_04644 [Botryotinia fuckeliana B05.10] gi|150847607|gb|EDN22800.1| BC1G_04644 [Botryotinia fuckeliana B05.10]
  misc_feature (141)..(1144): NCBI GI: 156037898 Blast Desc: SS1G_12663 [Sclerotinia sclerotiorum 1980] gi|154698071|gb|EDN97809.1| SS1G_12663 [Sclerotinia sclerotiorum 1980]
  misc_feature (530)..(1144): NCBI GI: 145614340 Blast Desc: MGG_11340 [Magnaporthe grisea 70-15] gi|145021277|gb|EDK05406.1| MGG_11340 [Magnaporthe grisea 70-15]
  misc_feature (84)..(1144): NCBI GI: 189202564 Blast Desc: conserved [Pyrenophora tritici-repentis Pt-1C-BFP] gi|187984717|gb|EDU50205.1| conserved [Pyrenophora tritici-repentis Pt-1C-BFP]
  misc_feature (174)..(1144): NCBI GI: 255951314 Blast Desc: Pc22g25380 [Penicillium chrysogenum Wisconsin 54-1255] gi|211593441|emb|CAP99826.1| Pc22g25380 [Penicillium chrysogenum Wisconsin 54-1255]
MPGSSSHDASPTSDSSLSATKARGKKKNKKLTGVESPGSKKKDKNAKDGGGVVAAVTKHGTKFTSSSSDSVANDVLPPDSDSPLFQSPNLKPAMPASIPMNGRPSMSPHLDPISATSISAGTAHSANDWTKAMGPLAGSPSNLISIMGDSPPTQPSSYEDPRGLSYTWGVQQQQQRYANNNAYSASPPNRRPLSFHKEFYPASDLRSQASSPPGVRRSSMHSPFAAPRVTGVPPLPHQAQAHFYGAPDVDFDMHAKTGLKAGERGYYFGFDSLPRPKGALTSNTDHVVLAGYEGGLNVYSVGKKGVDVLASLKGLRGGVINAKILPWAAGSDPSGMFPLVAVVVHGPVIPSNAPEIAVETGFDHPSSPRMDGTNTPQSDNHQRQGGQGKAIPIIEAYQTSVEVYSLGTNRLVDVLLQAPQTPIKTSVTSPVFRSPPPTGSFQISTGDGNVVVSSGTTGECWVYRQISHEQDPGYQFTCVGKIWTSLQQSLKGDATPEDEGSPAPKPPRKRPQMPIVSVNGRWLAYCPPAASSQIALNAYIPVPVEGKAPGLATLTSPVLPNESSEVDQPISDGVMNRIMRETTQEFIHGARWVGKQGMSLWNNYWKTGQQPAPRQATVGSPPWGSNYPTRADSPQFPPTYGVSGQAVTKEPGLVSIVDLYSLANSGAVHPITTFKTPLGCSFLSFAPTGLSLFTASSKGDVQTVWDLMRIQHTKSSPLQNSQPNNGHATRVRQIAQFSRMTVARIVDVAWAQPNGERAAMVTERGTVHLLDMPPSAFSWPPPRRRTANSEGAGGASEHPPSAVSIASNALSSAYGATRPLITRQRRANSNSTSQGSSTIMDHASYGGKVLAAGISHSLGNAGTAINHLRHTGENRVSLPLRNMSAGISCAMWITGRKHHTLFVVGDGLVRMFPSKSRQPSFRKEGPRTRGNKHTDFKLRDLPDDLIAQSVKQMIDPVDELDLANQGHDGSNTLVLHPRPRSVDSDHSPEAAIPQAEIESNAPYQPFHTDRRVGLHVYREGGDAGLSSVIQHMESVTLDVAPKRGKQRQPKSNGTQAWAFGQPISTIKLDLGLPPVVDEDISNSIDDHRALPVSAMERVLQVGENDEQIVVTTRRRRGGDRAPNADEDGFFEDDCEVLDFADQRV

SEQ ID NO: 17437 - DNA, 5169 bp, Muscodor strobelii
  misc_feature: SGI EST ID NO. CUFF.41132.0
  misc_feature: Variant of the nucleotide sequence at SEQ ID NO 17435
ctcgcatagccaaacacttgactgtcggtgaatgaatgcttcattgcccttctcttttctcttcttcataatcactctcatttgataaaccatctatctgcatagctgcgctgctaaaaagacataatcacgttgcgaatccgtaaataatagtattcttctctgcctgaacggactacactccgttctttgtcccccgctaccctttctcggcccttcgacgcgtccgctcgtcttcgtcatcctcattccccttagtgccaatctacctcaactcgattgctgaacagaccgtgaatccatacgaacaactctgctaaacctcgttgccccatcgcctaagacccatcttgctcagcaggaccggcaacccaatagtcgagctcttctcgcgaaggagggctctgctgctggtgagcaggagactgcacccggcttctctagcctcccgccattctatgcccggttcaaagaagaaggacaagaatgccaaagatggtggtggggttgtggccgcggtgaccaagcatggaaccaagttcactagcagcagcagtgacagcgtggcaaacgatgttctgccccctgattcagactcccctttattccagtcgccgaacctcaagccagccatgcccgcatcgattcccatgaacggccggccatctatgtcaccacacttagaccctatctcagcgacttcgatctcagctggcacagctcacagcgctaatgactggactaaagcgatggggccactggctggttctccctccaacttgatcagtatcatgggcgactcaccacccacacaaccatcatcgtacgaagacccgaggggcttgtcgtatacctggggtgtccagcaacagcagcagcgctatgctaataacaacgcgtactctgcttcgccaccaaatagacgacccttgagtttccacaaggagttctatcctgcgagcgacctgcgttctcaggcatcttcgcctcctggtgtccgaaggagttcgatgcactcaccgtttgcagctcctcgagttacgggtgttccacctctaccacatcaagctcaagctcacttctacggggctccggacgttgacttcgacatgcatgccaagactggcttgaaagctggtgagcgaggatactactttggctttgactcacttccacggcctaagggcgcacttacatctaataccgaccatgtcgtgttagctggctacgaaggcgggctcaatgtgtatagtgtaggtaagaaaggtgtggatgtacttgctagcctgaaaggactgcgaggaggagtcattaatgcaaagatacttccttgggctgctggatcagatccatcgggcatgttccctttggtagcggtcgtggtccacggtcctgttattccttcgaatgcccctgaaattgctgtggaaacgggcttcgaccatccctcgagtcctcgaatggatggcacgaacactccgcagtccgataatcatcaacggcaaggtggtcagggcaaggcgattcccatcattgaggcttaccaaacctcagttgaggtatactcattgggaaccaaccgactagttgatgtcctgcttcaagcgccacaaacccctatcaagacctccgttacaagcccagtattcaggagtcctccgcccactggatcttttcagataagtaccggagatggtaatgtggttgtgtcttcgggcaccacaggcgagtgttgggtttatcgtcaaatatctcatgagcaggatcctggctatcagttcacttgtgttggcaaaatctggacaagcttgcaacagagtctcaaaggcgatgccacaccagaagatgaaggaagcccggcaccgaaaccgccacgaaaacgcccacaaatgcccatagtctctgtcaacgggagatggctcgcatactgtcctccggctgcatcatcacaaatcgctctcaacgcatacatacccgtccccgtggaaggtaaagcgccaggattagcgacgctgacttcacccgtactacctaatgagagttcggaagttgaccagccgatctccgatggagtcatgaaccggatcatgagagaaacgactcaagaattcattcatggagcccgctgggttgggaaacagggaatgtcgctgtggaacaattattggaagactggccagcagcccgctccgagacaggcgactgtaggctcgccaccatggggttcaaattatcctacaagagctgactctccacaatttcccccaacgtacggtgtctcggggcaggccgttactaaggagccgggacttgtttctatagtcgacctatacagtttggcgaactccggtgcagttcaccctatcacgactttcaagacgccactcggctgtagcttcctgtctttcgctcctacaggattatcgctgttcacagcaagcagtaaaggagacgtccagactgtctgggatttgatgcgcatccagcacaccaaatcatccccacttcaaaattcacagccaaataatggacatgctacccgagttcgccaaattgcccaattttcgcgcatgactgtcgctcgcatagttgatgttgcttgggcccagcctaatggagaacgagctgccatggtgaccgaaaggggcactgtacaccttttagacatgcctcccagcgctttcagctggcctcctcctcgccggcgtactgccaattccgaaggtgctggtggagcatccgagcacccaccatcagctgtttccattgcatcgaatgcgctcagctctgcatacggggcaacaaggccactaattactcgtcaacgacgggccaactcaaattcaacttcacaaggctcgtcaacgatcatggatcatgcgagttacggcggaaaggttcttgccgcaggaattagtcattcactgggcaatgcggggaccgccatcaaccatttgcgccatactggagagaatcgtgttagcttacccttgagaaacatgtcggcgggcatttcgtgcgctatgtggattactggcaggaaacatcatactctcttcgtcgttggtgacggcttggtcaggatgtttcccagcaagagtcgccagcccagctttaggaaagaagggccacggactcgtggaaataagcatactgacttcaagctgagagacttgcctgacgatttgatcgcccaatcagtcaagcagatgattgatcctgtagatgaacttgacttggcgaaccaaggtcatgatggaagcaacacattggtgctccatcccagaccacgttccgtcgattccgaccacagtccggaggccgcaattccacaggctgaaatagagtcaaacgcaccttaccagccattccacactgatagacgagttggccttcacgtgtatcgagaaggtggtgacgctgggttgtcaagtgtcatacaacacatggagtcggttacactggatgttgcgcccaaaaggggaaaacaacgccaaccgaagtcgaacggtacccaggcttgggctttcgggcagcctataagcaccatcaagctagacctcggcttgccaccggtagtggatgaggatatcagcaacagcatcgatgatcaccgagccctgcccgtctcggctatggagcgagtcttgcaagtcggtgagaacgacgagcagattgtagtgacgacccgccgacggcgaggtggcgaccgcgctcctaacgccgacgaagatggatttttcgaggatgactgtgaagtgcttgattttgctgaccaacgagtatgatctggctggtgaagtataagtgagctgccagttgttgtcctttctacactgggcttggactgaagtgcagagactcggttgcttctgacggagttgggtgtggtgtctgggtgccccttttcgattgcttgccgttgagccgccaaggtcttgtcataccgaccctcactctcgctttcgcttggactttggactggggagcgcagctttgttgactggagttggagtactggcgtacgttcatcatcaatcacaacatcaccgggatactagatatacaagacgatatgagccgcctcgttagcgataggtgtccataacaaccccgagcaatcaaaaccagtaaaatccatgactgttcctaatggtttgtgtgacacagtgttcagctcgtagacagaaatcgattacatgtgatctgtatcttttggatttgctcaagcgctacgctaatagtacgccgaatttagttgtggcgaggccgacatattatcttgacagtcccaggttgtcaattctcagcgagctttgtctcccccctctcctccctatttccagataaatgggagtcaaaatgcgcgaacagcccagacgacggacttccacacaagatttgcccaccatgcccttatttcattactcgttctcaagccgcacctcgcccattgtctacgtcgcacaccattaccactatgtgatttcaatgaagacgtctaggccttcttcttggcagcggcggccttggcggccctcttccgattgctgcggatcatgacgacgctgaggaaggagccgacgatggcggaggcgagcaggatgaggatgacgggtatgcggatggcccattcgcggggtgggaatatgctgtggagggggtggtcggagtctacgaagggctggaggggggattgttagctttgtatgaatagacaagaatggtggttcgtgatagtatggtctaagggggctcggcggttgatgttttgcgattcgggagaggcgatagagtatcaggcggaagcaattcaagagagattgaaagtgactgtgaagtcgtaccatagccagcgtccagatggagtagtagaggaagacaacggaggcggccacgagcatggcgagaccgacgagcgttgagagctggagggggtttgttagtcgatcttcgttgaataggggaggggaggtggaggtgcatttccataccatttttaatgaatgaacgacgagttaagagtgtaaaatgagtgtgaagaagtttggagagatgggctgtactggtgatgttaccgttactggagttggttgagatattggttgtggtgtcgttggcgacgaattgtcaactctctgaaatgacacttttgcggtcgtctgcaat

SEQ ID NO: 17438 - DNA, 1218 bp, Muscodor strobelii
  misc_feature: SGI cDNA ID NO. 565824
  misc_feature: Elevated expression when VOC is produced
  misc_feature: Encodes the peptide sequence at SEQ ID NO 17439
atgactgtcgctcgcatagttgatgttgcttgggcccagcctaatggagaacgagctgccatggtgaccgaaaggggcactgtacaccttttagacatgcctcccagcgctttcagctggcctcctcctcgccggcgtactgccaattccgaaggtgctggtggagcatccgagcacccaccatcagctgtttccattgcatcgaatgcgctcagctctgcatacggggcaacaaggccactaattactcgtcaacgacgggccaactcaaattcaacttcacaaggctcgtcaacgatcatggatcatgcgagttacggcggaaaggttcttgccgcaggaattagtcattcactgggcaatgcggggaccgccatcaaccatttgcgccatactggagagaatcgtgttagcttacccttgagaaacatgtcggcgggcatttcgtgcgctatgtggattactggcaggaaacatcatactctcttcgtcgttggtgacggcttggtcaggatgtttcccagcaagagtcgccagcccagctttaggaaagaagggccacggactcgtggaaataagcatactgacttcaagctgagagacttgcctgacgatttgatcgcccaatcagtcaagcagatgattgatcctgtagatgaacttgacttggcgaaccaaggtcatgatggaagcaacacattggtgctccatcccagaccacgttccgtcgattccgaccacagtccggaggccgcaattccacaggctgaaatagagtcaaacgcaccttaccagccattccacactgatagacgagttggccttcacgtgtatcgagaaggtggtgacgctgggttgtcaagtgtcatacaacacatggagtcggttacactggatgttgcgcccaaaaggggaaaacaacgccaaccgaagtcgaacggtacccaggcttgggctttcgggcagcctataagcaccatcaagctagacctcggcttgccaccggtagtggatgaggatatcagcaacagcatcgatgatcaccgagccctgcccgtctcggctatggagcgagtcttgcaagtcggtgagaacgacgagcagattgtagtgacgacccgccgacggcgaggtggcgaccgcgctcctaacgccgacgaagatggatttttcgaggatgactgtgaagtgcttgattttgctgaccaacgagtatga

SEQ ID NO: 17439 - protein, 405 aa, Muscodor strobelii
  misc_feature: SGI Peptide ID NO. 565824
  misc_feature (1)..(405): NCBI GI: 46125669 Blast Desc: FG07212.1 [Gibberella zeae PH-1]
  misc_feature (1)..(405): NCBI GI: 116192127 Blast Desc: CHGG_05781 [Chaetomium globosum CBS 148.51] gi|88181694|gb|EAQ89162.1| CHGG_05781 [Chaetomium globosum CBS 148.51]
  misc_feature (1)..(405): NCBI GI: 261360335 Blast Desc: conserved [Verticillium albo-atrum VaMs.102]
  misc_feature (1)..(405): NCBI GI: 164428807 Blast Desc: NCU00068 [Neurospora crassa OR74A] gi|157072289|gb|EAA27142.2| [Neurospora crassa OR74A]
  misc_feature (1)..(405): NCBI GI: 171686698 Blast Desc: protein product [Podospora anserina] gi|170943310|emb|CAP68963.1| protein product [Podospora anserina]
  misc_feature (1)..(405): NCBI GI: 145614340 Blast Desc: MGG_11340 [Magnaporthe grisea 70-15] gi|145021277|gb|EDK05406.1| MGG_11340 [Magnaporthe grisea 70-15]
  misc_feature (1)..(405): NCBI GI: 156037898 Blast Desc: SS1G_12663 [Sclerotinia sclerotiorum 1980] gi|154698071|gb|EDN97809.1| SS1G_12663 [Sclerotinia sclerotiorum 1980]
  misc_feature (1)..(405): NCBI GI: 154315210 Blast Desc: BC1G_04644 [Botryotinia fuckeliana B05.10] gi|150847607|gb|EDN22800.1| BC1G_04644 [Botryotinia fuckeliana B05.10]
  misc_feature (1)..(405): NCBI GI: 242804222 Blast Desc: conserved [Talaromyces stipitatus ATCC 10500] gi|218717676|gb|EED17097.1| conserved [Talaromyces stipitatus ATCC 10500]
  misc_feature (1)..(405): NCBI GI: 212539548 Blast Desc: conserved [Penicillium marneffei ATCC 18224] gi|210067228|gb|EEA21320.1| conserved [Penicillium marneffei ATCC 18224]
  misc_feature: Useful for introducing or modulating the production of volatile compounds
MTVARIVDVAWAQPNGERAAMVTERGTVHLLDMPPSAFSWPPPRRRTANSEGAGGASEHPPSAVSIASNALSSAYGATRPLITRQRRANSNSTSQGSSTIMDHASYGGKVLAAGISHSLGNAGTAINHLRHTGENRVSLPLRNMSAGISCAMWITGRKHHTLFVVGDGLVRMFPSKSRQPSFRKEGPRTRGNKHTDFKLRDLPDDLIAQSVKQMIDPVDELDLANQGHDGSNTLVLHPRPRSVDSDHSPEAAIPQAEIESNAPYQPFHTDRRVGLHVYREGGDAGLSSVIQHMESVTLDVAPKRGKQRQPKSNGTQAWAFGQPISTIKLDLGLPPVVDEDISNSIDDHRALPVSAMERVLQVGENDEQIVVTTRRRRGGDRAPNADEDGFFEDDCEVLDFADQRV

SEQ ID NO: 17440 - DNA, 5169 bp, Muscodor strobelii; identical to SEQ ID NO: 17437
  misc_feature: SGI EST ID NO. CUFF.41132.0
  misc_feature: Variant of the nucleotide sequence at SEQ ID NO 17438

SEQ ID NO: 17441 - DNA, 267 bp, Muscodor strobelii
  misc_feature: SGI cDNA ID NO. 565825
  misc_feature: Encodes the peptide sequence at SEQ ID NO 17442
atgctctcaacgctcgtcggtctcgccatgctcgtggccgcctccgttgtcttcctctactactccatctggacgctggctatgcccttcgtagactccgaccaccccctccacagcatattcccaccccgcgaatgggccatccgcatacccgtcatcctcatcctgctcgcctccgccatcgtcggctccttcctcagcgtcgtcatgatccgcagcaatcggaagagggccgccaaggccgccgctgccaagaagaaggcctag

SEQ ID NO: 17442 - protein, 88 aa, Muscodor strobelii
  misc_feature: SGI Peptide ID NO. 565825
  misc_feature (1)..(78): Pfam Id: PF07297 Pfam Desc: Dolichol phosphate-mannose biosynthesis regulatory protein (DPM2)
  misc_feature (6)..(78): Pfam Id: PF07297 Pfam Desc: Dolichol phosphate-mannose biosynthesis regulatory protein (DPM2)
  misc_feature (1)..(75): NCBI GI: 154315212 Blast Desc: dolichyl-phosphate mannosyltransferase polypeptide 2 [Botryotinia fuckeliana B05.10] gi|150847608|gb|EDN22801.1| dolichyl-phosphate mannosyltransferase polypeptide 2 [Botryotinia
  misc_feature (1)..(75): NCBI GI: 156037896 Blast Desc: conserved [Sclerotinia sclerotiorum 1980] gi|154698070|gb|EDN97808.1| conserved [Sclerotinia sclerotiorum 1980]
  misc_feature (1)..(75): NCBI GI: 116192125 Blast Desc: CHGG_05780 [Chaetomium globosum CBS 148.51] gi|88181693|gb|EAQ89161.1| CHGG_05780 [Chaetomium globosum CBS 148.51]
  misc_feature (1)..(75): NCBI GI: 46125671 Blast Desc: FG07213.1 [Gibberella zeae PH-1]
  misc_feature (10)..(75): NCBI GI: 85079591 Blast Desc: NCU00067 [Neurospora crassa OR74A] gi|28917439|gb|EAA27141.1| NCU00067 [Neurospora crassa OR74A]
  misc_feature (1)..(75): NCBI GI: 239609434 Blast Desc: dolichol phosphate-mannose biosynthesis regulatory protein Dpm2 [Ajellomyces dermatitidis ER-3]
  misc_feature (5)..(75): NCBI GI: 240279740 Blast Desc: dolichol phosphate-mannose biosynthesis regulatory protein Dpm2 [Ajellomyces capsulatus H143]
  misc_feature (1)..(75): NCBI GI: 169596482 Blast Desc: SNOG_01004 [Phaeosphaeria nodorum SN15] gi|160701321|gb|EAT92499.2| SNOG_01004 [Phaeosphaeria nodorum SN15]
  misc_feature (5)..(75): NCBI GI: 154280208 Blast Desc: conserved [Ajellomyces capsulatus NAm1] gi|150412860|gb|EDN08247.1| conserved [Ajellomyces capsulatus NAm1]
  misc_feature (1)..(75): NCBI GI: 189202496 Blast Desc: conserved [Pyrenophora tritici-repentis Pt-1C-BFP] gi|187984683|gb|EDU50171.1| conserved [Pyrenophora tritici-repentis Pt-1C-BFP]
MLSTLVGLAMLVAASVVFLYYSIWTLAMPFVDSDHPLHSIFPPREWAIRIPVILILLASAIVGSFLSVVMIRSNRKRAAKAAAAKKKA

SEQ ID NO: 17443 - DNA, 5197 bp, Muscodor strobelii
  misc_feature: SGI EST ID NO. CUFF.41133.1
  misc_feature: Variant of the nucleotide sequence at SEQ ID NO 17441
attgcagacgaccgcaaaagtgtcatttcagagagttgacaattcgtcgccaacgacaccacaaccaatatctcaaccaactccagtaacggtaacatcaccagtacagcccatctctccaaacttcttcacactcattttacactcttaactcgtcgttcattcattaaaaatgctctcaacgctcgtcggtctcgccatgctcgtggccgcctccgttgtcttcctctactactccatctggacgctggctatgcccttcgtagactccgaccaccccctccacagcatattcccaccccgcgaatgggccatccgcatacccgtcatcctcatcctgctcgcctccgccatcgtcggctccttcctcagcgtcgtcatgatccgcagcaatcggaagagggccgccaaggccgccgctgccaagaagaaggcctagacgtcttcattgaaatcacatagtggtaatggtgtgcgacgtagacaatgggcgaggtgcggcttgagaacgagtaatgaaataagggcatggtgggcaaatcttgtgtggaagtccgtcgtctgggctgttcgcgcattttgactcccatttatctggaaatagggaggagaggggggagacaaagctcgctgagaattgacaacctgggactgtcaagataatatgtcggcctcgccacaactaaattcggcgtactattagcgtagcgcttgagcaaatccaaaagatacagatcacatgtaatcgatttctgtctacgagctgaacactgtgtcacacaaaccattaggaacagtcatggattttactggttttgattgctcggggttgttatggacacctatcgctaacgaggcggctcatatcgtcttgtatatctagtatcccggtgatgttgtgattgatgatgaacgtacgccagtactccaactccagtcaacaaagctgcgctccccagtccaaagtccaagcgaaagcgagagtgagggtcggtatgacaagaccttggcggctcaacggcaagcaatcgaaaaggggcacccagacaccacacccaactccgtcagaagcaaccgagtctctgcacttcagtccaagcccagtgtagaaaggacaacaactggcagctcacttatacttcaccagccagatcatactcgttggtcagcaaaatcaagcacttcacagtcatcctcgaaaaatccatcttcgtcggcgttaggagcgcggtcgccacctcgccgtcggcgggtcgtcactacaatctgctcgtcgttctcaccgacttgcaagactcgctccatagccgagacgggcagggctcggtgatcatcgatgctgttgctgatatcctcatccactaccggtggcaagccgaggtctagcttgatggtgcttataggctgcccgaaagcccaagcctgggtaccgttcgacttcggttggcgttgttttccccttttgggcgcaacatccagtgtaaccgactccatgtgttgtatgacacttgacaacccagcgtcaccaccttctcgatacacgtgaaggccaactcgtctatcagtgtggaatggctggtaaggtgcgtttgactctatttcagcctgtggaattgcggcctccggactgtggtcggaatcgacggaacgtggtctgggatggagcaccaatgtgttgcttccatcatgaccttggttcgccaagtcaagttcatctacaggatcaatcatctgcttgactgattgggcgatcaaatcgtcaggcaagtctctcagcttgaagtcagtatgcttatttccacgagtccgtggcccttctttcctaaagctgggctggcgactcttgctgggaaacatcctgaccaagccgtcaccaacgacgaagagagtatgatgtttcctgccagtaatccacatagcgcacgaaatgcccgccgacatgtttctcaagggtaagctaacacgattctctccagtatggcgcaaatggttgatggcggtccccgcattgcccagtgaatgactaattcctgcggcaagaacctttccgccgtaactcgcatgatccatgatcgttgacgagccttgtgaagttgaatttgagttggcccgtcgttgacgagtaattagtggccttgttgccccgtatgcagagctgagcgcattcgatgcaatggaaacagctgatggtgggtgctcggatgctccaccagcaccttcggaattggcagtacgccggcgaggaggaggccagctgaaagcgctgggaggcatgtctaaaaggtgtacagtgcccctttcggtcaccatggcagctcgttctccattaggctgggcccaagcaacatcaactatgcgagcgacagtcatgcgcgaaaattgggcaatttggcgaactcgggtagcatgtccattatttggctgtgaattttgaagtggggatgatttggtgtgctggatgcgcatcaaatcccagacagtctggacgtctcctttactgcttgctgtgaacagcgataatcctgtaggagcgaaagacaggaagctacagccgagtggcgtcttgaaagtcgtgatagggtgaactgcaccggagttcgccaaactgtataggtcgactatagaaacaagtcccggctccttagtaacggcctgccccgagacaccgtacgttgggggaaattgtggagagtcagctcttgtaggataatttgaaccccatggtggcgagcctacagtcgcctgtctcggagcgggctgctggccagtcttccaataattgttccacagcgacattccctgtttcccaacccagcgggctccatgaatgaattcttgagtcgtttctctcatgatccggttcatgactccatcggagatcggctggtcaacttccgaactctcattaggtagtacgggtgaagtcagcgtcgctaatcctggcgctttaccttccacggggacgggtatgtatgcgttgagagcgatttgtgatgatgcagccggaggacagtatgcgagccatctcccgttgacagagactatgggcatttgtgggcgttttcgtggcggtttcggtgccgggcttccttcatcttctggtgtggcatcgcctttgagactctgttgcaagcttgtccagattttgccaacacaagtgaactgatagccaggatcctgctcatgagatatttgacgataaacccaacactcgcctgtggtgcccgaagacacaaccacattaccatctccggtacttatctgaaaagatccagtgggcggaggactcctgaatactgggcttgtaacggaggtcttgataggggtttgtggcgcttgaagcaggacatcaactagtcggttggttcccaatgagtatacctcaactgaggtttggtaagcctcaatgatgggaatcgccttgccctgaccaccttgccgttgatgattatcggactgcggagtgttcgtgccatccattcgaggactcgagggatggtcgaagcccgtttccacagcaatttcaggggcattcgaaggaataacaggaccgtggaccacgaccgctaccaaagggaacatgcccgatggatctgatccagcagcccaaggaagtatctttgcattaatgactcctcctcgcagtcctttcaggctagcaagtacatccacacctttcttacctacactatacacattgagcccgccttcgtagccagctaacacgacatggtcggtattagatgtaagtgcgcccttaggccgtggaagtgagtcaaagccaaagtagtatcctcgctcaccagctttcaagccagtcttggcatgcatgtcgaagtcaacgtccggagccccgtagaagtgagcttgagcttgatgtggtagaggtggaacacccgtaactcgaggagctgcaaacggtgagtgcatcgaactccttcggacaccaggaggcgaagatgcctgagaacgcaggtcgctcgcaggatagaactccttgtggaaactcaagggtcgtctatttggtggcgaagcagagtacgcgttgttattagcatagcgctgctgctgttgctggacaccccaggtatacgacaagcccctcgggtcttcgtacgatgatggttgtgtgggtggtgagtcgcccatgatactgatcaagttggagggagaaccagccagtggccccatcgctttagtccagtcattagcgctgtgagctgtgccagctgagatcgaagtcgctgagatagggtctaagtgtggtgacatagatggccggccgttcatgggaatcgatgcgggcatggctggcttgaggttcggcgactggaataaaggggagtctgaatcagggggcagaacatcgtttgccacgctgtcactgctgctgctactataagaggtcacacacttagtcttctacattcaaacacatgaagaattcactcaaacagacaacaccagctgcagtattcaccatcgtcttgtctctatacacgcataacactcaagagaaagaaagggggagcaggcaggcggacatacgtgaacttggttccatgcttggtcaccgcggccacaaccccaccaccatctttggcattcttgtccttcttctttgaacctggagactcgaccccagtaagcttcttgttcttctttttaccgcgtgccttggtggcggagagggaggagtctgacgtcggagacgcgtcgtgggaggacgaaccgggcatagaatggcgggaggctagagaagccgggtgcagtctcctgctcaccagcagcagagccctccttcgcgagaagagctcgactattgggttgccggtcctgctgagcaagatgggtcttaggcgatggggcaacgaggtttagcagagttgttcgtatggattcacggtctgttcagcaatcgagttgaggtagattggcactaaggggaatgaggatgacgaagacgagcggacgcgtcgaagggccgagaaagggtagcgggggacaaagaacggagtgtagtccgttcaggcagagaagaatactattatttacggattcgcaacgtgattatgtctttttagcagcgcagctatgcagatagatggtttatcaaatgagagtgattatgaagaagagaaaagagaagggcaatgaagcattcattcaccgacagtcaagtgtttggctatgcgag

SEQ ID NO: 17444 - DNA, 1233 bp, Muscodor strobelii
  misc_feature: SGI cDNA ID NO. 565826
  misc_feature: Elevated expression when VOC is produced
  misc_feature: Encodes the peptide sequence at SEQ ID NO 17445
atgaaatacatcctaatcccactcttcatcggcgcctccctcttcggtttcaacgcaaccgtgataaccctgaccaagaacggtctaggcgacgctctaacagccgtaacaaccggtgaaatcacagcactcaatggcgcaccacagcccttcttacgctcatactccggtatctcgccgatagactttctcctcggaaacatggtctcatatttctccgctctaatcgacggcgacgcctcatggaacgtaacgctcttctacatctggggcatggcgcaattcgccgcaggttggacactcctcgtgctcgaagccaagcgggccgcgaaccgaggacggatagtttcctggataggaacagtcggcctcttattccaaaatctaagttggacattcaccgtaccgctctacctcgcactgcatctcctcacatcccccgtcgcaaagctcaaaaacggggacggcgacggtgcgcgccgcgctctattcgtatacctctgggacctagccatgatccccatggccgtaacgctatccttcgtcgtgcccggaatcctcatgagtctcccaaccctgttacagcacagcgcctcaacacactacggctggctagccttctggcaaccattccccctctggaccatcctctcgctctccttcctgcacaatgcctgctactacgccctaggcagcctcagcccaacaaacgaggatggcgagcccacgacgccagggcacgggtacatggtagcagtgcaaggcgtataccaattcggactcgcgctctgcgcctcaacacacctccccatcatgctcctaaccctcgctcaaggaccaggaaacgatatgctgggctactatctacccggttacttcaagcagctcaagaacgtcacattcagcgagacgttcattccctacccctggtatgcttccccaaccgtcgatccaaataactacaagtccggcgatttagcacctctggccgttcacttcatccactacgatttctacgtcgggactattcccctgctcatctggtccatgtatctgcaccagaccaccgtcaagaaccccagcctgagcgccatgctcaagaaatcagctctctggttcgtgctaggaggacctgctgctattgcgctagcgctgagttgggatcgtgatgaggtcgtgcgggagggtgaagcgccgcttgagcaggcgcttgagggcaggaagactaagtag

SEQ ID NO: 17445 - protein, 410 aa, Muscodor strobelii
  misc_feature: SGI Peptide ID NO. 565826
  misc_feature (51)..(395): NCBI GI: 154315324 Blast Desc: BC1G_04701 [Botryotinia fuckeliana B05.10] gi|150847664|gb|EDN22857.1| BC1G_04701 [Botryotinia fuckeliana B05.10]
  misc_feature (51)..(395): NCBI GI: 156037796 Blast Desc: SS1G_12612 [Sclerotinia sclerotiorum 1980] gi|154698020|gb|EDN97758.1| SS1G_12612 [Sclerotinia sclerotiorum 1980]
  misc_feature (46)..(410): NCBI GI: 171691482 Blast Desc: protein product [Podospora anserina] gi|170945689|emb|CAP71802.1| protein product [Podospora anserina]
  misc_feature (21)..(393): NCBI GI: 164425187 Blast Desc: NCU10677 [Neurospora crassa OR74A] gi|157070824|gb|EDO65115.1| NCU10677 [Neurospora crassa OR74A]
  misc_feature (4)..(408): NCBI GI: 121713356 Blast Desc: conserved [Aspergillus clavatus NRRL 1] gi|119402442|gb|EAW12863.1| conserved [Aspergillus clavatus NRRL 1]
  misc_feature (3)..(393): NCBI GI: 46139575 Blast Desc: FG11302.1 [Gibberella zeae PH-1]
  misc_feature (13)..(409): NCBI GI: 119479361 Blast Desc: NFIA_077520 [Neosartorya fischeri NRRL 181] gi|119407863|gb|EAW17812.1| conserved [Neosartorya fischeri NRRL 181]
  misc_feature (31)..(408): NCBI GI: 159126608 Blast Desc: conserved [Aspergillus fumigatus A1163]
  misc_feature (31)..(408): NCBI GI: 70997854 Blast Desc: conserved [Aspergillus fumigatus Af293] gi|66851295|gb|EAL91621.1| conserved [Aspergillus fumigatus Af293]
  misc_feature (27)..(393): NCBI GI: 115437294 Blast Desc: conserved [Aspergillus terreus NIH2624] gi|114188589|gb|EAU30289.1| conserved [Aspergillus terreus NIH2624]
  misc_feature: Useful for introducing or modulating the production of volatile compounds
MKYILIPLFIGASLFGFNATVITLTKNGLGDALTAVTTGEITALNGAPQPFLRSYSGISPIDFLLGNMVSYFSALIDGDASWNVTLFYIWGMAQFAAGWTLLVLEAKRAANRGRIVSWIGTVGLLFQNLSWTFTVPLYLALHLLTSPVAKLKNGDGDGARRALFVYLWDLAMIPMAVTLSFVVPGILMSLPTLLQHSASTHYGWLAFWQPFPLWTILSLSFLHNACYYALGSLSPTNEDGEPTTPGHGYMVAVQGVYQFGLALCASTHLPIMLLTLAQGPGNDMLGYYLPGYFKQLKNVTFSETFIPYPWYASPTVDPNNYKSGDLAPLAVHFIHYDFYVGTIPLLIWSMYLHQTTVKNPSLSAMLKKSALWFVLGGPAAIALALSWDRDEVVREGEAPLEQALEGRKTK

SEQ ID NO: 17446 - DNA, 4637 bp, Muscodor strobelii
  misc_feature: SGI EST ID NO. CUFF.40991.0
  misc_feature: Variant of the nucleotide sequence at SEQ ID NO 17444
ttcaagttcagcttttgcgcagtctcaggccattcattgaaacgaattgaaacaggttgagggtatagagtcgtgaggcagatgtatagctcatttattatattaaggtatgctcaaaaacgctttttcttggtgacggagcctatctctgatagtcctgatagggcagctgagagggagtactgcgagcctcggcatgcagagcatgaagtcttggccaggtagagggaacgattccttatctgacccagtgtaggatccttgacgagccagccccgctgacggttatgtaaggaggattgggaactcatgggtcgatgaaatcaaattcgaacgtcgttgatttctcgccgtgaattgtacagcgcccaagctatcttatatattgcgcgaggaagaatatacatttggccaatagggaaatttggcttcaagatatcttcaacatggcgtcaacaatgaaatacatcctaatcccactcttcatcggcgcctccctcttcggtttcaacgcaaccgtgataaccctgaccaagaacggtctaggcgacgctctaacagccgtaacaaccggtgaaatcacagcactcaatggcgcaccacagcccttcttacgctcatactccggtatctcgccgatagactttctcctcggaaacatggtctcatatttctccgctctaatcgacggcgacgcctcatggaacgtaacgctcttctacatctggggcatggcgcaattcgccgcaggttggacactcctcgtgctcgaagccaagcgggccgcgaaccgaggacggatagtttcctggataggaacagtcggcctcttattccaaaatctaagttggacattcaccgtaccgctctacctcgcactgcatctcctcacatcccccgtcgcaaagctcaaaaacggggacggcgacggtgcgcgccgcgctctattcgtatacctctgggacctagccatgatccccatggccgtaacgctatccttcgtcgtgcccggaatcctcatgagtctcccaaccctgttacagcacagcgcctcaacacactacggctggctagccttctggcaaccattccccctctggaccatcctctcgctctccttcctgcacaatgcctgctactacgccctaggcagcctcagcccaacaaacgaggatggcgagcccacgacgccagggcacgggtacatggtagcagtgcaaggcgtataccaattcggactcgcgctctgcgcctcaacacacctccccatcatgctcctaaccctcgctcaaggaccaggaaacgatatgctgggctactatctacccggttacttcaagcagctcaagaacgtcacattcagcgagacgttcattccctacccctggtatgcttccccaaccgtcgatccaaataactacaagtccggcgatttagcacctctggccgttcacttcatccactacgatttctacgtcgggactattcccctgctcatctggtccatgtatctgcaccagaccaccgtcaagaaccccagcctgagcgccatgctcaagaaatcagctctctggttcgtgctaggaggacctgctgctattgcgctagcgctgagttgggatcgtgatgaggtcgtgcgggagggtgaagcgccgcttgagcaggcgcttgagggcaggaagactaagtagatgctatgttgaagtatagagagattatatgtaaatacatcctgcatcgcgtgaggatttgtagaatccggatatctaagtagcgaggagaagggcatgtaggaatgaagctatgaccgcttttatacccctcctttcgtgcgttattcctgacataaagttcctcgatagtagctttacacaggagacaaataaaaaaaaaggtcaagagtcggatagaaagacttgggtcaatttaggtattgcagcgctatcttaacacagccagaaccgatgatttcatcccagctaagagcacaagttcccccctttaatcaatgcaccagactaatagcatctttgctacttcctaggcccctgagcccgtcgactgcgctcttggtacatctttctctccagcggcgagctgagtgacgtagtcgaagctcgttcgctcttaacctctgtcttaattgttgtacagttcgattcacctttaataatcttgccatttggcgtactagataccgatcgctttacctaatcacgatcgttatacctggttcgcttccgaggcgggctcacagactgtgatgggtcccgttttgcgcgtgcgcgtggaggtgacccgctgcgatcacgaccgtagccgcggctacggctacgcgacggggtatatgagcgagaacgtgaccgcgaatagctacgacctcggctgactgatcggggcctgccattacctcgcgccggcgggctgttagacctcggtcgggaatgtctggaatagctagaatcacgcctggcgcgtggggtagaatcatgtctggcgtgtggggtggaatcacgtctagcgcgtgggggaggtgttcgggatttgtatcttgagtagccaccatcacgctgatcacgtctgacggggcttatggaccgcgaatttcggcgtggagggggacttcgtgaagagctgtaggatcgagcccgcgatcgcgaggggcttctgctgtacgaagatggcctgccacgtcggagcggacttcgtgagtataaagcctgtctttgacgtgggggaggacttcgagaataactgggagagcgggatctggagatgcttcggctgtatgatctgggtctaccatttcttggtggtgtcctagagagagaacggccacgatttatagctttgcgtggtggtgtccttgaccgagatcgcgatgaataagatgacccagtgtatgaagaataactcgatactgaatcactatcttcatctttgacagctggtgcgggaagagccggctttggcatattcgccaagaactctctcatctcttctgtcaacgcacccataccaatacttgtgaagtagttaatggaaaatcggatgtttcgagggttgtcacgagggaagaggccatcgaagctcggctgcatcgtctcgtccctcattcgggcttgaagcttgggcataccaagttcttccgatatttcctggaataaaatcttgatgaagatacggctcgctgaagttgtctcttcctcgtttaagtggatgatggatagtgcatgccagccaattgcatcagaaccgaacagatgaccaaagaatctggcaatattgcgcagctgatttgtatcgtgacggtggattgtttcgtactttgtttggaaggcctgttcgaacatatccgtccataatctgttcagcttggcgaaacgctctccgatgagaccgaagaacttagtataagtcttctcctgggcgcaacattcgacgaccatggaggacatttcctgttcttggcccacgggaagctggattttgagtaatttatgtacggcttcctctggatctgcagaggactgaatcgtgaggtatatcgtttttcttaagttgacgagatccgtatttgactgatccttgatttccatggccttttgctcttcctcctcctcttcctcgtctgagctctcatcttcttcatcgtcatcgtcgtcgctgccctcgcctaaaatctcggccttcaatgtcttgtaggcggcctcgctctcctcccattctgggtcaaatttgaatatgttaagtccgtcctgcacgtcaacgtttccatctagctcaactcgatgggtaatctgatcctcttcttcgatgagatccaattcctctcttatcgcaggatcgtccttgtatccatcttttctgacctgaaagagaacttcgatcatatactgtgttctcttgtcgatgtcggcctcgtgcaaaatatttctgaactgatcgaagactgcgcgcgcaatcgcggggttcatctcctccaggtgttggccgacagccttggtcagacccacagcgatttccacactgtcgtctgttggcttctgtaataatagaagcagaatctgcgcagctaccatctcgtgcacgacctgttgattgacgagatgtgcgatgaacgtagtagatgataaggccacgggtttgtcatttcgtctgaagccctttctgaactgcatgacaagtctctttactaatagctcgcctacttgcggtagtttggtgttgacgatagcagccatggccgccaagactggcgtgaacggtagactggcagcttgcgccttcatgatgctacggcagaacagtccccgtcccctaatcaaattctcattgaaaagctcaggtacgatgtgtttgatgttgccggtgttgactttgttgatgagaccgttgacactcttcttgagcgcctcccaagccatgcgctgatactccttggacgtcttatcggtgatctgggcctgcagagcgcgtagtcgcgccggagggatgtaggtaccaccggagcgcatgttgagcagcttttcatactcggccttggccgcagcctgcttctcttcctcggtaggcgccatcttggatgaatgctggtgaacctgggcaggttcgggtcctgcagctctcaccatgag

SEQ ID NO: 17447 - DNA, 3513 bp, Muscodor strobelii
  misc_feature: SGI cDNA ID NO. 565827
  misc_feature: Elevated expression when VOC is produced
  misc_feature: Encodes the peptide sequence at SEQ ID NO 17448
atgacagatccttcggattacacggttgggtggatctgtgctatacgtccagagcttgttgcagctcgatcgattcttgatgaaaggcatgccgacttggacgctgtccctatcaatgacaacagttcatacacattaggacgaattggaaaccataatgtcgtcatcgctgtattgcccgccggtgaatatgggcttgtcaatgcagggctggctgccaaggacatgatacgcagctttcctaatgtaagaattgggttaatggttggcattggcggcggagctccaagcttaaggcacgacattcgcctaggcgacattgtagtcagtgttcccagcagttcgagtagtggtctgtttcaatatgactttggaaagacagttcaggcccagaggtttctacatacccagcacctgaatcagcctcccacattcatattatcggcaatatcgacccttagatctacgcacgagcttcagggccatgatattgacaaaaccatacgcaacgttctcgagggcaacgcaaggctacagtcaaactatggccgtccagagccagacacagatcgtttatatgaatcggatacgatacacacaactccaggtcaagagtgtgaagactgctgcggtatgcatggactgaaggtcagggccccgcgatctaataccgaagacgatcccaaggtccattacggtaccattgcctctgccaaccaggtaatgaagaacgccgttattcgcgatacattatcagcagagaaggacgtgttatgtttcgagatggaagcggctgggctgatgaatcattttccctgtctcgtcgttcgcggcatatgcgactattctgatacacacaaacaaaaacggtggcaaggctacgcagcactagtggcagccgcatatgcaaaagaacttctttccatgatcgcaccgaatcaggtcgcagcctcgaaaaaaatcggcgagatattgtcagacgtccaagcacgcacggagaaaatgggggcagagatgaaagagttgaggaaagacgaccatctcgatcgtattaaagaatggctcatgcctcctgatccgtcaacaaatgttgctagagccctgagcagccgccatccaggttcaggggcctggttcctcagtcatcctgcctatctttgctggaaattagaggataaatccgtattatggctccatggcatcccgggttgtggaaaggttctaagctctacaatcattgaggacttgcagcaaggcggagccgcccaaaatttactatactttttcttcgactttagtgacattagaaagcaaagcttagacatggcacttaggtcgcttatttctcaattatatcagtccgagaccacgcgtggccctctagactctctctattcttcatacaatagaggatggcagcaaccaactactgactcgctccgcatcaccttccaggaaatgattctccgatccggcaagctctgggtcatcatagatgcactcgatgaatgcatcaagactggagagcttctctcgtggattcggagcattcaaagtcttgagaccaacctccacttactagtgacgagcagacccgaacaggaaatacagtccaacattcgcagttgggcccacgactcaaacattgtatcgattcagaattccgaagagctcgaggcagacataatcaaatatgtacgcgcaaaggttcgagaagatggattgctcagcaagcggtggcacatgcgcccagatatccaagatgaaattgaaaataagttgacaaccaaagggaatggaatgttccggtggatttcatgtcaacttgaagagctagagcagtgcataggaccacgagaagttcgaaaggtactcgcggacctgcccataacactggatgagacatatgccagaatcttagcaaagattgaagcgaaggtgaagccaagtgcaatgagaatcctgcagtttctcattgtctccgatcacccgatacccttgacacagcttgtagacgctattgctgttgatacgactaattccacattccatcctgacgacagaattcctattccagaagagatattaaggtactgttctagtttagttgtcatcattgaccaagaagatcctcggtcaccttccacacctcaaaaggctctacagctttcacatctttctgttaaagagtatcttctctcggaccgagtagatgtaatctacgaggacctgaaagaaagcaatgccagattatcacttgcagtcgtatgcctcatctatttattggcacttgagggcatattaagcgacgaacttcgtaacggtgttcaaaagcaatttcctttgtcgacctacgccgcgaaaagctgggtaactcatgcgaaagccgccaacatcaacactcaccaactcagaaccttgcagatggatttactttccagtaaccgcgcgtacaagatctgctatgagttatgggctatagacgactatatcccggagaactctttcagcacaacaccgcccgcattgtactatgcatcatttgcaggactttgtgacccggtgcaagcattgttggacaatggtgctgacgccaatgctataggcggaatttacggtaacgctcttcaagctgcgtcataccaaggtcatgaagacatcgttcacatcttgctaaacaaaggcagcaatgttaatgccaccggcggcgagtatggtagcgctttacaagcagcatcatattcagggcatgaaacagtcgttcggattttgctctggaaatgcgcagaagtgaacgaaataggtggagaatatggtaatgctttactcgccgcgtcatatagggggcataatgatattgtgcttgcgctgcttgacaacggggctgacgtcaacatcatgggtggaacttcgaatgagtttggtagtccactccaagctgcttcatatgcagggcatgggaatgtagtgaatacattactggatagaggggcagacattgacaggaacaatggaggaaaggggtctcctatacacgctgcttcaatcgcgggccacaaagagattgttcaaattttacttcagcgaggcgcaagaacgaatatgcggaatggtccactaacagactgtgcactcatcgctgccctctggtctgaacaagaagaggttgtgaaactactacttgaaaagggtgctgccatcgatcttcaagactcgcaatctggacaaaccgcactgatgcttgctttgcaactcgagaaaccatcggtggttgatctaatcattcgctacggagctgatccaggagtggctgacaatacgggtcgatcattcttccatcacgtcgccatcagcggtgacaaggaactgttcgaaagactactgaccatcacaaacaacaacttagacaaccccgatttttacggggcaacccctttgtcccttgctgttcagataaatttggacgacttgtctcctcatggtgctggactgaagctgcatcacgagctttga

SEQ ID NO: 17448 - protein, 1170 aa, Muscodor strobelii
  misc_feature: SGI Peptide ID NO. 565827
  misc_feature (1074)..(1106): Pfam Id: PF00023 Pfam Desc: Ankyrin repeat
  misc_feature (1006)..(1038): Pfam Id: PF00023 Pfam Desc: Ankyrin repeat
  misc_feature (1009)..(1038): Pfam Id: PF00023 Pfam Desc: Ankyrin repeat
  misc_feature (941)..(969): Pfam Id: PF00023 Pfam Desc: Ankyrin repeat
  misc_feature (4)..(1130): NCBI GI: 119473749 Blast Desc: Ankyrin repeat protein [Neosartorya fischeri NRRL 181] gi|119406903|gb|EAW16853.1| Ankyrin repeat protein [Neosartorya fischeri NRRL 181]
  misc_feature (1)..(1128): NCBI GI: 212532817 Blast Desc: multiple ankyrin repeats single kh domain protein, [Penicillium marneffei ATCC 18224] gi|210071929|gb|EEA26018.1| multiple ankyrin repeats single kh domain protein, [Penicillium
  misc_feature (7)..(1034): NCBI GI: 159122813 Blast Desc: Pfs, NACHT and Ankyrin domain protein [Aspergillus fumigatus A1163]
  misc_feature (1)..(1071): NCBI GI: 119467286 Blast Desc: Ankyrin repeat protein [Neosartorya fischeri NRRL 181] gi|119405601|gb|EAW15552.1| Ankyrin repeat protein [Neosartorya fischeri NRRL 181]
  misc_feature (1)..(1142): NCBI GI: 116203745 Blast Desc: CHGG_09756 [Chaetomium globosum CBS 148.51] gi|88175884|gb|EAQ83352.1| CHGG_09756 [Chaetomium globosum CBS 148.51]
  misc_feature (1)..(1126): NCBI GI: 116199953 Blast Desc: CHGG_08132 [Chaetomium globosum CBS 148.51] gi|88179411|gb|EAQ86879.1| CHGG_08132 [Chaetomium globosum CBS 148.51]
  misc_feature (4)..(999): NCBI GI: 159122770 Blast Desc: Pfs, NACHT and Ankyrin domain protein [Aspergillus fumigatus A1163]
  misc_feature (1)..(1094): NCBI GI: 169784486 Blast Desc: [Aspergillus oryzae RIB40] gi|83775451|dbj|BAE65571.1| protein product [Aspergillus oryzae]
  misc_feature (1)..(1094): NCBI GI: 238508362 Blast Desc: vps9-ankyrin repeat-containing protein, [Aspergillus flavus NRRL3357] gi|220688895|gb|EED45247.1| vps9-ankyrin repeat-containing protein, [Aspergillus flavus NRRL3357]
  misc_feature (1)..(1150): NCBI GI: 212528994 Blast Desc: Pfs, NACHT and Ankyrin domain protein [Penicillium marneffei ATCC 18224] gi|210074052|gb|EEA28139.1| Pfs, NACHT and Ankyrin domain protein [Penicillium marneffei ATCC 18224]
  misc_feature: Useful for introducing or modulating the production of volatile compounds
MTDPSDYTVGWICAIRPELVAARSILDERHADLDAVPINDNSSYTLGRIGNHNVVIAVLPAGEYGLVNAGLAAKDMIRSFPNVRIGLMVGIGGGAPSLRHDIRLGDIVVSVPSSSSSGLFQYDFGKTVQAQRFLHTQHLNQPPTFILSAISTLRSTHELQGHDIDKTIRNVLEGNARLQSNYGRPEPDTDRLYESDTIHTTPGQECEDCCGMHGLKVRAPRSNTEDDPKVHYGTIASANQVMKNAVIRDTLSAEKDVLCFEMEAAGLMNHFPCLVVRGICDYSDTHKQKRWQGYAALVAAAYAKELLSMIAPNQVAASKKIGEILSDVQARTEKMGAEMKELRKDDHLDRIKEWLMPPDPSTNVARALSSRHPGSGAWFLSHPAYLCWKLEDKSVLWLHGIPGCGKVLSSTIIEDLQQGGAAQNLLYFFFDFSDIRKQSLDMALRSLISQLYQSETTRGPLDSLYSSYNRGWQQPTTDSLRITFQEMILRSGKLWVIIDALDECIKTGELLSWIRSIQSLETNLHLLVTSRPEQEIQSNIRSWAHDSNIVSIQNSEELEADIIKYVRAKVREDGLLSKRWHMRPDIQDEIENKLTTKGNGMFRWISCQLEELEQCIGPREVRKVLADLPITLDETYARILAKIEAKVKPSAMRILQFLIVSDHPIPLTQLVDAIAVDTTNSTFHPDDRIPIPEEILRYCSSLVVIIDQEDPRSPSTPQKALQLSHLSVKEYLLSDRVDVIYEDLKESNARLSLAVVCLIYLLALEGILSDELRNGVQKQFPLSTYAAKSWVTHAKAANINTHQLRTLQMDLLSSNRAYKICYELWAIDDYIPENSFSTTPPALYYASFAGLCDPVQALLDNGADANAIGGIYGNALQAASYQGHEDIVHILLNKGSNVNATGGEYGSALQAASYSGHETVVRILLWKCAEVNEIGGEYGNALLAASYRGHNDIVLALLDNGADVNIMGGTSNEFGSPLQAASYAGHGNVVNTLLDRGADIDRNNGGKGSPIHAASIAGHKEIVQILLQRGARTNMRNGPLTDCALIAALWSEQEEVVKLLLEKGAAIDLQDSQSGQTALMLALQLEKPSVVDLIIRYGADPGVADNTGRSFFHHVAISGDKELFERLLTITNNNLDNPDFYGATPLSLAVQINLDDLSPHGAGLKLHHEL

SEQ ID NO: 17449 - DNA, 5419 bp, Muscodor strobelii
  misc_feature: SGI EST ID NO. CUFF.40966.0
  misc_feature: Variant of the nucleotide sequence at SEQ ID NO 17447
tacaaatttagcttgtcacaggacggcatctagccaatgaaacgaagaatgctacctccttctcgacagcctgcataaggcgaaatgatgggctattttgcaaggcagcctacctgagagcggctggaagaaggccctgacttcctcagacatctcagatgcatcttttctgccctctctcctcactttcaagatgggaattaaactttagtgaagagtcccatcatgacagatccttcggattacacggttgggtggatctgtgctatacgtccagagcttgttgcagctcgatcgattcttgatgaaaggcatgccgacttggacgctgtccctatcaatgacaacagttcatacacattaggacgaattggaaaccataatgtcgtcatcgctgtattgcccgccggtgaatatgggcttgtcaatgcagggctggctgccaaggacatgatacgcagctttcctaatgtaagaattgggttaatggttggcattggcggcggagctccaagcttaaggcacgacattcgcctaggcgacattgtagtcagtgttcccagcagttcgagtagtggtctgtttcaatatgactttggaaagacagttcaggcccagaggtttctacatacccagcacctgaatcagcctcccacattcatattatcggcaatatcgacccttagatctacgcacgagcttcagggccatgatattgacaaaaccatacgcaacgttctcgagggcaacgcaaggctacagtcaaactatggccgtccagagccagacacagatcgtttatatgaatcggatacgatacacacaactccaggtcaagagtgtgaagactgctgcggtatgcatggactgaaggtcagggccccgcgatctaataccgaagacgatcccaaggtccattacggtaccattgcctctgccaaccaggtaatgaagaacgccgttattcgcgatacattatcagcagagaaggacgtgttatgtttcgagatggaagcggctgggctgatgaatcattttccctgtctcgtcgttcgcggcatatgcgactattctgatacacacaaacaaaaacggtggcaaggctacgcagcactagtggcagccgcatatgcaaaagaacttctttccatgatcgcaccgaatcaggtcgcagcctcgaaaaaaatcggcgagatattgtcagacgtccaagcacgcacggagaaaatgggggcagagatgaaagagttgaggaaagacgaccatctcgatcgtattaaagaatggctcatgcctcctgatccgtcaacaaatgttgctagagccctgagcagccgccatccaggttcaggggcctggttcctcagtcatcctgcctatctttgctggaaattagaggataaatccgtattatggctccatggcatcccgggttgtggaaaggtatgtaattgtcaagtcccgaaattatgacgaacaagtttcgcgtatctaaaatagcctaataaaaggccacgaactcacatctttctagacagttctaagctctacaatcattgaggacttgcagcaaggcggagccgcccaaaatttactatactttttcttcgactttagtgacattagaaagcaaagcttagacatggcacttaggtcgcttatttctcaattatatcagtccgagaccacgcgtggccctctagactctctctattcttcatacaatagaggatggcagcaaccaactactgactcgctccgcatcaccttccaggaaatgattctccgatccggcaagctctgggtcatcatagatgcactcgatgaatgcatcaagactggagagcttctctcgtggattcggagcattcaaagtcttgagaccaacctccacttactagtgacgagcagacccgaacaggaaatacagtccaacattcgcagttgggcccacgactcaaacattgtatcgattcagaattccgaagagctcgaggcagacataatcaaatatgtacgcgcaaaggttcgagaagatggattgctcagcaagcggtggcacatgcgcccagatatccaagatgaaattgaaaataagttgacaaccaaagggaatggaatgttccggtggatttcatgtcaacttgaagagctagagcagtgcataggaccacgagaagttcgaaaggtactcgcggacctgcccataacactggatgagacatatgccagaatcttagcaaagattgaagcgaaggtgaagccaagtgcaatgagaatcctgcagtttctcattgtctccgatcacccgatacccttgacacagcttgtagacgctattgctgttgatacgactaattccacattccatcctgacgacagaattcctattccagaagagatattaaggtactgttctagtttagttgtcatcattgaccaagaagatcctcggtcaccttccacacctcaaaaggctctacagctttcacatctttctgttaaagagtatcttctctcggaccgagtagatgtaatctacgaggacctgaaagaaagcaatgccagattatcacttgcagtcgtatgcctcatctatttattggcacttgagggcatattaagcgacgaacttcgtaacggtgttcaaaagcaatttcctttgtcgacctacgccgcgaaaagctgggtaactcatgcgaaagccgccaacatcaacactcaccaactcagaaccttgcagatggatttactttccagtaaccgcgcgtacaagatctgctatgagttatgggctatagacgactatatcccggagaactctttcagcacaacaccgcccgcattgtactatgcatcatttgcaggactttgtgacccggtgcaagcattgttggacaatggtgctgacgccaatgctataggcggaatttacggtaacgctcttcaagctgcgtcataccaaggtcatgaagacatcgttcacatcttgctaaacaaaggcagcaatgttaatgccaccggcggcgagtatggtagcgctttacaagcagcatcatattcagggcatgaaacagtcgttcggattttgctctggaaatgcgcagaagtgaacgaaataggtggagaatatggtaatgctttactcgccgcgtcatatagggggcataatgatattgtgcttgcgctgcttgacaacggggctgacgtcaacatcatgggtggaacttcgaatgagtttggtagtccactccaagctgcttcatatgcagggcatgggaatgtagtgaatacattactggatagaggggcagacattgacaggaacaatggaggaaaggggtctcctatacacgctgcttcaatcgcgggccacaaagagattgttcaaattttacttcagcgaggcgcaagaacgaatatgcggaatggtccactaacagactgtgcactcatcgctgccctctggtctgaacaagaagaggttgtgaaactactacttgaaaagggtgctgccatcgatcttcaagactcgcaatctggacaaaccgcactgatgcttgctttgcaactcgagaaaccatcggtggttgatctaatcattcgctacggagctgatccaggagtggctgacaatacgggtcgatcattcttccatcacgtcgccatcagcggtgacaaggaactgttcgaaagactactgaccatcacaaacaacaacttagacaaccccgatttttacggggcaacccctttgtcccttgctgttcgtcaccaacaccttgatttgatggatgtcatcttagctcaacccaacatcgatataaactcaagagataaatttggacgacttgtctcctcatggtgctggactgaagctgcatcacgagctttgaggttgagtggagaccaaacaaagacacattttcaagactctagtaacctggataagctgaagctatatggccgtccatatagcaccgagacaaaactgcatcaaaggtgccaaatatgcacattaaatgtcacaaatttgtcgtttagctgcgatacgtgttatgatggacttttcaatgtttgtcatgcctgctgtcgactaggcgcgcgttgtttagatgacagtcatgctctcaggagaaggaagaaactgagaagtttatagctggtgaaaaagacgcttattttattgtcattgaccattccagagtctccgcaataggaccatggattaggtctgttcggtatcgcgtctgcacaatactcaatatgagattcgctgcagtctcccaggcctgaggatgaagaacgccgactactattttccaaagtatattgctcgtatagagctctccgactgtgcttaaaaatcgggtttgcaaatagctaattgcgccaatgattaagagtcgtctgttgcttagccgcctttgagattgcttaatgtcgctcgtcgcgcaagataagctgcaccggaatcagcccatatctcataccgcattaccttagccttcccatcgaaacgaagaatataaataaacgtctcatcccaggtctgcttcgtctctttccacgtgaatttcgcctttccgcggacgaccacctttcctccgccctctaccctgaatacgccgctaccctcgtttgtgtccttttccgaatccggatcaacgatacattcgacaaaccgcatgtcctcgtactcaagacacttgccgacagtctcgaaatactctcgagcacctgcaataccggtgaaatctcggccgagaaacggtgcaagttcgggaagtccgtgttcgtgaactatgatatcatcttcgttttggttttggttttcattgttgtttaagcgcctatgtggagtttgcgaagcgtcagaggagaaagatgagaaatgtgacagtatctcgtcgagcggcttcttctgtgcgaagctgtcacagaatgatgtcgcggcttgcaggagttccttacggcttgaggtaggcatcttgattcttgtgacctattataatggtcagcttgacaggatatctgaggctatacatgcgcaagtcctggagtcagacgaacgaccatttaaatttacctatataaggtcttgttgttgggtttgggttatgtaaattgaagtcacatccccgctgacgtcacaatgagtgatgattgggttacctgtaacaagcatcgctactttgctggggagtgaggcctgtctgttcactctttccttttctcgcatgcgatctcagcccgcttaaagaagtaggcaatctggcatctaatcattggctttatggtatataattttattgtatatgtatttcgtattccaacaactcaatcctctgggcgacgtttttcccccttctcttttcgcttcgtttcataggagaaaaatagagtataagacagaaac

SEQ ID NO: 17450 - DNA, 3534 bp, Muscodor strobelii
  misc_feature: SGI cDNA ID NO. 565828
  misc_feature: Elevated expression when VOC is produced
  misc_feature: Encodes the peptide sequence at SEQ ID NO 17451
atgacagatccttcggattacacggttgggtggatctgtgctatacgtccagagcttgttgcagctcgatcgattcttgatgaaaggcatgccgacttggacgctgtccctatcaatgacaacagttcatacacattaggacgaattggaaaccataatgtcgtcatcgctgtattgcccgccggtgaatatgggcttgtcaatgcagggctggctgccaaggacatgatacgcagctttcctaatgtaagaattgggttaatggttggcattggcggcggagctccaagcttaaggcacgacattcgcctaggcgacattgtagtcagtgttcccagcagttcgagtagtggtctgtttcaatatgactttggaaagacagttcaggcccagaggtttctacatacccagcacctgaatcagcctcccacattcatattatcggcaatatcgacccttagatctacgcacgagcttcagggccatgatattgacaaaaccatacgcaacgttctcgagggcaacgcaaggctacagtcaaactatggccgtccagagccagacacagatcgtttatatgaatcggatacgatacacacaactccaggtcaagagtgtgaagactgctgcggtatgcatggactgaaggtcagggccccgcgatctaataccgaagacgatcccaaggtccattacggtaccattgcctctgccaaccaggtaatgaagaacgccgttattcgcgatacattatcagcagagaaggacgtgttatgtttcgagatggaagcggctgggctgatgaatcattttccctgtctcgtcgttcgcggcatatgcgactattctgatacacacaaacaaaaacggtggcaaggctacgcagcactagtggcagccgcatatgcaaaagaacttctttccatgatcgcaccgaatcaggtcgcagcctcgaaaaaaatcggcgagatattgtcagacgtccaagcacgcacggagaaaatgggggcagagatgaaagagttgaggaaagacgaccatctcgatcgtattaaagaatggctcatgcctcctgatccgtcaacaaatgttgctagagccctgagcagccgccatccaggttcaggggcctggttcctcagtcatcctgcctatctttgctggaaattagaggataaatccgtattatggctccatggcatcccgggttgtggaaaggttctaagctctacaatcattgaggacttgcagcaaggcggagccgcccaaaatttactatactttttcttcgactttagtgacattagaaagcaaagcttagacatggcacttaggtcgcttatttctcaattatatcagtccgagaccacgcgtggccctctagactctctctattcttcatacaatagaggatggcagcaaccaactactgactcgctccgcatcaccttccaggaaatgattctccgatccggcaagctctgggtcatcatagatgcactcgatgaatgcatcaagactggagagcttctctcgtggattcggagcattcaaagtcttgagaccaacctccacttactagtgacgagcagacccgaacaggaaatacagtccaacattcgcagttgggcccacgactcaaacattgtatcgattcagaattccgaagagctcgaggcagacataatcaaatatgtacgcgcaaaggttcgagaagatggattgctcagcaagcggtggcacatgcgcccagatatccaagatgaaattgaaaataagttgacaaccaaagggaatggaatgtatgttactctatttgaattgttccggtggatttcatgtcaacttgaagagctagagcagtgcataggaccacgagaagttcgaaaggtactcgcggacctgcccataacactggatgagacatatgccagaatcttagcaaagattgaagcgaaggtgaagccaagtgcaatgagaatcctgcagtttctcattgtctccgatcacccgatacccttgacacagcttgtagacgctattgctgttgatacgactaattccacattccatcctgacgacagaattcctattccagaagagatattaaggtactgttctagtttagttgtcatcattgaccaagaagatcctcggtcaccttccacacctcaaaaggctctacagctttcacatctttctgttaaagagtatcttctctcggaccgagtagatgtaatctacgaggacctgaaagaaagcaatgccagattatcacttgcagtcgtatgcctcatctatttattggcacttgagggcatattaagcgacgaacttcgtaacggtgttcaaaagcaatttcctttgtcgacctacgccgcgaaaagctgggtaactcatgcgaaagccgccaacatcaacactcaccaactcagaaccttgcagatggatttactttccagtaaccgcgcgtacaagatctgctatgagttatgggctatagacgactatatcccggagaactctttcagcacaacaccgcccgcattgtactatgcatcatttgcaggactttgtgacccggtgcaagcattgttggacaatggtgctgacgccaatgctataggcggaatttacggtaacgctcttcaagctgcgtcataccaaggtcatgaagacatcgttcacatcttgctaaacaaaggcagcaatgttaatgccaccggcggcgagtatggtagcgctttacaagcagcatcatattcagggcatgaaacagtcgttcggattttgctctggaaatgcgcagaagtgaacgaaataggtggagaatatggtaatgctttactcgccgcgtcatatagggggcataatgatattgtgcttgcgctgcttgacaacggggctgacgtcaacatcatgggtggaacttcgaatgagtttggtagtccactccaagctgcttcatatgcagggcatgggaatgtagtgaatacattactggatagaggggcagacattgacaggaacaatggaggaaaggggtctcctatacacgctgcttcaatcgcgggccacaaagagattgttcaaattttacttcagcgaggcgcaagaacgaatatgcggaatggtccactaacagactgtgcactcatcgctgccctctggtctgaacaagaagaggttgtgaaactactacttgaaaagggtgctgccatcgatcttcaagactcgcaatctggacaaaccgcactgatgcttgctttgcaactcgagaaaccatcggtggttgatctaatcattcgctacggagctgatccaggagtggctgacaatacgggtcgatcattcttccatcacgtcgccatcagcggtgacaaggaactgttcgaaagactactgaccatcacaaacaacaacttagacaaccccgatttttacggggcaacccctttgtcccttgctgttcagataaatttggacgacttgtctcctcatggtgctggactgaagctgcatcacgagctttga

SEQ ID NO: 17451 - protein, 1177 aa, Muscodor strobelii
  misc_feature: SGI Peptide ID NO. 565828
  misc_feature (1081)..(1113): Pfam Id: PF00023 Pfam Desc: Ankyrin repeat
  misc_feature (1013)..(1045): Pfam Id: PF00023 Pfam Desc: Ankyrin repeat
  misc_feature (1016)..(1045): Pfam Id: PF00023 Pfam Desc: Ankyrin repeat
  misc_feature (948)..(976): Pfam Id: PF00023 Pfam Desc: Ankyrin repeat
  misc_feature (4)..(1137): NCBI GI: 119473749 Blast Desc: Ankyrin repeat protein [Neosartorya fischeri NRRL 181] gi|119406903|gb|EAW16853.1| Ankyrin repeat protein [Neosartorya fischeri NRRL 181]
  misc_feature (1)..(1135): NCBI GI: 212532817 Blast Desc: multiple ankyrin repeats single kh domain protein, [Penicillium marneffei ATCC 18224] gi|210071929|gb|EEA26018.1| multiple ankyrin repeats single kh domain protein, [Penicillium
  misc_feature (7)..(1041): NCBI GI: 159122813 Blast Desc: Pfs, NACHT and Ankyrin domain protein [Aspergillus fumigatus A1163]
  misc_feature (1)..(1078): NCBI GI: 119467286 Blast Desc: Ankyrin repeat protein [Neosartorya fischeri NRRL 181] gi|119405601|gb|EAW15552.1| Ankyrin repeat protein [Neosartorya fischeri NRRL 181]
  misc_feature (1)..(1149): NCBI GI: 116203745 Blast Desc: CHGG_09756 [Chaetomium globosum CBS 148.51] gi|88175884|gb|EAQ83352.1| CHGG_09756 [Chaetomium globosum CBS 148.51]
  misc_feature (1)..(1133): NCBI GI: 116199953 Blast Desc: CHGG_08132 [Chaetomium globosum CBS 148.51] gi|88179411|gb|EAQ86879.1| CHGG_08132 [Chaetomium globosum CBS 148.51]
  misc_feature (4)..(1006): NCBI GI: 159122770 Blast Desc: Pfs, NACHT and Ankyrin domain protein [Aspergillus fumigatus A1163]
  misc_feature (1)..(1101): NCBI GI: 169784486 Blast Desc: [Aspergillus oryzae RIB40] gi|83775451|dbj|BAE65571.1| protein product [Aspergillus oryzae]
  misc_feature (1)..(1101): NCBI GI: 238508362 Blast Desc: vps9-ankyrin repeat-containing protein, [Aspergillus flavus NRRL3357] gi|220688895|gb|EED45247.1| vps9-ankyrin repeat-containing protein, [Aspergillus flavus NRRL3357]
  misc_feature (1)..(1157): NCBI GI: 212528994 Blast Desc: Pfs, NACHT and Ankyrin domain protein [Penicillium marneffei ATCC 18224] gi|210074052|gb|EEA28139.1| Pfs, NACHT and Ankyrin domain protein [Penicillium marneffei ATCC 18224]
  misc_feature: Useful for introducing or modulating the production of volatile compounds
MTDPSDYTVGWICAIRPELVAARSILDERHADLDAVPINDNSSYTLGRIGNHNVVIAVLPAGEYGLVNAGLAAKDMIRSFPNVRIGLMVGIGGGAPSLRHDIRLGDIVVSVPSSSSSGLFQYDFGKTVQAQRFLHTQHLNQPPTFILSAISTLRSTHELQGHDIDKTIRNVLEGNARLQSNYGRPEPDTDRLYESDTIHTTPGQECEDCCGMHGLKVRAPRSNTEDDPKVHYGTIASANQVMKNAVIRDTLSAEKDVLCFEMEAAGLMNHFPCLVVRGICDYSDTHKQKRWQGYAALVAAAYAKELLSMIAPNQVAASKKIGEILSDVQARTEKMGAEMKELRKDDHLDRIKEWLMPPDPSTNVARALSSRHPGSGAWFLSHPAYLCWKLEDKSVLWLHGIPGCGKVLSSTIIEDLQQGGAAQNLLYFFFDFSDIRKQSLDMALRSLISQLYQSETTRGPLDSLYSSYNRGWQQPTTDSLRITFQEMILRSGKLWVIIDALDECIKTGELLSWIRSIQSLETNLHLLVTSRPEQEIQSNIRSWAHDSNIVSIQNSEELEADIIKYVRAKVREDGLLSKRWHMRPDIQDEIENKLTTKGNGMYVTLFELFRWISCQLEELEQCIGPREVRKVLADLPITLDETYARILAKIEAKVKPSAMRILQFLIVSDHPIPLTQLVDAIAVDTTNSTFHPDDRIPIPEEILRYCSSLVVIIDQEDPRSPSTPQKALQLSHLSVKEYLLSDRVDVIYEDLKESNARLSLAVVCLIYLLALEGILSDELRNGVQKQFPLSTYAAKSWVTHAKAANINTHQLRTLQMDLLSSNRAYKICYELWAIDDYIPENSFSTTPPALYYASFAGLCDPVQALLDNGADANAIGGIYGNALQAASYQGHEDIVHILLNKGSNVNATGGEYGSALQAASYSGHETVVRILLWKCAEVNEIGGEYGNALLAASYRGHNDIVLALLDNGADVNIMGGTSNEFGSPLQAASYAGHGNVVNTLLDRGADIDRNNGGKGSPIHAASIAGHKEIVQILLQRGARTNMRNGPLTDCALIAALWSEQEEVVKLLLEKGAAIDLQDSQSGQTALMLALQLEKPSVVDLIIRYGADPGVADNTGRSFFHHVAISGDKELFERLLTITNNNLDNPDFYGATPLSLAVQINLDDLSPHGAGLKLHHEL

SEQ ID NO: 17452 - DNA, 5419 bp, Muscodor strobelii; identical to SEQ ID NO: 17449
  misc_feature: SGI EST ID NO. CUFF.40966.0
  misc_feature: Variant of the nucleotide sequence at SEQ ID NO 17450

SEQ ID NO: 17453 - DNA, 573 bp, Muscodor strobelii
  misc_feature: SGI cDNA ID NO. 565829
  misc_feature: Encodes the peptide sequence at SEQ ID NO 17454
atgcctacctcaagccgtaaggaactcctgcaagccgcgacatcattctgtgacagcttcgcacagaagaagccgctcgacgagatactgtcacatttctcatctttctcctctgacgcttcgcaaactccacataggcgcttaaacaacaatgaaaaccaaaaccaaaacgaagatgatatcatagttcacgaacacggacttcccgaacttgcaccgtttctcggccgagatttcaccggtattgcaggtgctcgagagtatttcgagactgtcggcaagtgtcttgagtacgaggacatgcggtttgtcgaatgtatcgttgatccggattcggaaaaggacacaaacgagggtagcggcgtattcagggtagagggcggaggaaaggtggtcgtccgcggaaaggcgaaattcacgtggaaagagacgaagcagacctgggatgagacgtttatttatattcttcgtttcgatgggaaggctaaggtaatgcggtatgagatatgggctgattccggtgcagcttatcttgcgcgacgagcgacattaagcaatctcaaaggcggctaa

SEQ ID NO: 17454 - protein, 190 aa, Muscodor strobelii
  misc_feature: SGI Peptide ID NO. 565829
  misc_feature (3)..(184): NCBI GI: 171686306 Blast Desc: protein product [Podospora anserina] gi|170943114|emb|CAP68767.1| protein product [Podospora anserina]
  misc_feature (1)..(185): NCBI GI: 85091688 Blast Desc: NCU08996 [Neurospora crassa OR74A] gi|28920420|gb|EAA29788.1| [Neurospora crassa OR74A]
  misc_feature (5)..(184): NCBI GI: 170111523 Blast Desc: [Laccaria bicolor S238N-H82] gi|164638008|gb|EDR02288.1| [Laccaria bicolor S238N-H82]
  misc_feature (3)..(188): NCBI GI: 119492712 Blast Desc: NFIA_069490 [Neosartorya fischeri NRRL 181] gi|119411835|gb|EAW21778.1| conserved [Neosartorya fischeri NRRL 181]
  misc_feature (3)..(188): NCBI GI: 71000301 Blast Desc: conserved [Aspergillus fumigatus Af293] gi|66852482|gb|EAL92807.1| conserved [Aspergillus fumigatus Af293] gi|159127857|gb|EDP52972.1| conserved [Aspergillus A1163]
  misc_feature (3)..(188): NCBI GI: 121705044 Blast Desc: conserved [Aspergillus clavatus NRRL 1] gi|119398931|gb|EAW09359.1| conserved [Aspergillus clavatus NRRL 1]
  misc_feature (4)..(184): NCBI GI: 169780528 Blast Desc: [Aspergillus oryzae RIB40] gi|238505304|ref|XP_002383881.1| conserved [Aspergillus flavus NRRL3357] gi|83773468|dbj|BAE63595.1| protein product oryzae]
  misc_feature (20)..(185): NCBI GI: 242222540 Blast Desc: [Postia placenta Mad-698-R] gi|220723694|gb|EED77814.1| [Postia placenta Mad-698-R]
  misc_feature (1)..(188): NCBI GI: 212536340 Blast Desc: conserved [Penicillium marneffei ATCC 18224] gi|210070725|gb|EEA24815.1| conserved [Penicillium marneffei ATCC 18224]
  misc_feature (1)..(188): NCBI GI: 242795420 Blast Desc: conserved [Talaromyces stipitatus ATCC 10500] gi|218719173|gb|EED18593.1| conserved [Talaromyces stipitatus ATCC 10500]
MPTSSRKELLQAATSFCDSFAQKKPLDEILSHFSSFSSDASQTPHRRLNNNENQNQNEDDIIVHEHGLPELAPFLGRDFTGIAGAREYFETVGKCLEYEDMRFVECIVDPDSEKDTNEGSGVFRVEGGGKVVVRGKAKFTWKETKQTWDETFIYILRFDGKAKVMRYEIWADSGAAYLARRATLSNLKGG

SEQ ID NO: 17455 - DNA, 1884 bp, Muscodor strobelii
  misc_feature: SGI cDNA ID NO. 565830
  misc_feature: Reduced expression when VOC is produced
  misc_feature: Encodes the peptide sequence at SEQ ID NO 17456
atggcgtcggaaatatctacctcggcgccggcggccaagcccaagcccaagctgcacgggcgcgctttctacgagagcatcgggagccccaacttcgttgttgctcccatggtcaaccagtccgagttcgcatggcgcatgctcacgcgatcgttcatgactcccgatgagaacgcgaaactactcgcatactcccccatgtaccacgcacgtctgttccaagagacagccaaatacaggggcgcacatttccaggcgaccaagaaccccatagaccccccacctgccgacctatcagccccagccgctaaaggagacttatttctcgacggcaatccgcagtttgaccgtcctctcttcgtccagttctgcgcaaacgaccccgctcaactcctgcgtgccgctcagatcgctgccccgtactgcgatgccatcgacttgaacctcggctgtccccagggcatcgcgcgcaacgggcactacggcgcgttcttgcaggaagaccagaagcttatattcgacctcatcaatactctgcacaagaatctctcgatacccgtcaccgccaagatacgcatcctcgatactaaagaggatactctggcatacgcgaagaatgtcttggctgctggtgccagtatcctcaccgtccacggccggaggagagaacaaaagggtcatttgacgggtgttgcggattgggagtatctacggtacttgcgcgagaatctgccaaaggaaaccgtcattttcgccaatggtaatattcttcagaccggcgacttggagaaatgtctcgaggccacgggtgcggatgcggtcatgagtgccgagggaaacctgagtgatcccgcgatattcgccactgcgcctcccgtcggagaagaaggccgcgagtattggcgaggacgggaccttaaaggtggctggagagtggatgccgtattccggcggtacttggatatattgcatcaatatgtcttacaacaggaacccccgagtcgtcgaccgctatttgttattggagatgacgaggcttggttatcagagactcaagctaaggaagaagatgacggcccggcgaagaaaaagaggaaaaggaaggaggcaaacatgaaccctcaccgaatctcgtcgctggatgtattggcgagaacacatgctggcgatgtgcagggcattgagaaagtgttagatttggtggaaagacgcatcgcgaagggtttgattgattacgagaagacggccggaaagagtatcgaggaggaagaatcaataccgacgaaagtcaataatctgcctaaaccacaggcccagagcgagaacaagaccgaagaactggatctggaagatgaccctgagagctctgtggctacggtcaaggcgtgtaagaggccgtggtggattgcgcagcccattattagaccgctgcctaaagaggcgctggctaaaggggctattaggttgacgaaaaaagagaggttgaaacaggaacaggaacaagagggaaaagaaaaggagaatgtgagcgggaagaagaggaaggctgaggatgagctaccgaggccggatgggagagatgggatcaaggagccggagatggatactaaggcccctggacttacgagtgatgagttgtcggttggctatttggttggcatcatgtcgtcctccaacagcaacaacaaagctgggcccagcactaacaaatccaacaaacaaccctctaaccctccagagcaggatgcctccaagaaaacccattgcgggggacctctagcctggcttcacgaggccgcgaactacgaggctcctgccccgaagaaggagttgcctaaggagcgtcctgcggactggatgggtgaggctgggaagagggtctag

SEQ ID NO: 17456 - protein, 627 aa, Muscodor strobelii
  misc_feature: SGI Peptide ID NO. 565830
  misc_feature (33)..(383): Pfam Id: PF01207 Pfam Desc: Dihydrouridine synthase (Dus)
  misc_feature (116)..(288): Pfam Id: PF01207 Pfam Desc: Dihydrouridine synthase (Dus)
  misc_feature (15)..(547): NCBI GI: 39953378 Blast Desc: MGG_08825 [Magnaporthe grisea 70-15] gi|145021243|gb|EDK05372.1| MGG_08825 [Magnaporthe grisea 70-15]
  misc_feature (8)..(493): NCBI GI: 46125679 Blast Desc: FG07217.1 [Gibberella zeae PH-1]
  misc_feature (9)..(490): NCBI GI: 256732802 Blast Desc: [Nectria haematococca mpVI 77-13-4]
  misc_feature (1)..(513): NCBI GI: 156037856 Blast Desc: SS1G_12642 [Sclerotinia sclerotiorum 1980] gi|154698050|gb|EDN97788.1| SS1G_12642 [Sclerotinia sclerotiorum 1980]
  misc_feature (17)..(507): NCBI GI: 189208310 Blast Desc: tRNA-dihydrouridine synthase C [Pyrenophora tritici-repentis Pt-1C-BFP] gi|187976581|gb|EDU43207.1| tRNA-dihydrouridine synthase C [Pyrenophora tritici-repentis
  misc_feature (1)..(508): NCBI GI: 255956875 Blast Desc: Pc21g22200 [Penicillium chrysogenum Wisconsin 54-1255] gi|211590901|emb|CAP97117.1| Pc21g22200 [Penicillium chrysogenum Wisconsin 54-1255]
  misc_feature (17)..(503): NCBI GI: 121700723 Blast Desc: dihydrouridine synthase family protein, [Aspergillus clavatus NRRL 1] gi|119396769|gb|EAW07200.1| dihydrouridine synthase family protein, [Aspergillus clavatus NRRL 1]
  misc_feature (11)..(500): NCBI GI: 119494427 Blast Desc: dihydrouridine synthase family protein, [Neosartorya fischeri NRRL 181] gi|119412271|gb|EAW22212.1| dihydrouridine synthase family protein, [Neosartorya fischeri NRRL 181]
  misc_feature (5)..(512): NCBI GI: 242774281 Blast Desc: dihydrouridine synthase family protein, [Talaromyces stipitatus ATCC 10500] gi|218722030|gb|EED21448.1| dihydrouridine synthase family protein, [Talaromyces stipitatus ATCC 10500]
  misc_feature (14)..(513): NCBI GI: 169767132 Blast Desc: [Aspergillus oryzae RIB40] gi|83765892|dbj|BAE56035.1| protein product [Aspergillus oryzae]
  misc_feature: Useful for introducing or modulating the production of volatile compounds
MASEISTSAPAAKPKPKLHGRAFYESIGSPNFVVAPMVNQSEFAWRMLTRSFMTPDENAKLLAYSPMYHARLFQETAKYRGAHFQATKNPIDPPPADLSAPAAKGDLFLDGNPQFDRPLFVQFCANDPAQLLRAAQIAAPYCDAIDLNLGCPQGIARNGHYGAFLQEDQKLIFDLINTLHKNLSIPVTAKIRILDTKEDTLAYAKNVLAAGASILTVHGRRREQKGHLTGVADWEYLRYLRENLPKETVIFANGNILQTGDLEKCLEATGADAVMSAEGNLSDPAIFATAPPVGEEGREYWRGRDLKGGWRVDAVFRRYLDILHQYVLQQEPPSRRPLFVIGDDEAWLSETQAKEEDDGPAKKKRKRKEANMNPHRISSLDVLARTHAGDVQGIEKVLDLVERRIAKGLIDYEKTAGKSIEEEESIPTKVNNLPKPQAQSENKTEELDLEDDPESSVATVKACKRPWWIAQPIIRPLPKEALAKGAIRLTKKERLKQEQEQEGKEKENVSGKKRKAEDELPRPDGRDGIKEPEMDTKAPGLTSDELSVGYLVGIMSSSNSNNKAGPSTNKSNKQPSNPPEQDASKKTHCGGPLAWLHEAANYEAPAPKKELPKERPADWMGEAGKRV

SEQ ID NO: 17457 - DNA, 2132 bp, Muscodor strobelii
  misc_feature: SGI EST ID NO. CUFF.41025.0
  misc_feature: Variant of the nucleotide sequence at SEQ ID NO 17455
aaaaagttgagatgattcagcgacaggcgcaacttctgcacgaaaccccgccaagacagcaatcacccgcactcgcttgaacaacgccgcccattctgcccagcaccctctggacaagacggaagggagccgaggactgcggcgaacacggtggcgagtcattgcatccgagcggcagcggcaggcctctcgcggaagatacaggtcagccgcaccgccgccatggcgtcggaaatatctacctcggcgccggcggccaagcccaagcccaagctgcacgggcgcgctttctacgagagcatcgggagccccaacttcgttgttgctcccatggtcaaccagtccgagttcgcatggcgcatgctcacgcgatcgttcatgactcccgatgagaacgcgaaactactcgcatactcccccatgtaccacgcacgtctgttccaagagacagccaaatacaggggcgcacatttccaggcgaccaagaaccccatagaccccccacctgccgacctatcagccccagccgctaaaggagacttatttctcgacggcaatccgcagtttgaccgtcctctcttcgtccagttctgcgcaaacgaccccgctcaactcctgcgtgccgctcagatcgctgccccgtactgcgatgccatcgacttgaacctcggctgtccccagggcatcgcgcgcaacgggcactacggcgcgttcttgcaggaagaccagaagcttatattcgacctcatcaatactctgcacaagaatctctcgatacccgtcaccgccaagatacgcatcctcgatactaaagaggatactctggcatacgcgaagaatgtcttggctgctggtgccagtatcctcaccgtccacggccggaggagagaacaaaagggtcatttgacgggtgttgcggattgggagtatctacggtacttgcgcgagaatctgccaaaggaaaccgtcattttcgccaatggtaatattcttcagaccggcgacttggagaaatgtctcgaggccacgggtgcggatgcggtcatgagtgccgagggaaacctgagtgatcccgcgatattcgccactgcgcctcccgtcggagaagaaggccgcgagtattggcgaggacgggaccttaaaggtggctggagagtggatgccgtattccggcggtacttggatatattgcatcaatatgtcttacaacaggaacccccgagtcgtcgaccgctatttgttattggagatgacgaggcttggttatcagagactcaagctaaggaagaagatgacggcccggcgaagaaaaagaggaaaaggaaggaggcaaacatgaaccctcaccgaatctcgtcgctgtgcgccctcatttgttccatctcctaaggcattttgtggccagacacacggatattagggatgtattggcgagaacacatgctggcgatgtgcagggcattgagaaagtgttagatttggtggaaagacgcatcgcgaagggtttgattgattacgagaagacggccggaaagagtatcgaggaggaagaatcaataccgacgaaagtcaataatctgcctaaaccacaggcccagagcgagaacaagaccgaagaactggatctggaagatgaccctgagagctctgtggctacggtcaaggcgtgtaagaggccgtggtggattgcgcagcccattattagaccgctgcctaaagaggcgctggctaaaggggctattaggttgacgaaaaaagagaggttgaaacaggaacaggaacaagagggaaaagaaaaggagaatgtgagcgggaagaagaggaaggctgaggatgagctaccgaggccggatgggagagatgggatcaaggagccggagatggatactaaggcccctggacttacgagtgatgagttggtctgtggatgaagagggaaagtaaggtgagaattatgatagatggtcttgcccttagtagcattgcatctgtggtagcgaaagatgtggtatagacacagtcagcaaatacataatggcaatggcctggaagtcgcaggtcacgtcccacagcatcagcgagaactcagaacttcgatatgaatctgaggacacaacctgattgtctatgtg

SEQ ID NO: 17458 - DNA, 2334 bp, Muscodor strobelii
  misc_feature: SGI cDNA ID NO. 565831
  misc_feature: Encodes the peptide sequence at SEQ ID NO 17459
atggctgctatgacacagacgtatccccagcaaaccggaaccgtaacactattgcagacgagaacaggtacaatgtcaggctcttcacaggccatctcgggccaagcatacggcaatccatcgagaagtgcctacaacggcctatccggcgggaatcaggtgggctaccgaacagccgggtctgccccgatccagccatacgcctttacatcgacacccagccttgctagtggaagtcagcctctgcaacatggtggctaccgcacatcttctggcaccaccgtaccgaccctacaacagatgcaagcacctgtgcccgtgattcgtccccagctcaatggcacttcaaaccagcctacgtttgcacaggtggctgctgctaaagcgtctcccgagcgatacagacgaccagccccaaggcagacagattcatcgcctgccactgttccaagccaacccgtgcaggcatcagctatgccggtcggctccggcaccgcgacggtagtccatctctataacccgcgggcccttccgcaaacccagcccgctctgaatagacctcacagcgcgtacggggcaatggatgatatggctttacatcgtcacacatcagatgaagaagctaagaggtttcgacgccgcagcatccactcgatcaattcatccgattacttcaacccactgagttcacaggccggtaaacagaccttcgaatcatcacgggcagacgctggatcaaagcagaaatatactcctgtggatgctccgaaaccgactgcgagaattgttcccgcgccaagccaggcgaaaaagacggagaaaagtgcagtacatacaagaaatggcagcgctgagagtaacgggtccagtcgcagcagcaattcgcgaccttcatcggcgaatcgtaacgccaacggctctccacttacagggagccccgcctcaacctcctctctgtctggggacaagacggcgaccaacgataaactcaagatagtgaacataccgcctcgtggctcgtctactgatgtcggcaagcgagcacatagtccttctcccttgtccaacccggtaactatggctgccgggccatcatcgcgcgatggggtcagcgccaccacgtccaccacgccgcctacttcttctcatggccctaaggttgagagcccggcagcaaggcagcttgccgcaataaatgaaaagggaggcagatctaagagcaagacctcccgattgcggcgggcattctcattcggaagtgctgcggagctgagaaaagccgccggccaggacatcggcgctgatgatagtaccaatccccccaaagatggccctgcacggttacacaaggagcaacggactgaagatgcttacgaggaggaacaagcacgcattgctcagaagcaggaggaaggtggtattggcagcagtatatattctggcacgaaactgttcgcaggctccacggacaatttgtcgatttcgtctactgcatcatcggcctcgattatgctccgtaagatgggtcgtggcatgaaaaagggcagtcgatcactcgtcggtctctttcgacccaagtctattattggctccccgaccgaggaactggcggcgccggaagtctctcaggctgctgtgtcgatggtcactgtggaagctgagcgtgaccgcgtcaacgtgacaacgaacgctgagcttccccaatccaccggcacaggtttccctcacctggaacgcaactcgcttgatgcaacccaaatctcagatgccgtctcctctgaacgtctggatagcactagcacggagaattcggccatgaggaagagcatagtcggcggtgaaaaggagcgagctgaggtgctggccaccatccgcaagggtatcctcaagactcgtagtaactcgcctactccgactactcccgcggtggacactaaagttcccgccttcgatcttccttcgatccctaatgtctcggactcacccaattcaagcgcacctagcacgcccaatgacgaagttcagggacacaagcgaaatggatctgtcgcccttggcaatgaagactactttatgtcagccctgcgtttgcgccaggacaccaagagtgcccccgccacgccccaggccagccacaagcgtaatgccaccttcagccctcgaatcgtcttccacgatacctggccacgtggcgagtacgaccggcggggagagatcgctacatgcaaccttctcacaccaatgcttgctcagcaaatcaaggaggagctgaacagctttaaaatggagatggaggttcacgagacatctaagatatacacacactttttctga

SEQ ID NO: 17459 - protein, 777 aa, Muscodor strobelii
  misc_feature: SGI Peptide ID NO. 565831
  misc_feature (1)..(777): NCBI GI: 171686730 Blast Desc: protein product [Podospora anserina] gi|170943326|emb|CAP68979.1| protein product [Podospora anserina]
  misc_feature (1)..(777): NCBI GI: 256732801 Blast Desc: [Nectria haematococca mpVI 77-13-4]
  misc_feature (1)..(777): NCBI GI: 46125681 Blast Desc: FG07218.1 [Gibberella zeae PH-1]
  misc_feature (1)..(767): NCBI GI: 116192119 Blast Desc: CHGG_05777 [Chaetomium globosum CBS 148.51] gi|88181690|gb|EAQ89158.1| CHGG_05777 [Chaetomium globosum CBS 148.51]
  misc_feature (127)..(777): NCBI GI: 156037858 Blast Desc: SS1G_12643 [Sclerotinia sclerotiorum 1980] gi|154698051|gb|EDN97789.1| SS1G_12643 [Sclerotinia sclerotiorum 1980]
  misc_feature (1)..(777): NCBI GI: 85079580 Blast Desc: NCU00064 [Neurospora crassa OR74A] gi|28917436|gb|EAA27138.1| conserved [Neurospora crassa OR74A]
  misc_feature (127)..(772): NCBI GI: 154315260 Blast Desc: BC1G_04669 [Botryotinia fuckeliana B05.10] gi|150847632|gb|EDN22825.1| BC1G_04669 [Botryotinia fuckeliana B05.10]
  misc_feature (1)..(777): NCBI GI: 225561369 Blast Desc: conserved [Ajellomyces capsulatus G186AR]
  misc_feature (1)..(777): NCBI GI: 240274474 Blast Desc: conserved [Ajellomyces capsulatus H143]
  misc_feature (1)..(777): NCBI GI: 154282481 Blast Desc: [Ajellomyces capsulatus NAm1] gi|150410216|gb|EDN05604.1| [Ajellomyces capsulatus NAm1]
MAAMTQTYPQQTGTVTLLQTRTGTMSGSSQAISGQAYGNPSRSAYNGLSGGNQVGYRTAGSAPIQPYAFTSTPSLASGSQPLQHGGYRTSSGTTVPTLQQMQAPVPVIRPQLNGTSNQPTFAQVAAAKASPERYRRPAPRQTDSSPATVPSQPVQASAMPVGSGTATVVHLYNPRALPQTQPALNRPHSAYGAMDDMALHRHTSDEEAKRFRRRSIHSINSSDYFNPLSSQAGKQTFESSRADAGSKQKYTPVDAPKPTARIVPAPSQAKKTEKSAVHTRNGSAESNGSSRSSNSRPSSANRNANGSPLTGSPASTSSLSGDKTATNDKLKIVNIPPRGSSTDVGKRAHSPSPLSNPVTMAAGPSSRDGVSATTSTTPPTSSHGPKVESPAARQLAAINEKGGRSKSKTSRLRRAFSFGSAAELRKAAGQDIGADDSTNPPKDGPARLHKEQRTEDAYEEEQARIAQKQEEGGIGSSIYSGTKLFAGSTDNLSISSTASSASIMLRKMGRGMKKGSRSLVGLFRPKSIIGSPTEELAAPEVSQAAVSMVTVEAERDRVNVTTNAELPQSTGTGFPHLERNSLDATQISDAVSSERLDSTSTENSAMRKSIVGGEKERAEVLATIRKGILKTRSNSPTPTTPAVDTKVPAFDLPSIPNVSDSPNSSAPSTPNDEVQGHKRNGSVALGNEDYFMSALRLRQDTKSAPATPQASHKRNATFSPRIVFHDTWPRGEYDRRGEIATCNLLTPMLAQQIKEELNSFKMEMEVHETSKIYTHFF

SEQ ID NO: 17460 - DNA, 4171 bp, Muscodor strobelii
  misc_feature: SGI EST ID NO. CUFF.41246.1
  misc_feature: Variant of the nucleotide sequence at SEQ ID NO 17458
ggttcgtccgctctctcgtcgtcgtctctccaaatccagagccaagtcatcctttcgactctcaacctcctgttctcgtcctccttcccgaccaaatgcccgtgtgaattgcatcactctgcccgttccttcctccggcacctctccctctcgttcgttctgccctcactaattcttcccttctcgtatctactagtacatagtcctctttcttctgccccggttctcagacaggttttccccctaccgcctgtcattccacccgagcccccttttgactttttgtccaccgtcccaacttcgacaccatttcgacacacaccactctcccagcctgacgactacggcctgtcatctctttcccatccatactttctgttcgtcgcattttgtgaatttgttgcctgctctggacctgcttctctgcatccagacctggcaactgtaccgaaaaagcaactaaaaaaaacacgagattattctttctgtttccgagtcgtccttgttgaccgacaacgcatttcccatgtccacctactagacagcattcttgggcccttctagtgtctgtttgggcattagaatccaattgacttcgactcatacgtctcggctacccaagacgccccaagaaatcgatcattcgcctcgtctacggtaaaagtagcctggccgacgtttcttcctcgggtcgctggcgtcctttactttctgcctgtccacagaacacgtatcgatcggtgtgaaacgctgctttttgcttggatcccttcgagtccaaggccactgagattggtgcgaggaaccgacaggtttccttgaaagaagcaaagttagaacttgagtatttgcttggaccgcatcactacctgatcgtccatctgttttcgacccaaacaagaaacaagaagcccgcttggccgagggatattgcgactcgacccagcaggcccttgtccttctaacatggctgctatgacacagacgtatccccagcaaaccggaaccgtaacactattgcagacgagaacaggtacaatgtcaggctcttcacaggccatctcgggccaagcatacggcaatccatcgagaagtgcctacaacggcctatccggcgggaatcaggtgggctaccgaacagccgggtctgccccgatccagccatacgcctttacatcgacacccagccttgctagtggaagtcagcctctgcaacatggtggctaccgcacatcttctggcaccaccgtaccgaccctacaacagatgcaagcacctgtgcccgtgattcgtccccagctcaatggcacttcaaaccagcctacgtttgcacaggtggctgctgctaaagcgtctcccgagcgatacagacgaccagccccaaggcagacagattcatcgcctgccactgttccaagccaacccgtgcaggcatcagctatgccggtcggctccggcaccgcgacggtagtccatctctataacccgcgggcccttccgcaaacccagcccgctctgaatagacctcacagcgcgtacggggcaatggatgatatggctttacatcgtcacacatcagatgaagaagctaagaggtttcgacgccgcagcatccactcgatcaattcatccgattacttcaacccactgagttcacaggccggtaaacagaccttcgaatcatcacgggcagacgctggatcaaagcagaaatatactcctgtggatgctccgaaaccgactgcgagaattgttcccgcgccaagccaggcgaaaaagacggagaaaagtgcagtacatacaagaaatggcagcgctgagagtaacgggtccagtcgcagcagcaattcgcgaccttcatcggcgaatcgtaacgccaacggctctccacttacagggagccccgcctcaacctcctctctgtctggggacaagacggcgaccaacgataaactcaagatagtgaacataccgcctcgtggctcgtctactgatgtcggcaagcgagcacatagtccttctcccttgtccaacccggtaactatggctgccgggccatcatcgcgcgatggggtcagcgccaccacgtccaccacgccgcctacttcttctcatggccctaaggttgagagcccggcagcaaggcagcttgccgcaataaatgaaaagggaggcagatctaagagcaagacctcccgattgcggcgggcattctcattcggaagtgctgcggagctgagaaaagccgccggccaggacatcggcgctgatgatagtaccaatccccccaaagatggccctgcacggttacacaaggagcaacggactgaagatgcttacgaggaggaacaagcacgcattgctcagaagcaggaggaaggtggtattggcagcagtatatattctggcacgaaactgttcgcaggctccacggacaatttgtcgatttcgtctactgcatcatcggcctcgattatgctccgtaagatgggtcgtggcatgaaaaagggcagtcgatcactcgtcggtctctttcgacccaagtctattattggctccccgaccgaggaactggcggcgccggaagtctctcaggctgctgtgtcgatggtcactgtggaagctgagcgtgaccgcgtcaacgtgacaacgaacgctgagcttccccaatccaccggcacaggtttccctcacctggaacgcaactcgcttgatgcaacccaaatctcagatgccgtctcctctgaacgtctggatagcactagcacggagaattcggccatgaggaagagcatagtcggcggtgaaaaggagcgagctgaggtgctggccaccatccgcaagggtatcctcaagactcgtagtaactcgcctactccgactactcccgcggtggacactaaagttcccgccttcgatcttccttcgatccctaatgtctcggactcacccaattcaagcgcacctagcacgcccaatgacgaagttcagggacacaagcgaaatggatctgtcgcccttggcaatgaagactactttatgtcagccctgcgtttgcgccaggacaccaagagtgcccccgccacgccccaggccagccacaagcgtaatgccaccttcagccctcgaatcgtcttccacgatacctggccacgtggcgagtacgaccggcggggagagatcgctacatgcaaccttctcacaccaatgcttgctcagcaaatcaaggaggagctgaacagctttaaaatggagatggaggttcacgagacatctaagatatacacacactttttctgacgaccacgagtaccacatcacgggcattttgagcgagactccccacactctctccttcctttccactatcatttctgtcgattccaggccatagacctcgatcatgtattcgactcatgtccgaagcagtggcgttgcactcggccagcattgtaaggtgtcggggcgtttttccaattcattctttgcgcgttgattatgccggggccgcctcgcggggcccacgggtccaacttgattataatggcggaaatgggcgaaggccaaaactgtcgagacttcatactacttgtctactctgtcttgaaagatacacggtgaagacaaaaaaagagtcagcattggcaatcaagcacatgtcaaaagcggagcaagagagatggaagttctgtagactgcaagacgaagagagcagtttgaggttgagtagagccgaaaaagattaggagggtgaccagcatctatcgcggggcgacgacaggtgcctcgagatgggatgaaacatgtacttttagtgagagagatctattagcacgggacaggagattggcagccgagtgaataataatagcagagcaagcgaacatgacggtcacgaacgcgaacatttttgcacattccaatcaattcgctaccagtgtgaaggatatctacccgatagttgaatgcagatgcacctgcagatgatgcagattgcgataggtggaaaaagaagtgggaaaaaacacatgagatagtgttgaagaccgtcatgcaggtcttgggttttgtcgagacattacagggacatgggccgtggatggaccaagattcggtatggttttggggggaataggggcaagtaggggttctcgtatggagggtcgccgag

SEQ ID NO: 17461 - DNA, 511 bp, Muscodor strobelii
  misc_feature: SGI cDNA ID NO. 565832
  misc_feature: Encodes the peptide sequence at SEQ ID NO 17462
atgacctgtaccattgtagatccgatggccaccgcagctgacaatgtgccgcggataccacctggccgcgagccagacgacatggctcaacctcgcgccatcgtgcccatcatcgccaccaccgccacgcccaccccgaccataaagacgtcggcgccctcgcctatcgccggcgaccccatggacatcaccacgcccacgagctcctccgccccgcagagcatcggccgaagctctgacggcgacgtcagcgacactaacgaccagcgcaagcccaccacgggctccggcgaccaggcctctggcagcgcctcgtccaacgccatgcccgctccgtcgaccgtcccctcgtccggctctgcgcccaccgctgccgctgctgccgtccaccagcccaagattgtccagactgctttcatccacaagctatacaacatgctggaagaccagaacatacagcacctcatcagctggtcaccttccgccgagagcttcgtcatgtcgccctctc

SEQ ID NO: 17462 - protein, 170 aa, Muscodor strobelii
  misc_feature: SGI Peptide ID NO. 565832
  misc_feature (137)..(166): Pfam Id: PF00447 Pfam Desc: HSF-type DNA-binding
  misc_feature (27)..(170): NCBI GI: 39978173 Blast Desc: MGG_06971 [Magnaporthe grisea 70-15] gi|145013454|gb|EDJ98095.1| MGG_06971 [Magnaporthe grisea 70-15]
  misc_feature (34)..(170): NCBI GI: 261357010 Blast Desc: flocculation suppression protein [Verticillium albo-atrum VaMs.102]
  misc_feature (34)..(170): NCBI GI: 256728910 Blast Desc: [Nectria haematococca mpVI 77-13-4]
  misc_feature (34)..(170): NCBI GI: 46138707 Blast Desc: FG10868.1 [Gibberella zeae PH-1]
  misc_feature (9)..(170): NCBI GI: 16944516 Blast Desc: related to heat shock transcription factor HSF21 [Neurospora crassa]
  misc_feature (20)..(170): NCBI GI: 119179680 Blast Desc: CIMG_08549 [Coccidioides immitis RS]
  misc_feature (20)..(170): NCBI GI: 240110175 Blast Desc: HSF-type DNA-binding domain containing protein [Coccidioides posadasii C735 delta SOWgp]
  misc_feature (84)..(170): NCBI GI: 242794362 Blast Desc: flocculation suppression protein [Talaromyces stipitatus ATCC 10500] gi|218718943|gb|EED18363.1| flocculation suppression protein [Talaromyces stipitatus ATCC 10500]
  misc_feature (21)..(170): NCBI GI: 225555058 Blast Desc: flocculation suppression protein [Ajellomyces capsulatus G186AR]
  misc_feature (35)..(170): NCBI GI: 145248646 Blast Desc: An14g00330 [Aspergillus niger] gi|134081329|emb|CAK41832.1| protein product [Aspergillus niger]
MTCTIVDPMATAADNVPRIPPGREPDDMAQPRAIVPIIATTATPTPTIKTSAPSPIAGDPMDITTPTSSSAPQSIGRSSDGDVSDTNDQRKPTTGSGDQASGSASSNAMPAPSTVPSSGSAPTAAAAAVHQPKIVQTAFIHKLYNMLEDQNIQHLISWSPSAESFVMSPS

SEQ ID NO: 17463 - DNA, 2196 bp, Muscodor strobelii
  misc_feature: SGI EST ID NO. CUFF.41021.1
  misc_feature: Variant of the nucleotide sequence at SEQ ID NO 17461
gctcaaggtacgtctcttgtaatcaacccaactccttcgaagttggaacaattgcccagagccgagagtccaggattagagaggacaacatggaataataggaattatcgatacacttgcatgccccggacagccactagcagcagcaacagatgtcatagctttgttgatagtgtactgtacctgccccccacaacgctccttccttgcgacttgtctggttgttcttgcccgggacatcagagagtgagagatatatcccgttcaatgagactgtagctttacgaatgacacctccggtgtccggcaagaagacagggagcagatattgtgttttccgaggccattgacagtaattcttgaagtgtgaagaaggcatgagattgcatgtgcaatgatgcaggacgtgtataagccccgttaggttaggacgccgtacagaaaccactaagtttgcagatgagcagcagttgactctttacggtatgtgcggtccagtcctcgagcgcaatcaaaagttagaacatttcaaccaggccgattgccttctagcgcggctgccggtttggaatctcgttcgcatcgaaacttgcttctcgtcgtctaagacgggtgtggtgcatgtgcgcttgacaccactcgtcgttgaggtaccaacgtaatctatggaatcttggttgatcaccagtccattccatcctggtttgcttattccagtattccagacttccaacctgcccggcgaagaagcactgcagtgcgcagatgcctgtcgcccgcctgtccatgtccctggctgcccagggtgcgctatagacaccgacagcaacacatcccggcgccggcaagccattggatacaacccaattgatcctgacccccaaatcaaatcccctttattatactcgcagcaatagcagcagcagcagtcgcagcacggcttcgatctgggctggctgcatgtatccatccgcatcgggctgggtacgggatacttggatacatctgagacacacacttactccagtatatacagtacctacatgctacttgctacttgatacctggcttcgttacattacatcccgcgcatgtcatatctctgtctgtctggccatcgagcgagactccaaaaatatctacactgtacctcacattgcatactgttgttccctcctgcgcgctccatacttccgctttcaacgccaacgcccgccgacgccatcgccatcgccattgccatcctgtgcatgctgtacttcgccgcgacttgggggaccagactaagtcaccactaacccatcaacttccaagtcagtattcgaaacacggcctctgccccccctcggcctgcagcaaaagcatacacatatacattcacacaaacgtagcatacgccttccgcattcaggtacagctgtgagcaagcagcctcgaggctgatcggcggcatcgcatcgcagcgcatccatccatccatcgacttatcggtcgataccagaataccagacgggacccctcccccatgtctgtcctgcggcaaccggcagcagcactccatcatccgtgatagggcctatcaccgatccagcgactgcacctgctactgctcctgctctggaccgagccattgatatatcaggaatcccccagattccgccgcgccctcacctccttcgccaacggtgtctgggaagctatgcgatccgatggccaccgcagctgacaatgtgccgcggataccacctggccgcgagccagacgacatggctcaacctcgcgccatcgtgcccatcatcgccaccaccgccacgcccaccccgaccataaagacgtcggcgccctcgcctatcgccggcgaccccatggacatcaccacgcccacgagctcctccgccccgcagagcatcggccgaagctctgacggcgacgtcagcgacactaacgaccagcgcaagcccaccacgggctccggcgaccaggcctctggcagcgcctcgtccaacgccatgcccgctccgtcgaccgtcccctcgtccggctctgcgcccaccgctgccgctgctgccgtccaccagcccaagattgtccagactgctttcatccacaagctatacaacatgctggaagaccagaacatacagcacctcatcagctggtcaccttccgccgagagcttcgtcatgtcgccctctc

SEQ ID NO: 17464 - DNA, 606 bp, Muscodor strobelii
  misc_feature: SGI cDNA ID NO. 565833
  misc_feature: Encodes the peptide sequence at SEQ ID NO 17465
atggagttcaacatcaaggacactggcgatggtgccaagaccatcaaattcaccgctcgtgagatggagaacattggcaaggccttcatgagctgcaaggaccctcagatcgactgggagcgcttcactacttcggctggctacaagaacgttggtgctgctcgtgccacctttggacccaccctcaagaagctccgtgagcttcagaaggaagatgcagtccttgccacacgcaccactgcttcccgaactgccagcgctcagggccgcaagcgcaaggctgaggctgaggctgatgtggaaggcaagtctaatggcgacgatgatactgccactaccagttcccctcagcccgtcaagaaggctcgtgccaccggccgtaagaagaaggccaaggaggagcccaaggagagtaaggagaatgtcaagcagccggctgttgctcagactctctacgacgactccgatgaggaccccaacgatgctgtctcacagatccaggagcagcttgagcaggagatgcgctctgagcatcgcaactacgctgcctgggataacttcatcgactatggtgcccactacgacctcaatgacggccacgtctag

SEQ ID NO: 17465 - protein, 201 aa, Muscodor strobelii
  misc_feature: SGI Peptide ID NO. 565833
MEFNIKDTGDGAKTIKFTAREMENIGKAFMSCKDPQIDWERFTTSAGYKNVGAARATFGPTLKKLRELQKEDAVLATRTTASRTASAQGRKRKAEAEADVEGKSNGDDDTATTSSPQPVKKARATGRKKKAKEEPKESKENVKQPAVAQTLYDDSDEDPNDAVSQIQEQLEQEMRSEHRNYAAWDNFIDYGAHYDLNDGHV

SEQ ID NO: 17466 - DNA, 1170 bp, Muscodor strobelii
  misc_feature: SGI cDNA ID NO. 565834
  misc_feature: Encodes the peptide sequence at SEQ ID NO 17467
atgcgccaagggacttcgacagatcacttcttccagaccgatgccgaacaagctcaggcggacagacgtgcggccaaggcaagtaacaaaaatggaaatcccattgtcctgaagtcaaaactattggctgctgtccgggacccttcgtcccagtctgccctgctcattgctgagtcgacgggctcagtccggagagttgatgttgattccggcgaaacaaaacaagtcttcaaaggtccaactgcacctgtaacctgtgttgcagttggcggccctgagaaccgcatagtctttgctggatcttgggataaagacgtctggtcgtgggatcttagcaccaaggcaccggggcgtaaatacagggctcacacagatttcgtcaaggctgtcatatgcgtgaaacttggttcaaaagattacctcattagtggcggcgcagacaagaagataatagtctgggatgtcgagacaggctcgcgcatccacacgattcaagaccagacagtgtccatgatggccctccaggcccttgctatcgaccctttagaatccacttccgactcagtcgtcttggttagctcgagtagcgacccaaacatcagacgctggcgcattacacctacgacttttgagcaattatcagagacagcgagcgatggctctgttcggcatactatattagaacatgatactacggtatacaaactcgtgttcgacactgagagcgaagaggtagacctctggacagcgagtggagacggcacaacgaagtgtctttcgcgacaaaaaggctacacggaagatgattgcatggcccatggcgatcacgtgcgatcagtcgcagtcacagaccagtggataatcacagcggggcgggatgaagatctcaaggtctgggaccggtcatcaggaaaggtgtactgcgtacttgagggccactacaacgaagtcacggacctgatagtcttagaccagggcaggcgtgtagtatctgtgtctatagatgggacggtacgaacatggcctcttcagaaatctgaacttgatcgggtcattgaagaaagggagaagaaagttaacagtgccgagatcgaaagccgtgcggagccagccgggggccttatgacggttgaagaggaggcagaacttgcggcactgatggaagattag

SEQ ID NO: 17467 - protein, 389 aa, Muscodor strobelii
  misc_feature: SGI Peptide ID NO. 565834
  misc_feature (71)..(110): Pfam Id: PF00400 Pfam Desc: WD domain, G-beta repeat
  misc_feature (114)..(154): Pfam Id: PF00400 Pfam Desc: WD domain, G-beta repeat
  misc_feature (304)..(342): Pfam Id: PF00400 Pfam Desc: WD domain, G-beta repeat
  misc_feature (264)..(300): Pfam Id: PF00400 Pfam Desc: WD domain, G-beta repeat
  misc_feature (3)..(389): NCBI GI: 16944517 Blast Desc: related to TRANSCRIPTIONAL REPRESSOR RCO-1 [Neurospora crassa]
  misc_feature (3)..(389): NCBI GI: 164423486 Blast Desc: NCU08485 [Neurospora crassa OR74A] gi|157070113|gb|EAA33920.2| conserved [Neurospora crassa OR74A]
  misc_feature (3)..(389): NCBI GI: 256729090 Blast Desc: [Nectria haematococca mpVI 77-13-4]
  misc_feature (3)..(372): NCBI GI: 171689272 Blast Desc: protein product [Podospora anserina] gi|170944598|emb|CAP70709.1| protein product [Podospora anserina]
  misc_feature (15)..(389): NCBI GI: 145605659 Blast Desc: MGG_06968 [Magnaporthe grisea 70-15] gi|145013457|gb|EDJ98098.1| MGG_06968 [Magnaporthe grisea 70-15]
  misc_feature (3)..(357): NCBI GI: 46138711 Blast Desc: FG10870.1 [Gibberella zeae PH-1]
  misc_feature (1)..(376): NCBI GI: 156062990 Blast Desc: SS1G_01611 [Sclerotinia sclerotiorum 1980] gi|154696947|gb|EDN96685.1| SS1G_01611 [Sclerotinia sclerotiorum 1980]
  misc_feature (1)..(376): NCBI GI: 154319013 Blast Desc: BC1G_02458 [Botryotinia fuckeliana B05.10] gi|150856889|gb|EDN32081.1| BC1G_02458 [Botryotinia fuckeliana B05.10]
  misc_feature (3)..(388): NCBI GI: 261357008 Blast Desc: WD repeat-containing protein [Verticillium albo-atrum VaMs.102]
  misc_feature (1)..(358): NCBI GI: 242806540 Blast Desc: WD repeat protein [Talaromyces stipitatus ATCC 10500] gi|218715389|gb|EED14811.1| WD repeat protein [Talaromyces stipitatus ATCC 10500]
  misc_feature (28)..(341): SWISSPROT Homolog: EC 2.7.11.7 [Myosin heavy-chain] kinase
MRQGTSTDHFFQTDAEQAQADRRAAKASNKNGNPIVLKSKLLAAVRDPSSQSALLIAESTGSVRRVDVDSGETKQVFKGPTAPVTCVAVGGPENRIVFAGSWDKDVWSWDLSTKAPGRKYRAHTDFVKAVICVKLGSKDYLISGGADKKIIVWDVETGSRIHTIQDQTVSMMALQALAIDPLESTSDSVVLVSSSSDPNIRRWRITPTTFEQLSETASDGSVRHTILEHDTTVYKLVFDTESEEVDLWTASGDGTTKCLSRQKGYTEDDCMAHGDHVRSVAVTDQWIITAGRDEDLKVWDRSSGKVYCVLEGHYNEVTDLIVLDQGRRVVSVSIDGTVRTWPLQKSELDRVIEEREKKVNSAEIESRAEPAGGLMTVEEEAELAALMED

SEQ ID NO: 17468 - DNA, 1528 bp, Muscodor strobelii
  misc_feature: SGI EST ID NO. CUFF.41043.0
  misc_feature: Variant of the nucleotide sequence at SEQ ID NO 17466
caaaggtgttctaaataaatttacttcctatcattctaactacctcgatgtgaaatcatttgttgaccaacccgtactatcagcaaaaaatagtgacctctttcgcccacccccactgactggaaacttttgagtcgtccccctcctcccctcgatattagaatcatgcgccaagggacttcgacagatcacttcttccagaccgagtatgcgtctgtttgacagctctacagctcctgatgctaacacctatatatcagtgccgaacaagctcaggcggacagacgtgcggccaaggcaagtaacaaaaatggaaatcccattgtcctgaagtcaaaactattggctgctgtccgggacccttcgtcccagtctgccctgctcattgctgagtcgacgggctcagtccggagagttgatgttgattccggcgaaacaaaacaagtcttcaaaggtccaactgcacctgtaacctgtgttgcagttggcggccctgagaaccgcatagtctttgctggatcttgggataaagacgtctggtcgtgggatcttagcaccaaggcaccggggcgtaaatacagggctcacacagatttcgtcaaggctgtcatatgcgtgaaacttggttcaaaagattacctcattagtggcggcgcagacaagaagataatagtctgggatgtcgagacaggctcgcgcatccacacgattcaagaccagacagtgtccatgatggccctccaggcccttgctatcgaccctttagaatccacttccgactcagtcgtcttggttagctcgagtagcgacccaaacatcagacgctggcgcattacacctacgacttttgagcaattatcagagacagcgagcgatggctctgttcggcatactatattagaacatgatactacggtatacaaactcgtgttcgacactgagagcgaagaggtagacctctggacagcgagtggagacggcacaacgaagtgtctttcgcgacaaaaaggctacacggaagatgattgcatggcccatggcgatcacgtgcgatcagtcgcagtcacagaccagtggataatcacagcggggcgggatgaagatctcaaggtctgggaccggtcatcaggaaaggtgtactgcgtacttgagggccactacaacgaagtcacggacctgatagtcttagaccagggcaggcgtgtagtatctgtgtctatagatgggacggtacgaacatggcctcttcagaaatctgaacttgatcgggtcattgaagaaagggagaagaaagttaacagtgccgagatcgaaagccgtgcggagccagccgggggccttatgacggttgaagaggaggcagaacttgcggcactgatggaagattagaggcatccatgccgatcaatcccatacttttcttcggccctctccttgagaactaattgtgtgagatgcatgttttaaccggccaaaataaggttgtttgccttcctaaaagcaagggcagccatacatatacctagac

SEQ ID NO: 17469 - DNA, 2550 bp, Muscodor strobelii
  misc_feature: SGI cDNA ID NO. 565835
  misc_feature: Encodes the peptide sequence at SEQ ID NO 17470
atggcatctacagcgcctcccagacctcgagcacggccagctcatacccagggcccgactcgttgcgcttacacaccggccggatcaaagctcgtgaccgtcggctccaacaacacgatcagattgtataagaccggttttgatggtgaacccatcaatatagacgattgccaggagcagaatgttgccgtggccgcatgcgacgacttcttcgttgtgggctctgaggatggcaccctcagcttgtactcgataccaaacgcagccttcgacagattcctcactcgcactacccttcccatacgcgacgtggccttgtcccacgactcaaaatggtgcgctgtcgccagcgatgagttgacggtcaagattgtcaataccagcgacaacagcaagctccgccatctcaaagcacacaacaaacctactaaacacctgacattcagtcccaagggtgatctggtctcgttgtcatgtacagatggcattgtctatgtctacgatcttggcatagaagacgatgaagaacctgagctgatcaggagagtcgacagcatcattggttccgtcgatactgagtctgaaatcagcacaaaggccgtctggcatcccgatggccgtgcctttgccttacctacacccacaagagatatccaggtggtgtcgaagaatgattgggagaaacaacgagcatttaatgggcacaccggagatgtcaccgctctgtcatggtctcccaatggcgccatgcttgcgtcggcaggcaaggacaagaagatcctcctatgggacactaagactcagaacatcattggccgatatgatttcgccaatgtcatggatattgcatggcacccaactaacaacaccgtctcttttacaaattcagatggcgaggtctacatccataccgacttcgtcccagagcaacacatttcgctgctaaaactccctgctcagcctgcaccattcattcatgaccccttgtcagagatatccgcgaacaccaggcgtccagaggcaaatggcttcaaatccatccccgctcgaccacgtcggctatcagcaggcagctatgactcgttgatggatggccctctacccgaggatgatgatttcgtagtggatgacgatggtgcgggctatgtcgtcaatgccaacggaaaacgcatgcatgatggaaccgatgcctatggcgcttacggcgaatctttgagcaaacgacgcaacgtacaaactgaataccacgaggcatttcagccaggctcaacaccatggcgaggcaatagaaagtacctatgtctgaatctcatcggcttcatatggacggttgatcaagatggtcaccatactgtcaccgtcgaattttatgatcacgagtttcaaagagacttccatttcactgatactttcctgtacgacaaagcttgtctgacggagaatggtgctgttttctcatgtccacccaacgaggatcagccagctacgatcttctaccggccgcatgaaacatggacgcaccgacaagattggagaacagagctaccgaaaggagaggctgttcttgccatatctctcagcgagtctttcgtgactgtcaccaccacagcaaactacgtgcgagtatatacgctcttcggcataccgtacagagtatatcgtccgaagagctcgccaatggtcacatgtgctagctggagagactatgtgatgaccattggcaatgggccagttgggggagacgggcggacaagacttctttacacgatcgagaatctcaaaagagacgagatctgccagaatgaggatacagtagcgctgccacctagcgcaactttgaaaagtgttttcttctcagacagtggtgatccctgtatttatgattctacgggcactttgctcacgctcctgcattggcgccagccttctaaggctttgtgggtccccttattagacaccactttgctccctcgtcttgcctcagggcgcaagactgagacctatttccccatcgctgttgctgacaacagattccactgcatcattttgaagggcggtgatcaatacccctatttccctcgcccgctgctctccgagtttgacttctccgtaccgctcacgtcggagccaccaaagcagaagcagacaaatgctgacgccatggaggatgacgaagcggcggacgctgacgatggcgactcggaaggccgtaagcttgaacagcagtatctactcaagtctatcgcagccgcacagacgcaagacctcgttgatgcaacacggggcaatcatgctcaacgctcgggacttgcgagacttgagctggagattgataaagctttgctccaactccttgctattgagtgtcgcgagggtgaggaaaggggtatgcgtgccctcgagttagtggatctcatgcgtgatcgcacgggacgtatggtggaagccgctggcaagattgccgagcggtacggaaggacgattcttggggacaagattcgagatgctggcgagaagcgtattcaggcgatggatgacgacgatttctga

SEQ ID NO: 17470 - protein, 849 aa, Muscodor strobelii
  misc_feature: SGI Peptide ID NO. 565835
  misc_feature (226)..(264): Pfam Id: PF00400 Pfam Desc: WD domain, G-beta repeat
  misc_feature (130)..(168): Pfam Id: PF00400 Pfam Desc: WD domain, G-beta repeat
  misc_feature (1)..(849): NCBI GI: 256728909 Blast Desc: NECHADRAFT_40224 [Nectria haematococca mpVI 77-13-4]
  misc_feature (1)..(849): NCBI GI: 46138709 Blast Desc: FG10869.1 [Gibberella zeae PH-1]
  misc_feature (1)..(847): NCBI GI: 261357009 Blast Desc: minichromosome loss protein [Verticillium albo-atrum VaMs.102]
  misc_feature (12)..(843): NCBI GI: 145605657 Blast Desc: MGG_06969 [Magnaporthe grisea 70-15] gi|145013456|gb|EDJ98097.1| MGG_06969 [Magnaporthe grisea 70-15]
  misc_feature (1)..(841): NCBI GI: 85109929 Blast Desc: NCU08484 [Neurospora crassa OR74A] gi|7981360|emb|CAB92040.1| sepB protein [Neurospora crassa] gi|28924818|gb|EAA33919.1| NCU08484 [Neurospora crassa OR74A]
  misc_feature (1)..(834): NCBI GI: 116199365 Blast Desc: CHGG_07838 [Chaetomium globosum CBS 148.51] gi|88179117|gb|EAQ86585.1| CHGG_07838 [Chaetomium globosum CBS 148.51]
  misc_feature (2)..(841): NCBI GI: 171689274 Blast Desc: protein product [Podospora anserina] gi|170944599|emb|CAP70710.1| protein product [Podospora anserina]
  misc_feature (1)..(847): NCBI GI: 154319015 Blast Desc: BC1G_02459 [Botryotinia fuckeliana B05.10] gi|150856890|gb|EDN32082.1| BC1G_02459 [Botryotinia fuckeliana B05.10]
  misc_feature (1)..(822): NCBI GI: 156062988 Blast Desc: SS1G_01610 [Sclerotinia sclerotiorum 1980] gi|154696946|gb|EDN96684.1| SS1G_01610 [Sclerotinia sclerotiorum 1980]
  misc_feature (8)..(849): NCBI GI: 115385819 Blast Desc: ATEG_10154 [Aspergillus terreus NIH2624] gi|114187903|gb|EAU29603.1| ATEG_10154 [Aspergillus terreus NIH2624]
MASTAPPRPRARPAHTQGPTRCAYTPAGSKLVTVGSNNTIRLYKTGFDGEPINIDDCQEQNVAVAACDDFFVVGSEDGTLSLYSIPNAAFDRFLTRTTLPIRDVALSHDSKWCAVASDELTVKIVNTSDNSKLRHLKAHNKPTKHLTFSPKGDLVSLSCTDGIVYVYDLGIEDDEEPELIRRVDSIIGSVDTESEISTKAVWHPDGRAFALPTPTRDIQVVSKNDWEKQRAFNGHTGDVTALSWSPNGAMLASAGKDKKILLWDTKTQNIIGRYDFANVMDIAWHPTNNTVSFTNSDGEVYIHTDFVPEQHISLLKLPAQPAPFIHDPLSEISANTRRPEANGFKSIPARPRRLSAGSYDSLMDGPLPEDDDFVVDDDGAGYVVNANGKRMHDGTDAYGAYGESLSKRRNVQTEYHEAFQPGSTPWRGNRKYLCLNLIGFIWTVDQDGHHTVTVEFYDHEFQRDFHFTDTFLYDKACLTENGAVFSCPPNEDQPATIFYRPHETWTHRQDWRTELPKGEAVLAISLSESFVTVTTTANYVRVYTLFGIPYRVYRPKSSPMVTCASWRDYVMTIGNGPVGGDGRTRLLYTIENLKRDEICQNEDTVALPPSATLKSVFFSDSGDPCIYDSTGTLLTLLHWRQPSKALWVPLLDTTLLPRLASGRKTETYFPIAVADNRFHCIILKGGDQYPYFPRPLLSEFDFSVPLTSEPPKQKQTNADAMEDDEAADADDGDSEGRKLEQQYLLKSIAAAQTQDLVDATRGNHAQRSGLARLELEIDKALLQLLAIECREGEERGMRALELVDLMRDRTGRMVEAAGKIAERYGRTILGDKIRDAGEKRIQAMDDDDF

SEQ ID NO: 17471 - DNA, 4484 bp, Muscodor strobelii
  misc_feature: SGI EST ID NO. CUFF.41072.0
  misc_feature: Variant of the nucleotide sequence at SEQ ID NO 17469
caacatcccattgactctcctcgtcaagcattgcctcgctttgacgccatactcgacaattgtcatacaaactcgattgaattttatgtttactttttttttgaaattcgccaacgaactccatgatctgcacgaagtaaatctgcaatggcatctacagcgcctcccagacctcgagcacggccagctcatacccagggcccgactcgttgcgcttacacaccggccggatcaaagctcgtgaccgtcggctccaacaacacgatcagattgtataagaccggttttgatggtgaacccatcaatatagacgattgccaggagcagaatgttgccgtggccgcatgcgacgacttcttcgttgtgggctctgaggatggcaccctcagcttgtactcgataccaaacgcagccttcgacagattcctcactcgcactacccttcccatacgcgacgtggccttgtcccacgactcaaaatggtgcgctgtcgccagcgatgagttgacggtcaagattgtcaataccagcgacaacagcaagctccgccatctcaaagcacacaacaaacctactaaacacctgacattcagtcccaagggtgatctggtctcgttgtcatgtacagatggcattgtctatgtctacgatcttggcatagaagacgatgaagaacctgagctgatcaggagagtcgacagcatcattggttccgtcgatactgagtctgaaatcagcacaaaggccgtctggcatcccgatggccgtgcctttgccttacctacacccacaagagatatccaggtggtgtcgaagaatgattgggagaaacaacgagcatttaatgggcacaccggagatgtcaccgctctgtcatggtctcccaatggcgccatgcttgcgtcggcaggcaaggacaagaagatcctcctatgggacactaagactcagaacatcattggccgatatgatttcgccaatgtcatggatattgcatggcacccaactaacaacaccgtctcttttacaaattcagatggcgaggtctacatccataccgacttcgtcccagagcaacacatttcgctgctaaaactccctgctcagcctgcaccattcattcatgaccccttgtcagagatatccgcgaacaccaggcgtccagaggcaaatggcttcaaatccatccccgctcgaccacgtcggctatcagcaggcagctatgactcgttgatggatggccctctacccgaggatgatgatttcgtagtggatgacgatggtgcgggctatgtcgtcaatgccaacggaaaacgcatgcatgatggaaccgatgcctatggcgcttacggcgaatctttgagcaaacgacgcaacgtacaaactgaataccacgaggcatttcagccaggctcaacaccatggcgaggcaatagaaagtacctatgtctgaatctcatcggcttcatatggacggttgatcaagatggtcaccatactgtcaccgtcgaattttatgatcacgagtttcaaagagacttccatttcactgatactttcctgtacgacaaagcttgtctgacggagaatggtgctgttttctcatgtccacccaacgaggatcagccagctacgatcttctaccggccgcatgaaacatggacgcaccgacaagattggagaacagagctaccgaaaggagaggctgttcttgccatatctctcagcgagtctttcgtgactgtcaccaccacagcaaactacgtgcgagtatatacgctcttcggcataccgtacagagtatatcgtccgaagagctcgccaatggtcacatgtgctagctggagagactatgtgatgaccattggcaatgggccagttgggggagacgggcggacaagacttctttacacgatcgagaatctcaaaagagacgagatctgccagaatgaggatacagtagcgctgccacctagcgcaactttgaaaagtgttttcttctcagacagtggtgatccctgtatttatgattctacgggcactttgctcacgctcctgcattggcgccagccttctaaggctttgtgggtccccttattagacaccactttgctccctcgtcttgcctcagggcgcaagactgagacctatttccccatcgctgttgctgacaacagattccactgcatcattttgaagggcggtgatcaatacccctatttccctcgcccgctgctctccgagtttgacttctccgtaccgctcacgtcggagccaccaaagcagaagcagacaaatgctgacgccatggaggatgacgaagcggcggacgctgacgatggcgactcggaaggccgtaagcttgaacagcagtatctactcaagtctatcgcagccgcacagacgcaagacctcgttgatgcaacacggggcaatcatgctcaacgctcgggacttgcgagacttgagctggagattgataaagctttgctccaactccttgctattgagtgtcgcgagggtgaggaaaggggtatgcgtgccctcgagttagtggatctcatgcgtgatcgcacgggacgtatggtggaagccgctggcaagattgccgagcggtacggaaggacgattcttggggacaagattcgagatgctggcgagaagcgtattcaggcgatggatgacgacgatttctgaatgacaaagtgtccacgaggcattgtatatttaatcgaaacggttatttggtgtagaggagcatggaggatagtgcgatacctgtcttgacaacacgctcacgatgaaatggattaggcatagccagtgggagttatcaaggtgaaaatcggtattaatgagtaaagttctattccaacagtttcgaatctttcgtctattcgccgtacgacccacaccgtgttcctatcaatacaaatattttacacagcaatctcactgccaattggccaaacaagtatcaccaattttaacctgcgcataccccaacgaatcaacccacaacctctcacacttcaccgcatccttggcctcggcgcctggctccgccttcacatgaccatccatataaacaccatttggcttaacacccagtttctcagtatcgaacgcagcctcaatcacgtcacttgcgctctgcgcagtggtccggaagtcgttgccaggcataagcttggtcaatacgcccatgaaagggctgagaatcttgccagccacatagagaacctggtttccgcggcgaactagactggtggacattgcgccgggatcaacggctagtacggcgattgacgataaggcgggatctgttgagatgcgctttgagagttcgcgcctatagtttcgggtgttagtatgtggtttcaagttacaattttgagaaggcaaacgtaggtgggactaacataaacataacctcgcacaattttgaagcaccatatcttctataccccggattgctcttgcccggttcttcgtcaggagggctccattttcctctcgccaaaggctcagtgttgagaggctccttgaagacttggttatacttctccgtcacgtagggactcaagaggcctgagacattgttccttggatccgcaacactagcaacatctatccatcagtacaacgactatttcaagccataaagtagagaaaggggaaacatactcatgcgaccaactccccaacacaacaacccgtccatgctccttatccatactcttcagcagcaagagcgtaagcaaaaaatgcgagagataattactctgaaacgcggtatcaaacccatccttcgtgttagtctgcgtgaagtactcctgccacccagcatttagtatcaaagccctaatcggtgggatcttcccagacgcgactttggagttgatagcttctgctgcctttctggtggattctagactagagagatcaagtgtcacaagctcgtagttgtgtgagactttcttggctttttgcagaacggactgaactgctgttgcgcgctctgggctgcgaactgtgtagaggccgtagtgcgaggaggagagtttgggatcgttgaggatgtgctggacgatggacgagcctagcccgccgttggcccctgtcactagaattgaaccttttggtgtggccatgatgaattgtcacgatggccgaactatggcagatgtgatgagtaggaatctgcgatcaccactgcgagaagagatgagtgtagatggcattcattcagtctattaccgtgtctctcgacaggacactactaggtagttatatacaatgccacgccatggcatggcgtgtctcagaatattcatccttctcctttggccaagcaatctaatgcctaaagagtatgattcacgatcattcatatgcgaaaggatgccttattcctccgagctccattatgtctccgtgaagatatacggatgacataagatttgtagccgggcaaaaagtaa

SEQ ID NO: 17472 - DNA, 1065 bp, Muscodor strobelii
  misc_feature: SGI cDNA ID NO. 565836
  misc_feature: Encodes the peptide sequence at SEQ ID NO 17473
atggccacaccaaaaggttcaattctagtgacaggggccaacggcgggctaggctcgtccatcgtccagcacatcctcaacgatcccaaactctcctcctcgcactacggcctctacacagttcgcagcccagagcgcgcaacagcagttcagtccgttctgcaaaaagccaagaaagtctcacacaactacgagcttgtgacacttgatctctctagtctagaatccaccagaaaggcagcagaagctatcaactccaaagtcgcgtctgggaagatcccaccgattagggctttgatactaaatgctgggtggcaggagtacttcacgcagactaacacgaaggatgggtttgataccgcgtttcagagtaattatctctcgcattttttgcttacgctcttgctgctgaagagtatggataaggagcatggacgggttgttgtgttggggagttggtcgcatgatgttgcggatccaaggaacaatgtctcaggcctcttgagtccctacgtgacggagaagtataaccaagtcttcaaggagcctctcaacactgagcctttggcgagaggaaaatggagccctcctgacgaagaaccgggcaagagcaatccggggtatagaagatatggtgcttcaaaattgtgcgaggttatgtttatgcgcgaactctcaaagcgcatctcaacagatcccgccttatcgtcaatcgccgtactagccgttgatcccggcgcaatgtccaccagtctagttcgccgcggaaaccaggttctctatgtggctggcaagattctcagccctttcatgggcgtattgaccaagcttatgcctggcaacgacttccggaccactgcgcagagcgcaagtgacgtgattgaggctgcgttcgatactgagaaactgggtgttaagccaaatggtgtttatatggatggtcatgtgaaggcggagccaggcgccgaggccaaggatgcggtgaagtgtgagaggttgtgggttgattcgttggggtatgcgcaggttaaaattggtgatacttgtttggccaattggcagtga

SEQ ID NO: 17473 - protein, 354 aa, Muscodor strobelii
  misc_feature: SGI Peptide ID NO. 565836
  misc_feature (5)..(354): NCBI GI: 39942728 Blast Desc: MGG_03444 [Magnaporthe grisea 70-15] gi|145010010|gb|EDJ94666.1| MGG_03444 [Magnaporthe grisea 70-15]
  misc_feature (1)..(354): NCBI GI: 46108216 Blast Desc: FG00990.1 [Gibberella zeae PH-1]
  misc_feature (3)..(354): NCBI GI: 212538423 Blast Desc: short-chain dehydrogenase, [Penicillium marneffei ATCC 18224] gi|210069109|gb|EEA23200.1| short-chain dehydrogenase, [Penicillium marneffei ATCC 18224]
  misc_feature (3)..(354): NCBI GI: 242765007 Blast Desc: short-chain dehydrogenase, [Talaromyces stipitatus ATCC 10500] gi|218724083|gb|EED23500.1| short-chain dehydrogenase, [Talaromyces stipitatus ATCC 10500]
  misc_feature (5)..(354): NCBI GI: 238840352 Blast Desc: conserved [Microsporum canis CBS 113480]
  misc_feature (1)..(354): NCBI GI: 256735183 Blast Desc: NECHADRAFT_74766 [Nectria haematococca mpVI 77-13-4]
  misc_feature (5)..(354): NCBI GI: 242764805 Blast Desc: short-chain dehydrogenase, [Talaromyces stipitatus ATCC 10500] gi|218724042|gb|EED23459.1| short-chain dehydrogenase, [Talaromyces stipitatus ATCC 10500]
  misc_feature (5)..(354): NCBI GI: 212528992 Blast Desc: short-chain dehydrogenase, [Penicillium marneffei ATCC 18224] gi|210074051|gb|EEA28138.1| short-chain dehydrogenase, [Penicillium marneffei ATCC 18224]
  misc_feature (22)..(354): NCBI GI: 154323033 Blast Desc: BC1G_00859 [Botryotinia fuckeliana B05.10] gi|150848193|gb|EDN23386.1| BC1G_00859 [Botryotinia fuckeliana B05.10]
  misc_feature (6)..(351): NCBI GI: 238842886 Blast Desc: oxidoreductase [Microsporum canis CBS 113480]
  misc_feature (5)..(276): SWISSPROT Homolog: EC 1.3.1.33 Protochlorophyllide reductase
MATPKGSILVTGANGGLGSSIVQHILNDPKLSSSHYGLYTVRSPERATAVQSVLQKAKKVSHNYELVTLDLSSLESTRKAAEAINSKVASGKIPPIRALILNAGWQEYFTQTNTKDGFDTAFQSNYLSHFLLTLLLLKSMDKEHGRVVVLGSWSHDVADPRNNVSGLLSPYVTEKYNQVFKEPLNTEPLARGKWSPPDEEPGKSNPGYRRYGASKLCEVMFMRELSKRISTDPALSSIAVLAVDPGAMSTSLVRRGNQVLYVAGKILSPFMGVLTKLMPGNDFRTTAQSASDVIEAAFDTEKLGVKPNGVYMDGHVKAEPGAEAKDAVKCERLWVDSLGYAQVKIGDTCLANWQ

SEQ ID NO: 17474 - DNA, 2308 bp, Muscodor strobelii
  misc_feature: SGI EST ID NO. CUFF.41073.1
  misc_feature: Variant of the nucleotide sequence at SEQ ID NO 17472
atgtcatccgtatatcttcacggagacataatggagctcggaggaataaggcatcctttcgcatatgaatgatcgtgaatcatactctttaggcattagattgcttggccaaaggagaaggatgaatattctgagacacgccatgccatggcgtggcattgtatataactacctagtagtgtcctgtcgagagacacggtaatagactgaatgaatgccatctacactcatctcttctcgcagtggtgatcgcagattcctactcatcacatctgccatagttcggccatcgtgacaattcatcatggccacaccaaaaggttcaattctagtgacaggggccaacggcgggctaggctcgtccatcgtccagcacatcctcaacgatcccaaactctcctcctcgcactacggcctctacacagttcgcagcccagagcgcgcaacagcagttcagtccgttctgcaaaaagccaagaaagtctcacacaactacgagcttgtgacacttgatctctctagtctagaatccaccagaaaggcagcagaagctatcaactccaaagtcgcgtctgggaagatcccaccgattagggctttgatactaaatgctgggtggcaggagtacttcacgcagactaacacgaaggatgggtttgataccgcgtttcagagtaattatctctcgcattttttgcttacgctcttgctgctgaagagtatggataaggagcatggacgggttgttgtgttggggagttggtcgcatgatgttgcggatccaaggaacaatgtctcaggcctcttgagtccctacgtgacggagaagtataaccaagtcttcaaggagcctctcaacactgagcctttggcgagaggaaaatggagccctcctgacgaagaaccgggcaagagcaatccggggtatagaagatatggtgcttcaaaattgtgcgaggttatgtttatgcgcgaactctcaaagcgcatctcaacagatcccgccttatcgtcaatcgccgtactagccgttgatcccggcgcaatgtccaccagtctagttcgccgcggaaaccaggttctctatgtggctggcaagattctcagccctttcatgggcgtattgaccaagcttatgcctggcaacgacttccggaccactgcgcagagcgcaagtgacgtgattgaggctgcgttcgatactgagaaactgggtgttaagccaaatggtgtttatatggatggtcatgtgaaggcggagccaggcgccgaggccaaggatgcggtgaagtgtgagaggttgtgggttgattcgttggggtatgcgcaggttaaaattggtgatacttgtttggccaattggcagtgagattgctgtgtaaaatatttgtattgataggaacacggtgtgggtcgtacggcgaatagacgaaagattcgaaactgttggaatagaactttactcattaataccgattttcaccttgataactcccactggctatgcctaatccatttcatcgtgagcgtgttgtcaagacaggtatcgcactatcctccatgctcctctacaccaaataaccgtttcgattaaatatacaatgcctcgtggacactttgtcattcagaaatcgtcgtcatccatcgcctgaatacgcttctcgccagcatctcgaatcttgtccccaagaatcgtccttccgtaccgctcggcaatcttgccagcggcttccaccatacgtcccgtgcgatcacgcatgagatccactaactcgagggcacgcatacccctttcctcaccctcgcgacactcaatagcaaggagttggagcaaagctttatcaatctccagctcaagtctcgcaagtcccgagcgttgagcatgattgccccgtgttgcatcaacgaggtcttgcgtctgtgcggctgcgatagacttgagtagatactgctgttcaagcttacggccttccgagtcgccatcgtcagcgtccgccgcttcgtcatcctccatggcgtcagcatttgtctgcttctgctttggtggctccgacgtgagcggtacggagaagtcaaactcggagagcagcgggcgagggaaataggggtattgatcaccgcccttcaaaatgatgcagtggaatctgttgtcagcaacagcgatggggaaataggtctcagtcttgcgccctgaggcaagacgagggagcaaagtggtgtctaataaggggacccacaaagccttagaaggctggcgccaatgcaggagcgtgagcaaagtgcccgtagaatcataaatacagggatc

SEQ ID NO: 17475 - DNA, 1323 bp, Muscodor strobelii
  misc_feature: SGI cDNA ID NO. 565837
  misc_feature: Reduced expression when VOC is produced
  misc_feature: Encodes the peptide sequence at SEQ ID NO 17476
atggcgacctccgcagcgtcgtcaaacttaccacatcaactccagcagtcaatcaatcgcgaggctgctctcccgaatcccgatccgccagccgactctccaagcgcgaccctagtctcacaacatcttaagcacatggtcgcgacgtactctcgaccttcggtagtattcgtcaagggtgaaggctgctatctttacgaccttgagaacaggaaatatctcgacttcactgccggaattgcagtcaatgcgcttggtcactcagacccagcgattgcgagagttatcgcagaccaggccacaacgttacttcatacgtcaaatttatacttcaacccgtggaccggtgccctttctgaactcttagtacagaagaccatcgagtcgggcgctatgcacaatgcttcctcggtatttgtgtgcaattcaggctcggaagcaaatgaggcggccatcaagttttctcgtaaggtcggcaaagccgtggacccaagtggagagaagcatgagtttgtttcttttcacggttctttccacggtcgaacaatgggaagcttgtcagccacgcctaatccaaaataccaggagccatttgcgccgatgctgcctggtttcaaatacggcacgtgcaacgacatagccgcgatcaacaatctagtcaacgagaagacgtgtggggtgattattgaacctattcaaggcgagggcggtgtcaatgtgccaaccgacgactttttaattgcacttgcgaagcggtgtcgcgaggtgggcgctgtcttgatctacgatgagatacaatgtggtctttctcggacgggcactctctgggctcacagtcatttacctaaagaggctcacccagatataattacgagcgccaaggctcttggaaatggtatccccattggcgccgtgataaccaatagccatattagcgaaaagatcaagattggtgatcatggcacgacttttggtggcaaccccatggcctgtcgtgtggctcatcatattgtcgcacgactggcggacgaaaggttacaaaaagaagtcgtcaacaagtcaaaaatattcaaacaaggtttcgaggcactgcggaaatcattcccggatctcgttggtgaaacccggggccgcggtctcatgctcggtgttcagctaacggaggatccgactcccatcatcaaagctgcgagggaaaggggcttgttgatcatcacgtgtggcacaaatacgcttcgttttgtcccgcctttgaacatcagcgaggaagaaattcaagctgggctgaacatcctatcggaagcgatccgatcgaccaggtga

SEQ ID NO: 17476 - protein, 440 aa, Muscodor strobelii
  misc_feature: SGI Peptide ID NO. 565837
  misc_feature (56)..(388): Pfam Id: PF00202 Pfam Desc: Aminotransferase class-III
  misc_feature (4)..(437): NCBI GI: 154316588 Blast Desc: BC1G_04225 [Botryotinia fuckeliana B05.10] gi|150846025|gb|EDN21218.1| BC1G_04225 [Botryotinia fuckeliana B05.10]
  misc_feature (8)..(437): NCBI GI: 156043343 Blast Desc: SS1G_10675 [Sclerotinia sclerotiorum 1980] gi|154695062|gb|EDN94800.1| SS1G_10675 [Sclerotinia sclerotiorum 1980]
  misc_feature (4)..(440): NCBI GI: 256730559 Blast Desc: [Nectria haematococca mpVI 77-13-4]
  misc_feature (22)..(440): NCBI GI: 46109382 Blast Desc: FG01573.1 [Gibberella zeae PH-1]
  misc_feature (24)..(438): NCBI GI: 85110516 Blast Desc: acetylornithine aminotransferase, mitochondrial precursor [Neurospora crassa OR74A] gi|52782761|sp|Q9P3I3.1|ARGD_NEUCR RecName: Full=Acetylornithine
  misc_feature (24)..(440): NCBI GI: 145606356 Blast Desc: acetylornithine aminotransferase, [Magnaporthe grisea 70-15] gi|145014041|gb|EDJ98682.1| acetylornithine aminotransferase, [Magnaporthe grisea 70-15]
  misc_feature (8)..(438): NCBI GI: 189198618 Blast Desc: acetylornithine aminotransferase, mitochondrial precursor [Pyrenophora tritici-repentis Pt-1C-BFP] gi|187982745|gb|EDU48233.1| acetylornithine aminotransferase,
  misc_feature (2)..(434): NCBI GI: 119481347 Blast Desc: acetylornithine aminotransferase [Neosartorya fischeri NRRL 181] gi|119408856|gb|EAW18805.1| acetylornithine aminotransferase [Neosartorya fischeri NRRL 181]
  misc_feature (2)..(436): NCBI GI: 258565405 Blast Desc: acetylornithine aminotransferase [Uncinocarpus reesii 1704] gi|237907148|gb|EEP81549.1| acetylornithine aminotransferase [Uncinocarpus reesii 1704]
  misc_feature (5)..(438): NCBI GI: 255946377 Blast Desc: Pc20g14810 [Penicillium chrysogenum Wisconsin 54-1255] gi|211588691|emb|CAP86810.1| Pc20g14810 [Penicillium chrysogenum Wisconsin 54-1255]
  misc_feature (38)..(438): SWISSPROT Homolog: EC 2.6.1.11 Acetylornithine transaminase
  misc_feature: Useful for introducing or modulating the production of volatile compounds
MATSAASSNLPHQLQQSINREAALPNPDPPADSPSATLVSQHLKHMVATYSRPSVVFVKGEGCYLYDLENRKYLDFTAGIAVNALGHSDPAIARVIADQATTLLHTSNLYFNPWTGALSELLVQKTIESGAMHNASSVFVCNSGSEANEAAIKFSRKVGKAVDPSGEKHEFVSFHGSFHGRTMGSLSATPNPKYQEPFAPMLPGFKYGTCNDIAAINNLVNEKTCGVIIEPIQGEGGVNVPTDDFLIALAKRCREVGAVLIYDEIQCGLSRTGTLWAHSHLPKEAHPDIITSAKALGNGIPIGAVITNSHISEKIKIGDHGTTFGGNPMACRVAHHIVARLADERLQKEVVNKSKIFKQGFEALRKSFPDLVGETRGRGLMLGVQLTEDPTPIIKAARERGLLIITCGTNTLRFVPPLNISEEEIQAGLNILSEAIRSTR

SEQ ID NO: 17477 - DNA, 2436 bp, Muscodor strobelii
  misc_feature: SGI EST ID NO. CUFF.41172.1
  misc_feature: Variant of the nucleotide sequence at SEQ ID NO 17475
gcgacatcggatagttgggccggctatcgataagaaaacaatatgtaacccatcacgaaacccaggaaaaacacgagtggtccagatcaaaagttttgctcacacctagacatttagacacttagacgatgtcaattgtgtttgcggaataaagggaagccaattgacatactcttccgaccgctacaccatttgcctggtcgcgccttgagtggggaccggggcagaactgtcatatcgacggtgtccgatagaccacggagaccatcgtgttgactcacccgaatgtttcatacttaagtatcgtagctacacggtcttcttcggctcaattcataatggccctgcgatttctagctcgatatgtcgtctccaacggcgctcggaggctttcgtcgcgagccatggcgacctccgcagcgtcgtcaaacttaccacatcaactccagcagtcaatcaatcgcgaggctgctctcccgaatcccgatccgccagccgactctccaagcgcgaccctagtctcacaacatcttaagcacatggtcgcgacgtactctcgaccttcggtagtattcgtcaagggtgaaggctgctatctttacgaccttgagaacaggaaatatctcgacttcactgccggaattgcagtcaatgcgcttggtcactcagacccagcgattgcgagagttatcgcagaccaggccacaacgttacttcatacgtcaaatttatacttcaacccgtggaccggtgccctttctgaactcttagtacagaagaccatcgagtcgggcgctatgcacaatgcttcctcggtatttgtgtgcaattcaggctcggaagcaaatgaggcggccatcaagttttctcgtaaggtcggcaaagccgtggacccaagtggagagaagcatgagtttgtttcttttcacggttctttccacggtcgaacaatgggaagcttgtcagccacgcctaatccaaaataccaggagccatttgcgccgatgctgcctggtttcaaatacggcacgtgcaacgacatagccgcgatcaacaatctagtcaacgagaagacgtgtggggtgattattgaacctattcaaggcgagggcggtgtcaatgtgccaaccgacgactttttaattgcacttgcgaagcggtgtcgcgaggtgggcgctgtcttgatctacgatgagatacaatgtggtctttctcggacgggcactctctgggctcacagtcatttacctaaagaggctcacccagatataattacgagcgccaaggctcttggaaatggtatccccattggcgccgtgataaccaatagccatattagcgaaaagatcaagattggtgatcatggcacgacttttggtggcaaccccatggcctgtcgtgtggctcatcatattgtcgcacgactggcggacgaaaggttacaaaaagaagtcgtcaacaagtcaaaaatattcaaacaaggtttcgaggcactgcggaaatcattcccggatctcgttggtgaaacccggggccgcggtctcatgctcggtgttcagctaacggaggatccgactcccatcatcaaagctgcgagggaaaggggcttgttgatcatcacgtgtggcacaaatacgcttcgttttgtcccgcctttgaacatcagcgaggaagaaattcaagctgggctgaacatcctatcggaagcgatccgatcgaccaggtgataggaagcgacacattaacaccaatgctatgccaagctataatgatttttacggccggacgacagtgtgtcttaccgagttggatgaagtgaacaaaatttcatagagaattgctacgctagcgatagtaccattcagctcctcaagcttgccatatactagaggtctgtgtcagttgtatttgatacagaattctgacgagatcaaacacctaccgcttttgggattcacttcgatctgattggctccgagacccccggaagtcatacttgaccgctccggtgatgccgatgatagaatcggaccgtgtatcctaagcttctaacggttgtcataccattgaggtcgcacgacacacatcgcttgatgaacatacgttgcccagcttgggatccttaccaatgtggatgagacaagagtctgcccgtccaagccgaccacaatgtgatgtaatatcggattgattcgggctgtacctgatttagagcctgtgatttaccaatagatccatttggcaacgagtttattgtcccggaagacagagatatgatttcataccgatcgtaagttacgtaaatctcctgccatagcgccccgcttgttcgaaatgttgtaatctgtatactgctgaagaaggacatgccttcaaaatatctttatctaaatgagtagttgacgggcgtcacttatctgcattcgaacagtcttg

SEQ ID NO: 17478 - DNA, 1467 bp, Muscodor strobelii
  misc_feature: SGI cDNA ID NO. 565838
  misc_feature: Encodes the peptide sequence at SEQ ID NO 17479
atggtgcacttgtccacgatccctgacgcggctagcactagcactctaccggaggtgctgaaaaagttcaatctacagcttagcaacgacgatgacagcttcacaactagcgtttatggctccaagttcgctgctgaggatctgccaaagcacgagatgcccgagggcgaaatgccgaaggaagttgcgtaccgcatgatcaaggatgagctgagcttggatggaaatccaatgttgaatctggcttccttcgttacgacctacatggaagaggaggcggagaaactcatggccgacgcattttccaagaactttatcgactacgaagaatacccgcaatcggcagatatccagaaccgctgcgtatcgatgatcggccgtctatttcatgcccctaacagtggagaagatgatcatgggaatgcaatcggcacttcttgtgtcggttcctccgaggcaattatgctcggtgttctggcgatgaagaagcgctggaagaacaagagaaaggcggaagggaagtcgactgagaaccctaacattgtgatgtcctccgcagtccaggagactgtcaacctcgtggacgagaacacgattggcatttgctgcattcttggcaccacctatacaggagaatatgaagatgtccaggccgtcaatgatttgttggtgaagaagaacatagactgcccgatccacgtcgatgctgcttcgggcgggtttgtcgcaccattcgtggttcccgacttgaaatgggatttcagacttgagaaggtcgtatcgatcaatgtatctggacataagtacggtctcgtataccccggtgttggctgggttgtctggagagctgccgaatatttgcccaaagagctcgtgttcaacatcaactaccttggcgcagaccagtcatcgttcacattgaacttctctaaaggcgctagccaagttatcgggcaatactaccaactaattcgacttggaaagaagggttaccgcgccatcatgtcgaacttgacgcgaaccgccgattatctttccgacgctcttgatgcactaggtttcgtcatcatgagcaagaaatcaggtgaaggcttgccgctcgttgctttccggttgcccgaagataaagatagacactacgatgaatttgcgctggcacacaagctacgcgctcgtagctgggttgtgcctgcgtataccatggcacctaagacggataacctgaagatgttacgtgttgtcgtgcgtgaagactttacgaagaatcgctgtgatgctttgatatgcgatatcaagctttgccagggcttgcttgaggagatggacaaggagactattcagagacaacagcagttcatccgggatcacactatgcatagcggacaggcgaagcataatcatcctaagtacaggaatgagaaacactccatccaggggaagcacggcaagacacatgctatctgctag

SEQ ID NO: 17479 - protein, 488 aa, Muscodor strobelii
  misc_feature: SGI Peptide ID NO. 565838
  misc_feature (54)..(373): Pfam Id: PF00282 Pfam Desc: Pyridoxal-dependent decarboxylase conserved domain
  misc_feature (194)..(373): Pfam Id: PF00282 Pfam Desc: Pyridoxal-dependent decarboxylase conserved domain
  misc_feature (54)..(188): Pfam Id: PF00282 Pfam Desc: Pyridoxal-dependent decarboxylase conserved domain
  misc_feature (1)..(488): NCBI GI: 164424588 Blast Desc: glutamate decarboxylase [Neurospora crassa OR74A] gi|157070576|gb|EAA34408.2| glutamate decarboxylase [Neurospora crassa OR74A]
  misc_feature (1)..(470): NCBI GI: 18375993 Blast Desc: glutamate decarboxylase [Neurospora crassa]
  misc_feature (1)..(488): NCBI GI: 256730764 Blast Desc: [Nectria haematococca mpVI 77-13-4]
  misc_feature (25)..(488): NCBI GI: 46109380 Blast Desc: FG01572.1 [Gibberella zeae PH-1]
  misc_feature (1)..(488): NCBI GI: 119196893 Blast Desc: CIMG_02821 [Coccidioides immitis RS]
  misc_feature (1)..(488): NCBI GI: 240110754 Blast Desc: glutamate decarboxylase, [Coccidioides posadasii C735 delta SOWgp]
  misc_feature (1)..(488): NCBI GI: 145240697 Blast Desc: An08g08840 [Aspergillus niger] gi|134077519|emb|CAK96663.1| protein product [Aspergillus niger]
  misc_feature (1)..(488): NCBI GI: 70992753 Blast Desc: glutamate decarboxylase [Aspergillus fumigatus Af293] gi|66848858|gb|EAL89187.1| glutamate decarboxylase [Aspergillus fumigatus Af293] gi|159130320|gb|EDP55433.1| glutamate fumigatus
  misc_feature (1)..(488): NCBI GI: 212275962 Blast Desc: LOC100192055 [Zea mays] gi|194690536|gb|ACF79352.1| [Zea mays]
  misc_feature (1)..(488): NCBI GI: 226285654 Blast Desc: glutamate decarboxylase [Paracoccidioides brasiliensis Pb01]
  misc_feature (37)..(442): SWISSPROT Homolog: EC 4.1.1.15 Glutamate decarboxylase
MVHLSTIPDAASTSTLPEVLKKFNLQLSNDDDSFTTSVYGSKFAAEDLPKHEMPEGEMPKEVAYRMIKDELSLDGNPMLNLASFVTTYMEEEAEKLMADAFSKNFIDYEEYPQSADIQNRCVSMIGRLFHAPNSGEDDHGNAIGTSCVGSSEAIMLGVLAMKKRWKNKRKAEGKSTENPNIVMSSAVQETVNLVDENTIGICCILGTTYTGEYEDVQAVNDLLVKKNIDCPIHVDAASGGFVAPFVVPDLKWDFRLEKVVSINVSGHKYGLVYPGVGWVVWRAAEYLPKELVFNINYLGADQSSFTLNFSKGASQVIGQYYQLIRLGKKGYRAIMSNLTRTADYLSDALDALGFVIMSKKSGEGLPLVAFRLPEDKDRHYDEFALAHKLRARSWVVPAYTMAPKTDNLKMLRVVVREDFTKNRCDALICDIKLCQGLLEEMDKETIQRQQQFIRDHTMHSGQAKHNHPKYRNEKHSIQGKHGKTHAIC

SEQ ID NO: 17480 - DNA, 3225 bp, Muscodor strobelii
  misc_feature: SGI EST ID NO. CUFF.41175.0
  misc_feature: Variant of the nucleotide sequence at SEQ ID NO 17478
tagcactccgagctgagcgagaccaatacgtgcggatactaaagtaatccccaagaacaggtccattcacatacagtaccaagctttcttgccaatgctacgtgggctgccgatcacaacgaatgcccctcatacccctccatcttccacattccatctctcccttccgtccagaaataggtcgttaaacgcttggcttacgaaccggtttgctgagcaacaccgaattgaatgatccacaatgtcatgtttcccattactcaagttcggaaataattgagtgcaagcttctatcaccaattacggctggataaagcgaggaaacctagccaactgtccactggtcatcacaccgcccgaaatctatttctgcatatcctgaaactggatggcaccttgtttgtggtttatctcccttgttcatgtgggcttgggaggcagcccagatcaaaatcagcgcaagaaatagaataaaaactggcctcttacatcttctgttgatctgacatgccaacacgcatactgtagctactaggtaccccgcttacccacatcagaatgccatgcaaagtaacgagctcttccataggagccactttccatgcgttcctatgccctgctactcgctactgcaacgtgggttagaggattgggtggtgatttactttcccatacattcactgtgctcccattccaggcgcgcaatgctgttcctgacgtataatagcccccccatggcccccctttccttctctgtggtgcttagaccgcttcgtccgtgcccctcactctcctgagcgctcggtgttttgtgatttcgtttcctcttggactctcgcgtctaccgtcaacttccctcaactatcccagtgccactcatattatagccaaaatggtgcacttgtccacgatccctgacgcggctagcactagcactctaccggaggtgctgaaaaagttcaatctacagcttagcaacgacgatgacagcttcacaactagcgtttatggctccaagttcgctgctgaggatctgccaaagcacgagatgcccgagggcgaaatgccgaaggaagttgcgtaccgcatgatcaaggatgagctgagcttggatggaaatccaatgttgaatctggcttccttcgttacgacctacatggaagaggaggcggagaaactcatggccgacgcattttccaagaactttatcgactacgaagaatacccgcaatcggcagatatccagaaccgctgcgtatcgatgatcggccgtctatttcatgcccctaacagtggagaagatgatcatgggaatgcaatcggcacttcttgtgtcggttcctccgaggcaattatgctcggtgttctggcgatgaagaagcgctggaagaacaagagaaaggcggaagggaagtcgactgagaaccctaacattgtgatgtcctccgcagtccaggtctgttgggagaaggccacgcggtattttcgaagtcgacgagaagcttgtctactgcacaaacgaccgttatgtcatcgatcctgaggagactgtcaacctcgtggacgagaacacgattggcatttgctgcattcttggcaccacctatacaggagaatatgaagatgtccaggccgtcaatgatttgttggtgaagaagaacatagactgcccgatccacgtcgatgctgcttcgggcgggtttgtcgcaccattcgtggttcccgacttgaaatgggatttcagacttgagaaggtcgtatcgatcaatgtatctggacataagtacggtctcgtataccccggtgttggctgggttgtctggagagctgccgaatatttgcccaaagagctcgtgttcaacatcaactaccttggcgcagaccagtcatcgttcacattgaacttctctaaaggcgctagccaagttatcgggcaatactaccaactaattcgacttggaaagaagggttaccgcgccatcatgtcgaacttgacgcgaaccgccgattatctttccgacgctcttgatgcactaggtttcgtcatcatgagcaagaaatcaggtgaaggcttgccgctcgttgctttccggttgcccgaagataaagatagacactacgatgaatttgcgctggcacacaagctacgcgctcgtagctgggttgtgcctgcgtataccatggcacctaagacggataacctgaagatgttacgtgttgtcgtgcgtgaagactttacgaagaatcgctgtgatgctttgatatgcgatatcaagctttgccagggcttgcttgaggagatggacaaggagactattcagagacaacagcagttcatccgggatcacactatgcatagcggacaggcgaagcataatcatcctaagtacaggaatgagaaacactccatccaggggaagcacggcaagacacatgctatctgctaggtaaaacatgtgggaactagtagtcttggttgatcggtgcttttttgttctcgtacagcgatattttttggtggagagcgctacgtacatatggctatctataagattatggcaagccagttaggtaggagcgggctttgttctgcgctatctgatagttacagtagacgagaacacattgaagcatgctcaagatgacatgcaatctttcctgtggcaagtgcatgtccacggaccgaatttaataacccacggcccaacctcacaattggttaattttccttttctttcttcacgaagtctgttataagtcggctatcttcatttaccaacatgctttatcctaccgttttccttactactatcctatagtgttcaccaacttattctgagatcactcgtcagaagatagctaattcgatggactgccgccatcagaagggcatagtgtgtgggctgtttttttagtcaactggagcatcgccgattcaaactgtatattctgaattgtgtgacacaaactgccgaaaatgtattgtcactaactgtttgcgagaggagggttggatgcgcacgcatttcgaataaggaccaacacactataaatattaaatagagcgaccagtataaggaagaaccaaaacagtctttattccttttggctattttaaattctatcgaaggcagctgtagcgtatttggttgactcagtcattccttatctatgacatgcttttgtgcgtgagtcgaacgtgtcaacgccaacacgaagggttca

SEQ ID NO: 17481 - DNA, 2592 bp, Muscodor strobelii
  misc_feature: SGI cDNA ID NO. 565839
  misc_feature: Encodes the peptide sequence at SEQ ID NO 17482
atggatccttccaacaaatcgaacaagctggaagatgatgatccaacagaacagaatgctggagagccacacacatcagatgggactcctcttgccactactccagggatcgtgccaactagggctggaatgaagccgagtctcgggcgactgaactcaggaaacgttgcaaacggcccctgggaagtcaagatcacccttctcccatctgcgtcttggaactcaccgccggagaagtatagtaagcagtatcaaaggcttaaatcgagaaagctaattgttctcacctgtatttggggacacggcagtgtcacaatcaggaaccatatcagcatcacttttgccgacgctttgagaggtcgtgattggatgccgttacagaccctaaggcatccccagacgttgagcattcatctttctacactatcggagagtctgcgtaccgaaaaccaggatataaatttccttgcagctcactgtctattggagaacacaaagaagcagaaactttatctctatatcgcaccaacggctgggacgctcagctgggaatatatcagaagtctccaatctgggcttcctagcgcgcgtcttggcatttctcgaattgcggacgaagtgctgtgggagtcagacgcagaagagccgctaagtatgactagggagaatgtcgatctggatatcaacccgcggtctatcccagaattaccaccgaaacccattgctcatctatttctactggggatgaacgttcccaagagcgaaacgttctctacaagacccgcggtgaaggctaagaatggcagatatctttgcctcgactcgaaatgtgccagatcacgtatacccttcaagacaaaagaggttttctttgaacacatgcagggacgtcacaatgtggcgatcgcggagagagattcgccaacagaaccaccaacttccgtacacaaccaatcaaacgtgactggggtggatgtagaatctcagggttctagcgtggtttcatcggttggtgatagcaagtccgtccatggcacctggccagttccctcaagagcactcccaacagccgacgagacccgaactcgtcagaccaatctcttcaattcgataaaagacggagctaggagacacagtcatggtgatattcgttcttcagactcgtggcaggacaaggctattttgggagcaccaaagggggtcacaaacctcactaacgacagtattgatcgactcgatggagaaagcgagctcacgctgtattccacattagctatcagaactagaccaggtcacgaaagtcccgcagacactaccggcgcgggctcggtaccgaaccacgagcgagcggacgatggttcaggtcaaggacactctctgaaaagaaaaaaacgcagcggaagtataggtgatggtcagaagaatgatggtggtgacagcgatcacgacgatgacataccgaaattgggtatgaacgacctaagctcggacgaaaatcggtcgcttgtctccttcgcctggatcctaacaatttcaagagaacatctgtatcgcacgcacatgctgcctccacaccaatgtcctaggtgcttcgaatgtttcgaggaggaaacggacttcgctaagcacctacaaccacccggtagatgtgattccacaaagaaaaagccagaaggagtcacaataaagcaagaaaagctacttcgccagcgaaagtcgaaaatgactgagaaagaaagatggattgacatgtacaagatactcttccccgatgagaatgaagatgagataccttctccatggtacgaaaatccaccagatcaagatgaatcttcaatgaacctatctcttcatgagaattatcgagagtttctatcaaagccactacctcgtgaatgctgtaagggcatacaagagaggctcgacagtgtaattcgtggcaatcatgatgatctcaataatatcccacccgctagtcgcatcagaattgttgaaatgcttacgaaagctgtcgtcgaatcgcagcgtgaaattttcgaatactacgtccagagccgcccagataacgatactgaagcccagagacagaatggggatacgttcgatctcaagaaagtcttgggtccagatgagaccacaacgtcaaatcctgaactgattgttgatcaagcagatggtaagacgcctattcgcgatccaagccccatccaaagcctggatggtacggtgaacacagtcaaccgagcagaggccaccgaaaacctctatgaaaacaatgacagaacagctccgagcccgcccaatatgttacagcgttcagcaacgatgccggcggatttctcgcccagtcagttcgacttagatacaaatggtagcatgttgctggacctcgaggatcaatcaaacttcgactataacttcgacaatatcgacttcacagagtcggatgcctatgacttgtttgctgacgagggcgaaatcttctttatcccttatgaagcggacccaggcggggcacctttgtcggggccgatgcgcaacaaccacgtagatgatgatagagacgtgggcactgatgtagatatatgctga

SEQ ID NO: 17482 - protein, 863 aa, Muscodor strobelii
  misc_feature: SGI Peptide ID NO. 565839
  misc_feature (437)..(700): NCBI GI: 116194256 Blast Desc: CHGG_03726 [Chaetomium globosum CBS 148.51] gi|88179639|gb|EAQ87107.1| CHGG_03726 [Chaetomium globosum CBS 148.51]
  misc_feature (511)..(681): NCBI GI: 171683689 Blast Desc: protein product [Podospora anserina] gi|170941804|emb|CAP67458.1| protein product [Podospora anserina]
  misc_feature (500)..(638): NCBI GI: 46109250 Blast Desc: FG01507.1 [Gibberella zeae PH-1]
  misc_feature (434)..(631): NCBI GI: 256724972 Blast Desc: [Nectria haematococca mpVI 77-13-4]
  misc_feature (513)..(677): NCBI GI: 116205235 Blast Desc: CHGG_10501 [Chaetomium globosum CBS 148.51] gi|88176629|gb|EAQ84097.1| CHGG_10501 [Chaetomium globosum CBS 148.51]
  misc_feature (513)..(679): NCBI GI: 171689708 Blast Desc: protein product [Podospora anserina] gi|170944816|emb|CAP70928.1| protein product [Podospora anserina]
  misc_feature (513)..(665): NCBI GI: 116203989 Blast Desc: CHGG_09878 [Chaetomium globosum CBS 148.51] gi|88176006|gb|EAQ83474.1| CHGG_09878 [Chaetomium globosum CBS 148.51]
  misc_feature (58)..(187): NCBI GI: 261360790 Blast Desc: conserved [Verticillium albo-atrum VaMs.102]
  misc_feature (25)..(263): NCBI GI: 39978035 Blast Desc: MGG_06902 [Magnaporthe grisea 70-15] gi|145013530|gb|EDJ98171.1| MGG_06902 [Magnaporthe grisea 70-15]
  misc_feature (513)..(685): NCBI GI: 145614532 Blast Desc: MGG_04644 [Magnaporthe grisea 70-15] gi|145021440|gb|EDK05569.1| MGG_04644 [Magnaporthe grisea 70-15]
MDPSNKSNKLEDDDPTEQNAGEPHTSDGTPLATTPGIVPTRAGMKPSLGRLNSGNVANGPWEVKITLLPSASWNSPPEKYSKQYQRLKSRKLIVLTCIWGHGSVTIRNHISITFADALRGRDWMPLQTLRHPQTLSIHLSTLSESLRTENQDINFLAAHCLLENTKKQKLYLYIAPTAGTLSWEYIRSLQSGLPSARLGISRIADEVLWESDAEEPLSMTRENVDLDINPRSIPELPPKPIAHLFLLGMNVPKSETFSTRPAVKAKNGRYLCLDSKCARSRIPFKTKEVFFEHMQGRHNVAIAERDSPTEPPTSVHNQSNVTGVDVESQGSSVVSSVGDSKSVHGTWPVPSRALPTADETRTRQTNLFNSIKDGARRHSHGDIRSSDSWQDKAILGAPKGVTNLTNDSIDRLDGESELTLYSTLAIRTRPGHESPADTTGAGSVPNHERADDGSGQGHSLKRKKRSGSIGDGQKNDGGDSDHDDDIPKLGMNDLSSDENRSLVSFAWILTISREHLYRTHMLPPHQCPRCFECFEEETDFAKHLQPPGRCDSTKKKPEGVTIKQEKLLRQRKSKMTEKERWIDMYKILFPDENEDEIPSPWYENPPDQDESSMNLSLHENYREFLSKPLPRECCKGIQERLDSVIRGNHDDLNNIPPASRIRIVEMLTKAVVESQREIFEYYVQSRPDNDTEAQRQNGDTFDLKKVLGPDETTTSNPELIVDQADGKTPIRDPSPIQSLDGTVNTVNRAEATENLYENNDRTAPSPPNMLQRSATMPADFSPSQFDLDTNGSMLLDLEDQSNFDYNFDNIDFTESDAYDLFADEGEIFFIPYEADPGGAPLSGPMRNNHVDDDRDVGTDVDIC

SEQ ID NO: 17483 - DNA, 2976 bp, Muscodor strobelii
  misc_feature: SGI EST ID NO. CUFF.41082.1
  misc_feature: Variant of the nucleotide sequence at SEQ ID NO 17481
cggggaccggcgcacgactataaaagcagcaagactagccgatctatctgcaatcaatttaggtgtctccaaatgtccaatagtcgaattataattactgccctctatctatgcagacattagtccatacatcaaacagacatggatccttccaacaaatcgaacaagctggaagatgatgatccaacagaacagaatgctggagagccacacacatcagatgggactcctcttgccactactccagggatcgtgccaactagggctggaatgaagccgagtctcgggcgactgaactcaggaaacgttgcaaacggcccctgggaagtcaagatcacccttctcccatctgcgtcttggaactcaccgccggagaagtatagtaagcagtatcaaaggcttaaatcgagaaagctaattgttctcacctgtatttggggacacggcagtgtcacaatcaggaaccatatcagcatcacttttgccgacgctttgagaggtcgtgattggatgccgttacagaccctaaggcatccccagacgttgagcattcatctttctacactatcggagagtctgcgtaccgaaaaccaggatataaatttccttgcagctcactgtctattggagaacacaaagaagcagaaactttatctctatatcgcaccaacggctgggacgctcagctgggaatatatcagaagtctccaatctgggcttcctagcgcgcgtcttggcatttctcgaattgcggacgaagtgctgtgggagtcagacgcagaagagccgctaagtatgactagggagaatgtcgatctggatatcaacccgcggtctatcccagaattaccaccgaaacccattgctcatctatttctactggggatgaacgttcccaagagcgaaacgttctctacaagacccgcggtgaaggctaagaatggcagatatctttgcctcgactcgaaatgtgccagatcacgtatacccttcaagacaaaagaggttttctttgaacacatgcagggacgtcacaatgtggcgatcgcggagagagattcgccaacagaaccaccaacttccgtacacaaccaatcaaacgtgactggggtggatgtagaatctcagggttctagcgtggtttcatcggttggtgatagcaagtccgtccatggcacctggccagttccctcaagagcactcccaacagccgacgagacccgaactcgtcagaccaatctcttcaattcgataaaagacggagctaggagacacagtcatggtgatattcgttcttcagactcgtggcaggacaaggctattttgggagcaccaaagggggtcacaaacctcactaacgacagtattgatcgactcgatggagaaagcgagctcacgctgtattccacattagctatcagaactagaccaggtcacgaaagtcccgcagacactaccggcgcgggctcggtaccgaaccacgagcgagcggacgatggttcaggtcaaggacactctctgaaaagaaaaaaacgcagcggaagtataggtgatggtcagaagaatgatggtggtgacagcgatcacgacgatgacataccgaaattgggtatgaacgacctaagctcggacgaaaatcggtcgcttgtctccttcgcctgtccgttctatcagcggtatcacaaacaagatcccagtaactacagaaattgcttgaagtggagttggaaaagagtttccagggtgaaagaacatctgtatcgcacgcacatgctgcctccacaccaatgtcctaggtgcttcgaatgtttcgaggaggaaacggacttcgctaagcacctacaaccacccggtagatgtgattccacaaagaaaaagccagaaggagtcacaataaagcaagaaaagctacttcgccagcgaaagtcgaaaatgactgagaaagaaagatggattgacatgtacaagatactcttccccgatgagaatgaagatgagataccttctccatggtacgaaaatccaccagatcaagatgaatcttcaatgaacctatctcttcatgagaattatcgagagtttctatcaaagccactacctcgtgaatgctgtaagggcatacaagagaggctcgacagtgtaattcgtggcaatcatgatgatctcaataatatcccacccgctagtcgcatcagaattgttgaaatgcttacgaaagctgtcgtcgaatcgcagcgtgaaattttcgaatactacgtccagagccgcccagataacgatactgaagcccagagacagaatggggatacgttcgatctcaagaaagtcttgggtccagatgagaccacaacgtcaaatcctgaactgattgttgatcaagcagatggtaagacgcctattcgcgatccaagccccatccaaagcctggatggtacggtgaacacagtcaaccgagcagaggccaccgaaaacctctatgaaaacaatgacagaactccgagcccgcccaatatgttacagcgttcagcaacgatgccggcggatttctcgcccagtcagttcgacttagatacaaatggtagcatgttgctggacctcgaggatcaatcaaacttcgactataacttcgacaatatcgacttcacagagtcggatgcctatgacttgtttgctgacgagggcgaaatcttctttatcccttatgaagcggacccaggcggggcacctttgtcggggccgatgcgcaacaaccacgtagatgatgatagagacgtgggcactgatgtagatatatgctgattacgtgcagatggtgggcacatgccacaaggctgccagtgccaagtcacaacggaccccttggatcgtgtatcgccaaggcacttatgaagtagggggaaagatgtaaatgaaagagtacacaaactttcaatcgcaggccgaatatgcagtcgaattgatgaatttacagtcgct

SEQ ID NO: 17484 - DNA, 1011 bp, Muscodor strobelii
  misc_feature: SGI cDNA ID NO. 565840
  misc_feature: Reduced expression when VOC is produced
  misc_feature: Encodes the peptide sequence at SEQ ID NO 17485
atgatccatttagagggagctctcgagcctgatctgttatttgcacttgcggcgaaaaatagcatcacgctgcccacattgacggatgctgcctttacttccattcaaaccctgctgaagcggtatgagagttttgcaaatctggacgattttcttgggtactattatatcggcatgtcagtcctactagaagaatctgactttgaggatctggcatatgcatatttccgaaaggctgccagccagggtgttcggcatgctgaggttttcttcgatccacaagcgcatttagttcgaggagtggctttcggaacagtcgtgaaagggtttaaagcagcacaggcaagagcagaagctgatttctcgatgagcaccgagctgattatgtgcttgcttaaacatttgccgttggccagtgcccttaagactttcgaggaggcgaaggcggcggggtacttttcggacggaacatttgctgggatcggtatggattcctctgaagtaccgtttccgccagccatgtggatagaactatttgatgctgcaaaatctgcaggtatacggagaacgatacactctggcgaggaggggccggctagcaatgtctcgcaagcaatggacttacttgatgcacagcgtattgaccacggaataagggcgatcatagacggtgatgaaccgctaatatctcggttggcaaagcagaagacacttttgactatgtgtcccttgtcaaacgtcaagttaaactgtattgcctcagtcgaggaattcccactgcggaaattactagaagccggcatcgccttcagtatcaacagcgatgatccagcttattttgggggctatattctggaaaactactgcgcgctacaagatgcttttgatctgaacattgcggaatgggcaggtattgcaaaaggagccgtcatgggaagctggtgctcctcgaatagaaagacacaactactacaagagatcgagactgtcgtccgtacttggtctccatag

SEQ ID NO: 17485 - protein, 336 aa, Muscodor strobelii
  misc_feature: SGI Peptide ID NO. 565840
  misc_feature (2)..(326): Pfam Id: PF00962 Pfam Desc: Adenosine/AMP deaminase
  misc_feature (2)..(331): NCBI GI: 154320275 Blast Desc: BC1G_02118 [Botryotinia fuckeliana B05.10] gi|150854857|gb|EDN30049.1| BC1G_02118 [Botryotinia fuckeliana B05.10]
  misc_feature (2)..(334): NCBI GI: 156065619 Blast Desc: SS1G_00820 [Sclerotinia sclerotiorum 1980] gi|154691679|gb|EDN91417.1| SS1G_00820 [Sclerotinia sclerotiorum 1980]
  misc_feature (2)..(335): NCBI GI: 19111863 Blast Desc: adenine deaminase Dea2 [Schizosaccharomyces pombe] gi|74638718|sp|Q9P6I7.1|ADA_SCHPO RecName: Full=Adenosine deaminase; AltName: Full=Adenosine aminohydrolase adenine Dea2
  misc_feature (2)..(332): NCBI GI: 212528902 Blast Desc: adenosine deaminase [Penicillium marneffei ATCC 18224] gi|210074006|gb|EEA28093.1| adenosine deaminase [Penicillium marneffei ATCC 18224]
  misc_feature (2)..(335): NCBI GI: 255941188 Blast Desc: Pc16g10530 [Penicillium chrysogenum Wisconsin 54-1255] gi|211585986|emb|CAP93723.1| Pc16g10530 [Penicillium chrysogenum Wisconsin 54-1255]
  misc_feature (2)..(332): NCBI GI: 242765191 Blast Desc: adenosine deaminase [Talaromyces stipitatus ATCC 10500] gi|218724120|gb|EED23537.1| adenosine deaminase [Talaromyces stipitatus ATCC 10500]
  misc_feature (2)..(332): NCBI GI: 242765187 Blast Desc: adenosine deaminase [Talaromyces stipitatus ATCC 10500] gi|218724119|gb|EED23536.1| adenosine deaminase [Talaromyces stipitatus ATCC 10500]
  misc_feature (2)..(335): NCBI GI: 189205585 Blast Desc: adenosine deaminase [Pyrenophora tritici-repentis Pt-1C-BFP] gi|187975220|gb|EDU41846.1| adenosine deaminase [Pyrenophora tritici-repentis Pt-1C-BFP]
  misc_feature (2)..(332): NCBI GI: 119480769 Blast Desc: adenosine deaminase [Neosartorya fischeri NRRL 181] gi|119408567|gb|EAW18516.1| adenosine deaminase [Neosartorya fischeri NRRL 181]
  misc_feature (2)..(331): NCBI GI: 145246602 Blast Desc: An12g04800 [Aspergillus niger] gi|134080268|emb|CAK97171.1| protein product [Aspergillus niger]
  misc_feature (2)..(335): SWISSPROT Homolog: EC 3.5.4.4 Adenosine deaminase
  misc_feature: Useful for introducing or modulating the production of volatile compounds
MIHLEGALEPDLLFALAAKNSITLPTLTDAAFTSIQTLLKRYESFANLDDFLGYYYIGMSVLLEESDFEDLAYAYFRKAASQGVRHAEVFFDPQAHLVRGVAFGTVVKGFKAAQARAEADFSMSTELIMCLLKHLPLASALKTFEEAKAAGYFSDGTFAGIGMDSSEVPFPPAMWIELFDAAKSAGIRRTIHSGEEGPASNVSQAMDLLDAQRIDHGIRAIIDGDEPLISRLAKQKTLLTMCPLSNVKLNCIASVEEFPLRKLLEAGIAFSINSDDPAYFGGYILENYCALQDAFDLNIAEWAGIAKGAVMGSWCSSNRKTQLLQEIETVVRTWSP

SEQ ID NO: 17486 - DNA, 2466 bp, Muscodor strobelii
  misc_feature: SGI cDNA ID NO. 565841
  misc_feature: Reduced expression when VOC is produced
  misc_feature: Encodes the peptide sequence at SEQ ID NO 17487
atggcgactccgtcccacaatctgtttcctcgctccccgacacgatcgtacgactcttcttccgtctcgtccgcaacttcaccgcggccgcaggttcattaccttagtagtctaatggggcctagtgctaggtcaaatcctacccacacgcctcaaccgatagggattccccccttgccgccagttagccagtcatctttccagccatatactccacagacggcaacgtcgatgatgggacgagagtcactgccatctaacgagtcgatggcgagcaccccaggacttcagagcagccagttgccagcgaatgttcaagcgcaaaagcgagcatatcgacaacggagaaaagaccctagttgcgatgcttgtcgggaaaggaaggtcaaatgtgatgcgacggagacaacaagttgctctgagtgctcaagtcgaaatgtcaagtgtcagtttactaaggaaacgaaccgtcgaatgtcgtcgatcaagcaggtacaagatttagagaagcaagtggaacgagtgcgaagggaaaacagccacctcaagcgcagcttggctgatcgcgtaggcgtgggccacatggacgtcgacagcataaaccccgagcagggtttacttcaactccccgagattcactccgagccgcggaagaggaagcgagtgactccgatgtacgatcattcacgacttcgagatgacttccgaactgcatctaagggtctgttccgagctcctgcaccttatcgaccgcagtctagtgcgccaatgtttgaaccgatgcgtatatcgctaccggcttggctaacgacagataatctgcttgattcatattaccggaatgttcacatgacggcgcctatcgtatactacccggagtttcgaaggaaggtggaggagctgtatcagcataacgatatccgtcggttgcctccgtcgtggtcggccttgttctttgccgtgctcgcactagggcatttattcagcaccgaccccgttcccgatcgatctgtgcaggcgggcgaattcatggagacttcgaagagtttcctcgatccatgggctaatgattttgtgctggatgacgtgcggaccttttttctcatatcgttggctctgaacgagatgaatttaaagtctgcagcttggatttggctgggaagggcagtgcgcagcgcacaagacctcgaactgcatttagaagtgggactgcgatctagagtagaagctgatatgcgacggcgcgtttggtgggccatttacgtactggacagaacgttagcaacagatctctgccggccttttgcaatcgacgacgacgactgcgatgtcgcgctgccagagcacatcgacgaccaccttctcgatccagacatgccaccacgggctcctccgagcacaagacccctaacacagttccttcatccaataatcaacgttgtcagatcattcacagcgttgaggaaggcgttggcagcgcccgtgctggagcgatcgcggctccaaatgttcgagagctacttcggttcttgtcagcccttctttcccgcaggcctcgagcccgaaaaccctgagacaatttcccctgcctacataatgccttacgctcacttactaaatgcccgcctccaattacatcgacatattttggcaccattatgccctccggatgctcggggccacgctatcgagcaatgcctctacatatcactcgaaacagctcgattaatggagcgttccagcggatcgcttgctgattgcgccacaagcctctttgttacccatatcttccgatcaactctgttcttactcctatgtgggtatatcaagcccgccataacttgtctccgggttctcaagtcgattcacgaacgaagagacatcaccttcgcttgcgggaggtatatttctttgttcgtgagattcttaacaagcaaacagcaagaggctctgagccaatttccgcggccacagccaataggccaattcccgcttcagactccacacattgacgtcgaagccgtgcagaactctctggtgagagacgaagagctgttgctccatgtcagcaccgatcttcaggctaatgtagagactgcctggctttgggtgggaactgatcccaactcgattccacccttaagccaagcagccaaagggctcgcatcggcggacaaacggactgggctcgctagcgaggaacgacatggttggggcggatgggataatctcatggacgctgttcagaatttgccactagcagcaacgtccaacgcgatgtcaaactacaggtcagcaccgcctcaaccattggcacccagtttgcctcctatcaaaatggaaccggcgcccatcatacctcgaagtgccccgacagaccccgacagtaacaagaatagcccagcccctggcgcgagtgctggcagcagaaactctgagagaatcagcatcgcaaacatcatttaa

SEQ ID NO: 17487 - protein, 821 aa, Muscodor strobelii
  misc_feature: SGI Peptide ID NO. 565841
  misc_feature (119)..(158): Pfam Id: PF00172 Pfam Desc: Fungal Zn(2)-Cys(6) binuclear cluster domain
  misc_feature (359)..(453): Pfam Id: PF04082 Pfam Desc: Fungal specific transcription factor domain
  misc_feature (62)..(821): NCBI GI: 261357258 Blast Desc: Zfr1 [Verticillium albo-atrum VaMs.102]
  misc_feature (1)..(821): NCBI GI: 46109364 Blast Desc: FG01564.1 [Gibberella zeae PH-1]
  misc_feature (1)..(821): NCBI GI: 39968569 Blast Desc: MGG_02377 [Magnaporthe grisea 70-15] gi|145014036|gb|EDJ98677.1| MGG_02377 [Magnaporthe grisea 70-15]
  misc_feature (1)..(751): NCBI GI: 116205137 Blast Desc: CHGG_10452 [Chaetomium globosum CBS 148.51] gi|88176580|gb|EAQ84048.1| CHGG_10452 [Chaetomium globosum CBS 148.51]
  misc_feature (17)..(720): NCBI GI: 171689630 Blast Desc: protein product [Podospora anserina] gi|170944777|emb|CAP70888.1| protein product [Podospora anserina]
  misc_feature (64)..(754): NCBI GI: 7899338 Blast Desc: [Neurospora crassa]
  misc_feature (78)..(754): NCBI GI: 164424584 Blast Desc: NCU06799 [Neurospora crassa OR74A] gi|157070574|gb|EAA34404.2| conserved [Neurospora crassa OR74A]
  misc_feature (1)..(597): NCBI GI: 40288409 Blast Desc: Zfr1 [Gibberella moniliformis]
  misc_feature (1)..(821): NCBI GI: 154320271 Blast Desc: BC1G_02116 [Botryotinia fuckeliana B05.10] gi|150854855|gb|EDN30047.1| BC1G_02116 [Botryotinia fuckeliana B05.10]
  misc_feature (105)..(821): NCBI GI: 156065611 Blast Desc: SS1G_00816 [Sclerotinia sclerotiorum 1980] gi|154691675|gb|EDN91413.1| SS1G_00816 [Sclerotinia sclerotiorum 1980]
  misc_feature: Useful for introducing or modulating the production of volatile compounds
MATPSHNLFPRSPTRSYDSSSVSSATSPRPQVHYLSSLMGPSARSNPTHTPQPIGIPPLPPVSQSSFQPYTPQTATSMMGRESLPSNESMASTPGLQSSQLPANVQAQKRAYRQRRKDPSCDACRERKVKCDATETTSCSECSSRNVKCQFTKETNRRMSSIKQVQDLEKQVERVRRENSHLKRSLADRVGVGHMDVDSINPEQGLLQLPEIHSEPRKRKRVTPMYDHSRLRDDFRTASKGLFRAPAPYRPQSSAPMFEPMRISLPAWLTTDNLLDSYYRNVHMTAPIVYYPEFRRKVEELYQHNDIRRLPPSWSALFFAVLALGHLFSTDPVPDRSVQAGEFMETSKSFLDPWANDFVLDDVRTFFLISLALNEMNLKSAAWIWLGRAVRSAQDLELHLEVGLRSRVEADMRRRVWWAIYVLDRTLATDLCRPFAIDDDDCDVALPEHIDDHLLDPDMPPRAPPSTRPLTQFLHPIINVVRSFTALRKALAAPVLERSRLQMFESYFGSCQPFFPAGLEPENPETISPAYIMPYAHLLNARLQLHRHILAPLCPPDARGHAIEQCLYISLETARLMERSSGSLADCATSLFVTHIFRSTLFLLLCGYIKPAITCLRVLKSIHERRDITFACGRYISLFVRFLTSKQQEALSQFPRPQPIGQFPLQTPHIDVEAVQNSLVRDEELLLHVSTDLQANVETAWLWVGTDPNSIPPLSQAAKGLASADKRTGLASEERHGWGGWDNLMDAVQNLPLAATSNAMSNYRSAPPQPLAPSLPPIKMEPAPIIPRSAPTDPDSNKNSPAPGASAGSRNSERISIANII

SEQ ID NO: 17488 - DNA, 8899 bp, Muscodor strobelii
  misc_feature: SGI EST ID NO. CUFF.41088.0
  misc_feature: Variant of the nucleotide sequence at SEQ ID NO 17486
gtataatgtacactatgtatattgtagcggttgaaggattcacccctccagtttattataattccgatttctggtctggttcacggatgttccgacagtgcaaatgccaacctctaagttctgtgtactttaatttgtatggagaccatcaacatacagaacacagtcaacttcaaaggtcacgctacccacttcccgtcttctatcctctgtagtattcatacctgctcttttctctcctctccttcgacgaattcgtctgtcgtggtgacgacgaccgtccgtcataatttgatgacctttttcttgtcgtacatatcccgagtaaaactttgcccgtgatgcgctcttagataatctcaacccttccttacaacagcttttggatatactcgacgactgcttgaagaacgaactcatccggatactgaagatcgaattagcatttcaactcttttactctcattaacttatctagtcatccacttgctaagcatccctgggacgacaagcttggttgtgaccatcaaggaacgcggcagtgaatacgagagcagactaggtacagcggtattgcagtagcacaacactgctgcaagactgcgaagcgctggttatagaggtttcttggagtgaaacttgagagacgtttgcctgaattcgactctggtggcatctggtacgagggcagcctcaacccctcgctgcagatctaattgcttcgtccatgcccagcccatccccaatatattcgccgaaaactagctcggctcgaacaagttattgcacaactcactgctcgcatcgattcttttgttcgcctgtatgcttgggctactgagtcgagaattctcagcatttgacttagctgggaagccacaggaggttgagcgacatcagcttgccgggccctggggcgtcgaatcgtcaccgacgatggcgactccgtcccacaatctgtttcctcgctccccgacacgatcgtacgactcttcttccgtctcgtccgcaacttcaccgcggccgcaggttcattaccttagtagtctaatggggcctagtgctaggtcaaatcctacccacacgcctcaaccgatagggattccccccttgccgccagttagccagtcatctttccagccatatactccacagacggcaacgtcgatgatgggacgagagtcactgccatctaacgagtcgatggcgagcaccccaggacttcagagcagccagttgccagcgaatgttcaagcgcaaaagcgagcatatcgacaacggagaaaagaccctagttgcgatgcttgtcgggaaaggaaggtcaaatgtgatgcgacggagacaacaagttgctctgagtgctcaagtcgaaatgtcaagtgtcagtttactaaggaaacgaaccgtcgaatgtcgtcgatcaagcaggtacaagatttagagaagcaagtggaacgagtgcgaagggaaaacagccacctcaagcgcagcttggctgatcgcgtaggcgtgggccacatggacgtcgacagcataaaccccgagcagggtttacttcaactccccgagattcactccgagccgcggaagaggaagcgagtgactccgatgtacgatcattcacgacttcgagatgacttccgaactgcatctaagggtctgttccgagctcctgcaccttatcgaccgcagtctagtgcgccaatgtttgaaccgatgcgtatatcgctaccggcttggctaacgacagataatctgcttgattcatattaccggaatgttcacatgacggcgcctatcgtatactacccggagtttcgaaggaaggtggaggagctgtatcagcataacgatatccgtcggttgcctccgtcgtggtcggccttgttctttgccgtgctcgcactagggcatttattcagcaccgaccccgttcccgatcgatctgtgcaggcgggcgaattcatggagacttcgaagagtttcctcgatccatgggctaatgattttgtgctggatgacgtgcggaccttttttctcatatcgttggctctgaacgagatgaatttaaagtctgcagcttggatttggctgggaagggcagtgcgcagcgcacaagacctcgaactgcatttagaagtgggactgcgatctagagtagaagctgatatgcgacggcgcgtttggtgggccatttacgtactggacagaacgttagcaacagatctctgccggccttttgcaatcgacgacgacgactgcgatgtcgcgctgccagagcacatcgacgaccaccttctcgatccagacatgccaccacgggctcctccgagcacaagacccctaacacagttccttcatccaataatcaacgttgtcagatcattcacagcgttgaggaaggcgttggcagcgcccgtgctggagcgatcgcggctccaaatgttcgagagctacttcggttcttgtcagcccttctttcccgcaggcctcgagcccgaaaaccctgagacaatttcccctgcctacataatgccttacgctcacttactaaatgcccgcctccaattacatcgacatattttggcaccattatgccctccggatgctcggggccacgctatcgagcaatgcctctacatatcactcgaaacagctcgattaatggagcgttccagcggatcgcttgctgattgcgccacaagcctctttgttacccatatcttccgatcaactctgttcttactcctatgtgggtatatcaagcccgccataacttgtctccgggttctcaagtcgattcacgaacgaagagacatcaccttcgcttgcgggaggtatatttctttgttcgtgagattcttaacaagcaaacagcaagaggctctgagccaatttccgcggccacagccaataggccaattcccgcttcagactccacacattgacgtcgaagccgtgcagaactctctggtgagagacgaagagctgttgctccatgtcagcaccgatcttcaggctaatgtagagactgcctggctttgggtgggaactgatcccaactcgattccacccttaagccaagcagccaaagggctcgcatcggcggacaaacggactgggctcgctagcgaggaacgacatggttggggcggatgggataatctcatggacgctgttcagaatttgccactagcagcaacgtccaacgcgatgtcaaactacaggtcagcaccgcctcaaccattggcacccagtttgcctcctatcaaaatggaaccggcgcccatcatacctcgaagtgccccgacagaccccgacagtaacaagaatagcccagcccctggcgcgagtgctggcagcagaaactctgagagaatcagcatcgcaaacatcatttaaaaatcagacccaggatctataactgggttgatattacccactgcctggcagcataattcctttcgttacgaatacgcttcacgttgttgtttctctaatcaagaatctcacgaatattcacgtgtcgaagacttggcgacgcatcgatacgactcgttttacgatatccattcagttgcatggcgagagaacacaaaaactggcggaacatttcagatgacggcatagacacctgatttcgatacaaaccggatatacctctgcgcattttgcctcggccatgtttgagtcgctgtcctcaatgcaatttttacgttctctcatactatcttagtttttttttttttttttttttttttttaactaatttagcctatcctcgacgataccaatttcctcgttttccagcattctcacgcttcgactacatttagttcccgttacagggccgggatccgcttgcgcacaccatgatacaattttgttgatcaacattctattctcagtcgctaatgtaatcattcattctttggcgccttttggttggttttttctatgtaccatgtccgcgagcatggtacgcgggcatgagaaaaggcatgttaatgaccgaacgagcctctgtcaacgacgatcaagtcactgtgccgacatgggatgaagttatctgagggaggaggaaatacactgcaagccgcgctggacgtactgtgcgtattcgagaagtattcacctgaaagctgccacgaatacctgtaattatagtatatacctatacccaaaccgagatttctaagcttgtgataagtcacaagtgcaatgtattctgtcgcccacatgacatgaaaccaatataactttggttacaatttgcaaccccaccggtccaaggcttgaatgtgcgtccaatagcaaccggcggatgtcggcatgtcgacttccagatgccgtagaagttgggaatttccgatcttgtgggaatgcagttgcgttcgcttaacggtgccaacgcatgaggtcgtccccgcttagtcaggatgtaatcaatctgcaacgaagaagagggaatttgatacatggaggaagtcgaaattattatgagacaatgaccaagccaaaacgtccccccacatgcatcttacgttataggcccgcaacgacttgcaaacggacctggaaaccgaaatcctcgggaccataagtaacagtaactgtgcactgtttctaccattcgatagcgacaagatccgcgtttcgatagcacagacagtagcattgttctagtttcgatggacgcgtccacctatagcatgttgccactgtcgggtgagtctaggccttgatggagctggccatgtcgcgcgtgatgcatgatctatcgatggggcggcaagtgggcaccgtctcatgtgcggcgcaggcccggtagattgctgcgcatcgtcagctcaacatatgcacaaattaccatgttgacgggtatccgtatcttcaaacttggctgctctttagatgaattgtagtaacggtactttaaagtttaaacggtattcagcggtcacaccacaccagatgaaaatgcactggtcactgattgcaattgtctgcatgtgcaggctgcagcaattggggggtttgggcgcaggcggtagggcagacctaatgaacgagctgactggtcaagtcgggactggcgactggcgagcgggcaagtcaagccacataacccatgcccttggagatgcatggccacggggttctccatgcctgtggcctgtgtttctggtgccactgtgacgccgacagacaggacacacatactgcaggtagacgcactacatcatcttatctggccgaacccaaggctgcatgccatctcgtgtttatcgtcttgtcttgtcgcagtgacgtttgccttccactacaattagaaccttatcgtctcgggtttctctatttctctatcccttaaggagccccctttgagtgctcacatccgtcctccctgctagagggacagtcaaaagggacccatgacccccatccatccttgatcgcccactccaacgagcacacgccgcctcgactgcacagcaacacgacgagatgcttgcgcttgaggcgatatggatcccgaacaagctgtgcccttggagagaaccacgtcgcagctgtcgtccgtctcggccgtgtccgcaaagagcaccacccctcgctccagccgcgcaaagtcgcggccacgcaaactagcgtcgcacccttcgagctccgcgtcgtccctctcgccctccgacaagtccctgacatcctttccctccttctctccacaggccgcgacgagcgagaacgcctttgcgaccgacactctgacgcaagccatcgacatccagcagcccccagccgctcgcgagacccgccagaagtcagccaccatcgacagcctcacctcggccgagacgcccaagaactcacgcaacgccctgttcgaggacactcccgtggcgaccagatccatcccaggcgcactccacctggccgatgacgaacacatccaacggcttgtcgcccgccacggctctacccgtcttgtccgccagattgccgaagacttggcccagcgagatgtgcagatcgccaacctgaggaggaaggctgatgagagggagagggcgttgagaaagatcatcttagaatgcggactgtcgaatctagagttggaaacaaagctccgccttgtcgagcaagagctgaaggcgcaagacgaagccaagcgcggtccagatggcggcctgtctaacatgatgagcgacgccatgcaagactcgttatcaaatgcatcgcggattgggaccgattctacaatcagagcaaacgggccaggcacaccgcgagaaggtaacagcacagagaaaggaactgttcggggatggaagacctacttatggggtactggcacaagcaggaaaccaagcagagctacgagccttgagaacgatgggtccaagactgccatcaaagcgccatctgctggagatcgccggccccctatccaagaagacttgttcacgccgcccgaagccggctccacacagaactctagtcgagcatctagcatctactcagggcatgggccaagaaagccttccgcttctatcgccagcatggctctatctcttgtcgccggcaagagtacgcctcgagattccgactcgggtaggggtcggtcagattcggcagggcatggctcgctccgaacgtcttcggcaacaagtaccaagacgggcacctcatcacgagctgtctcgtctcaagtagggcctaaagccttaatggctatgcgacgcgcaacgccagcttccagcagcctcgcccagcgctctcaacttgcaggcacatctcctgacacgccagcaagtccgcggcccgataattacggccctgtggaaatggacacaatattttctcccgaggaacaaccgcctacattgacgcatatttacaacaactatggaaattccgaatacctcactgatagatttgggttcatctatgaccaacgtcggaagatgaggcaacgtgaagcagctcaagtggcggcgcacattaagcgaggcagccgtactgagatgctcacgggtggcaggaatggtttgtctccaaatcagctcgaagagaacgcaccttcaatctctgagagtggaagcgatgaacgccccgagacgcccaattcagccgagttccttatggatcagggacgaccaaagaggtggcaagactacctcaaaatcgcaacaatccccaccgagctactctcacatacgcctcttgctgcgtccaatttagaggttctcgagggcagtgaaccagccaagtcgcctgggctaatcacatcggatgaccgcggtttcgtcccaccagctagcacgactgccgccatcgacaacaatgccacggtgaagctagatgaggaaacctctgcgacactagtgcacgaagatgtcgagccggtcaagcttcttctcaagcagctaagcgacgtgcatgacgctctacagcgtgagaaatcagtccgttggaacgagtttcttcgtaaagttcgagcagaacgtaaaagggatggtgaagccgcagcggccgccgcagctgcatatgctgaagctcggtttcaaagagcccctgtcatgattcccgaagccaaactcaccgacggagagacgattggcattgccgatttaggtgtcaaaggcaaagtcggtcgagctaaatggaacgagttccggaatctagtgcttggcggcattccagtggccaaccgccctaaagtttgggctgagtgttcaggggcgttgtcaaagcggattcctggctattatgaagatctcgtttcgaaatcagacgaagaagacgatccggtagtgatttcacaaattgggatggatgtcaatcgcacgctgacagacaacattttctttcgccgcggccctggcgttgcgaagctaagcgaagtcctgagagcttatgcccggcgaaaccctgaagtgggatactgccagggcatgaatcttatcgctgccaatctacttctcatcatgccatcgacggaagatactttttgggtactcgtatctatcatcgagctcatcctacctcgcggctactatgatcacagcttaatggcatcccgcgctgaccaacaggtgctgcgccagtatgtcacaggcgttttacccaagctttctcagcatttggaaaatctcagtatcgaactagaagccttgacatttcaatggttcttgagtgtcttcactgactgcctctcggctgaagctctgttccgcgtttgggatgtcgtcctatgtattagtgatggtagcacattcttattccaagtggccttggccctcctgaaactcaatgaacagcaactgctgcaatgtgattcacctgcagccatatatacctatatcaaccaccaaatgacaaaccatgcgattagtatcgatgggttgatacaagcctcggaaggccttcgaaaggttgtcaaacgtgaagaggtagaagacagacggaacaagtcaatcgaagcagagaaagaaatgatgaaacagcgtgaagaagacgcccaacgctatcgtacacaaaaatcaacatctgcacccgcattagtatcgaatgcttctgcagtatcaagtccagcgcccagcgcgatgcgcatggacagcgagagtgctagcatcgcaagtctgagtgcgatagatggagaggaaggagaagggactttgaatatcagggctactacgcccgtggaggaagaagcaacatatggtctcggtgcatgacggagagatcaaagttttatagacgagtgctgcatgcttcacctgcgctactggttccattattcggagcctttttgtttttttaccggcagtttggtgttcatagtcgccaagatacccccaattaatgagaatatgaaaaagtttatccagcgcaa

SEQ ID NO: 17489 - DNA, 3213 bp, Muscodor strobelii
  misc_feature: SGI cDNA ID NO. 565842
  misc_feature: Reduced expression when VOC is produced
  misc_feature: Encodes the peptide sequence at SEQ ID NO 17490
atggatcccgaacaagctgtgcccttggagagaaccacgtcgcagctgtcgtccgtctcggccgtgtccgcaaagagcaccacccctcgctccagccgcgcaaagtcgcggccacgcaaactagcgtcgcacccttcgagctccgcgtcgtccctctcgccctccgacaagtccctgacatcctttccctccttctctccacaggccgcgacgagcgagaacgcctttgcgaccgacactctgacgcaagccatcgacatccagcagcccccagccgctcgcgagacccgccagaagtcagccaccatcgacagcctcacctcggccgagacgcccaagaactcacgcaacgccctgttcgaggacactcccgtggcgaccagatccatcccaggcgcactccacctggccgatgacgaacacatccaacggcttgtcgcccgccacggctctacccgtcttgtccgccagattgccgaagacttggcccagcgagatgtgcagatcgccaacctgaggaggaaggctgatgagagggagagggcgttgagaaagatcatcttagaatgcggactgtcgaatctagagttggaaacaaagctccgccttgtcgagcaagagctgaaggcgcaagacgaagccaagcgcggtccagatggcggcctgtctaacatgatgagcgacgccatgcaagactcgttatcaaatgcatcgcggattgggaccgattctacaatcagagcaaacgggccaggcacaccgcgagaaggtaacagcacagagaaaggaactgttcggggatggaagacctacttatggggtactggcacaagcaggaaaccaagcagagctacgagccttgagaacgatgggtccaagactgccatcaaagcgccatctgctggagatcgccggccccctatccaagaagacttgttcacgccgcccgaagccggctccacacagaactctagtcgagcatctagcatctactcagggcatgggccaagaaagccttccgcttctatcgccagcatggctctatctcttgtcgccggcaagagtacgcctcgagattccgactcgggtaggggtcggtcagattcggcagggcatggctcgctccgaacgtcttcggcaacaagtaccaagacgggcacctcatcacgagctgtctcgtctcaagtagggcctaaagccttaatggctatgcgacgcgcaacgccagcttccagcagcctcgcccagcgctctcaacttgcaggcacatctcctgacacgccagcaagtccgcggcccgataattacggccctgtggaaatggacacaatattttctcccgaggaacaaccgcctacattgacgcatatttacaacaactatggaaattccgaatacctcactgatagatttgggttcatctatgaccaacgtcggaagatgaggcaacgtgaagcagctcaagtggcggcgcacattaagcgaggcagccgtactgagatgctcacgggtggcaggaatggtttgtctccaaatcagctcgaagagaacgcaccttcaatctctgagagtggaagcgatgaacgccccgagacgcccaattcagccgagttccttatggatcagggacgaccaaagaggtggcaagactacctcaaaatcgcaacaatccccaccgagctactctcacatacgcctcttgctgcgtccaatttagaggttctcgagggcagtgaaccagccaagtcgcctgggctaatcacatcggatgaccgcggtttcgtcccaccagctagcacgactgccgccatcgacaacaatgccacggtgaagctagatgaggaaacctctgcgacactagtgcacgaagatgtcgagccggtcaagcttcttctcaagcagctaagcgacgtgcatgacgctctacagcgtgagaaatcagtccgttggaacgagtttcttcgtaaagttcgagcagaacgtaaaagggatggtgaagccgcagcggccgccgcagctgcatatgctgaagctcggtttcaaagagcccctgtcatgattcccgaagccaaactcaccgacggagagacgattggcattgccgatttaggtgtcaaaggcaaagtcggtcgagctaaatggaacgagttccggaatctagtgcttggcggcattccagtggccaaccgccctaaagtttgggctgagtgttcaggggcgttgtcaaagcggattcctggctattatgaagatctcgtttcgaaatcagacgaagaagacgatccggtagtgatttcacaaattgggatggatgtcaatcgcacgctgacagacaacattttctttcgccgcggccctggcgttgcgaagctaagcgaagtcctgagagcttatgcccggcgaaaccctgaagtgggatactgccagggcatgaatcttatcgctgccaatctacttctcatcatgccatcgacggaagatactttttgggtactcgtatctatcatcgagctcatcctacctcgcggctactatgatcacagcttaatggcatcccgcgctgaccaacaggtgctgcgccagtatgtcacaggcgttttacccaagctttctcagcatttggaaaatctcagtatcgaactagaagccttgacatttcaatggttcttgagtgtcttcactgactgcctctcggctgaagctctgttccgcgtttgggatgtcgtcctatgtattagtgatggtagcacattcttattccaagtggccttggccctcctgaaactcaatgaacagcaactgctgcaatgtgattcacctgcagccatatatacctatatcaaccaccaaatgacaaaccatgcgattagtatcgatgggttgatacaagcctcggaaggccttcgaaaggttgtcaaacgtgaagaggtagaagacagacggaacaagtcaatcgaagcagagaaagaaatgatgaaacagcgtgaagaagacgcccaacgctatcgtacacaaaaatcaacatctgcacccgcattagtatcgaatgcttctgcagtatcaagtccagcgcccagcgcgatgcgcatggacagcgagagtgctagcatcgcaagtctgagtgcgatagatggagaggaaggagaagggactttgaatatcagggctactacgcccgtggaggaagaagcaacatatggtctcggtgcatga

SEQ ID NO: 17490 - protein, 1070 aa, Muscodor strobelii
  misc_feature: SGI Peptide ID NO. 565842
  misc_feature (721)..(937): Pfam Id: PF00566 Pfam Desc: TBC domain
  misc_feature (37)..(1003): NCBI GI: 46109524 Blast Desc: FG01644.1 [Gibberella zeae PH-1]
  misc_feature (13)..(996): NCBI GI: 154313978 Blast Desc: BC1G_04932 [Botryotinia fuckeliana B05.10] gi|150849078|gb|EDN24271.1| BC1G_04932 [Botryotinia fuckeliana B05.10]
  misc_feature (9)..(1048): NCBI GI: 85076201 Blast Desc: NCU03330 [Neurospora crassa OR74A] gi|28881167|emb|CAD70349.1| conserved [Neurospora crassa] gi|28916922|gb|EAA26658.1| conserved [Neurospora crassa OR74A]
  misc_feature (8)..(1006): NCBI GI: 171688960 Blast Desc: protein product [Podospora anserina] gi|170944442|emb|CAP70553.1| protein product [Podospora anserina]
  misc_feature (8)..(998): NCBI GI: 39942348 Blast Desc: MGG_03254 [Magnaporthe grisea 70-15] gi|145015749|gb|EDK00239.1| MGG_03254 [Magnaporthe grisea 70-15]
  misc_feature (31)..(991): NCBI GI: 70992315 Blast Desc: TBC domain protein [Aspergillus fumigatus Af293] gi|66848639|gb|EAL88968.1| TBC domain protein, [Aspergillus fumigatus Af293] gi|159124576|gb|EDP49694.1| TBC domain protein,
  misc_feature (416)..(996): NCBI GI: 156046797 Blast Desc: SS1G_09482 [Sclerotinia sclerotiorum 1980] gi|154693877|gb|EDN93615.1| SS1G_09482 [Sclerotinia sclerotiorum 1980]
  misc_feature (96)..(1046): NCBI GI: 189189124 Blast Desc: RUN and TBC1 domain containing protein [Pyrenophora tritici-repentis Pt-1C-BFP] gi|187972507|gb|EDU40006.1| RUN and TBC1 domain containing protein [Pyrenophora tritici-repentis
  misc_feature (59)..(991): NCBI GI: 255956801 Blast Desc: Pc21g21820 [Penicillium chrysogenum Wisconsin 54-1255] gi|211590864|emb|CAP97079.1| Pc21g21820 [Penicillium chrysogenum Wisconsin 54-1255]
  misc_feature (1)..(1013): NCBI GI: 169607603 Blast Desc: SNOG_06860 [Phaeosphaeria nodorum SN15] gi|160701450|gb|EAT85511.2| SNOG_06860 [Phaeosphaeria nodorum SN15]
  misc_feature: Useful for introducing or modulating the production of volatile compounds
MDPEQAVPLERTTSQLSSVSAVSAKSTTPRSSRAKSRPRKLASHPSSSASSLSPSDKSLTSFPSFSPQAATSENAFATDTLTQAIDIQQPPAARETRQKSATIDSLTSAETPKNSRNALFEDTPVATRSIPGALHLADDEHIQRLVARHGSTRLVRQIAEDLAQRDVQIANLRRKADERERALRKIILECGLSNLELETKLRLVEQELKAQDEAKRGPDGGLSNMMSDAMQDSLSNASRIGTDSTIRANGPGTPREGNSTEKGTVRGWKTYLWGTGTSRKPSRATSLENDGSKTAIKAPSAGDRRPPIQEDLFTPPEAGSTQNSSRASSIYSGHGPRKPSASIASMALSLVAGKSTPRDSDSGRGRSDSAGHGSLRTSSATSTKTGTSSRAVSSQVGPKALMAMRRATPASSSLAQRSQLAGTSPDTPASPRPDNYGPVEMDTIFSPEEQPPTLTHIYNNYGNSEYLTDRFGFIYDQRRKMRQREAAQVAAHIKRGSRTEMLTGGRNGLSPNQLEENAPSISESGSDERPETPNSAEFLMDQGRPKRWQDYLKIATIPTELLSHTPLAASNLEVLEGSEPAKSPGLITSDDRGFVPPASTTAAIDNNATVKLDEETSATLVHEDVEPVKLLLKQLSDVHDALQREKSVRWNEFLRKVRAERKRDGEAAAAAAAAYAEARFQRAPVMIPEAKLTDGETIGIADLGVKGKVGRAKWNEFRNLVLGGIPVANRPKVWAECSGALSKRIPGYYEDLVSKSDEEDDPVVISQIGMDVNRTLTDNIFFRRGPGVAKLSEVLRAYARRNPEVGYCQGMNLIAANLLLIMPSTEDTFWVLVSIIELILPRGYYDHSLMASRADQQVLRQYVTGVLPKLSQHLENLSIELEALTFQWFLSVFTDCLSAEALFRVWDVVLCISDGSTFLFQVALALLKLNEQQLLQCDSPAAIYTYINHQMTNHAISIDGLIQASEGLRKVVKREEVEDRRNKSIEAEKEMMKQREEDAQRYRTQKSTSAPALVSNASAVSSPAPSAMRMDSESASIASLSAIDGEEGEGTLNIRATTPVEEEATYGLGA

SEQ ID NO: 17491 - DNA, 8899 bp, Muscodor strobelii; identical to SEQ ID NO: 17488
  misc_feature: SGI EST ID NO. CUFF.41088.0
  misc_feature: Variant of the nucleotide sequence at SEQ ID NO 17489

SEQ ID NO: 17492 - DNA, 1566 bp, Muscodor strobelii
  misc_feature: SGI cDNA ID NO. 565843
  misc_feature: Encodes the peptide sequence at SEQ ID NO 17493
atgggtctcctcaaaaacttacgactcggaggagccttcatcacagcgctgatcgccatcttactaacatatcaatgggcgactaaaccagaccttctacctctgatccgagggaaagataacactttgctattcgtgacacctgcggaatcgggacagatcaacatccagctcgcgacggcgcaggcgctgatagaggagtacccggggataaaaatccacatcgcgtctttcgcagcggcggaaaagaaaatatcgcgtgtctctgatctgggaatcaagaagaacgctgctgcgcaatctatatcgttccatgagatccccggtccggatcgatttgaggcgattaatgcaagaatgggttgttcggattcatccaccgatacatgtctttcgcaccctcccggcgcagcggggatcgatatcttggccagccagatggaatacgttgtctcgtcttggactggggaggagcactttgcgattgttgaacacgttattcgaatcatggaggatgttgatccagcggctgttgtagtcgatgtgctgttcagaccggctgttgacgcgattgaacatgcgaatcgattgcatgttgctatgagtcccatcgcgatgtctgatctttttgggcctattcagccttttgggaagggcttttggaaataccctgctcttgggacgggtttctcgttcccagtcccgctgcgcaatattccggagaatatctatgtgaatttcaggatcgtgtggagtatgcttttcagcccggctccaagagaggcagaggcgtatttgaagagcaagggcctaattccattaggtcttctgaacttccgcgatgacgtggtgaggatcattcagacgcttccggacgttagcttgccggtcgataaaatccccccgaacaccacggctgtcagcgcaatgctcctagactctgcaccggctgttgagcaagattctgctctagtagcatggcttggacgtgcgccgactgtggtcataaatttcgggtctctcttcgcgtatagtgaggaacgcgcgaagacgatggctctggtcattgagcgggttctggcaaagagcgaatttcagatattgtggaagatggctcctaccagcgacttcggtcaggcatatgcggcatcggtcgagccgtatctcgaagcaggacgtctgaagattatggagtggttgccaattgatacactgaccttgcttgggatcgataatgtgattgcgtctgttcatcatggaggagcgagtagcttcaatgaggcgactgtagcgggtgttccgcaaattattgttcctctatgggaggacctgtacaatttcgcgcaactagctgaggaccgaggcattggtatttatgcgaatcgcaagtcggcacctgtttgggatgtggacaccttggtagatgacattatgcgggttacaaatggcagcaacttatgtgtccgaatgcgagagaaggcgtctgcgattggtcataccgtgagagctagcccggggcgatcggaggctgcgaggataatagctaagcttgtggtaccgaggtga

SEQ ID NO: 17493 - protein, 521 aa, Muscodor strobelii
  misc_feature: SGI Peptide ID NO. 565843
  misc_feature (419)..(440): Pfam Id: PF04101 Pfam Desc: Glycosyltransferase family 28 C-terminal domain
  misc_feature (3)..(517): NCBI GI: 256728005 Blast Desc: NECHADRAFT_95258 [Nectria haematococca mpVI 77-13-4]
  misc_feature (11)..(517): NCBI GI: 46133785 Blast Desc: FG09032.1 [Gibberella zeae PH-1]
  misc_feature (11)..(517): NCBI GI: 256722508 Blast Desc: NECHADRAFT_35090 [Nectria haematococca mpVI 77-13-4]
  misc_feature (38)..(517): NCBI GI: 154304172 Blast Desc: BC1G_08356 [Botryotinia fuckeliana B05.10] gi|150854158|gb|EDN29350.1| BC1G_08356 [Botryotinia fuckeliana B05.10]
  misc_feature (40)..(518): NCBI GI: 226277750 Blast Desc: UDP-glucoronosyl and UDP-glucosyl transferase family protein [Paracoccidioides brasiliensis Pb01]
  misc_feature (39)..(518): NCBI GI: 226293037 Blast Desc: UDP-glucoronosyl and UDP-glucosyl transferase family protein [Paracoccidioides brasiliensis Pb18]
  misc_feature (39)..(518): NCBI GI: 225683676 Blast Desc: UDP-glucoronosyl and UDP-glucosyl transferase family protein [Paracoccidioides brasiliensis Pb03]
  misc_feature (12)..(517): NCBI GI: 156059010 Blast Desc: SS1G_03517 [Sclerotinia sclerotiorum 1980] gi|154701304|gb|EDO01043.1| SS1G_03517 [Sclerotinia sclerotiorum 1980]
  misc_feature (42)..(518): NCBI GI: 121715678 Blast Desc: UDP-glucoronosyl and UDP-glucosyl transferase, [Aspergillus clavatus NRRL 1] gi|119403605|gb|EAW14022.1| UDP-glucoronosyl and UDP-glucosyl transferase, [Aspergillus NRRL
  misc_feature (43)..(514): NCBI GI: 46139653 Blast Desc: FG11341.1 [Gibberella zeae PH-1]
  misc_feature (216)..(507): SWISSPROT Homolog: EC 2.4.1.45 2-hydroxyacylsphingosine 1-beta-galactosyltransferase
MGLLKNLRLGGAFITALIAILLTYQWATKPDLLPLIRGKDNTLLFVTPAESGQINIQLATAQALIEEYPGIKIHIASFAAAEKKISRVSDLGIKKNAAAQSISFHEIPGPDRFEAINARMGCSDSSTDTCLSHPPGAAGIDILASQMEYVVSSWTGEEHFAIVEHVIRIMEDVDPAAVVVDVLFRPAVDAIEHANRLHVAMSPIAMSDLFGPIQPFGKGFWKYPALGTGFSFPVPLRNIPENIYVNFRIVWSMLFSPAPREAEAYLKSKGLIPLGLLNFRDDVVRIIQTLPDVSLPVDKIPPNTTAVSAMLLDSAPAVEQDSALVAWLGRAPTVVINFGSLFAYSEERAKTMALVIERVLAKSEFQILWKMAPTSDFGQAYAASVEPYLEAGRLKIMEWLPIDTLTLLGIDNVIASVHHGGASSFNEATVAGVPQIIVPLWEDLYNFAQLAEDRGIGIYANRKSAPVWDVDTLVDDIMRVTNGSNLCVRMREKASAIGHTVRASPGRSEAARIIAKLVVPR

SEQ ID NO: 17494 - DNA, 1891 bp, Muscodor strobelii
  misc_feature: SGI EST ID NO. CUFF.41112.0
  misc_feature: Variant of the nucleotide sequence at SEQ ID NO 17492
atccaatccgaagattacccaaataaacatgggtctcctcaaaaacttacgactcggaggagccttcatcacagcgctgatcgccatcttactaacatatcaatgggcgactaaaccagaccttctacctctgatccgagggaaagataacactttgctattcgtgacacctgcggaatcgggacagatcaacatccagctcgcgacggcgcaggcgctgatagaggagtacccggggataaaaatccacatcgcgtctttcgcagcggcggaaaagaaaatatcgcgtgtctctgatctgggaatcaagaagaacgctgctgcgcaatctatatcgttccatgagatccccggtccggatcgatttgaggcgattaatgcaagaatgggttgttcggattcatccaccgatacatgtctttcgcaccctcccggcgcagcggggatcgatatcttggccagccagatggaatacgttgtctcgtcttggactggggaggagcactttgcgattgttgaacacgttattcgaatcatggaggatgttgatccagcggctgttgtagtcgatgtgctgttcagaccggctgttgacgcgattgaacatgcgaatcgattgcatgttgctatgagtcccatcgcgatgtctgatctttttgggcctattcagccttttgggaagggcttttggaaataccctgctcttgggacgggtttctcgttcccagtcccgctgcgcaatattccggagaatatctatgtgaatttcaggatcgtgtggagtatgcttttcagcccggctccaagagaggcagaggcgtatttgaagagcaagggcctaattccattaggtcttctgaacttccgcgatgacgtggtgaggatcattcagacgcttccggacgttagcttgccggtcgataaaatccccccgaacaccacggctgtcagcgcaatgctcctagactctgcaccggctgttgagcaagattctgctctagtagcatggcttggacgtgcgccgactgtggtcataaatttcgggtctctcttcgcgtatagtgaggaacgcgcgaagacgatggctctggtcattgagcgggttctggcaaagagcgaatttcagatattgtggaagatggctcctaccagcgacttcggtcaggcatatgcggcatcggtcgagccgtatctcgaagcaggacgtctgaagattatggagtggttgccaattgatacactgaccttgcttgggatcgataatgtgattgcgtctgttcatcatggaggagcgagtagcttcaatgaggcgactgtagcgggtgttccgcaaattattgttcctctatgggaggacctgtacaatttcgcgcaactagctgaggaccgaggcattggtatttatgcgaatcgcaagtcggcacctgtttgggatgtggacaccttggtagatgacattatgcgggttacaaatggcagcaacttatgtgtccgaatgcgagagaaggcgtctgcgattggtcataccgtgagagctagcccggggcgatcggaggctgcgaggataatagctaagcttgtggtaccgaggtgatcgatgtttcgaggcgttatatcaaagccggaaatggtattaatattcagatgtggaacttatcatggcatgcctattcgtcaatgattcagcgtcatgtcaattgttcctttaggtggtttagaatttgaataatgggttgaatgaaagcactactaatactaggcgaaaattccatcgatcctgtatctcccaattgcttcgccttcgacctactcactactttcatcacgaattcctgttgtaagcgacatttgaaccatgacgaagaccgtagtagccatcacaaccacgatc

SEQ ID NO: 17495 - DNA, 771 bp, Muscodor strobelii
  misc_feature: SGI cDNA ID NO. 565844
  misc_feature: Encodes the peptide sequence at SEQ ID NO 17496
atgtcagatcagccacttttaggcggtgctcatgatacccgtcgcaaaaataccttgaagcagcgtggcatagggtccggtctcccgtttctcaacattattcgaggtggtctgatcgccccaagcgcgacgacttatgactcaatatacataattctcaatactacggatacagagaaacaagatgacttgacgcgaaggtggatggaccataagctagaagagctgaactttgtcggccttgtgggaggcttgctgtccgggtgtttaacgtcaacaggtagctggccagatgtcttagataacggccgtgaaaagccatgggtcgtaaaagctttttggcacagcggcatcattttcgccgtattcgctgttcttatcgctatgatgcagggactccggttacatcgactgtctgcgcatcgtgacggactggaactgattcgcaaatccatgtcaaaaaccgaaaacacgaaggcttttgataatgcggatcaccaagccgccattagacccaaaacctcacttgtatacgcatggcaggccagtttttcgtttctcgtcgcagcggtcttctgtttgattgctggaatgctggttctagtttgggtttcggctagtccagggccaaataaatccgcaaagaatttttgggacgacagtgcactccttgcactcgtattcacgatcgtggttgtgatggctactacggtcttcgtcatggttcaaatgtcgcttacaacaggaattcgtgatgaaagtagtgagtag

SEQ ID NO: 17496 - protein, 256 aa, Muscodor strobelii
  misc_feature: SGI Peptide ID NO. 565844
  misc_feature (1)..(222): NCBI GI: 261352595 Blast Desc: conserved [Verticillium albo-atrum VaMs.102]
  misc_feature (2)..(251): NCBI GI: 189205873 Blast Desc: PTRG_08939 [Pyrenophora tritici-repentis Pt-1C-BFP] gi|187975364|gb|EDU41990.1| PTRG_08939 [Pyrenophora tritici-repentis Pt-1C-BFP]
  misc_feature (42)..(222): NCBI GI: 46127003 Blast Desc: FG07879.1 [Gibberella zeae PH-1]
  misc_feature (30)..(203): NCBI GI: 169600950 Blast Desc: SNOG_03329 [Phaeosphaeria nodorum SN15] gi|160705840|gb|EAT88534.2| SNOG_03329 [Phaeosphaeria nodorum SN15]
  misc_feature (42)..(202): NCBI GI: 46110875 Blast Desc: FG02319.1 [Gibberella zeae PH-1]
  misc_feature (47)..(202): NCBI GI: 256723972 Blast Desc: [Nectria haematococca mpVI 77-13-4]
MSDQPLLGGAHDTRRKNTLKQRGIGSGLPFLNIIRGGLIAPSATTYDSIYIILNTTDTEKQDDLTRRWMDHKLEELNFVGLVGGLLSGCLTSTGSWPDVLDNGREKPWVVKAFWHSGIIFAVFAVLIAMMQGLRLHRLSAHRDGLELIRKSMSKTENTKAFDNADHQAAIRPKTSLVYAWQASFSFLVAAVFCLIAGMLVLVWVSASPGPNKSAKNFWDDSALLALVFTIVVVMATTVFVMVQMSLTTGIRDESSE

SEQ ID NO: 17497 - DNA, 3222 bp, Muscodor strobelii
  misc_feature: SGI EST ID NO. CUFF.41113.2
  misc_feature: Variant of the nucleotide sequence at SEQ ID NO 17495
aggggtgacaacgatgcatcttcacaatcgcattcttttcgccacatcattttatcatttgattttggctcgaggaatacatgaatataccaagttgacctgaccggttggttatcgatatactgataagagaaaggcagttgcgtaccttacaccatgtttctcgatcgtttcaattgcgagcaatgtatcgcgacctccctaattcaacgcatgaatctatgtgactgtacatctacatttctagggcactcccacaggcacgaagatggcggcttcctcgatttatgagagctggatcctcaaaaggatttggagggttccccaaggcgctggttcttccccaaaattctccgcattgcattgtttggctcgtgatctgcataggtacatatgtatccccgcgatggagggacgtcatcagcacaaccaactcaggtgttaacaaacaacttatccgagagtaggcatatgtttcgagaagtccttcgccataagcatcaaatatcatcgacgccaatatgtcagatcagccacttttaggcggtgctcatgatacccgtcgcaaaaataccttgaagcgtggcatagggtccggtctcccgtttctcaacattattcgaggtggtctgatcgccccaagcgcgacgacttatgactcaatatacataattctcaatactacggatacagagaaacaagatgacttgacgcgaaggtggatggaccataagctagaagagctgaactttgtcggccttgtgggaggcttgctgtccgggtgtttaacgtcaacaggtagctggccagatgtcttagataacggccgtgaaaagccatgggtcgtaaaagctttttggcacagcggcatcattttcgccgtattcgctgttcttatcgctatgatgcagggactccggttacatcgactgtctgcgcatcgtgacggactggaactgattcgcaaatccatgtcaaaaaccgaaaacacgaaggcttttgataatgcggatcaccaagccgccattagacccaaaacctcacttgtatacgcatggcaggccagtttttcgtttctcgtcgcagcggtcttctgtttgattgctggaatgctggttctagtttgggtttcggctagtccagggccaaataaatccgcaaagaatttttgggacgacagtgcactccttgcactcgtattcacgatcgtggttgtgatggctactacggtcttcgtcatggttcaaatgtcgcttacaacaggaattcgtgatgaaagtagtgagtaggtcgaaggcgaagcaattgggagatacaggatcgatggaattttcgcctagtattagtagtgctttcattcaacccattattcaaattctaaaccacctaaaggaacaattgacatgacgctgaatcattgacgaataggcatgccatgataagttccacatctgaatattaataccatttccggctttgatataacgcctcgaaacatcgatcacctcggtaccacaagcttagctattatcctcgcagcctccgatcgccccgggctagctctcacggtatgaccaatcgcagacgccttctctcgcattcggacacataagttgctgccatttgtaacccgcataatgtcatctaccaaggtgtccacatcccaaacaggtgccgacttgcgattcgcataaataccaatgcctcggtcctcagctagttgcgcgaaattgtacaggtcctcccatagaggaacaataatttgcggaacacccgctctaataatagtcagtaaaaaccactggagatgcgatgagatagagagacggtcttacacagtcgcctcattgaagctactcgctcctccatgatgaacagacgcaatcacattatcgatcccaagcaaggtcagtgtatcaattggcaaccactccataatcttcagacgtcctgcttcgagatacggctcgaccgatgccgcatatgcctgaccgaagtcgctggtaggagccatcttccacaatatctgaaattcgctctttgccagaacccgctcaatgaccagagccatcgtcttcgcgcgttcctcactatacgcgaagagagacccgaaatttatgaccacagtcggcgcacgtccaagccatgctactagagcagaatcttgctcaacagccggtgcagagtctaggagcattgcgctgacagccgtggtgttcggggggattttatcgaccggcaagctaacgtccggaagcgtctgaatgatcctcaccacgtcatcgcggaagttcagaagacctaatggaattaggcccttgctcttcaaatacgcctctgcctctcttggagccgggctgaaaagcatactccacacgatcctgaaattcacatagatattctccggaatattgcgcagcgggactgggaacgagaaacccgtcccaagactgattatagggtcaaccgcgttagtaactgttgaaacggacattcttgggaattcgaagtcgaactcacgcagggtatttccaaaagcccttcccaaaaggctgaataggcccaaaaagatcagacatcgcgatgggactcatagcaacatgcaatcgattcgcatgttcaatcgcgtcaacagccggtctgaacagcacatcgactacaacagccgctggatcaacatcctccatgattcgaataacgtgttcaacaatcgcaaagtgctcctccccagtccaagacgagacaacgtattccatctggctggccaagatatcgatccccgctgcgccgggagggtgcgaaagacatgtatcggtggatgaatccgaacaacccattcttgcattaatcgcctcaaatcgatccggaccggggatctcatggaacgatatagattgcgcagcagcgttcttcttgattcccagatcagagacacgcgatattttcttttccgccgctgcgaaagacgcgatgtggatttttatccccgggtactcctctatcagcgcctgcgccgtcgcgagctggatgttgatctgtcccgattccgcaggtgtcacgaatagcaaagtgttatctttccctcggatcagaggtagaaggtctggtttagtcgcccattgatatgttagtaagatggcgatcagcgctgtgatgaaggctcctccgagtcgtaagtttttgaggagacccatgtttatttgggtaatcttcggattggat

SEQ ID NO: 17498 - DNA, 1497 bp, Muscodor strobelii
  misc_feature: SGI cDNA ID NO. 565845
  misc_feature: Reduced expression when VOC is produced
  misc_feature: Encodes the peptide sequence at SEQ ID NO 17499
atgttctattatcctagcccccagatttccgccttggaacatgtcctagtcgacaacttcggcgcatacgcctcaaacttctcgtcagctatcacgccatgcaccaactacgtgacagaagtaggggaacctgcgaagaattctggccgtacaacagctgcgcaatggatacgagtagtgttccacgatgcagtcacagcgaacgtgtctgctgggacaggaggtgtagacgcaagtattggatttgagacttttcgcgatgagaataaaggcagtgctttcaacgactcctttacattctggcaaccatacgtgaatgagtttataccaatggcggacttggtagccctaggaactgtcatgtctgtcaatctttgcggtgggcaccagatgccattccagcctggacgcgttgatgccattcaagctgaccctacgaccggagtacctgagcctggtacgagtgttgacgaaacactggaccagttcgaaagagctgggttcaaccaaactgatgcgataggcttaacagcatgtggccatacacttgggtccgtacatcatagcggctttccagaagtttccgataactcgacggtctctgagaacaacaccaacggcggtataaactttgattcttcccgaggcgcgtttgatccattagtcgtccatgagtacatcgacggaacaggacaacgtggaggatctctcgtaacaagctacaacgagacgagcagatcagatcttcggctctatgaaagcgaccagaatgctacaatgaaggcattctacgaccaaggcgatggatttctagacacatgtgttgatctatttgtacgcttgatcaacacagttccttcccacgcgaagctcggcgaaaacattcaacccatggatattaagcccatcaatgtgacatgggacttgaacggagatggccaactagccttgtcaggaagaatacgatttctcagtcagcaaacaaccgccaactcgagtagtatagcgttctcaagcggctacacgcaggatctaactttggaagatgagacgggtgattcagtgttcggcactacccaattcaccccgttctcaatcgattactcgaaaatcaagggatcctcatcatttcaagtatcccgtccaggcttcgaaacggaaacgttcgactttcaagcccaaaatttcatcataccatctctaaccacagccacaagctcctatgtgaatgtgactgtggctgttgcaaagggatcaaacctccctggcctaacagcaaaaattacggtccccgttctgcagcccctaactctggcaccaaaactgtcttccgtcgaagtcgagcttcaaaaaggagcggatctcgaccaagacttcgagatctggcagggcacatctgacatcgggcaaccaacaggtgcagtgagtgttcggattgagaaagacggcgagaccctcgatactctactacttgatgctggtgttgcgggttggtaa

SEQ ID NO: 17499 - protein, 498 aa, Muscodor strobelii
  misc_feature: SGI Peptide ID NO. 565845
  misc_feature (112)..(219): Pfam Id: PF00141 Pfam Desc: Peroxidase
  misc_feature (2)..(498): NCBI GI: 189206994 Blast Desc: conserved [Pyrenophora tritici-repentis Pt-1C-BFP] gi|187975924|gb|EDU42550.1| conserved [Pyrenophora tritici-repentis Pt-1C-BFP]
  misc_feature (2)..(315): NCBI GI: 169623156 Blast Desc: SNOG_14809 [Phaeosphaeria nodorum SN15] gi|111056881|gb|EAT78001.1| SNOG_14809 [Phaeosphaeria nodorum SN15]
  misc_feature (12)..(449): NCBI GI: 154291795 Blast Desc: BC1G_14974 [Botryotinia fuckeliana B05.10] gi|150846582|gb|EDN21775.1| BC1G_14974 [Botryotinia fuckeliana B05.10]
  misc_feature (4)..(341): NCBI GI: 46117184 Blast Desc: FG04434.1 [Gibberella zeae PH-1]
  misc_feature (12)..(391): NCBI GI: 39959907 Blast Desc: MGG_09398 [Magnaporthe grisea 70-15] gi|145014360|gb|EDJ98928.1| MGG_09398 [Magnaporthe grisea 70-15]
  misc_feature (2)..(336): NCBI GI: 261354251 Blast Desc: conserved [Verticillium albo-atrum VaMs.102]
  misc_feature (2)..(322): NCBI GI: 238577943 Blast Desc: MPER_12419 [Moniliophthora perniciosa FA553] gi|215449932|gb|EEB89476.1| MPER_12419 [Moniliophthora perniciosa FA553]
  misc_feature (12)..(323): NCBI GI: 261355684 Blast Desc: L-ascorbate peroxidase [Verticillium albo-atrum VaMs.102]
  misc_feature (2)..(337): NCBI GI: 156060705 Blast Desc: SS1G_02495 [Sclerotinia sclerotiorum 1980] gi|154699899|gb|EDN99637.1| SS1G_02495 [Sclerotinia sclerotiorum 1980]
  misc_feature (2)..(337): NCBI GI: 154314024 Blast Desc: BC1G_04955 [Botryotinia fuckeliana B05.10] gi|150849101|gb|EDN24294.1| BC1G_04955 [Botryotinia fuckeliana B05.10]
  misc_feature: Useful for introducing or modulating the production of volatile compounds
MFYYPSPQISALEHVLVDNFGAYASNFSSAITPCTNYVTEVGEPAKNSGRTTAAQWIRVVFHDAVTANVSAGTGGVDASIGFETFRDENKGSAFNDSFTFWQPYVNEFIPMADLVALGTVMSVNLCGGHQMPFQPGRVDAIQADPTTGVPEPGTSVDETLDQFERAGFNQTDAIGLTACGHTLGSVHHSGFPEVSDNSTVSENNTNGGINFDSSRGAFDPLVVHEYIDGTGQRGGSLVTSYNETSRSDLRLYESDQNATMKAFYDQGDGFLDTCVDLFVRLINTVPSHAKLGENIQPMDIKPINVTWDLNGDGQLALSGRIRFLSQQTTANSSSIAFSSGYTQDLTLEDETGDSVFGTTQFTPFSIDYSKIKGSSSFQVSRPGFETETFDFQAQNFIIPSLTTATSSYVNVTVAVAKGSNLPGLTAKITVPVLQPLTLAPKLSSVEVELQKGADLDQDFEIWQGTSDIGQPTGAVSVRIEKDGETLDTLLLDAGVAGW

SEQ ID NO: 17500 - DNA, 2336 bp, Muscodor strobelii
  misc_feature: SGI EST ID NO. CUFF.41209.0
  misc_feature: Variant of the nucleotide sequence at SEQ ID NO 17498
tgccacgtggggactacttctaaccgtagcggtcgcgagtatcctgtttgaggctttcgcacaattatcgtgaattatcgaacaagtgccgagcaagtggactaaaagatcctagagcagatcagtggatagcaagtgcggtggcaaaaataaagtctttgcaaataggaagtatgccatcgtcgaagcccttgacgatactgcggcttcgttccagttttactccacatggcaaattatcatcttcttgtggacctatatctcggagaagctgattattaaaccatggatacgattggactgccttatttgtggtgtaccctgctatcagggcttcatactaaaatatttaagatgtcttcattttgcaaatgcaaagtgggatgaatcaggtctgcaataatcaacaatgttctattatcctagcccccagatttccgccttggaacatgtcctagtcgacaacttcggcgcatacgcctcaaacttctcgtcagctatcacgccatgcaccaactacgtgacagaagtaggggaacctgcgaagaattctggccgtacaacagctgcgcaatggatacgagtagtgttccacgatgcagtcacagcgaacgtgtctgctgggacaggaggtgtagacgcaagtattggatttgagacttttcgcgatgagaataaaggcagtgctttcaacgactcctttacattctggcaaccatacgtgaatgagtttataccaatggcggacttggtagccctaggaactgtcatgtctgtcaatctttgcggtgggcaccagatgccattccagcctggacgcgttgatgccattcaagctgaccctacgaccggagtacctgagcctggtacgagtgttgacgaaacactggaccagttcgaaagagctgggttcaaccaaactgatgcgataggcttaacagcatgtggccatacacttgggtccgtacatcatagcggctttccagaagtttccgataactcgacggtctctgagaacaacaccaacggcggtataaactttgattcttcccgaggcgcgtttgatccattagtcgtccatgagtacatcgacggaacaggacaacgtggaggatctctcgtaacaagctacaacgagacgagcagatcagatcttcggctctatgaaagcgaccagaatgctacaatgaaggcattctacgaccaaggcgatggatttctagacacatgtgttgatctatttgtacgcttgatcaacacagttccttcccacgcgaagctcggcgaaaacattcaacccatggatattaagcccatcaatgtgacatgggacttgaacggagatggccaactagccttgtcaggaagaatacgatttctcagtcagcaaacaaccgccaactcgagtagtatagcgttctcaagcggctacacgcaggatctaactttggaagatgagacgggtgattcagtgttcggcactacccaattcaccccgttctcaatcgattactcgaaaatcaagggatcctcatcatttcaagtatcccgtccaggcttcgaaacggaaacgttcgactttcaagcccaaaatttcatcataccatctctaaccacagccacaagctcctatgtgaatgtgactgtggctgttgcaaagggatcaaacctccctggcctaacagcaaaaattacggtccccgttctgcagcccctaactctggcaccaaaactgtcttccgtcgaagtcgagcttcaaaaaggagcggatctcgaccaagacttcgagatctggcagggcacatctgacatcgggcaaccaacaggtgcagtgagtgttcggattgagaaagacggcgagaccctcgatactctactacttgatgctggtgttgcgggttggtaactttggtcaaaatcatcgacctttgagcattgcgaaacagacgcgtcgcgctctcgatgcaacgctatgtctatctcgtgactcagtagagctattgaagactggtctttgataaatcttccggaaacgacccatgaagatggtgtaatgtggaatacttggtggttgaacaaatagggagaaatattggagcagtatcgatccggagattaccagtctccatagacggcgttattcggcctggaaatatggattttgccgttcaaaatggaagtccgatgagccaattataggcgatcctctacccagctatttcaatttgacctcagtgtagtcaactgctcttagggtcttcatacagaagttgtagcaaaattttaacatgccaatttttgatatgaacttctgagatctagaagtttaatctgta

SEQ ID NO: 17501 - DNA, 2259 bp, Muscodor strobelii
  misc_feature: SGI cDNA ID NO. 565846
  misc_feature: Encodes the peptide sequence at SEQ ID NO 17502
atgagtttcctcaggccaagcttcggcagcacgctgctgatccttggactgatcttggtattgatgccaaccaaggctgcggctttcggtgctggaaacattccttctattgctcaagtcgagggtcacaactggcgtcatggcgacatcgaggatatgctcaagacaattgccttcttacatgggaagaaatggactactttgctggtccaacgtacgtatttcggtaactggctacgtgattattctcaagcagtcgacgtgggaagtctgaagggagtgaacgctgagacaattcgcatccttgtatgggtcttatctttccttgcgaatggatatgctaccgaggaatttgaggtcactgcagagcgtctcggagtatatcggcctgaggagcatatcgataatcctttaggttatgcggataacaaagacgctcgagaattcgacagacgcttgcgaggccctgtcatgccagtcgagacagagatcgacatgcacactggcatgaaaaattacattgccaatgaacgaggaaactgggccacaagtgctggatatcttaggttcagtttcggccgcagcatccactatggaagaatgtacactcatggatcccaaggcaaggggaaagaagaagatctttgcgaggccttgcgatgtcttggtcaagctcttcattgcatggaagatttcagtgcccacagcaactactgtgaattggctctgcgcgaaatgggataccgcaacgttttcccacactgcggcgaacgtactgagattagcctgcgcagtcaccgaggagatcatgtccgcgtcttccctcttgtgacggggactttcggcggcgttgacttcctgcactccgtactgggcgaagccaacgatcactttacacaatccgaagtcgaccagttagatattgctctcaaaaactccgaaaagggcacggcgccaggtagcaccgacggtgctcgcggatttggttcaggacttttcggtggaggcggcaacgatttcatttcgcttgtcagtcagctgcccggcataggaggcgggatggcttctgaggcgaaaaacctcaagcgcatggcgcaggagcaggaggacagaaactctcacagcagcggatattcctctacaagagccaatgttaaccatgtccccggcatgagtgagaactttgatcctgttaaggtctctaaacaggtttaccctatcttggagttccgcgacaagattgttaaatccatcaacagaggaatagctaaaattcctgggcttgagagcttattggagaaaatcggcgagaccttgacagcatttgtgcttggattattagcaccgttcatccgacctattatcagcgctgtcaccaaggcactcaaggacggttcgtcaggcgtcatcgatgccagtgcccactcgcagcttgaaccatggaggaatcctaactgcagcgatccgacacactctatgctctcaaaagatcacttcacaaatgtgctgaactcctgtgctggccgagttgccagtaccattctgcaatatgttgtcccgcgtattttgtacgcctgggataaccctggcgtacccgttgacgaagttgtcaacgacgttcttagagctttccatcatcctgccctcagagatgaaagaatcgagattcaacgagacatgtataacactgttcacaagtgggcgcaagagtatcgcggaggacgagataagctcaaccacgttctcggatccgaatcggtaaaggctgggaagaaccatatccaatcaggaactaaaggtcactcgcacggtggtggtatcttcgatggtggtatcatggagcagctcggccatggaagaccgaagggttcattgtgggatcagtgcgcaactcgagatttagatgcgatgggagcaggaacaagtcctcgccctccatcgaattactccaacccgagttcaggttatggaggggcaccgcaacaaccgccaccgactcatggcgaagctgcctcatacttttctggcggatcccaacaaagccaggggcatcatccggattatcatcagggatatcctcagggacatcatcaaggacagcatcaggactactatggcggtggggggccgccgccgccagccccgccgcctggctatcaacctggctatcaatccgaatatcaacaacctccttatcctccgtacccccaacaaccgcaatatggcggaggtcaaggtcaaccaccgtacccctactag

SEQ ID NO: 17502 - protein, 752 aa, Muscodor strobelii
  misc_feature: SGI Peptide ID NO. 565846
  misc_feature (1)..(632): Pfam Id: PF07217 Pfam Desc: Heterokaryon incompatibility protein Het-C
  misc_feature (6)..(746): NCBI GI: 46121569 Blast Desc: FG05163.1 [Gibberella zeae PH-1]
  misc_feature (6)..(656): NCBI GI: 67772310 Blast Desc: hch [Fusarium proliferatum]
  misc_feature (1)..(648): NCBI GI: 171690006 Blast Desc: protein product [Podospora anserina] gi|5852937|gb|AAD54275.1|AF169793_1 HET-C protein [Podospora anserina] gi|170944958|emb|CAP71069.1| protein product [Podospora
  misc_feature (1)..(690): NCBI GI: 156064873 Blast Desc: SS1G_00446 [Sclerotinia sclerotiorum 1980] gi|154691306|gb|EDN91044.1| SS1G_00446 [Sclerotinia sclerotiorum 1980]
  misc_feature (1)..(684): NCBI GI: 154322635 Blast Desc: BC1G_00660 [Botryotinia fuckeliana B05.10] gi|150847994|gb|EDN23187.1| BC1G_00660 [Botryotinia fuckeliana B05.10]
  misc_feature (1)..(684): NCBI GI: 14029167 Blast Desc: Bc-hch [Botryotinia fuckeliana]
  misc_feature (1)..(676): NCBI GI: 116200111 Blast Desc: CHGG_08211 [Chaetomium globosum CBS 148.51] gi|88179490|gb|EAQ86958.1| CHGG_08211 [Chaetomium globosum CBS 148.51]
  misc_feature (1)..(728): NCBI GI: 1261823 Blast Desc: glycine rich protein [Neurospora crassa]
  misc_feature (1)..(752): NCBI GI: 6425091 Blast Desc: AF196305_1 heterokaryon incompatibility protein HET-C [Neurospora crassa]
  misc_feature (1)..(728): NCBI GI: 18376334 Blast Desc: glycine rich protein (het-COR) [Neurospora crassa]
MSFLRPSFGSTLLILGLILVLMPTKAAAFGAGNIPSIAQVEGHNWRHGDIEDMLKTIAFLHGKKWTTLLVQRTYFGNWLRDYSQAVDVGSLKGVNAETIRILVWVLSFLANGYATEEFEVTAERLGVYRPEEHIDNPLGYADNKDAREFDRRLRGPVMPVETEIDMHTGMKNYIANERGNWATSAGYLRFSFGRSIHYGRMYTHGSQGKGKEEDLCEALRCLGQALHCMEDFSAHSNYCELALREMGYRNVFPHCGERTEISLRSHRGDHVRVFPLVTGTFGGVDFLHSVLGEANDHFTQSEVDQLDIALKNSEKGTAPGSTDGARGFGSGLFGGGGNDFISLVSQLPGIGGGMASEAKNLKRMAQEQEDRNSHSSGYSSTRANVNHVPGMSENFDPVKVSKQVYPILEFRDKIVKSINRGIAKIPGLESLLEKIGETLTAFVLGLLAPFIRPIISAVTKALKDGSSGVIDASAHSQLEPWRNPNCSDPTHSMLSKDHFTNVLNSCAGRVASTILQYVVPRILYAWDNPGVPVDEVVNDVLRAFHHPALRDERIEIQRDMYNTVHKWAQEYRGGRDKLNHVLGSESVKAGKNHIQSGTKGHSHGGGIFDGGIMEQLGHGRPKGSLWDQCATRDLDAMGAGTSPRPPSNYSNPSSGYGGAPQQPPPTHGEAASYFSGGSQQSQGHHPDYHQGYPQGHHQGQHQDYYGGGGPPPPAPPPGYQPGYQSEYQQPPYPPYPQQPQYGGGQGQPPYPY

SEQ ID NO: 17503 - DNA, 2896 bp, Muscodor strobelii
  misc_feature: SGI EST ID NO. CUFF.41243.0
  misc_feature: Variant of the nucleotide sequence at SEQ ID NO 17501
gtcatctttgtcgcgattgaggtctccaacaacctaaccaggcaccttctttgtgcatttttaacctacgccctccctaagaagatcaaaaagggctaaaatctcgataataacggctgcgtttcattttccagctgtgagcgatacaccaaagctgtgcggtcgcagccagcacaggatttaagcaaaatgagtttcctcaggccaagcttcggcagcacgctgctgatccttggactgatcttggtattgatgccaaccaaggctgcggctttcggtgctggaaacattccttctattgctcaagtcgagggtcacaactggcgtcatggcgacatcgaggatatgctcaagacaattgccttcttacatgggaagaaatggactactttgctggtccaacgtacgtatttcggtaactggctacgtgattattctcaagcagtcgacgtgggaagtctgaagggagtgaacgctgagacaattcgcatccttgtatgggtcttatctttccttgcgaatggatatgctaccgaggaatttgaggtcactgcagagcgtctcggagtatatcggcctgaggagcatatcgataatcctttaggttatgcggataacaaagacgctcgagaattcgacagacgcttgcgaggccctgtcatgccagtcgagacagagatcgacatgcacactggcatgaaaaattacattgccaatgaacgaggaaactgggccacaagtgctggatatcttaggttcagtttcggccgcagcatccactatggaagaatgtacactcatggatcccaaggcaaggggaaagaagaagatctttgcgaggccttgcgatgtcttggtcaagctcttcattgcatggaagatttcagtgcccacagcaactactgtgaattggctctgcgcgaaatgggataccgcaacgttttcccacactgcggcgaacgtactgagattagcctgcgcagtcaccgaggagatcatgtccgcgtcttccctcttgtgacggggactttcggcggcgttgacttcctgcactccgtactgggcgaagccaacgatcactttacacaatccgaagtcgaccagttagatattgctctcaaaaactccgaaaagggcacggcgccaggtagcaccgacggtgctcgcggatttggttcaggacttttcggtggaggcggcaacgatttcatttcgcttgtcagtcagctgcccggcataggaggcgggatggcttctgaggcgaaaaacctcaagcgcatggcgcaggagcaggaggacagaaactctcacagcagcggatattcctctacaagagccaatgttaaccatgtccccggcatgagtgagaactttgatcctgttaaggtctctaaacaggtttaccctatcttggagttccgcgacaagattgttaaatccatcaacagaggaatagctaaaattcctgggcttgagagcttattggagaaaatcggcgagaccttgacagcatttgtgcttggattattagcaccgttcatccgacctattatcagcgctgtcaccaaggcactcaaggacggttcgtcaggcgtcatcgatgccagtgcccactcgcagcttgaaccatggaggaatcctaactgcagcgatccgacacactctatgctctcaaaagatcacttcacaaatgtgctgaactcctgtgctggccgagttgccagtaccattctgcaatatgttgtcccgtaagtagaaccctaaatttgtatagacctcaagctaagtttgtgacaggcgtattttgtacgcctgggataaccctggcgtacccgttgacgaagttgtcaacgacgttcttagagctttccatcatcctgccctcagagatgaaagaatcgagattcaacgagacatgtataacactgttcacaagtgggcgcaagagtatcgcggaggacgagataagctcaaccacgttctcggatccgaatcggtaaaggctgggaagaaccatatccaatcaggaactaaaggtcactcgcacggtggtggtatcttcgatggtggtatcatggagcagctcggccatggaagaccgaagggttcattgtgggatcagtgcgcaactcgagatttagatgcgatgggagcaggaacaagtcctcgccctccatcgaattactccaacccgagttcaggttatggaggggcaccgcaacaaccgccaccgactcatggcgaagctgcctcatacttttctggcggatcccaacaaagccaggggcatcatccggattatcatcagggatatcctcagggacatcatcaaggacagcatcaggactactatggcggtggggggccgccgccgccagccccgccgcctggctatcaacctggctatcaatccgaatatcaacaacctccttatcctccgtacccccaacaaccgcaatatggcggaggtcaaggtcaaccaccgtacccctactagactcaatacatggagcacgatactggacttttagtctgtcagaaatggtgaggtaggtggcgcgcttaccgagagtgattaagaatagtcttctaaggattaaaaatacccaattgattcataatacgcctatcaataatatatgctactccctactctgaccgctctcgctcgttaagtaaagcgctataacatcaaaacaccaggaattggtacagtagtgactgtgatactaaagccgcggtaaacaaatgatgagctcttattccagatcaaactgaattatgacttagtatcatgctgttctccctgtggctactagagacacctagtcgcgtggttgtgaaatgggatctggcaacacggctctttaagcgtgactcgaaccgtggaagcagc

SEQ ID NO: 17504 - DNA, 903 bp, Muscodor strobelii
  misc_feature: SGI cDNA ID NO. 565847
  misc_feature: Reduced expression when VOC is produced
  misc_feature: Encodes the peptide sequence at SEQ ID NO 17505
atgttcacttacgttgtggcgctgtgcgctgtgctccttgtgctcaacagttcagtactacagaatctcaacattctctcaagcgaaccacagcgcataccacgaacacctcgtccgcccatcaatgagagtctcctagcgatagattcagccggagcggaagatccacaatgtcctgatcatcgctttgacggtattcatgtcttctcgagggcgccgctggtcatctacgtcgaaggcttcatgagtctggaagaacgggaagagctcctaagcctgagtgaacccctcttcgcgccctctaccacaacttcagatgggaatcatatctcccgtgacacaagcattcgagactcggaagttgcgctcttaccaagggtagatgtggtgcgatgcctggagcggagggcactggccctgcagggctggcgcgacgaactgtggatcgaacgcctacgtacccaacggtacgttgctggtggccactatacgcaccattttgactggggcagtggtgctagaggctggggtcgtgtgagtagtggaatggcatgggtgggctcaagtgatctggaaggtggcggcacagaattcccgtctctgaggaagcgaaaagaaggagagtggtgcaaattcatcgaatgtcctgatgttaagcatgagaaagggccacaactggaggcaaacaatcaaaaagtcgtggctcgcgatgctaaacatgaactatcggatgacgaacttggggttacttttagagtcgtacctggcaatgcggtgttttggtggaactttagacctgatggcactggtcgaggattcgatgagacctggcatgctggtcttccagtaaagaatggcaaaaaagtcgggttgaatatctggagctggggaagactggactga

SEQ ID NO: 17505 - protein, 300 aa, Muscodor strobelii
  misc_feature: SGI Peptide ID NO. 565847
  misc_feature (36)..(299): NCBI GI: 46122191 Blast Desc: FG05473.1 [Gibberella zeae PH-1]
  misc_feature (1)..(300): NCBI GI: 85080725 Blast Desc: NCU00207 [Neurospora crassa OR74A] gi|28917662|gb|EAA27356.1| conserved [Neurospora crassa OR74A]
  misc_feature (1)..(300): NCBI GI: 171685630 Blast Desc: protein product [Podospora anserina] gi|170942776|emb|CAP68429.1| protein product [Podospora anserina]
  misc_feature (7)..(299): NCBI GI: 256729720 Blast Desc: NECHADRAFT_71135 [Nectria haematococca mpVI 77-13-4]
  misc_feature (1)..(298): NCBI GI: 156048362 Blast Desc: SS1G_08912 [Sclerotinia sclerotiorum 1980] gi|154693309|gb|EDN93047.1| SS1G_08912 [Sclerotinia sclerotiorum 1980]
  misc_feature (41)..(298): NCBI GI: 154300704 Blast Desc: BC1G_10940 [Botryotinia fuckeliana B05.10] gi|150856547|gb|EDN31739.1| BC1G_10940 [Botryotinia fuckeliana B05.10]
  misc_feature (5)..(300): NCBI GI: 39976751 Blast Desc: MGG_06278 [Magnaporthe grisea 70-15] gi|145016324|gb|EDK00814.1| MGG_06278 [Magnaporthe grisea 70-15]
  misc_feature (58)..(296): NCBI GI: 169601488 Blast Desc: SNOG_03610 [Phaeosphaeria nodorum SN15] gi|111067695|gb|EAT88815.1| SNOG_03610 [Phaeosphaeria nodorum SN15]
  misc_feature (39)..(296): NCBI GI: 169770869 Blast Desc: [Aspergillus oryzae RIB40] gi|83767763|dbj|BAE57902.1| protein product [Aspergillus oryzae]
  misc_feature (56)..(296): NCBI GI: 145233095 Blast Desc: An02g07870 [Aspergillus niger] gi|134056845|emb|CAK37750.1| protein product [Aspergillus niger]
  misc_feature: Useful for introducing or modulating the production of volatile compounds
MFTYVVALCAVLLVLNSSVLQNLNILSSEPQRIPRTPRPPINESLLAIDSAGAEDPQCPDHRFDGIHVFSRAPLVIYVEGFMSLEEREELLSLSEPLFAPSTTTSDGNHISRDTSIRDSEVALLPRVDVVRCLERRALALQGWRDELWIERLRTQRYVAGGHYTHHFDWGSGARGWGRVSSGMAWVGSSDLEGGGTEFPSLRKRKEGEWCKFIECPDVKHEKGPQLEANNQKVVARDAKHELSDDELGVTFRVVPGNAVFWWNFRPDGTGRGFDETWHAGLPVKNGKKVGLNIWSWGRLD

SEQ ID NO: 17506 - DNA, 1491 bp, Muscodor strobelii
  misc_feature: SGI EST ID NO. CUFF.41092.0
  misc_feature: Variant of the nucleotide sequence at SEQ ID NO 17504
ggtcacaacgccatcaatcagggttgcatcaatatggcttcgttgaagagcacgtcattcttcatgtcttggttaaatattctgattatctcatatgattcattgacgcttccacggaagcgccgctctgtacgagttgtagttcacggaactactagtcggttcatgtttacgggatctgcgagtgcctagaacatgtgttttacaggcttgccaagggaccaccacccactggaccctgaactcacaccacaataggtatgctcgaatccttcaccaatcctgggctgtcactactgccggattcgaaaaattcacaacaaccttggaagctcttcttctaccccaagtatagatgcgagacaatcactgcgctttttcaggggtagaagtcgtaacagcgagtaacgactcaatggacactttacttcattgaacatgttcacttacgttgtggcgctgtgcgctgtgctccttgtgctcaacagttcagtactacagaatctcaacattctctcaagcgaaccacagcgcataccacgaacacctcgtccgcccatcaatgagagtctcctagcgatagattcagccggagcggaagatccacaatgtcctgatcatcgctttgacggtattcatgtcttctcgagggcgccgctggtcatctacgtcgaaggcttcatgagtctggaagaacgggaagagctcctaagcctgagtgaacccctcttcgcgccctctaccacaacttcagatgggaatcatatctcccgtgacacaagcattcgagactcggaagttgcgctcttaccaagggtagatgtggtgcgatgcctggagcggagggcactggccctgcagggctggcgcgacgaactgtggatcgaacgcctacgtacccaacggtacgttgctggtggccactatacgcaccattttgactggggcagtggtgctagaggctggggtcgtgtgagtagtggaatggcatgggtgggctcaagtgatctggaaggtggcggcacagaattcccgtctctgaggaagcgaaaagaaggagagtggtgcaaattcatcgaatgtcctgatgttaagcatgagaaagggccacaactggaggcaaacaatcaaaaagtcgtggctcgcgatgctaaacatgaactatcggatgacgaacttggggttacttttagagtcgtacctggcaatgcggtgttttggtggaactttagacctgatggcactggtcgaggattcgatgagacctggcatgctggtcttccagtaaagaatggcaaaaaagtcgggttgaatatctggagctggggaagactggactgataaccggccctcaattacagtgtatgatgcatatcacatgattctatttactcactgcgcacctgatattattgttatgtaggagaagcattttcgaatcgaagagctttttgcaccttggagagtaattggacatgcctttcacccgat

SEQ ID NO: 17507 - DNA, 1248 bp, Muscodor strobelii
  misc_feature: SGI cDNA ID NO. 565848
  misc_feature: Encodes the peptide sequence at SEQ ID NO 17508
atgccactgtccatcggcagaaatctctctcctttgccccaacctcttagggagccagcttccaactcaccccatattcttatcattggaggcggcgtcactggccttgtcaacgcatgggttctcctagatcgtggctaccgtgtcacagtcgttagcaatgcatgggttagtgatgagactcgcttgacctcccagatcgccggagcactttgggagttcccgcccgccgtgtgtggacagcataccgataagatatcgcttgcgcattctaagagatggtgcatgattgcatatcatatctgggaccaaattgcctcgatcccatcattgagcgaacaatctggcgtacgcatgatgccatcggacttcttctttcccaccgagattgagaacgatcccaaacaaatgtcaaagatggctgagatcatggcgagtggtgtgagaggcttctacagaggagctgacatcattgatgatcgaagagtagacccagcatacggcgctattgatgcctacgagctgatggcaccaatcattgacaccgacaaggctatgcactggctgacagatcttgtcgaaggcaagggtgctattctcgtcaccgagactgtcgatggtgatctcatcgacctcgaggactcccttctcgaacgtttcgacgcagatatcattgtcaactgcacggggctgcagagctacacgcttgcaggggaccagtctgtttaccctattagagggggtcttattcgagtcatcaacgatgggaaggactttcctaaagtgactgcagccttgacaattaccgctgatgcggctcattcatcgaacgagatcgtgttccttgtaccaaggaacgacaacatcctgctgattggtgggatcaccgaaccacacaagtacgaccttgatcttacgttggatagccccatcatccgtaggatgcgagaaagatgtgagaacttcttacctgggctcaaagatgctagacttgacccggactaccccttggcccaaggactacgaccgttcagaggtagtaacgtgagggtcgaacgtgagcttcgacggacaggaagcaaggtggtgcactcgtacggtcacggcggcgctggttggagcttgtctttcggctgtgctcaagacgtattgggcctcgtcgaagagacattggcgggtgtacccgcaacgccaatgcacgaaagagttgtggatcggctcagaaaggagaagagaggttcattctga

SEQ ID NO: 17508 - protein, 415 aa, Muscodor strobelii
  misc_feature: SGI Peptide ID NO. 565848
  misc_feature (25)..(386): Pfam Id: PF01266 Pfam Desc: FAD dependent oxidoreductase
  misc_feature (179)..(386): Pfam Id: PF01266 Pfam Desc: FAD dependent oxidoreductase
  misc_feature (25)..(52): Pfam Id: PF01266 Pfam Desc: FAD dependent oxidoreductase
  misc_feature (25)..(52): Pfam Id: PF00070 Pfam Desc: Pyridine nucleotide-disulphide oxidoreductase
  misc_feature (3)..(410): NCBI GI: 169614339 Blast Desc: SNOG_10311 [Phaeosphaeria nodorum SN15] gi|111061526|gb|EAT82646.1| SNOG_10311 [Phaeosphaeria nodorum SN15]
  misc_feature (2)..(407): NCBI GI: 258577815 Blast Desc: [Uncinocarpus reesii 1704] gi|237903355|gb|EEP77756.1| [Uncinocarpus reesii 1704]
  misc_feature (2)..(391): NCBI GI: 240110168 Blast Desc: FAD dependent oxidoreductase family protein [Coccidioides posadasii C735 delta SOWgp]
  misc_feature (2)..(391): NCBI GI: 119179657 Blast Desc: CIMG_08541 [Coccidioides immitis RS]
  misc_feature (2)..(388): NCBI GI: 169775625 Blast Desc: [Aspergillus oryzae RIB40] gi|83771014|dbj|BAE61146.1| protein product [Aspergillus oryzae]
  misc_feature (9)..(388): NCBI GI: 238502255 Blast Desc: D-amino acid oxidase, [Aspergillus flavus NRRL3357] gi|220691171|gb|EED47519.1| D-amino acid oxidase, [Aspergillus flavus NRRL3357]
  misc_feature (15)..(392): NCBI GI: 238576027 Blast Desc: MPER_13168 [Moniliophthora perniciosa FA553] gi|215448727|gb|EEB88815.1| MPER_13168 [Moniliophthora perniciosa FA553]
  misc_feature (21)..(391): NCBI GI: 271969999 Blast Desc: D-aspartate oxidase [Streptosporangium roseum DSM 43021] gi|270513174|gb|ACZ91452.1| D-aspartate oxidase [Streptosporangium roseum DSM 43021]
  misc_feature (18)..(391): NCBI GI: 282896975 Blast Desc: D-amino-acid oxidase [Raphidiopsis brookii D9] gi|281198148|gb|EFA73040.1| D-amino-acid oxidase [Raphidiopsis brookii D9]
  misc_feature (22)..(391): NCBI GI: 282901097 Blast Desc: D-amino-acid oxidase [Cylindrospermopsis raciborskii CS-505] gi|281193996|gb|EFA68961.1| D-amino-acid oxidase [Cylindrospermopsis raciborskii CS-505]
  misc_feature (125)..(407): SWISSPROT Homolog: EC 1.4.3.1 D-aspartate oxidase
MPLSIGRNLSPLPQPLREPASNSPHILIIGGGVTGLVNAWVLLDRGYRVTVVSNAWVSDETRLTSQIAGALWEFPPAVCGQHTDKISLAHSKRWCMIAYHIWDQIASIPSLSEQSGVRMMPSDFFFPTEIENDPKQMSKMAEIMASGVRGFYRGADIIDDRRVDPAYGAIDAYELMAPIIDTDKAMHWLTDLVEGKGAILVTETVDGDLIDLEDSLLERFDADIIVNCTGLQSYTLAGDQSVYPIRGGLIRVINDGKDFPKVTAALTITADAAHSSNEIVFLVPRNDNILLIGGITEPHKYDLDLTLDSPIIRRMRERCENFLPGLKDARLDPDYPLAQGLRPFRGSNVRVERELRRTGSKVVHSYGHGGAGWSLSFGCAQDVLGLVEETLAGVPATPMHERVVDRLRKEKRGSF

SEQ ID NO: 17509 - DNA, 741 bp, Muscodor strobelii
  misc_feature: SGI cDNA ID NO. 565849
  misc_feature: Reduced expression when VOC is produced
  misc_feature: Encodes the peptide sequence at SEQ ID NO 17510
atggattcctacgcggtggagtcttggaatgagaaacatccccaacggggagaagccacagacgagaagtcagcctggaccgaagagatggcccagccagtcatgggcagcgagcgcctcacacttaactctttgtccctctaccgccagcctcccgtcaacttcggccaggttatgcctggtgtctaccgtagtggctaccctgctgccgctgattatcccttcatccaaactctcaagctcaagacgattgtcaccctcgtcagcaaagagcttcccgatggctaccacgacttcatgtgcgctaacaagatcacccacaagatcttcgacatgggtgggaccaagaaagaagagatccccgccgagctcatgcgttccatcatggctgtagtgtccaaggaagacaactaccccctcctcatccactgtaaccagggcaagcatcggacaggctgtgtggtcggagtcattcgcaagcacagcggctgggccgccaagagcatcattgacgagtacaccaagtttgcggagcccaaagtgcgacagactgacgtgcagtacctcacgaagctggagctcagcaccctgatgctggcacccaaagcgactacgatgaccggtaccattggccgattctgccgattcgctattatggccgccttggcactcttcaccttctatcccattggcaaatttaggataccaccaccaccacctcaggcgaaacagtctttatag

SEQ ID NO: 17510 - protein, 246 aa, Muscodor strobelii
  misc_feature: SGI Peptide ID NO. 565849
  misc_feature (51)..(210): Pfam Id: PF03162 Pfam Desc: Tyrosine phosphatase family
  misc_feature (51)..(190): Pfam Id: PF03162 Pfam Desc: Tyrosine phosphatase family
  misc_feature (52)..(228): NCBI GI: 116199785 Blast Desc: CHGG_08048 [Chaetomium globosum CBS 148.51] gi|88179327|gb|EAQ86795.1| CHGG_08048 [Chaetomium globosum CBS 148.51]
  misc_feature (52)..(236): NCBI GI: 85079914 Blast Desc: NCU03333 [Neurospora crassa OR74A] gi|28917507|gb|EAA27206.1| [Neurospora crassa OR74A]
  misc_feature (52)..(230): NCBI GI: 145606989 Blast Desc: MGG_12093 [Magnaporthe grisea 70-15] gi|145014610|gb|EDJ99178.1| MGG_12093 [Magnaporthe grisea 70-15]
  misc_feature (31)..(234): NCBI GI: 261357277 Blast Desc: tyrosine-protein phosphatase SIW14 [Verticillium albo-atrum VaMs.102]
  misc_feature (52)..(203): NCBI GI: 256730527 Blast Desc: NECHADRAFT_30066 [Nectria haematococca mpVI 77-13-4]
  misc_feature (52)..(200): NCBI GI: 46109578 Blast Desc: FG01671.1 [Gibberella zeae PH-1]
  misc_feature (52)..(197): NCBI GI: 156059848 Blast Desc: SS1G_03937 [Sclerotinia sclerotiorum 1980] gi|154701723|gb|EDO01462.1| SS1G_03937 [Sclerotinia sclerotiorum 1980]
  misc_feature (53)..(228): NCBI GI: 154315986 Blast Desc: BC1G_04565 [Botryotinia fuckeliana B05.10] gi|150846961|gb|EDN22154.1| BC1G_04565 [Botryotinia fuckeliana B05.10]
  misc_feature (51)..(221): NCBI GI: 168053205 Blast Desc: [Physcomitrella patens subsp. patens] gi|162669590|gb|EDQ56174.1| [Physcomitrella patens subsp. patens]
  misc_feature (51)..(207): NCBI GI: 255587792 Blast Desc: Tyrosine-protein phosphatase SIW14, [Ricinus communis] gi|223525370|gb|EEF27985.1| Tyrosine-protein phosphatase SIW14, [Ricinus communis]
  misc_feature (47)..(207): SWISSPROT Homolog: EC 3.1.3.48 Protein-tyrosine-phosphatase
  misc_feature: Useful for introducing or modulating the production of volatile compounds
MDSYAVESWNEKHPQRGEATDEKSAWTEEMAQPVMGSERLTLNSLSLYRQPPVNFGQVMPGVYRSGYPAAADYPFIQTLKLKTIVTLVSKELPDGYHDFMCANKITHKIFDMGGTKKEEIPAELMRSIMAVVSKEDNYPLLIHCNQGKHRTGCVVGVIRKHSGWAAKSIIDEYTKFAEPKVRQTDVQYLTKLELSTLMLAPKATTMTGTIGRFCRFAIMAALALFTFYPIGKFRIPPPPPQAKQSL

SEQ ID NO: 17511 - DNA, 2300 bp, Muscodor strobelii
  misc_feature: SGI EST ID NO. CUFF.41223.0
  misc_feature: Variant of the nucleotide sequence at SEQ ID NO 17509
gcttgctaagctggcaggtgaatgagatgaatggaagccggaacttgctcatgtccactaacaatcaaacatgctttatgacaatgcgggtgtagaaactctgctcaagctttctgtgtacttggtatcctgtacaagtactggagtgcagacacaccaaccgagaagctgggaagtgcaaaagtggcgtcgaaagtcggaacaaagaagtcactcggaacagcgatagttcagtcggatcgatccccgttcaacccattcgagaccccagccggactcgccagctaaaaggcgaggcgaggccaagaaagcagccccaaaaacaagtgcaaagtcgtccaaacagtcgcccttgtgccccacaccgtctgtttttggcgactccatcgtcgacctcgttttaaacttcaccggccgccttcgcttcccacctgtgacccgttcacacttctatctccgtggccccttcgcactcgtctgacttgcatttctacttctcaatattggtcatcccgacattcaacttctcctccatcaacaacgtcaccctctccaaccacgttcatcagcgcctctgtccagcaccgtgcatggacaacgcctagacttcccatcttcattcgaccattccgacatgaatatcaattctactgtcaccatggcgcgctttttggactctctgtaacctcacgttccaattcggagctttaggaccacgcacatcacacatcacacatcactctctcgtctgctcagtaacaacatcgctgtacaccctctcttgagcctgtagctcggtttaatctacaccacgattcccgacctcaacgtcactttcaactttgaggaacattttcaaccagagctcagacgggtccaatctattgactcatagctcaagagtcatctacaacggcttcattcacgcgctcagcatcgtaatccagcctcggccaagtacttacacaagacggacacgatggattcctacgcggtggagtcttggaatgagaaacatccccaacggggagaagccacagacgagaagtcagcctggaccgaagagatggcccagccagtcatgggcagcgagcgcctcacacttaactctttgtccctctaccgccagcctcccgtcaacttcggccaggttatgcctggtgtctaccgtagtggctaccctgctgccgctgattatcccttcatccaaactctcaagctcaagacgattgtcaccctcgtcagcaaagagcttcccgatggctaccacgacttcatgtgcgctaacaagatcacccacaagatcttcgacatgggtgggaccaagaaagaagagatccccgccgagctcatgcgttccatcatggctgtagtgtccaaggaagacaactaccccctcctcatccactgtaaccagggcaagcatcggacaggctgtgtggtcggagtcattcgcaagcacagcggctgggccgccaagagcatcattgacgagtacaccaagtttgcggagcccaaagtgcgacagactgacgtgcagtacctcacgaagctggagctcagcaccctgatgctggcacccaaagcgactacgatgaccggtaccattggccgattctgccgattcgctattatggccgccttggcactcttcaccttctatcccattggcaaatttaggataccaccaccaccacctcaggcgaaacagtctttatagagctcgttccattcagacaacgaaggactgggcataacgcctcagaaaggcgagaaactggttatagcgccaatcctgagaagtacacgacaacacaattagattccggccgggctgagcatcgccgattgagagcgactgatccaagtctggtctttttttcttttgtcattcttttgtccagggcggcgggaaaactgaggggttttgattttgtgataaaaatttggcccggcgttctcgaggaatccattaacgagactatcaagtgctgagctgtctcacggcgttcaggatttcagggctctcaagatttcagagctctcaagatttcagagcccaggcaatagacaccacatgggacttgtcttagagaggtttgctctcccatagctttgctatagctacagtgtccctattgctatagtgcaattgacatgatatgaaacgaaacgaattccgttccgcgagaaaaggtaagtttgtagaccatgcttgctttcgtgatcgtcggcgtaaatgtccacattttggaaggattcgatgttcaggttttgctgtgatgcaacttgagatagcc

SEQ ID NO: 17512 - DNA, 390 bp, Muscodor strobelii
  misc_feature: SGI cDNA ID NO. 565850
  misc_feature: Reduced expression when VOC is produced
  misc_feature: Encodes the peptide sequence at SEQ ID NO 17513
atggcgactcccgagcctaaaaagaccgccatatcccaactatcagcctggggcaactcctccatagccccagccggcctcgcaaccctaatagcgcccctgcacctacgtcccgcacaacctctccccctcctcttcgtgcccatcctgttcttctcctcctacgcaaacctgcagggcttcaagatcgacagcgcaggcataaccatggcagcctcggggacctacgccctgctggccatgcgacggagagcaccacagggatttagaggcaagttctccgtaagaggagtcgtcaggggttcagcgatcggtgtcgctgctgcaaatgctgtcgcgtgtggctgggtatatttgacgggaaatcgcaaggaggagaaggttttttag

SEQ ID NO: 17513 - protein, 129 aa, Muscodor strobelii
  misc_feature: SGI Peptide ID NO. 565850
  misc_feature (4)..(127): NCBI GI: 39943794 Blast Desc: MGG_03908 [Magnaporthe grisea 70-15] gi|145014609|gb|EDJ99177.1| MGG_03908 [Magnaporthe grisea 70-15]
  misc_feature (1)..(127): NCBI GI: 85079918 Blast Desc: NCU03334 [Neurospora crassa OR74A] gi|25369737|pir||T51902 B23I11.140 [imported] - Neurospora crassa gi|28881172|emb|CAD70354.1| [Neurospora crassa] conserved crassa
  misc_feature (1)..(127): NCBI GI: 169603652 Blast Desc: SNOG_04834 [Phaeosphaeria nodorum SN15] gi|111066105|gb|EAT87225.1| SNOG_04834 [Phaeosphaeria nodorum SN15]
  misc_feature (4)..(127): NCBI GI: 189196176 Blast Desc: conserved [Pyrenophora tritici-repentis Pt-1C-BFP] gi|187980305|gb|EDU46931.1| conserved [Pyrenophora tritici-repentis Pt-1C-BFP]
  misc_feature (7)..(127): NCBI GI: 255949986 Blast Desc: Pc22g18550 [Penicillium chrysogenum Wisconsin 54-1255] gi|211592777|emb|CAP99143.1| Pc22g18550 [Penicillium chrysogenum Wisconsin 54-1255]
  misc_feature (1)..(128): NCBI GI: 256730737 Blast Desc: NECHADRAFT_65108 [Nectria haematococca mpVI 77-13-4]
  misc_feature (4)..(126): NCBI GI: 46109576 Blast Desc: FG01670.1 [Gibberella zeae PH-1]
  misc_feature (2)..(127): NCBI GI: 169773751 Blast Desc: [Aspergillus oryzae RIB40] gi|238491766|ref|XP_002377120.1| conserved [Aspergillus flavus NRRL3357] gi|83769205|dbj|BAE59342.1| protein product oryzae]
  misc_feature (5)..(127): NCBI GI: 121706771 Blast Desc: conserved [Aspergillus clavatus NRRL 1] gi|119399772|gb|EAW10198.1| conserved [Aspergillus clavatus NRRL 1]
  misc_feature (2)..(127): NCBI GI: 261206402 Blast Desc: conserved [Ajellomyces dermatitidis SLH14081] gi|239592997|gb|EEQ75578.1| conserved [Ajellomyces dermatitidis SLH14081] gi|239610826|gb|EEQ87813.1| conserved [Ajellomyces
  misc_feature: Useful for introducing or modulating the production of volatile compounds
MATPEPKKTAISQLSAWGNSSIAPAGLATLIAPLHLRPAQPLPLLFVPILFFSSYANLQGFKIDSAGITMAASGTYALLAMRRRAPQGFRGKFSVRGVVRGSAIGVAAANAVACGWVYLTGNRKEEKVF

SEQ ID NO: 17514 - DNA, 1127 bp, Muscodor strobelii
  misc_feature: SGI EST ID NO. CUFF.41285.1
  misc_feature: Variant of the nucleotide sequence at SEQ ID NO 17512
caaggaccgacttccatgttcaagagcttgactaggattgcacttgtcgccaagacctagagattccgactggaacctgcaattgagcttctgacagacatgacgatacctatcacctcttcatcttgttctcgacagaataactctcttccattgtgccttctctgatcaaacaccccaatcttcaagaacccgagtcgacacccagttcaaatatttcctccaaatctcttctcaacgcccctcacgatttcgagctcaggcgcatcgcaaattctccaacgacgtcactggctgtaccactcccagattcctcacctctttgacacgcaacccaaatcacattaaaagaagccaccacagacgaaacaacagcaaccatggcgactcccgagcctaaaaagaccgccatatcccaactatcagcctggggcaactcctccatagccccagccggcctcgcaaccctaatagcgcccctgcacctacgtcccgcacaacctctccccctcctcttcgtgcccatcctgttcttctcctcctacgcaaacctgcagggcttcaagatcgacagcgcaggcataaccatggcagcctcggggacctacgccctgctggccatgcgacggagagcaccacagggatttagaggcaagttctccgtaagaggagtcgtcaggggttcagcgatcggtgtcgctgctgcaaatgctgtcgcgtgtggctgggtatatttgacgggaaatcgcaaggaggagaaggttttttaggcaggagaatcctaaatggacgtagtttaaggacaggagggggaagagagaaattggggaaggaaagattgaggtgtgtataagaatgtgaggagattcacatgtataaagtagcgacatggtgtgaggatgcactctcggtataatattgggggggactggttgtgtcactgtacatatgggatcatagcacggcggaagctgtattattattgacaagagataccacgcatgaaatagcgaatagctgatcaacatggcattcaagaatacgcaatttgacaatacgtgtataagatgaacaatagtcaatatatgctctactagaaactgtgacgagagatattacgaagttac

SEQ ID NO: 17515 - DNA, 1089 bp, Muscodor strobelii
  misc_feature: SGI cDNA ID NO. 565851
  misc_feature: Reduced expression when VOC is produced
  misc_feature: Encodes the peptide sequence at SEQ ID NO 17516
atgtccagcgcaaaagcgtccggctcctcggccggcaacggcgacgcgccgcgcaaccgcgagcacaaccaaggcaaccaggaccgcaaatgcacgcccgagcagcgcgccgccgtgctgcgcatccgcaaatgcaaagtcacagccttctacgagatcctcgacatcgagaccctgcgctcctcggccacagactcagacatcaagaaggcctaccggaaacagtccctcctcactcaccccgacaagaatggccacgagcacgccgacgaggccttcaagatggtgagcaaggcgtttagtgtgctgggggacaaggataagagggagaagtttgacaggtttggtacggatccagagagcaggtttgagagtgcgagggcacaggctagtaatcccttcggtggaggtggaggaggctttggaggaagaccgcagggtggcggtggtatgttcgatgatgagattagccccgaggagatgtttgccagattctttggtggagggtttggcggtggtccttttggtgctggtggtttcgacacaggcccccaattcgtctttaacataggcggaaaccgtgccttccgcgtcaaccagttcggcggcggcatcccccgacgacgaccacagcccaacggtccccagggccagcaacagcccgcctcaggctgggacacattcgtctccctcctccccatactcttcctctttgtcttcccgctcctcacctcgctcttctccggcctcggcgactcccaacccgcgctccccaccatggtcttcgaccacccccaaccgccgcagaccctccaccgaaagacaccgaagctcaacgtcgactatttcgtctcgccgcacgatgtagcagggtggcaggagcagaagttcacccagctggatcgagaggccgagatgggattcgtcaggattctgagacggagatgtgatcatgagattcgcacacagcaagaactattcgataaggcgcagggatggttcttccccgacccggacaagatgaagattgctagggattttgagctcgcttcttgtaagagattggatggctttggtctctcgaggtag

SEQ ID NO: 17516 - protein, 362 aa, Muscodor strobelii
  misc_feature: SGI Peptide ID NO. 565851
  misc_feature (49)..(113): Pfam Id: PF00226 Pfam Desc: DnaJ domain
  misc_feature (242)..(358): Pfam Id: PF09320 Pfam Desc: Domain of function (DUF1977)
  misc_feature (1)..(358): NCBI GI: 85079921 Blast Desc: NCU03335 [Neurospora crassa OR74A] gi|25466233|pir||T51903 related to HLJ1 protein [imported] - Neurospora crassa gi|28881173|emb|CAD70355.1| related to HLJ1
  misc_feature (1)..(360): NCBI GI: 46109476 Blast Desc: FG01620.1 [Gibberella zeae PH-1]
  misc_feature (1)..(358): NCBI GI: 169773749 Blast Desc: [Aspergillus oryzae RIB40] gi|238491764|ref|XP_002377119.1| ER associated DnaJ chaperone (Hlj1), [Aspergillus flavus NRRL3357] gi|83769204|dbj|BAE59341.1|
  misc_feature (1)..(360): NCBI GI: 154278575 Blast Desc: conserved [Ajellomyces capsulatus NAm1] gi|150413686|gb|EDN09069.1| conserved [Ajellomyces capsulatus NAm1]
  misc_feature (20)..(360): NCBI GI: 116199781 Blast Desc: CHGG_08046 [Chaetomium globosum CBS 148.51] gi|88179325|gb|EAQ86793.1| CHGG_08046 [Chaetomium globosum CBS 148.51]
  misc_feature (1)..(362): NCBI GI: 261357275 Blast Desc: HLJ1 [Verticillium albo-atrum VaMs.102]
  misc_feature (1)..(358): NCBI GI: 145256859 Blast Desc: An04g01720 [Aspergillus niger] gi|134058449|emb|CAK47936.1| protein product [Aspergillus niger]
  misc_feature (1)..(360): NCBI GI: 119188035 Blast Desc: CIMG_04065 [Coccidioides immitis RS]
  misc_feature (1)..(360): NCBI GI: 225560550 Blast Desc: conserved [Ajellomyces capsulatus G186AR]
  misc_feature (14)..(360): NCBI GI: 240107988 Blast Desc: DnaJ domain containing protein [Coccidioides posadasii C735 delta SOWgp]
  misc_feature: Useful for introducing or modulating the production of volatile compounds
MSSAKASGSSAGNGDAPRNREHNQGNQDRKCTPEQRAAVLRIRKCKVTAFYEILDIETLRSSATDSDIKKAYRKQSLLTHPDKNGHEHADEAFKMVSKAFSVLGDKDKREKFDRFGTDPESRFESARAQASNPFGGGGGGFGGRPQGGGGMFDDEISPEEMFARFFGGGFGGGPFGAGGFDTGPQFVFNIGGNRAFRVNQFGGGIPRRRPQPNGPQGQQQPASGWDTFVSLLPILFLFVFPLLTSLFSGLGDSQPALPTMVFDHPQPPQTLHRKTPKLNVDYFVSPHDVAGWQEQKFTQLDREAEMGFVRILRRRCDHEIRTQQELFDKAQGWFFPDPDKMKIARDFELASCKRLDGFGLSR

SEQ ID NO: 17517 - DNA, 4816 bp, Muscodor strobelii
  misc_feature: SGI EST ID NO. CUFF.41613.0
  misc_feature: Variant of the nucleotide sequence at SEQ ID NO 17515
cggagttcagccgctgtccaggcgagccagaccttctcagacccctccaggtgcagcgtggccagatggactcactggcgacggccaccgaaaacaccacaatccgattatcgtcgtccctccaatcctcgcccaccttactaaatccatcgacgaccctgcccttctcccgcgctcctttgactccggccgccattcacctgtctgtcgcttggctggctattggtatctcttagaagattgaagcactcattttcattcaaccttgtgcgacattcgcttctgccttggaccccaagtgacatcttccattgtctcgatacgtgcgacatccaattacctacagagagagataagccacgacaccaacttctgaacacttgactccaaatcgccaacatcttctcaactcatgttatcctgacacttgcagtcgccgacctacaccccttatccgataggatccggtcacatcccatccgcatcatccaacacacctaatctctgaataatactctctacgcctcatgtccagcgcaaaagcgtccggctcctcggccggcaacggcgacgcgccgcgcaaccgcgagcacaaccaaggcaaccaggaccgcaaatgcacgcccgagcagcgcgccgccgtgctgcgcatccgcaaatgcaaagtcacagccttctacgagatcctcgacatcgagaccctgcgctcctcggccacagactcagacatcaagaaggcctaccggaaacagtccctcctcactcaccccgacaagaatggccacgagcacgccgacgaggccttcaagatggtgagcaaggcgtttagtgtgctgggggacaaggataagagggagaagtttgacaggtttggtacggatccagagagcaggtttgagagtgcgagggcacaggctagtaatcccttcggtggaggtggaggaggctttggaggaagaccgcagggtggcggtggtatgttcgatgatgagattagccccgaggagatgtttgccagattctttggtggagggtttggcggtggtccttttggtgctggtggtttcgacacaggcccccaattcgtctttaacataggcggaaaccgtgccttccgcgtcaaccagttcggcggcggcatcccccgacgacgaccacagcccaacggtccccagggccagcaacagcccgcctcaggctgggacacattcgtctccctcctccccatactcttcctctttgtcttcccgctcctcacctcgctcttctccggcctcggcgactcccaacccgcgctccccaccatggtcttcgaccacccccaaccgccgcagaccctccaccgaaagacaccgaagctcaacgtcgactatttcgtctcgccgcacgatgtagcagggtggcaggagcagaagttcacccagctggatcgagaggccgagatgggattcgtcaggattctgagacggagatgtgatcatgagattcgcacacagcaagaactattcgataaggcgcagggatggttcttccccgacccggacaagatgaagattgctagggattttgagctcgcttcttgtaagagattggatggctttggtctctcgaggtagtgcgagcgttaaggagttgtacggagtactacacgaactacggctggctagagagaggcgccttgactagcatgagacatgagtagggtccgtttagaatacctcaattaatgattcttctcatactcgtgcttcggtgtggtctgttgggatataaggggtaaggggcaaatgatagcatgaggggaagatgaacggattggaccctgtgaaattggaagtaaaactagatttacatggtgagcgagatggtgagtgacatacatttttcgcagctgggcataatcacgagcttgggcgcgagagtctggtgctcgggttcgactcttcacatcgggaataagactggcgaggcctgtcaggggccgagagatgagagactctgtgtgtcgactacaaaaggaatggcttctcactttgagatacgacagactctgacgtttgaatccgccctttacatgtagaacatactcgagctcaactagatgtcatcgtgctatctggcgccccttaggaaaggacagaacccatagcgaaatctgcaatctctatttcgagaatcatactggatttctctaattgggcattgccacaccactaacttatcctaacagccagccctctcgggctcatcaaccacatccgcgcagagtacctatccatacagcatacagccttcccctattccatctcctcttcccctttactctcccctaatcctcctaccgtctcccccgtctaggatcaagcgcctcattccgcctataatccctaatctccttcgttcccaggctccccaacccaccctcgctcctcctctcccagcctcccaatctgacaacaagacaggtcgcattgtcgccatccgtactgacctccgtagcgtaggcaacgacatccttactgccctgctctggcgtcttcgcctctttgaccacatccacaatctcctggtcacttagcgtgcccgatatgccgtcagacatcaaaacgaggaaggagtattgcgcaggcccgagttcggtgcgggtgatttctggctcggcagatacgccgagacgcttggagctgacgtcgccgaaagcgcgggagttggctagtccttggattctttcctcgccaaaggaatcggcgacgaaggacgtcgtgaagcggcgcaggcgatgcgattcgcctggcgatgatgggtggtggtctgaggtcaggggtttggcgagccctgtggctgtctcgcagaggaggatgcgtgtatcgccaacgtgccctaccaagagtgttgatgaggctgcgggatgccagaatggtgctggggtgggagtggatatcaacgctacggatgcagttgacccgcctttgaagcgtgtgctcccccctatgccgtgtccagagggtgggcgatggtgtggctttcctagtatctcgtcgttgtttagggctgtgtctgctacgtatggatcgtcggggtcttgcttccgtgcttgagctccgacgaaatctagatctgcacgtagaaaggcgtatgttaggacagactcgacgctgacgagcgcatcagactctgcttttggatctcgagatgaaggggcgaaatgtggtggagtgaaacgacggaagtaaccgccgatggtctgcttgtactcttttatgatctctttctgtagatctagagctcgtgtctcggacacctttgccgggactggctcgtctcctttgatagcgtcttcattttcgacttcttcgatggctccgagctcagacttctcggggatattggtttttgctagtacatctttcgagttcttaatatccaactgatccaacttcttctggccgccagcttcgtggtctgtcagcatcggtgttggtacgttctcctccggctcttgcatgcttttactcgagcgtagactactcttcagcccgaattcctgtgcagcttcttcgatgtatccgtgaagctcgtctcgtaaaaaggtactgcactgtgtgccaccgtgaccatcgaatatgccaaagtagaaaatttgaggatctccaaagggactatcggcggatgttccttctccagaggtcttacccattgcttttctgactagactaatcggtgcccgtttggcaaaagccggcatatcgatggtgccggcttgattcgtatcctcattgtatggacgagagcctcgggactctgtgacgccaaagtggtgttttgcgctccgaagaggaatgcggacgacggttaggtcgcgattagaaggcagatgtggtggcgtgacgggagcggcaccgctactgccacgatgcggtgctgccgctgatctagggagcttgtggtgagggccagtcgggccacgagagtcgggatggagtgaggacgaaggaagatgtgtcacgaagtacgtgtgaaagccacgacgcacgacgttctgtgtggacgtgggatacaaaccatcatgtttagctgaagtctgggatgtagtgagatgtcgagcttgacttgttgagctacagatggagcgagtatgatgccgtgaacgaggacagcggacagaagtcggcagtctctggcggggtgtcgcgcgagacagggaggcttgagcggtacagaaagacgcgatgaagcctatatgatagattgctcagtaagtcctcgtatcaaaaaccgaacaacacgccatagcacaagatagatggcgaatcatattgggtagctgacgaaccatatgtgtcgttgagagaccatctcttgggcgtggtacgactgagccccatcgtcatttctgaggggagctctatcaacgacctcaacacgaacacaccctgtcaaccccagttccaacagtccgcaatcgatttggtaggatgagagctagttgaagatccatgtgcggtacacacgtactggcccaggcaaacaggacggtgtattgaggagtaggtaatagcagtaatcaagctgtagtcaagctgtagtcaagccgcagtcctgaaaaagtgtcttgattgtggttggtctaggccctgcacttgcgcccaaaatactgatattcaggtaccgaatggtcggtgatattcggcgataataacaatagtatgcaagtgcccaatgacctcatttgtccaattcaggtgtgagcaatgtatgtacggatgtacagggaagtagggaagagaggtatgtccaagcagagtgtcgactgtca

SEQ ID NO: 17518 - DNA, 1950 bp, Muscodor strobelii
  misc_feature: SGI cDNA ID NO. 565852
  misc_feature: Reduced expression when VOC is produced
  misc_feature: Encodes the peptide sequence at SEQ ID NO 17519
atggggctcagtcgtaccacgcccaagagatggtctctcaacgacacatatggcttcatcgcgtctttctgtaccgctcaagcctccctgtctcgcgcgacaccccgccagagactgccgacttctgtccgctgtcctcgttcacggcatcatactcgctccatctgtagctcaacaagtcaagctcgacatctcactacatcccagacttcagctaaacatgatggtttgtatcccacgtccacacagaacgtcgtgcgtcgtggctttcacacgtacttcgtgacacatcttccttcgtcctcactccatcccgactctcgtggcccgactggccctcaccacaagctccctagatcagcggcagcaccgcatcgtggcagtagcggtgccgctcccgtcacgccaccacatctgccttctaatcgcgacctaaccgtcgtccgcattcctcttcggagcgcaaaacaccactttggcgtcacagagtcccgaggctctcgtccatacaatgaggatacgaatcaagccggcaccatcgatatgccggcttttgccaaacgggcaccgattagtctagtcagaaaagcaatgggtaagacctctggagaaggaacatccgccgatagtccctttggagatcctcaaattttctactttggcatattcgatggtcacggtggcacacagtgcagtacctttttacgagacgagcttcacggatacatcgaagaagctgcacaggaattcgggctgaagagtagtctacgctcgagtaaaagcatgcaagagccggaggagaacgtaccaacaccgatgctgacagaccacgaagctggcggccagaagaagttggatcagttggatattaagaactcgaaagatgtactagcaaaaaccaatatccccgagaagtctgagctcggagccatcgaagaagtcgaaaatgaagacgctatcaaaggagacgagccagtcccggcaaaggtgtccgagacacgagctctagatctacagaaagagatcataaaagagtacaagcagaccatcggcggttacttccgtcgtttcactccaccacatttcgccccttcatctcgagatccaaaagcagagtctgatgcgctcgtcagcgtcgagtctgtcctaacatacgcctttctacgtgcagatctagatttcgtcggagctcaagcacggaagcaagaccccgacgatccatacgtagcagacacagccctaaacaacgacgagatactaggaaagccacaccatcgcccaccctctggacacggcataggggggagcacacgcttcaaaggcgggtcaactgcatccgtagcgttgatatccactcccaccccagcaccattctggcatcccgcagcctcatcaacactcttggtagggcacgttggcgatacacgcatcctcctctgcgagacagccacagggctcgccaaacccctgacctcagaccaccacccatcatcgccaggcgaatcgcatcgcctgcgccgcttcacgacgtccttcgtcgccgattcctttggcgaggaaagaatccaaggactagccaactcccgcgctttcggcgacgtcagctccaagcgtctcggcgtatctgccgagccagaaatcacccgcaccgaactcgggcctgcgcaatactccttcctcgttttgatgtctgacggcatatcgggcacgctaagtgaccaggagattgtggatgtggtcaaagaggcgaagacgccagagcagggcagtaaggatgtcgttgcctacgctacggaggtcagtacggatggcgacaatgcgacctgtcttgttgtcagattgggaggctgggagaggaggagcgagggtgggttggggagcctgggaacgaaggagattagggattataggcggaatgaggcgcttgatcctagacgggggagacggtag

SEQ ID NO: 17519 - protein, 649 aa, Muscodor strobelii
  misc_feature: SGI Peptide ID NO. 565852
  misc_feature (344)..(607): Pfam Id: PF00481 Pfam Desc: Protein phosphatase 2C
  misc_feature (440)..(607): Pfam Id: PF00481 Pfam Desc: Protein phosphatase 2C
  misc_feature (80)..(649): NCBI GI: 85076111 Blast Desc: NCU03495 [Neurospora crassa OR74A] gi|18376332|emb|CAD21078.1| related to protein phosphatase 2c [Neurospora crassa] gi|28916908|gb|EAA26646.1| conserved crassa
  misc_feature (87)..(649): NCBI GI: 39943814 Blast Desc: MGG_03918 [Magnaporthe grisea 70-15] gi|145014625|gb|EDJ99193.1| MGG_03918 [Magnaporthe grisea 70-15]
  misc_feature (45)..(649): NCBI GI: 256732524 Blast Desc: [Nectria haematococca mpVI 77-13-4]
  misc_feature (45)..(649): NCBI GI: 46121567 Blast Desc: FG05162.1 [Gibberella zeae PH-1]
  misc_feature (11)..(648): NCBI GI: 156063034 Blast Desc: SS1G_01633 [Sclerotinia sclerotiorum 1980] gi|154696969|gb|EDN96707.1| SS1G_01633 [Sclerotinia sclerotiorum 1980]
  misc_feature (11)..(648): NCBI GI: 154318963 Blast Desc: BC1G_02433 [Botryotinia fuckeliana B05.10] gi|150856864|gb|EDN32056.1| BC1G_02433 [Botryotinia fuckeliana B05.10]
  misc_feature (85)..(648): NCBI GI: 171689952 Blast Desc: protein product [Podospora anserina] gi|170944938|emb|CAP71049.1| protein product [Podospora anserina]
  misc_feature (3)..(649): NCBI GI: 261191418 Blast Desc: protein phosphatase 2C [Ajellomyces dermatitidis SLH14081] gi|239589883|gb|EEQ72526.1| protein phosphatase 2C [Ajellomyces dermatitidis SLH14081]
  misc_feature (3)..(649): NCBI GI: 154282585 Blast Desc: conserved [Ajellomyces capsulatus NAm1] gi|150410268|gb|EDN05656.1| conserved [Ajellomyces capsulatus NAm1]
  misc_feature (3)..(649): NCBI GI: 225561418 Blast Desc: phosphatase 2c [Ajellomyces capsulatus G186AR]
  misc_feature: Useful for introducing or modulating the production of volatile compounds
MGLSRTTPKRWSLNDTYGFIASFCTAQASLSRATPRQRLPTSVRCPRSRHHTRSICSSTSQARHLTTSQTSAKHDGLYPTSTQNVVRRGFHTYFVTHLPSSSLHPDSRGPTGPHHKLPRSAAAPHRGSSGAAPVTPPHLPSNRDLTVVRIPLRSAKHHFGVTESRGSRPYNEDTNQAGTIDMPAFAKRAPISLVRKAMGKTSGEGTSADSPFGDPQIFYFGIFDGHGGTQCSTFLRDELHGYIEEAAQEFGLKSSLRSSKSMQEPEENVPTPMLTDHEAGGQKKLDQLDIKNSKDVLAKTNIPEKSELGAIEEVENEDAIKGDEPVPAKVSETRALDLQKEIIKEYKQTIGGYFRRFTPPHFAPSSRDPKAESDALVSVESVLTYAFLRADLDFVGAQARKQDPDDPYVADTALNNDEILGKPHHRPPSGHGIGGSTRFKGGSTASVALISTPTPAPFWHPAASSTLLVGHVGDTRILLCETATGLAKPLTSDHHPSSPGESHRLRRFTTSFVADSFGEERIQGLANSRAFGDVSSKRLGVSAEPEITRTELGPAQYSFLVLMSDGISGTLSDQEIVDVVKEAKTPEQGSKDVVAYATEVSTDGDNATCLVVRLGGWERRSEGGLGSLGTKEIRDYRRNEALDPRRGRR

SEQ ID NO: 17520 - DNA, 4800 bp, Muscodor strobelii
  misc_feature: SGI EST ID NO. CUFF.41614.1
  misc_feature: Variant of the nucleotide sequence at SEQ ID NO 17518
tgacagtcgacactctgcttggacatacctctcttccctacttccctgtacatccgtacatacattgctcacacctgaattggacaaatgaggtcattgggcacttgcatactattgttattatcgccgaatatcaccgaccattcggtacctgaatatcagtattttgggcgcaagtgcagggcctagaccaaccacaatcaagacactttttcaggactgcggcttgactacagcttgactacagcttgattactgctattacctactcctcaatacaccgtcctgtttgcctgggccagtacgtgtgtaccgcacatggatcttcaactagctctcatcctaccaaatcgattgcggactgttggaactggggttgacagggtgtgttcgtgttgaggtcgttgatagagctcccctcagaaatgacgatggggctcagtcgtaccacgcccaagagatggtctctcaacgacacatatggcttcatcgcgtctttctgtaccgctcaagcctccctgtctcgcgcgacaccccgccagagactgccgacttctgtccgctgtcctcgttcacggcatcatactcgctccatctgtagctcaacaagtcaagctcgacatctcactacatcccagacttcagctaaacatgatggtttgtatcccacgtccacacagaacgtcgtgcgtcgtggctttcacacgtacttcgtgacacatcttccttcgtcctcactccatcccgactctcgtggcccgactggccctcaccacaagctccctagatcagcggcagcaccgcatcgtggcagtagcggtgccgctcccgtcacgccaccacatctgccttctaatcgcgacctaaccgtcgtccgcattcctcttcggagcgcaaaacaccactttggcgtcacagagtcccgaggctctcgtccatacaatgaggatacgaatcaagccggcaccatcgatatgccggcttttgccaaacgggcaccgattagtctagtcagaaaagcaatgggtaagacctctggagaaggaacatccgccgatagtccctttggagatcctcaaattttctactttggcatattcgatggtcacggtggcacacagtgcagtacctttttacgagacgagcttcacggatacatcgaagaagctgcacaggaattcgggctgaagagtagtctacgctcgagtaaaagcatgcaagagccggaggagaacgtaccaacaccgatgctgacagaccacgaagctggcggccagaagaagttggatcagttggatattaagaactcgaaagatgtactagcaaaaaccaatatccccgagaagtctgagctcggagccatcgaagaagtcgaaaatgaagacgctatcaaaggagacgagccagtcccggcaaaggtgtccgagacacgagctctagatctacagaaagagatcataaaagagtacaagcagaccatcggcggttacttccgtcgtttcactccaccacatttcgccccttcatctcgagatccaaaagcagagtctgatgcgctcgtcagcgtcgagtctgtcctaacatacgcctttctacgtgcagatctagatttcgtcggagctcaagcacggaagcaagaccccgacgatccatacgtagcagacacagccctaaacaacgacgagatactaggaaagccacaccatcgcccaccctctggacacggcataggggggagcacacgcttcaaaggcgggtcaactgcatccgtagcgttgatatccactcccaccccagcaccattctggcatcccgcagcctcatcaacactcttggtagggcacgttggcgatacacgcatcctcctctgcgagacagccacagggctcgccaaacccctgacctcagaccaccacccatcatcgccaggcgaatcgcatcgcctgcgccgcttcacgacgtccttcgtcgccgattcctttggcgaggaaagaatccaaggactagccaactcccgcgctttcggcgacgtcagctccaagcgtctcggcgtatctgccgagccagaaatcacccgcaccgaactcgggcctgcgcaatactccttcctcgttttgatgtctgacggcatatcgggcacgctaagtgaccaggagattgtggatgtggtcaaagaggcgaagacgccagagcagggcagtaaggatgtcgttgcctacgctacggaggtcagtacggatggcgacaatgcgacctgtcttgttgtcagattgggaggctgggagaggaggagcgagggtgggttggggagcctgggaacgaaggagattagggattataggcggaatgaggcgcttgatcctagacgggggagacggtaggaggattaggggagagtaaaggggaagaggagatggaataggggaaggctgtatgctgtatggataggtactctgcgcggatgtggttgatgagcccgagagggctggctgttaggataagttagtggtgtggcaatgcccaattagagaaatccagtatgattctcgaaatagagattgcagatttcgctatgggttctgtcctttcctaaggggcgccagatagcacgatgacatctagttgagctcgagtatgttctacatgtaaagggcggattcaaacgtcagagtctgtcgtatctcaaagtgagaagccattccttttgtagtcgacacacagagtctctcatctctcggcccctgacaggcctcgccagtcttattcccgatgtgaagagtcgaacccgagcaccagactctcgcgcccaagctcgtgattatgcccagctgcgaaaaatgtatgtcactcaccatctcgctcaccatgtaaatctagttttacttccaatttcacagggtccaatccgttcatcttcccctcatgctatcatttgccccttaccccttatatcccaacagaccacaccgaagcacgagtatgagaagaatcattaattgaggtattctaaacggaccctactcatgtctcatgctagtcaaggcgcctctctctagccagccgtagttcgtgtagtactccgtacaactccttaacgctcgcactacctcgagagaccaaagccatccaatctcttacaagaagcgagctcaaaatccctagcaatcttcatcttgtccgggtcggggaagaaccatccctgcgccttatcgaatagttcttgctgtgtgcgaatctcatgatcacatctccgtctcagaatcctgacgaatcccatctcggcctctcgatccagctgggtgaacttctgctcctgccaccctgctacatcgtgcggcgagacgaaatagtcgacgttgagcttcggtgtctttcggtggagggtctgcggcggttgggggtggtcgaagaccatggtggggagcgcgggttgggagtcgccgaggccggagaagagcgaggtgaggagcgggaagacaaagaggaagagtatggggaggagggagacgaatgtgtcccagcctgaggcgggctgttgctggccctggggaccgttgggctgtggtcgtcgtcgggggatgccgccgccgaactggttgacgcggaaggcacggtttccgcctatgttaaagacgaattgggggcctgtgtcgaaacctgtggttgttgcgcatgtacattaatgttttgtttggggttgtgataattcttcagcaagaagccgggcccagaacttaccaccagcaccaaaaggaccaccgccaaaccctccaccaaagaatctggcaaacatctcctcggggctaatctcatcatcgaacataccaccgccaccctgcggtcttcctccaaagcctcctccacctccaccgaagggattactagcctgtgccctcgcactctcaaacctgctctctggatccgtaccaaacctgtcaaacttctccctcttatccttgtcccccagcacactaaacgccttgctcaccatcttgaaggcctcgtcggcgtgctcgtggccattcttgtcggggtgagtgaggagggactgtttccggtaggccttcttgatgtctgagtctgtggccgaggagcgcagggtctcgatgtcgaggatctcgtagaaggctgtgactttgcatttgcggatgcgcagcacggcggcgcgctgctcgggcgtgcatttgcggtcctggttgccttggttgtgctcgcggttgcgcggcgcgtcgccgttgccggccgaggagccggacgcttttgcgctggacatgaggcgtagagagtattattcagagattaggtgtgttggatgatgcggatgggatgtgaccggatcctatcggataaggggtgtaggtcggcgactgcaagtgtcaggataacatgagttgagaagatgttggcgatttggagtcaagtgttcagaagttggtgtcgtggcttatctctctctgtaggtaattggatgtcgcacgtatcgagacaatggaagatgtcacttggggtccaaggcagaagcgaatgtcgcacaaggttgaatgaaaatgagtgcttcaatcttctaagagataccaatagccagccaagcgacagacaggtgaatggcggccggagtcaaaggagcgcgggagaagggcagggtcgtcgatggatttagtaaggtgggcgaggattggagggacgacgataatcggattgtggtgttttcggtggccgtcgccagtgagtccatctggccacgctgcacctggaggggtctgagaaggtctggctcgcctggacagcggctgaactccg

SEQ ID NO: 17521 - DNA, 1374 bp, Muscodor strobelii
  misc_feature: SGI cDNA ID NO. 565853
  misc_feature: Reduced expression when VOC is produced
  misc_feature: Encodes the peptide sequence at SEQ ID NO 17522
atgccacgggcttccacttcccaggtcgacgttgaaatcgccgaaaatggctataggacacctaaagagcgggacttcttcaatcggagatcgttatcgcctgccatgtcacaccagcggagccgcgagaagaaccctttagatccgttctctgatgcgcctaatcatgctcctcctaaccaggagtacggaccctatagcttggcgcgcatgatatctgtggctaggaaagaagctgcacgtggcggtaacattggccttcgagacagaatatgttgctttcaatggacatattttacatcgaccatggcaacgggtggtgtagcaaacgtattgtatagtctgtcgaaagaatattcagcgaattggctttggcacattgggctcgtgttcttcttcctgaatatgcttatgttcgcgatcaattgcgtcttgatcactatgaggtttatcatggttcctgggagcttcatgcattccttcttagaccagacagaatctctgttcataccagccgtagtagtatcctttgcgacaattctgatcaacgtctgtcaatatggtgtgccgcacactggtccatggctccttaagactatcgaggtcttcttctggatttatacggtgttgagtgttgtcacgagtgctggcatgtatctgatactctggtcgacccaaatattcccggtacatcaaatgacgccagtttgggtcttcccaggctatcccctattgctgaccgctccctacgctgcgaacttgatcagcgtggacacactcggcacaggcgagatcaatcgattacccatcgcgattgcggccgtcactctgcaagggacgggtttcttaatcagttttatgatttgtgcggcttttatttaccgcctcatgacgcagaaactgcctcgcgatatgcagcgtccgggtgtgtttatatctatcggaccgcctgcattcacagtcgctggtatagtcctcctaggccaacaaactgcctccatcctcccaccatcctacgccggcgagccccatgcgaaattcatcctcgagctcctctccacactcctcggactttggctctggggcctcagcgaatggttcttcatcgtatccgttgggtccctctggaagtatgcacgcggagcccataagatgccatttcaaatgacctggtggtcgtttgtgtttccgaacacggcactttccaccgctacattggcacttgctaaggcgttggatagcaatgggctgagattgtatagttctgtgttcacgggtgtgctggtattagtctgggcggccatttttacggtcatggtcaagtgtatttggaagagacaactgttgtggccgaaggatttggagagggagtag

SEQ ID NO: 17522 - protein, 457 aa, Muscodor strobelii
  misc_feature: SGI Peptide ID NO. 565853
  misc_feature (96)..(404): Pfam Id: PF03595 Pfam Desc: C4-dicarboxylate transporter/malic acid transport protein
  misc_feature (17)..(455): NCBI GI: 171689400 Blast Desc: protein product [Podospora anserina] gi|170944662|emb|CAP70773.1| protein product [Podospora anserina]
  misc_feature (102)..(453): NCBI GI: 261356712 Blast Desc: conserved [Verticillium albo-atrum VaMs.102]
  misc_feature (68)..(453): NCBI GI: 256732964 Blast Desc: NECHADRAFT_78786 [Nectria haematococca mpVI 77-13-4]
  misc_feature (83)..(448): NCBI GI: 18376140 Blast Desc: related to C4-dicarboxylate transport protein mae1 [Neurospora crassa]
  misc_feature (17)..(455): NCBI GI: 164428188 Blast Desc: NCU01788 [Neurospora crassa OR74A] gi|157072047|gb|EAA26724.2| [Neurospora crassa OR74A]
  misc_feature (14)..(455): NCBI GI: 255936139 Blast Desc: Pc13g06630 [Penicillium chrysogenum Wisconsin 54-1255] gi|211583716|emb|CAP91732.1| Pc13g06630 [Penicillium chrysogenum Wisconsin 54-1255]
  misc_feature (28)..(457): NCBI GI: 121714303 Blast Desc: C4-dicarboxylate/malic acid transporter, [Aspergillus clavatus NRRL 1] gi|119402916|gb|EAW13336.1| C4-dicarboxylate/malic acid transporter, [Aspergillus clavatus 1]
  misc_feature (88)..(457): NCBI GI: 238839866 Blast Desc: malic acid transport protein [Microsporum canis CBS 113480]
  misc_feature (14)..(457): NCBI GI: 169784165 Blast Desc: [Aspergillus oryzae RIB40] gi|83775289|dbj|BAE65411.1| protein product [Aspergillus oryzae]
  misc_feature (71)..(453): NCBI GI: 46121655 Blast Desc: FG05206.1 [Gibberella zeae PH-1]
  misc_feature: Useful for introducing or modulating the production of volatile compounds
MPRASTSQVDVEIAENGYRTPKERDFFNRRSLSPAMSHQRSREKNPLDPFSDAPNHAPPNQEYGPYSLARMISVARKEAARGGNIGLRDRICCFQWTYFTSTMATGGVANVLYSLSKEYSANWLWHIGLVFFFLNMLMFAINCVLITMRFIMVPGSFMHSFLDQTESLFIPAVVVSFATILINVCQYGVPHTGPWLLKTIEVFFWIYTVLSVVTSAGMYLILWSTQIFPVHQMTPVWVFPGYPLLLTAPYAANLISVDTLGTGEINRLPIAIAAVTLQGTGFLISFMICAAFIYRLMTQKLPRDMQRPGVFISIGPPAFTVAGIVLLGQQTASILPPSYAGEPHAKFILELLSTLLGLWLWGLSEWFFIVSVGSLWKYARGAHKMPFQMTWWSFVFPNTALSTATLALAKALDSNGLRLYSSVFTGVLVLVWAAIFTVMVKCIWKRQLLWPKDLERE

SEQ ID NO: 17523 - DNA, 6585 bp, Muscodor strobelii
  misc_feature: SGI EST ID NO. CUFF.41212.0
  misc_feature: Variant of the nucleotide sequence at SEQ ID NO 17521
ctagatcgaagtgcgtcgcacaaacgcttctccagatgcataagatcggagccgcaatcgtacgacagttctctacagtatcacagatatctcttacagtacatgggtgaatcaagaatcgatgttgttaacggcaaaggttttgagtatcccatcatttttggatattttgtgacttcggcccattagcctggataccgcataaggcttccgagactgttctgattgaagctcaagaagtcccatatcctgtgctggatgctaaggtcaaacggcggaagtgtctttcggcctctacaagacagatattgccgcttgtatacgtgtagtcatcgtatgagactatccacaagcaagcaagcctctgctcgcctcccaagctcaagctgaagccgccctagtccgctcatctctcgcgctaccatcgaataagcatgtcacgatcgtcctgcagcttctagcactttaggctgcgaagttcaagtgcaggttccacgatccatcttcagcttcccgagtcggtagccacaggcgagtccgtgttcccagtgataggtcaacaacaccaaagtttcggtgtttcaagtgtacgccaaaatcacaaatcgtcatgtttttctatctggcgctagcttgcaaacctcgcaccgaactcgcgtgtccgacatggatctcgtgaggtctggccaagccatcgtcaagccatcatgctaaataaccactcgaatggattcaacaacatgatatacctattatgtataatgaaacgggtgaacccgtctgactgaacactaacaaaacacgtgaagtccacgaaagcccactcttatccaatgggaaacatggacagcaattcgaacaatcgttggtatccctgtatagtgccttgggattgacctcaaaatagtctaccgagacagcaagtgcagaattccataggcgaggcgtagaattccagttccagacccttggccgagcggccgctcgacagacaacatgattgcgatatggcgacatctgcgctgcaaatcgtgcaaaccacgcgtgtctgaggcacggttcgacagggcgggggtctcgctcctatgcgaaagccggcgacgttccgtggttcttgatcattttgatatacatgtctgttcactgatagtatagtctgtttcttctccttttttgtctttcttcgttcgatcttcgagtttttcgactcttaccatcttctacctccgactatcttacatgtaagagagacccatcgagaatctggggaagtaccagtcttacgggcgtctccatgtgcaacgagccgcctattacaccagtaaacgagacgaaatccactgcaaagacaatttaaactcatcatattcacctttctcatctttctcttgatcgcggtatctttatcaaatctagtatatacaattgtgtcgactatcaaaacgtgtgattccacatcctattacatcacacccgactgtgcgagtgtggggatcagcatcggcaaacggcacctccaaagcataacggatttatctctgtcgatcggtcttgactcggcctctgttcttcgacatgtcttttacagacgtcggggcattcctcttccgcttcgtcgctttcctggcctgcctcgtcaactttcagtcggcaatcgcacatgtggaacagcccatgttgcttgtgacactttactatgcatccaagctctttacacggaccgctgagagttacgtcgaaggcgactactttaatacttgatcgcagcaatgccacgggcttccacttcccaggtcgacgttgaaatcgccgaaaatggctataggacacctaaagagcgggacttcttcaatcggagatcgttatcgcctgccatgtcacaccagcggagccgcgagaagaaccctttagatccgttctctgatgcgcctaatcatgctcctcctaaccaggagtacggaccctatagcttggcgcgcatgatatctgtggctaggaaagaagctgcacgtggcggtaacattggccttcgagacagaatatgttgctttcaatggacatattttacatcgaccatggcaacgggtggtgtagcaaacgtattgtatagtctgtcgaaagaatattcagcgaattggctttggcacattgggctcgtgttcttcttcctgaatatgcttatgttcgcgatcaattgcgtcttgatcactatgaggtttatcatggttcctgggagcttcatgcattccttcttagaccagacagaatctctgttcataccagccgtagtagtatcctttgcgacaattctgatcaacgtctgtcaatatggtgtgccgcacactggtccatggctccttaagactatcgaggtcttcttctggatttatacggtgttgagtgttgtcacgagtgctggcatgtatctgatactctggtcgacccaaatattcccggtacatcaaatgacgccagtttgggtcttcccaggctatcccctattgctgaccgctccctacgctgcgaacttgatcagcgtggacacactcggcacaggcgagatcaatcgattacccatcgcgattgcggccgtcactctgcaagggacgggtttcttaatcagttttatgatttgtgcggcttttatttaccgcctcatgacgcagaaactgcctcgcgatatgcagcgtccgggtgtgtttatatctatcggaccgcctgcattcacagtcgctggtatagtcctcctaggccaacaaactgcctccatcctcccaccatcctacgccggcgagccccatgcgaaattcatcctcgagctcctctccacactcctcggactttggctctggggcctcagcgaatggttcttcatcgtatccgttgggtccctctggaagtatgcacgcggagcccataagatgccatttcaaatgacctggtggtcgtttgtgtttccgaacacggcactttccaccgctacattggcacttgctaaggcgttggatagcaatgggctgagattgtatagttctgtgttcacgggtgtgctggtattagtctgggcggccatttttacggtcatggtcaagtgtatttggaagagacaactgttgtggccgaaggatttggagagggagtagaggttttatggtgtgattactggagaggcttgagaggttcttgatcgtgcgtagttcttctagtgatacccagattgagattcatgatttgtttcactatttaattgtgaaagaaacaaatgatcgcgaatgtctgtcgttactactgagagtaactgtaccactaggtatccttcgcctgccataagttgtccgacctaacgggtagcacaaagaagtttttcgactgttagcaattacgataccagtctgtaaggaaaagcgagaacctcgaagtccggctttcacacctcctagggacactatcgtgccttggaagcttcagtacactcctctctaatcacatacatctttcccctatctactcaatttcctcaatcttcggcctactcaccccgccgtttggcacacctcctaacgagaccctcggcgcattcacatccaagcccgctatcctcataataccaggcgcagcagcagcttggtccgggactagccgcacaagtctgagattttgcagattctcaatcgcatcccgggcatgctggcgcacgagctcatcgtcatctgtctgttcgacgtacgtcaagatacgcacaacgtcatcttcgctcgttgtgaattctgcgccgaatacacctccagaaccaagacctgagctacttgtacgccgtgcttcgcccagcacgcgagcaaatgtcagtatcagcatgacagctgcacgacgcaggatcccagtttccagcagtcccgactcgagtacgaggacatcaagtgacaaggcgagagcggcatcgacgagctgggagctgaaggctcgcagattcgtttccagacctgatgtgaataacgagagcgaggaggcccgaatgcgcatatcctcgctgccgcgcttactctcccatccagagataatgcgtgcaaggatcgcattttgtgcgcgttgttcaggtgttagatcttccaagtctaaatctgaatcttcctcgtctttgtcatcccctgagatccgtgtgacaagattcgtgctggttttagacctcatttttctttgggcctccaacttctgctctgcaagacgctctgcacgagcctgtcgttcttccgtcttggtacggtgagctcgtcgccctgctagggcaagcagcgcctcgccaacagaggcagatagctcgcctgaaaatgtctcaccgagacgctgcatgagctgtagtaatgtttcaccgaatcggaggcgtgtgtctgtggatagtcgctctgaagcgtctacgtactgctctaaaacctcggagattgtagaacgaggatgccggtccgataattggacaaaaattctgattacagataggctgatatattcgtcatcatcgttcaagagggacgacaacaacactagtgtcgccgggatatcaacaattgcactgttcgctttaacaagtgtgccgagcagattcaaaccctcggcacgcactggagggggcgagtcggcttgcgttatatatgataacgcaagattatacgtcttgcggtcctcggcttgtctttgtgtcggagcagtcgggtggtctgcaggatcatcaagctcatcccggaatttgaggaaaagggacaggttgtaagcagtcttggaaacgtcactattacggcttcgaatgaccttagctagtgacgactcaatcgaagtcaatatttcctcggcgacatcctttcgctggaaactaggtaccgtgacgaccagattgagaagactaagagccacaggcacagcatcatcgtttcctgactcactgttgaactctctcaggatcttgtcgacaagttccagtaactgcgttggatttgagattaacctgtcgggcaactcttccatcatcttttcaagcactcgggttctacttagttgtaagacagggttattgttgtagtcatcatgtgctgttaattgaatgtcggtgggggtcttcatttgcgcaagtacaactccgagaagctttaagaagaccgatggtaccgcggagtcagacccaatacgctttaaaaggtcgacaaataacgatgtctttgactccagagtctcaaaccctaatgagtccatgctgtcatctcgtacttttaagatgtgtatttgagagttgtcagactcttgatatgcccagtgagatttgtcatccgcgttgaagctgccgttaaattggaggttatctaggataatctcaagtctatcggcggagcccgcgagcctaaggtatatatcaaggagacgcagtgcaggctggcaataccgctggttcaattgctcaacagaagcctgccacgttgacaaagcccataggggaagtagtagtggctgcaaaagccgtttcgtgaggccaggattgggatgcgaatgaagcaaagaagtcagccgggtcaatcccgtggatagggcatcgcccagcacgaggacggtctcttttcgaagatctactaccttgtcggggccggcacaaaagacgagaggctcgactgctttgtcttgagaagaaagcgatgggtctatacatgcaatcatgggctctacgaataccttccacccaacggtgccttccagccggatttcagttagttcgcacaatgagttgatagcagtgtgatttacccacctggagcaccaaactgctttcttcccagaacaccgtagcctatcacgtaggcagcggctttcgtgagatcgtgaccttccgtgccatctagcagctttagcagctgaggcgcaacgcccggaaaccacgcttctggtttgaccgtcgcaggtggtactgtgagtagtgttgatgccattttcagggcctccatggtaatgttggcaccttgtttctgcgttgcggtaaactctgacgcactgactgtactcgatgggtgcaccgagaagacaaattccatagtcgtccggacaccgtcaggccgctgaggcagtaaggtgagaacatccatcagatgtatacgaagccagtctggcaggtgggtcggtttgatgagggtgttcaaggacgacatcagagccatcgtgccagtccttgacatagttcagaaacaaggctattgaataaaagactagcctgcgtgtgcctaccttgagatcagggcagcgaagtcccgctgtccatctgcgcgtgatgacgcatcagagtccggctggaacgctttacgacccagcctttcaagagtcaaaacgagcgtctcattttgttcatcctttggctcagtctgaacactgctagctgagccttccgccattgccaaagactttcttggtagatacgtccagggacactatgcagcggcaccaagtggcagttcaagtcgattgcggcaagggcgcagctacgcaatgtcgaacatgttacctcactatgccagaggagaaaaggcttctctcaactctagtcttgccacattccca

SEQ ID NO: 17524 - DNA, 1428 bp, Muscodor strobelii
  misc_feature: SGI cDNA ID NO. 565854
  misc_feature: Elevated expression when VOC is produced
  misc_feature: Encodes the peptide sequence at SEQ ID NO 17525
atgccacgggcttccacttcccaggtcgacgttgaaatcgccgaaaatggctataggacacctaaagagcgggacttcttcaatcggagatcgttatcgcctgccatgtcacaccagcggagccgcgagaagaaccctttagatccgttctctgatgcgcctaatcatgctcctcctaaccaggagtacggaccctatagcttggcgcgcatgatatctgtggctaggaaagaagctgcacgtggcggtaacattggccttcgagacagaatatgttgctttcaatggacatattttacatcgaccatggcaacgggtggtgtagcaaacgtattgtatagtctgtcgaaagaatattcagcgaattggctttggcacattgggctcgtgttcttcttcctgaatatgcttatgttcgcgatcaattgcgtcttgatcactatgaggtttatcatggttcctgggagcttcatgcattccttcttagaccagacagaatctctgttcataccagccgtagtaggtaaccactcaataagcacacttatcaaaacagctgctaatatcgaacaggtagtatcctttgcgacaattctgatcaacgtctgtcaatatggtgtgccgcacactggtccatggctccttaagactatcgaggtcttcttctggatttatacggtgttgagtgttgtcacgagtgctggcatgtatctgatactctggtcgacccaaatattcccggtacatcaaatgacgccagtttgggtcttcccaggctatcccctattgctgaccgctccctacgctgcgaacttgatcagcgtggacacactcggcacaggcgagatcaatcgattacccatcgcgattgcggccgtcactctgcaagggacgggtttcttaatcagttttatgatttgtgcggcttttatttaccgcctcatgacgcagaaactgcctcgcgatatgcagcgtccgggtgtgtttatatctatcggaccgcctgcattcacagtcgctggtatagtcctcctaggccaacaaactgcctccatcctcccaccatcctacgccggcgagccccatgcgaaattcatcctcgagctcctctccacactcctcggactttggctctggggcctcagcgaatggttcttcatcgtatccgttgggtccctctggaagtatgcacgcggagcccataagatgccatttcaaatgacctggtggtcgtttgtgtttccgaacacggcactttccaccgctacattggcacttgctaaggcgttggatagcaatgggctgagattgtatagttctgtgttcacgggtgtgctggtattagtctgggcggccatttttacggtcatggtcaagtgtatttggaagagacaactgttgtggccgaaggatttggagagggagtag

SEQ ID NO: 17525 - protein, 475 aa, Muscodor strobelii
  misc_feature: SGI Peptide ID NO. 565854
  misc_feature (96)..(422): Pfam Id: PF03595 Pfam Desc: C4-dicarboxylate transporter/malic acid transport protein
  misc_feature (193)..(422): Pfam Id: PF03595 Pfam Desc: C4-dicarboxylate transporter/malic acid transport protein
  misc_feature (96)..(172): Pfam Id: PF03595 Pfam Desc: C4-dicarboxylate transporter/malic acid transport protein
  misc_feature (17)..(473): NCBI GI: 171689400 Blast Desc: protein product [Podospora anserina] gi|170944662|emb|CAP70773.1| protein product [Podospora anserina]
  misc_feature (102)..(471): NCBI GI: 261356712 Blast Desc: conserved [Verticillium albo-atrum VaMs.102]
  misc_feature (68)..(471): NCBI GI: 256732964 Blast Desc: NECHADRAFT_78786 [Nectria haematococca mpVI 77-13-4]
  misc_feature (83)..(466): NCBI GI: 18376140 Blast Desc: related to C4-dicarboxylate transport protein mae1 [Neurospora crassa]
  misc_feature (17)..(473): NCBI GI: 164428188 Blast Desc: NCU01788 [Neurospora crassa OR74A] gi|157072047|gb|EAA26724.2| [Neurospora crassa OR74A]
  misc_feature (14)..(473): NCBI GI: 255936139 Blast Desc: Pc13g06630 [Penicillium chrysogenum Wisconsin 54-1255] gi|211583716|emb|CAP91732.1| Pc13g06630 [Penicillium chrysogenum Wisconsin 54-1255]
  misc_feature (28)..(475): NCBI GI: 121714303 Blast Desc: C4-dicarboxylate/malic acid transporter, [Aspergillus clavatus NRRL 1] gi|119402916|gb|EAW13336.1| C4-dicarboxylate/malic acid transporter, [Aspergillus clavatus 1]
  misc_feature (88)..(475): NCBI GI: 238839866 Blast Desc: malic acid transport protein [Microsporum canis CBS 113480]
  misc_feature (14)..(475): NCBI GI: 169784165 Blast Desc: [Aspergillus oryzae RIB40] gi|83775289|dbj|BAE65411.1| protein product [Aspergillus oryzae]
  misc_feature (14)..(475): NCBI GI: 261188053 Blast Desc: C4-dicarboxylate transporter [Ajellomyces dermatitidis SLH14081] gi|239593318|gb|EEQ75899.1| C4-dicarboxylate transporter [Ajellomyces dermatitidis SLH14081] C4-dicarboxylate
  misc_feature: Useful for introducing or modulating the production of volatile compounds
MPRASTSQVDVEIAENGYRTPKERDFFNRRSLSPAMSHQRSREKNPLDPFSDAPNHAPPNQEYGPYSLARMISVARKEAARGGNIGLRDRICCFQWTYFTSTMATGGVANVLYSLSKEYSANWLWHIGLVFFFLNMLMFAINCVLITMRFIMVPGSFMHSFLDQTESLFIPAVVGNHSISTLIKTAANIEQVVSFATILINVCQYGVPHTGPWLLKTIEVFFWIYTVLSVVTSAGMYLILWSTQIFPVHQMTPVWVFPGYPLLLTAPYAANLISVDTLGTGEINRLPIAIAAVTLQGTGFLISFMICAAFIYRLMTQKLPRDMQRPGVFISIGPPAFTVAGIVLLGQQTASILPPSYAGEPHAKFILELLSTLLGLWLWGLSEWFFIVSVGSLWKYARGAHKMPFQMTWWSFVFPNTALSTATLALAKALDSNGLRLYSSVFTGVLVLVWAAIFTVMVKCIWKRQLLWPKDLERE

SEQ ID NO: 17526 - DNA, 6585 bp, Muscodor strobelii; identical to SEQ ID NO: 17523
  misc_feature: SGI EST ID NO. CUFF.41212.0
  misc_feature: Variant of the nucleotide sequence at SEQ ID NO 17524

SEQ ID NO: 17527 - DNA, 2799 bp, Muscodor strobelii
  misc_feature: SGI cDNA ID NO. 565855
  misc_feature: Encodes the peptide sequence at SEQ ID NO 17528
atggcggaaggctcagctagcagtgttcagactgagccaaaggatgaacaaaatgagacgctcgttttgactcttgaaaggctgggtcgtaaagcgttccagccggactctgatgcgtcatcacgcgcagatggacagcgggacttcgctgccctgatctcaaggactggcacgatggctctgatgtcgtccttgaacaccctcatcaaaccgacccacctgccagactggcttcgtatacatctgatggatgttctcaccttactgcctcagcggcctgacggtgtccggacgactatggaatttgtcttctcggtgcacccatcgagtacagtcagtgcgtcagagtttaccgcaacgcagaaacaaggtgccaacattaccatggaggccctgaaaatggcatcaacactactcacagtaccacctgcgacggtcaaaccagaagcgtggtttccgggcgttgcgcctcagctgctaaagctgctagatggcacggaaggtcacgatctcacgaaagccgctgcctacgtgataggctacggtgttctgggaagaaagcagtttggtgctccaggcaccgttgggtggaaggtattcgtagagcccatgattgcatgtatagacccatcgctttcttctcaagacaaagcagtcgagcctctcgtcttttgtgccggccccgacaaggtagtagatcttcgaaaagagaccgtcctcgtgctgggcgatgccctatccacgggattgacccggctgacttctttgcttcattcgcatcccaatcctggcctcacgaaacggcttttgcagccactactacttcccctatgggctttgtcaacgtggcaggcttctgttgagcaattgaaccagcggtattgccagcctgcactgcgtctccttgatatataccttaggctcgcgggctccgccgatagacttgagattatcctagataacctccaatttaacggcagcttcaacgcggatgacaaatctcactgggcatatcaagagtctgacaactctcaaatacacatcttaaaagtacgagatgacagcatggactcattagggtttgagactctggagtcaaagacatcgttatttgtcgaccttttaaagcgtattgggtctgactccgcggtaccatcggtcttcttaaagcttctcggagttgtacttgcgcaaatgaagacccccaccgacattcaattaacagcacatgatgactacaacaataaccctgtcttacaactaagtagaacccgagtgcttgaaaagatgatggaagagttgcccgacaggttaatctcaaatccaacgcagttactggaacttgtcgacaagatcctgagagagttcaacagtgagtcaggaaacgatgatgctgtgcctgtggctcttagtcttctcaatctggtcgtcacggtacctagtttccagcgaaaggatgtcgccgaggaaatattgacttcgattgagtcgtcactagctaaggtcattcgaagccgtaatagtgacgtttccaagactgcttacaacctgtcccttttcctcaaattccgggatgagcttgatgatcctgcagaccacccgactgctccgacacaaagacaagccgaggaccgcaagacgtataatcttgcgttatcatatataacgcaagccgactcgccccctccagtgcgtgccgagggtttgaatctgctcggcacacttgttaaagcgaacagtgcaattgttgatatcccggcgacactagtgttgttgtcgtccctcttgaacgatgatgacgaatatatcagcctatctgtaatcagaatttttgtccaattatcggaccggcatcctcgttctacaatctccgaggttttagagcagtacgtagacgcttcagagcgactatccacagacacacgcctccgattcggtgaaacattactacagctcatgcagcgtctcggtgagacattttcaggcgagctatctgcctctgttggcgaggcgctgcttgccctagcagggcgacgagctcaccgtaccaagacggaagaacgacaggctcgtgcagagcgtcttgcagagcagaagttggaggcccaaagaaaaatgaggtctaaaaccagcacgaatcttgtcacacggatctcaggggatgacaaagacgaggaagattcagatttagacttggaagatctaacacctgaacaacgcgcacaaaatgcgatccttgcacgcattatctctggatgggagagtaagcgcggcagcgaggatatgcgcattcgggcctcctcgctctcgttattcacatcaggtctggaaacgaatctgcgagccttcagctcccagctcgtcgatgccgctctcgccttgtcacttgatgtcctcgtactcgagtcgggactgctggaaactgggatcctgcgtcgtgcagctgtcatgctgatactgacatttgctcgcgtgctgggcgaagcacggcgtacaagtagctcaggtcttggttctggaggtgtattcggcgcagaattcacaacgagcgaagatgacgttgtgcgtatcttgacgtacgtcgaacagacagatgacgatgagctcgtgcgccagcatgcccgggatgcgattgagaatctgcaaaatctcagacttgtgcggctagtcccggaccaagctgctgctgcgcctggtattatgaggatagcgggcttggatgtgaatgcgccgagggtctcgttaggaggtgtgccaaacggcggggtgagtaggccgaagattgaggaaattgagtag

SEQ ID NO: 17528 - protein, 932 aa, Muscodor strobelii
  misc_feature: SGI Peptide ID NO. 565855
  misc_feature (13)..(932): NCBI GI: 39943762 Blast Desc: MGG_03892 [Magnaporthe grisea 70-15] gi|145014590|gb|EDJ99158.1| MGG_03892 [Magnaporthe grisea 70-15]
  misc_feature (28)..(932): NCBI GI: 171690224 Blast Desc: protein product [Podospora anserina] gi|170945060|emb|CAP71171.1| protein product [Podospora anserina]
  misc_feature (28)..(932): NCBI GI: 16416012 Blast Desc: conserved [Neurospora crassa]
  misc_feature (28)..(932): NCBI GI: 164428062 Blast Desc: NCU01615 [Neurospora crassa OR74A] gi|157071995|gb|EAA27290.2| [Neurospora crassa OR74A]
  misc_feature (23)..(932): NCBI GI: 116204801 Blast Desc: CHGG_10284 [Chaetomium globosum CBS 148.51] gi|88176412|gb|EAQ83880.1| CHGG_10284 [Chaetomium globosum CBS 148.51]
  misc_feature (19)..(932): NCBI GI: 156033336 Blast Desc: SS1G_13388 [Sclerotinia sclerotiorum 1980] gi|154698791|gb|EDN98529.1| SS1G_13388 [Sclerotinia sclerotiorum 1980]
  misc_feature (21)..(932): NCBI GI: 154310785 Blast Desc: BC1G_06371 [Botryotinia fuckeliana B05.10] gi|150851170|gb|EDN26363.1| BC1G_06371 [Botryotinia fuckeliana B05.10]
  misc_feature (29)..(904): NCBI GI: 46138491 Blast Desc: FG10760.1 [Gibberella zeae PH-1]
  misc_feature (369)..(932): NCBI GI: 256729169 Blast Desc: NECHADRAFT_39804 [Nectria haematococca mpVI 77-13-4]
  misc_feature (77)..(932): NCBI GI: 159124493 Blast Desc: protein required for cell viability, [Aspergillus fumigatus A1163]
MAEGSASSVQTEPKDEQNETLVLTLERLGRKAFQPDSDASSRADGQRDFAALISRTGTMALMSSLNTLIKPTHLPDWLRIHLMDVLTLLPQRPDGVRTTMEFVFSVHPSSTVSASEFTATQKQGANITMEALKMASTLLTVPPATVKPEAWFPGVAPQLLKLLDGTEGHDLTKAAAYVIGYGVLGRKQFGAPGTVGWKVFVEPMIACIDPSLSSQDKAVEPLVFCAGPDKVVDLRKETVLVLGDALSTGLTRLTSLLHSHPNPGLTKRLLQPLLLPLWALSTWQASVEQLNQRYCQPALRLLDIYLRLAGSADRLEIILDNLQFNGSFNADDKSHWAYQESDNSQIHILKVRDDSMDSLGFETLESKTSLFVDLLKRIGSDSAVPSVFLKLLGVVLAQMKTPTDIQLTAHDDYNNNPVLQLSRTRVLEKMMEELPDRLISNPTQLLELVDKILREFNSESGNDDAVPVALSLLNLVVTVPSFQRKDVAEEILTSIESSLAKVIRSRNSDVSKTAYNLSLFLKFRDELDDPADHPTAPTQRQAEDRKTYNLALSYITQADSPPPVRAEGLNLLGTLVKANSAIVDIPATLVLLSSLLNDDDEYISLSVIRIFVQLSDRHPRSTISEVLEQYVDASERLSTDTRLRFGETLLQLMQRLGETFSGELSASVGEALLALAGRRAHRTKTEERQARAERLAEQKLEAQRKMRSKTSTNLVTRISGDDKDEEDSDLDLEDLTPEQRAQNAILARIISGWESKRGSEDMRIRASSLSLFTSGLETNLRAFSSQLVDAALALSLDVLVLESGLLETGILRRAAVMLILTFARVLGEARRTSSSGLGSGGVFGAEFTTSEDDVVRILTYVEQTDDDELVRQHARDAIENLQNLRLVRLVPDQAAAAPGIMRIAGLDVNAPRVSLGGVPNGGVSRPKIEEIE

SEQ ID NO: 17529 - DNA, 4387 bp, Muscodor strobelii
  misc_feature: SGI EST ID NO. CUFF.41213.2
  misc_feature: Variant of the nucleotide sequence at SEQ ID NO 17527
gcaagactagagttgagagaagccttttctcctctggcatagtgaggtaacatgttcgacattgcgtagctgcgcccttgccgcaatcgacttgaactgccacttggtgccgctgcatagtgtccctggacgtatctaccaagaaagtctttggcaatggcggaaggctcagctagcagtgttcagactgagccaaaggatgaacaaaatgagacgctcgttttgactcttgaaaggctgggtcgtaaagcgttccagccggactctgatgcgtcatcacgcgcagatggacagcgggacttcgctgccctgatctcaaggactggcacgatggctctgatgtcgtccttgaacaccctcatcaaaccgacccacctgccagactggcttcgtatacatctgatggatgttctcaccttactgcctcagcggcctgacggtgtccggacgactatggaatttgtcttctcggtgcacccatcgagtacagtcagtgcgtcagagtttaccgcaacgcagaaacaaggtgccaacattaccatggaggccctgaaaatggcatcaacactactcacagtaccacctgcgacggtcaaaccagaagcgtggtttccgggcgttgcgcctcagctgctaaagctgctagatggcacggaaggtcacgatctcacgaaagccgctgcctacgtgataggctacggtgttctgggaagaaagcagtttggtgctccaggtgggtaaatcacactgctatcaactcattgtgcgaactaactgaaatccggctggaaggcaccgttgggtggaaggtattcgtagagcccatgattgcatgtatagacccatcgctttcttctcaagacaaagcagtcgagcctctcgtcttttgtgccggccccgacaaggtagtagatcttcgaaaagagaccgtcctcgtgctgggcgatgccctatccacgggattgacccggctgacttctttgcttcattcgcatcccaatcctggcctcacgaaacggcttttgcagccactactacttcccctatgggctttgtcaacgtggcaggcttctgttgagcaattgaaccagcggtattgccagcctgcactgcgtctccttgatatataccttaggctcgcgggctccgccgatagacttgagattatcctagataacctccaatttaacggcagcttcaacgcggatgacaaatctcactgggcatatcaagagtctgacaactctcaaatacacatcttaaaagtacgagatgacagcatggactcattagggtttgagactctggagtcaaagacatcgttatttgtcgaccttttaaagcgtattgggtctgactccgcggtaccatcggtcttcttaaagcttctcggagttgtacttgcgcaaatgaagacccccaccgacattcaattaacagcacatgatgactacaacaataaccctgtcttacaactaagtagaacccgagtgcttgaaaagatgatggaagagttgcccgacaggttaatctcaaatccaacgcagttactggaacttgtcgacaagatcctgagagagttcaacagtgagtcaggaaacgatgatgctgtgcctgtggctcttagtcttctcaatctggtcgtcacggtacctagtttccagcgaaaggatgtcgccgaggaaatattgacttcgattgagtcgtcactagctaaggtcattcgaagccgtaatagtgacgtttccaagactgcttacaacctgtcccttttcctcaaattccgggatgagcttgatgatcctgcagaccacccgactgctccgacacaaagacaagccgaggaccgcaagacgtataatcttgcgttatcatatataacgcaagccgactcgccccctccagtgcgtgccgagggtttgaatctgctcggcacacttgttaaagcgaacagtgcaattgttgatatcccggcgacactagtgttgttgtcgtccctcttgaacgatgatgacgaatatatcagcctatctgtaatcagaatttttgtccaattatcggaccggcatcctcgttctacaatctccgaggttttagagcagtacgtagacgcttcagagcgactatccacagacacacgcctccgattcggtgaaacattactacagctcatgcagcgtctcggtgagacattttcaggcgagctatctgcctctgttggcgaggcgctgcttgccctagcagggcgacgagctcaccgtaccaagacggaagaacgacaggctcgtgcagagcgtcttgcagagcagaagttggaggcccaaagaaaaatgaggtctaaaaccagcacgaatcttgtcacacggatctcaggggatgacaaagacgaggaagattcagatttagacttggaagatctaacacctgaacaacgcgcacaaaatgcgatccttgcacgcattatctctggatgggagagtaagcgcggcagcgaggatatgcgcattcgggcctcctcgctctcgttattcacatcaggtctggaaacgaatctgcgagccttcagctcccagctcgtcgatgccgctctcgccttgtcacttgatgtcctcgtactcgagtcgggactgctggaaactgggatcctgcgtcgtgcagctgtcatgctgatactgacatttgctcgcgtgctgggcgaagcacggcgtacaagtagctcaggtcttggttctggaggtgtattcggcgcagaattcacaacgagcgaagatgacgttgtgcgtatcttgacgtacgtcgaacagacagatgacgatgagctcgtgcgccagcatgcccgggatgcgattgagaatctgcaaaatctcagacttgtgcggctagtcccggaccaagctgctgctgcgcctggtattatgaggatagcgggcttggatgtgaatgcgccgagggtctcgttaggaggtgtgccaaacggcggggtgagtaggccgaagattgaggaaattgagtagataggggaaagatgtatgtgattagagaggagtgtactgaagcttccaaggcacgatagtgtccctaggaggtgtgaaagccggacttcgaggttctcgcttttccttacagactggtatcgtaattgctaacagtcgaaaaacttctttgtgctacccgttaggtcggacaacttatggcaggcgaaggatacctagtggtacagttactctcagtagtaacgacagacattcgcgatcatttgtttctttcacaattaaatagtgaaacaaatcatgaatctcaatctgggtatcactagaagaactacgcacgatcaagaacctctcaagcctctccagtaatcacaccataaaacctctactccctctccaaatccttcggccacaacagttgtctcttccaaatacacttgaccatgaccgtaaaaatggccgcccagactaataccagcacacccgtgaacacagaactatacaatctcagcccattgctatccaacgccttagcaagtgccaatgtagcggtggaaagtgccgtgttcggaaacacaaacgaccaccaggtcatttgaaatggcatcttatgggctccgcgtgcatacttccagagggacccaacggatacgatgaagaaccattcgctgaggccccagagccaaagtccgaggagtgtggagaggagctcgaggatgaatttcgcatggggctcgccggcgtaggatggtgggaggatggaggcagtttgttggcctaggaggactaggtgcggtgttaggttagtcagattgctgagaagatggcaaataagtagggcgtcttacctataccagcgactgtgaatgcaggcggtccgatagatataaacacacccggacgctgcatatcgcgaggcagtttctgcgtcatgaggcggtaaataaaagccgcacaaatcataaaactgattaagaaacccgtcccttgcagagtgacggccgcaatcgcgatgggtaatcgattgatctcgcctgtgccgagtgtgtccacgctgatcaagttcgcagcgtagggagcggtcagcaataggggatagcctgggaagacccaaactggcgtcatttgatgtaccgggaatattctattgcgtgtaagccgtctccctcaactattgcgacatgattatacttactgggtcgaccagagtatcagatacatgccagcactcgtgacaacactcaacaccgtataaatccagaagaagacctcgatagtcttaaggagccatggaccagtgtgcggcacaccatattgacagacgttgatcagaattgtcgcaaagctaaggaagagacgttagttatgggcctagttccatggttcttccaatgtac

SEQ ID NO: 17530 - DNA, 1281 bp, Muscodor strobelii
  misc_feature: SGI cDNA ID NO. 565856
  misc_feature: Reduced expression when VOC is produced
  misc_feature: Encodes the peptide sequence at SEQ ID NO 17531
atggagttaatggaacttgtcgacaatgagccaacagctcgtcctttccaatgtgattggcagtcctgctctaagagcttcaatcgcaaatcagatttgcaaagacattaccggatacatacaaacgaacgtccatattcatgtatgacaccagggtgtgggaaaagcttcattcaacgcagtgccttgacggtgcacattcgaacacacacaggcgagaaaccccatcagtgccagcatattggttgtggcaagcgcttttcggattcatcaagtctggcaaggcatcgccggatccacactggtaaaaggccgtatagatgtgcgcatgatgggtgtttgaaaagcttttgccgaaagaccactatggtcaagcaccaaagacgttctcatcaaagaggcatgcacctgtcggatttggacgatttctcatctgaatctgatggcggagattctccttcgactcccggacacccaggaatgtcttggacaccaccaccacacctaacacaggacttggacggccatgcgcttcaaagagctgcttcgttctccggtttcggccagcacgtggagggttatgggatatccgtgccattcggtcatcgtcctagtgtctcatcgaccgggggtcaacatgagtaccataggactcctttgccagagcagacgggcattcacatacttcaacgcacgattggcatcccccaacaaccatattatgtgacagaacaaagtaaccctggcgtggctacaatgaatacgcaccaaatccagccgtatcaggcgccgggacagcagccagatcggccccttctagatcttccttatactacggcaagtattagcgaaccgattcatagcagtcctccgaactcattctctcctcctgccacggtccaaactccaccatcacatgacaactactaccatcgccaacccgcgcagaatagttcctatggtcccaaccctggaacaccaggaattgatcaacatgccatcgtgcagtatccacatcagatccagcaagcaatgggccaaaccgtgtcccaagtcccgggttccgaggctgcacatcaaattcaagaccgatatacttacacaacgagccaccaaggagagcattggtatagtgctataccgtatcaagcccccgtcgaagtcgctacaattggccagcttcccacgtatggatccggtctgtacgatccttgggcaatcaaggcggaatatgatgacccaacgatgcagatgccgagcgcgcgcattgacgccatgtaa

SEQ ID NO: 17531 - protein, 426 aa, Muscodor strobelii
  misc_feature: SGI Peptide ID NO. 565856
  misc_feature (16)..(40): Pfam Id: PF00096 Pfam Desc: Zinc finger, C2H2 type
  misc_feature (76)..(100): Pfam Id: PF00096 Pfam Desc: Zinc finger, C2H2 type
  misc_feature (46)..(70): Pfam Id: PF00096 Pfam Desc: Zinc finger, C2H2 type
  misc_feature (106)..(131): Pfam Id: PF00096 Pfam Desc: Zinc finger, C2H2 type
  misc_feature (1)..(426): NCBI GI: 156054480 Blast Desc: SS1G_06088 [Sclerotinia sclerotiorum 1980] gi|154703868|gb|EDO03607.1| SS1G_06088 [Sclerotinia sclerotiorum 1980]
  misc_feature (1)..(263): NCBI GI: 171690188 Blast Desc: protein product [Podospora anserina] gi|170945042|emb|CAP71153.1| protein product [Podospora anserina]
  misc_feature (1)..(91): NCBI GI: 261352992 Blast Desc: gastrula zinc finger protein XlCGF17.1 [Verticillium albo-atrum VaMs.102]
  misc_feature (13)..(136): NCBI GI: 242768578 Blast Desc: C2H2 finger domain protein, [Talaromyces stipitatus ATCC 10500] gi|218724793|gb|EED24210.1| C2H2 finger domain protein, [Talaromyces stipitatus ATCC 10500]
  misc_feature (67)..(426): NCBI GI: 154321101 Blast Desc: BC1G_01425 [Botryotinia fuckeliana B05.10] gi|150851963|gb|EDN27155.1| BC1G_01425 [Botryotinia fuckeliana B05.10]
  misc_feature (13)..(134): NCBI GI: 212542301 Blast Desc: C2H2 finger domain protein, [Penicillium marneffei ATCC 18224] gi|210066212|gb|EEA20305.1| C2H2 finger domain protein, [Penicillium marneffei ATCC 18224]
  misc_feature (13)..(134): NCBI GI: 212542303 Blast Desc: C2H2 finger domain protein, [Penicillium marneffei ATCC 18224] gi|210066213|gb|EEA20306.1| C2H2 finger domain protein, [Penicillium marneffei ATCC 18224]
  misc_feature (13)..(134): NCBI GI: 212542299 Blast Desc: C2H2 finger domain protein, [Penicillium marneffei ATCC 18224] gi|210066211|gb|EEA20304.1| C2H2 finger domain protein, [Penicillium marneffei ATCC 18224]
  misc_feature (12)..(134): NCBI GI: 159125396 Blast Desc: C2H2 finger domain protein, [Aspergillus fumigatus A1163]
  misc_feature (14)..(132): NCBI GI: 238843863 Blast Desc: zinc finger protein 273 [Microsporum canis CBS 113480]
  misc_feature: Useful for introducing or modulating the production of volatile compounds
MELMELVDNEPTARPFQCDWQSCSKSFNRKSDLQRHYRIHTNERPYSCMTPGCGKSFIQRSALTVHIRTHTGEKPHQCQHIGCGKRFSDSSSLARHRRIHTGKRPYRCAHDGCLKSFCRKTTMVKHQRRSHQRGMHLSDLDDFSSESDGGDSPSTPGHPGMSWTPPPHLTQDLDGHALQRAASFSGFGQHVEGYGISVPFGHRPSVSSTGGQHEYHRTPLPEQTGIHILQRTIGIPQQPYYVTEQSNPGVATMNTHQIQPYQAPGQQPDRPLLDLPYTTASISEPIHSSPPNSFSPPATVQTPPSHDNYYHRQPAQNSSYGPNPGTPGIDQHAIVQYPHQIQQAMGQTVSQVPGSEAAHQIQDRYTYTTSHQGEHWYSAIPYQAPVEVATIGQLPTYGSGLYDPWAIKAEYDDPTMQMPSARIDAM

SEQ ID NO: 17532 - DNA, 5184 bp, Muscodor strobelii
  misc_feature: SGI EST ID NO. CUFF.41227.1
  misc_feature: Variant of the nucleotide sequence at SEQ ID NO 17530
aagcaatcggatcgcaagcaatcgtgatcctgaaagggaagatacggtcatgcaaccgcgcacgcttctcatgtacgtgggctacgtacctgtctcgcctgtgttagtcttcattagcagggagactgtggcgccccccaatgttcactcacgacaaatcggctgcagtacagaggtcttcgcggcgacgctaccttaagcaggtgtgcccggccgactggccagaggttatgcttcaatgcatcagaggtttgacagcaggtttggcggcatgtacgcacgccaagtgccaccgcgcatgtggtggcctgcactccacacgacatagaacattacgctgtactgggttgcatggatctcgaaaaaaatacggcaccctgccatgtccctgaccacaaaccatgctgtctttggaagacccatcccttctctgacccctgctcctcttaccgtgtctccgtacctatttggtatcatgtcactcgacggtggagagatcgcgggcgggctaggcacacgatatggtctgacatactgcggctcgacaggcacttacagaagtactcgttagtacatgtctgattttgttgcccaatgtctgtgtgtacgtctatccctcagttacctacttgtagggatcccttctctcagttcctgccctggcctatagctggaatgaggtctatatgccccagaatactagtacgacttcctctattgtctcctatgtgtattgcccgcctcatgttgcatatttgagtctcatggatacccatcaaccgttaaatgtttcttttcccgcccctcaatgaacctcgtgctcgagtgccggaaccgtcgagtaggtccactgcgatgacactttctcgcttcgcgcctcatgaactataactactacagattggccgtcacccaggtcgaaagcccacacgttaaagacgagggactcaggacaaacaacgctgatatatccctacataagcctctcgccttggtcgacgcagctagacgcaaggaccgccaccacgaaggcgataccttagtctctcacatgaaaataccttcaccagcgagtattcttgtcttgggtctatacgccattaatagctttttacaatcacataatcaccaagggcgtcatcagatcccctcggggctgccgcacatcatcgcacatatcgatactggtcttcttgaatttgctatattgggcgcctctagatttagactactcttgaagctgctcacacctgaacactccttgcttctcttgtagcccttcatacctaggactaagtacgaaaactggacgttcgggtggcataccggctgcattatccgtcggttttattatacaggcccaagtctatctaggtgccgctgtatatatacagtctcatctacggcaaggactcggggcgagagaaagcagatattagtgtgagcttgagtgtgagctcgcttggccctttgccgtacagcaatcacaagcttctttgaatgttgccttctcgatactttcactctaacacgccccgaaagccagccgcgcactccgaggatttcaccaaagaaaacctcagccatatctcaacggtctcaactgccggctctgacacttatattcggaagaaccacacttcggtcgactcagtcgccttggagttcatctcacgctgatcatttcatgccctgagtagatcttgtagatcagacatcaactcgaagacaccgtgtattagcacgcccaaggacgattcttcaggatactttgccggaggaagaagcctactgagttaatcgtcaactctccttagtgtttaggtcagcatcggagtgacagcgaaaccgttgccaaaaattgactacgccacttacaccttccaagaccacgaacttacattcgcttccgcaaacttacggccctttctgacgaatatctcttctcttaattctccgttacctccgtggactggtccagaactcctaataactaagttacaccgccgaagtttgatctatcgaccatcgttcagtcgatttagacctcatccattggtacagagatccatcggtctgaagcgcataaatcgcaatagagacgtcgcattgaagccggttccgcttccaagctatccgagcaaggatcccattgcacatacaacctacctcaaacacgccgaacaaccctagtcactaccagcagccttagtgtctaccctgaaagcctggttgactattctgcggtggtcttagcaacatataatcgtcatcacgctggctatagtcatctcaaattcgtatttttcttgacattgggaatatggagttaatggaacttgtcgacaatgagccaacagctcgtcctttccaatgtgattggcagtcctgctctaagagcttcaatcgcaaatcagatttgcaaagacattaccggatacatacaaacgaacgtccatattcatgtatgacaccagggtgtgggaaaagcttcattcaacgcagtgccttgacggtgcacattcgaacacacacaggcgagaaaccccatcagtgccagcatattggttgtggcaagcgcttttcggattcatcaagtctggcaaggcatcgccggatccacactggtaaaaggccgtatagatgtgcgcatgatgggtgtttgaaaagcttttgccgaaagaccactatggtcaagcaccaaagacgttctcatcaaagaggcatgcacctgtcggatttggacgatttctcatctgaatctgatggcggagattctccttcgactcccggacacccaggaatgtcttggacaccaccaccacacctaacacaggacttggacggccatgcgcttcaaagagctgcttcgttctccggtttcggccagcacgtggagggttatgggatatccgtgccattcggtcatcgtcctagtgtctcatcgaccgggggtcaacatgagtaccataggactcctttgccagagcagacgggcattcacatacttcaacgcacgattggcatcccccaacaaccatattatgtgacagaacaaagtaaccctggcgtggctacaatgaatacgcaccaaatccagccgtatcaggcgccgggacagcagccagatcggccccttctagatcttccttatactacggcaagtattagcgaaccgattcatagcagtcctccgaactcattctctcctcctgccacggtccaaactccaccatcacatgacaactactaccatcgccaacccgcgcagaatagttcctatggtcccaaccctggaacaccaggaattgatcaacatgccatcgtgcagtatccacatcagatccagcaagcaatgggccaaaccgtgtcccaagtcccgggttccgaggctgcacatcaaattcaagaccgatatacttacacaacgagccaccaaggagagcattggtatagtgctataccgtatcaagcccccgtcgaagtcgctacaattggccagcttcccacgtatggatccggtctgtacgatccttgggcaatcaaggcggaatatgatgacccaacgatgcagatgccgagcgcgcgcattgacgccatgtaatcattatcggagtatatgtatgctcttagtcattacttgagcagaactgtgcatctccggatccgggtatcaaattccctcccacgtactcggcacggcgcaatctgcattagcaagccatctcctgcgcttcgatcatctcttcagatcagcaaactactgatcataacatcgtcacgagtcacaaaattacctactagaaggcgatccgagaaaacagcattggagtctttcgaattttccgctgcttagagaggtgttcgggagtcaatacacaaatatgtacgaaaccgccatacatgatttgttttcttccctctatggtgttgtctgtgttgaaacggccacgaggccgaattacaattcaacccaattccgcccaggcgtattccgtccccaggcatatcaacttcggtggggatcggatctcgacgatcgaattatatatgagggtgttttctgtttagaattgtacgaacgatatcaacgattttgatacccggcgaatttttttgagcggcagatcgccggagagcggcgggcctctgtgcacatatggatcgaaacagaggattatcggtaggggtttcggagttatgagatgatgagttaatatgcctatcctatgaggtttgggggtttcgggtaccagcattggagcgggtcgagtcaagcatatgcaacacactgtatactatactattatctgtgttcagggcgttaaaaaatatgatgcattgttgttatcaatatcaatattctgtagcgatcatattctcctgtgaactgactaaattgtcgaagatggcgaatagcagctggtagaacatagagcgctgaatgagaatgaaggagagcgatagacagagattgcaagcaggatgacacacgatgtcagctatataccatgattgagttggggcagctgaggaaaagaaatcagccgccacccctcccaatctcgcatatcatgcaatagcacgctactagcgaatagcgatcatctcctgtaagacaatgacatgccgttaatatggcatggagccgccatatagctccggatcgggtctccgcctcaagtaccttactcatgcagtgtattctagataaattgaaagcctcgcaaactcgctgcacgtaatgggttgcgatagcctcaattgccgattccatttgtcccgatgcgattcatagtgcattcacacgttcaagaaatgatcgcccatttgcaatatgatctagattagactgattaattgataaggactacaacatcaaaagaggactcgtcatacctcgttggagggacgcgttgcacgactccacgttacgtggcacccaaggaatcttccttcaatcttcgaaagtataagcaagtgggcaagtgtttgactttgaataaatcaaaatcctagctcaagttgaaatcacagtgcctttggtcgtcgtcctaccggcgcagatctgtgacgtggaggaggtttttgatacatactttgtagcgtttcaaaatgagcaaattttgatattttcgtttctaggaggggtgaattgcaaagcgcacatagcgaatacggtgc

SEQ ID NO: 17533 - DNA, 1068 bp, Muscodor strobelii
  misc_feature: SGI cDNA ID NO. 565857
  misc_feature: Encodes the peptide sequence at SEQ ID NO 17534
atgccgaaggttctcctaaccggtggttctggcttcattgccgcgcatgtccttgccttacttttggaacgaggccacgatgtcgtgaccactgtgcgctcggaagacaaggcggagaagattcgcgctgcttacccagatgcgaagctcaccgttgtgattgttcctgatctagctcagcctggtgccttcgacgaggtgatgcaaacaccagatcttgaatatgtccagcatacagcgtcaccattccattacaacttcacagatccaaagacggagctcttagatcccgctatcaagggaacaacctcagttctcgaagcagtccagaagtatgcgccgactgtgaagcgcgtcgttattacaagttcattcgcagcaattctatcggcctcagagctcgagaatatggataagacttggagtgaggcagactggaatccaaatacctatggtaagcgctccggcctctcaaatatcagagttccattccaagacggggtcaccggagcaccggcagtcagctatcgtgtctctaagacactagctgaaaaggcagcttgggattttaagaaggagaagaatcctaactttgatgtcgccacgatcaatccaccgcttgtttttggccccgtggtccaccatttgaactcattgtcgaacatcaatactagcaatgagcgtatcgtacatctcatcacaggcaagtggaaagccgacaaccaaatcccggccacaggcgttcacttctgggtcgatgtgcgcgacgtagcgaaggcacatgttgaggcgatggagcgtccagaagccggcggcaatcgctttttcgtaacagctggttacgctagtaacagagaattcgtgcctattgttcgagaacatttcccacaacttgctgataagctgcctgatgatagcgtcaagggtggcgactatcccactggcaagaaggaagagacttacaaatatgataactcgaaggctacgaagaaattgggcatcgaatggatctcacttgagaagtcaattgttgataccgtcaagagtcttctggaggtcggcgtttag

SEQ ID NO: 17534 - protein, 355 aa, Muscodor strobelii
  misc_feature: SGI Peptide ID NO. 565857
  misc_feature (5)..(304): Pfam Id: PF01073 Pfam Desc: 3-beta hydroxysteroid dehydrogenase/isomerase family
  misc_feature (4)..(279): Pfam Id: PF01370 Pfam Desc: NAD dependent epimerase/dehydratase family
  misc_feature (6)..(255): Pfam Id: PF07993 Pfam Desc: Male sterility protein
  misc_feature (4)..(128): Pfam Id: PF01370 Pfam Desc: NAD dependent epimerase/dehydratase family
  misc_feature (6)..(39): Pfam Id: PF07993 Pfam Desc: Male sterility protein
  misc_feature (1)..(354): NCBI GI: 212547096 Blast Desc: NAD dependent epimerase/dehydratase, [Penicillium marneffei ATCC 18224] gi|210064461|gb|EEA18557.1| NAD dependent epimerase/dehydratase, [Penicillium marneffei ATCC 18224]
  misc_feature (12)..(354): NCBI GI: 242807352 Blast Desc: NAD dependent epimerase/dehydratase, [Talaromyces stipitatus ATCC 10500] gi|218715563|gb|EED14985.1| NAD dependent epimerase/dehydratase, [Talaromyces stipitatus ATCC 10500]
  misc_feature (1)..(355): NCBI GI: 256730603 Blast Desc: NECHADRAFT_65266 [Nectria haematococca mpVI 77-13-4]
  misc_feature (1)..(354): NCBI GI: 85080012 Blast Desc: NCU03358 [Neurospora crassa OR74A] gi|28917532|gb|EAA27231.1| NCU03358 [Neurospora crassa OR74A]
  misc_feature (1)..(354): NCBI GI: 115396004 Blast Desc: conserved [Aspergillus terreus NIH2624] gi|114193210|gb|EAU34910.1| conserved [Aspergillus terreus NIH2624]
  misc_feature (1)..(355): NCBI GI: 169609791 Blast Desc: SNOG_07987 [Phaeosphaeria nodorum SN15] gi|111063143|gb|EAT84263.1| SNOG_07987 [Phaeosphaeria nodorum SN15]
  misc_feature (1)..(354): NCBI GI: 67539614 Blast Desc: AN5977.2 [Aspergillus nidulans FGSC A4] gi|40738536|gb|EAA57726.1| AN5977.2 [Aspergillus nidulans FGSC A4] gi|259479840|tpe|CBF70432.1| TPA: ketoreductase AFUA_2G10280)
  misc_feature (1)..(354): NCBI GI: 119480963 Blast Desc: ketoreductase [Neosartorya fischeri NRRL 181] gi|119408664|gb|EAW18613.1| ketoreductase [Neosartorya fischeri NRRL 181]
  misc_feature (1)..(355): NCBI GI: 46109188 Blast Desc: FG01476.1 [Gibberella zeae PH-1]
  misc_feature (1)..(355): NCBI GI: 171688932 Blast Desc: protein product [Podospora anserina] gi|170944428|emb|CAP70539.1| protein product [Podospora anserina]
  misc_feature (4)..(352): SWISSPROT Homolog: EC 1.1.1.283 Methylglyoxal reductase (NADPH-dependent)
MPKVLLTGGSGFIAAHVLALLLERGHDVVTTVRSEDKAEKIRAAYPDAKLTVVIVPDLAQPGAFDEVMQTPDLEYVQHTASPFHYNFTDPKTELLDPAIKGTTSVLEAVQKYAPTVKRVVITSSFAAILSASELENMDKTWSEADWNPNTYGKRSGLSNIRVPFQDGVTGAPAVSYRVSKTLAEKAAWDFKKEKNPNFDVATINPPLVFGPVVHHLNSLSNINTSNERIVHLITGKWKADNQIPATGVHFWVDVRDVAKAHVEAMERPEAGGNRFFVTAGYASNREFVPIVREHFPQLADKLPDDSVKGGDYPTGKKEETYKYDNSKATKKLGIEWISLEKSIVDTVKSLLEVGV

SEQ ID NO: 17535 - DNA, 1117 bp, Muscodor strobelii
  misc_feature: SGI EST ID NO. CUFF.41219.1
  misc_feature: Variant of the nucleotide sequence at SEQ ID NO 17533
gtaaactttatgagattgtgagcagagctttcctgatagaataccattctagcataactactagattggcccaaggttccgttgcaaatgctgtaccggtagcgtatagagagaaaagaatatcgcacataacaagtcttgtagctccacatagggtagactgtacgttaatgtaccatgactgatgtaactgaaatcgaggctcactctcgcgtcaaaaagccggatgattgctcgatgcgcggagttaacgtatacttacgcatgctatgttaaaccacagcatctaagagcaattgactttttaagtcctggaacgtctgaggtagtatatgtatccgcagatacagtgggtgagcgactctgttgctttttatgactaacgtaccatttattatcgccgaaaagcgaactagtcggtcataggagttggcggtcgcaactgcacctatagtgacgtatcgtcgctaaccccgcttgactgtgggattattaaatattgattgataaagcacgcagcccgaagatttagtatataataatttggttttcatttccattctcatgctataatactctctcatttactcgagacttcagctttccaggctcgtctgttccgtgaaactgagactttgatcaggaatctgaaaaggaacctctcctcacgatgccgaaggttctcctaaccggtggttctggcttcattgccgcgcatgtccttgccttacttttggaacgaggccacgatgtcgtgaccactgtgcgctcggaagacaaggcggagaagattcgcgctgcttacccagatgcgaagctcaccgttgtgattgttcctgatctagctcagcctggtgccttcgacgaggtgatgcaaacaccagatcttgaatatgtccagcatacagcgtcaccattccattacaacttcacagatccaaagacggagctcttagatcccgctatcaagggaacaacctcagttctcgaagcagtccagaagtatgcgccgactgtgaagcgcgtcgttattacaagttcattcgcagcaattctatcggcctcagagctcgagaatatggataagacttggagtgaggcagactggaatccaaat

SEQ ID NO: 17536 - DNA, 558 bp, Muscodor strobelii
  misc_feature: SGI cDNA ID NO. 565858
  misc_feature: Elevated expression when VOC is produced
  misc_feature: Encodes the peptide sequence at SEQ ID NO 17537
atggtggttcaattaccacatgatgctttgggtgccgcagtcggtgtgcaaatctactctttcctgtgccttatatgcagtgcgttggtaatcttgcttgtatggaaacatcatgaaaagggaagctacgttgccttacttggctacttcacatttctcggtacggctgcatctatagcacagcagcttcatacgatcgtattatggacgaatatcaagacagaccaattttactatgtcagaagcaactttgggtgtcctgtcattgctctcgcaggtccgtctacaggagcggatctgattctgttttatatacaattctattgctacaacgttgaaggcttgttggcgctgatttgggcttcttctctcgcacactcggttttctatgcttcattgccggaacgctggcagcaaataagtggaggatatatcagtctgacggcgaagattattgccgttctccagcctctgattctagtcagcttcctgcagatcggagctgttcagcagtcgccagtaggctttttggtcctttcagacatcactcgtcagtaa

SEQ ID NO: 17537 - protein, 185 aa, Muscodor strobelii
  misc_feature: SGI Peptide ID NO. 565858
  misc_feature (1)..(182): NCBI GI: 145613698 Blast Desc: MGG_01430 [Magnaporthe grisea 70-15] gi|145020736|gb|EDK04865.1| MGG_01430 [Magnaporthe grisea 70-15]
  misc_feature (2)..(177): NCBI GI: 171683493 Blast Desc: protein product [Podospora anserina] gi|170941706|emb|CAP67360.1| protein product [Podospora anserina]
  misc_feature (1)..(182): NCBI GI: 39976553 Blast Desc: MGG_05800 [Magnaporthe grisea 70-15] gi|145011966|gb|EDJ96622.1| MGG_05800 [Magnaporthe grisea 70-15]
  misc_feature (60)..(181): NCBI GI: 116194522 Blast Desc: CHGG_03859 [Chaetomium globosum CBS 148.51] gi|88179772|gb|EAQ87240.1| CHGG_03859 [Chaetomium globosum CBS 148.51]
  misc_feature (1)..(183): NCBI GI: 156056216 Blast Desc: SS1G_05460 [Sclerotinia sclerotiorum 1980] gi|154703244|gb|EDO02983.1| SS1G_05460 [Sclerotinia sclerotiorum 1980]
  misc_feature (1)..(105): NCBI GI: 154302637 Blast Desc: [Botryotinia fuckeliana B05.10] gi|150855384|gb|EDN30576.1| [Botryotinia fuckeliana B05.10]
  misc_feature: Useful for introducing or modulating the production of volatile compounds
MVVQLPHDALGAAVGVQIYSFLCLICSALVILLVWKHHEKGSYVALLGYFTFLGTAASIAQQLHTIVLWTNIKTDQFYYVRSNFGCPVIALAGPSTGADLILFYIQFYCYNVEGLLALIWASSLAHSVFYASLPERWQQISGGYISLTAKIIAVLQPLILVSFLQIGAVQQSPVGFLVLSDITRQ

SEQ ID NO: 17538 - DNA, 4542 bp, Muscodor strobelii
  misc_feature: SGI EST ID NO. CUFF.41220.3
  misc_feature: Variant of the nucleotide sequence at SEQ ID NO 17536
aaaatttaaatctgagattctctcagcatggtgtctaaaatcgatccttgatctagatcctaaacggacccggcctataattcgatatcagattctattctttgcgctcatttgtgaatcggaaaatcggcaagcgacgatctccgcccttgctggggcactgccggcatctcatgttggccgttgactcggttgagttacagaactcggcttggcaaccgactgggttaggatccgaactctcacgatagcgaatcaatcactcggaggtatgcctcatatagtaagcaccatcgatactgcagcgtcgccacagatacctcgacggaaccaggaccgcattcttaataaagatggagattagaaaacagcgttcaagaattccaaccgaacaaggcatgagagccgtccgagcgagtttcgatgtcgtatcgtatatactcattctcagctaattatatgcatggagatctcgaatgggcctcgatgttggggttttcatggctatatgctcaaccaagggcctcgacgttgtgtgctataggcaactaagcaaccaaattcctgatttccttctccttggtttataccctctgtgatatctcatgggcacccccacgcatgcagcgttggaacaaaatccgggccctgcatcttgcagccgcggagggtgggaatacagaatgtcactgcagatcccggcagtgctcgtcagggcttagtttctagttgtggtagtgtcgtgcttaaggaggcaaaaaactattgatatatcaatttacgatcagaaacgctgccaagtctaagagccacaatcctcatgccttcaaattgctttaccgagccgttatggtggttcaattaccacatgatgctttgggtgccgcagtcggtgtgcaaatctactctttcctgtgccttatatgcagtgcgttggtaatcttgcttgtatggaaacatcatgaaaagggaagctacgttgccttacttggctacttcacatttctcggtacggctgcatctatagcacagcagcttcatacgatcgtattatggacgaatatcaagacagaccaattttactatgtcagaagcaactttgggtgtcctgtcattgctctcgcaggtccgtctacaggagcggatctgattctgttttatatacaattctattgctacaacgttgaaggcttgttggcgctgatttgggcttcttctctcgcacactcggttttctatgcttcattgccggaacgctggcagcaaataagtggaggatatatcagtctgacggcgaagattattgccgttctccagcctctgattctagtcagcttcctgcagatcggagctgttcagcagtcgccagtaggctttttggtcctttcagacatcactctggttatcagcattatcggggtaactttgattatcattgctataatagtgaaacacatatatacacgacgacgacttcaccgttggaactttcgccacttcaccgcgagtcatacttcagacgccgaacaagcaccggaggcggcaaacgaagagcgcaacgaagctcagactaccgcttatgacatttggttgatcggacgatttgccattgcttttttgtttctagaagccttccaaatacttgatatattgtcagaatttgcacagatcgagcacaacagacccgaatcgttcccgtcaagcccggatctatccgcaggccacgcgaatcaagattttcccatgttcatacctggtgtttctccaagtcttttgatatttatcgtatttggaacttcgcagtcgttccggagaactctatacatatctttggtcccgcaaagatttcgccaatgtcctgtcgaaagaacagaaccgacatcacctatatcaccaagtcttcaccaaatcgtatatctctctccccggactactcctcgcacccaatcggtctgtgccgggccaataatcaattcttttcgcctcatgcacgatgagacacgacccagtttagagcttaaccaagaagccatatcaggaatatcgcatctagtcaaatattctgagctcgctctggtagagaaggcaatacgaaatgcggacaattcttctataagtacctctaaaattcgctactctgaggccgagacaagtggaagcagcgaacaggcttcgtaggtaagagtcgcgaaacctcgcctgatactcatcggttctgcgtcactttcatctagttatcagagagacacgaagaaaaaacgactctttgcaccagcacctgaaagggttggatcttgtgcgaatgggcagttgcacaatatttcattacaaactggttaggatacaggcttgtggtgatggaagtacggactatatacacctcacatatccggaatttatataaaagaggagagagataagaattcacagatcgtgttctatggcacattatataagctaggcttctatgtatcatcctcttatcagtctaataccccctagtatcgtagtctaaacgccgacctccagaagactcttgacggtatcaacaattgacttctcaagtgagatccattcgatgcccaatttcttcgtagccttcgagttatcatatttgtaagtctcttccttcttgccagtgggatagtcgccacccttgacgctatcatcaggcagcttatcagcaagttgtgggaaatgttctcgaacaataggcacgaattctctgttactagcgtaaccagctgttacgaaaaagcgattgccgccggcttctggacgctccatcgcctcaacatgtgccttcgctacgtcgcgcacatcgacccagaagtgaacgcctgtggccgggatttggttgtcggctttccacttgcctgtgatgagatgtacgatacgctcattgctagtattgatgttcgacaatgagttcaaatggtggaccacggggccaaaaacaagcggtggattgatcgtggcgacatcaaagttaggattcttctccttcttaaaatcccaagctgccttttcagctagtgtcttagagacacgatagctgactgccggtgctccggtgaccccgtcttctgaaagcccgcgagagatcatgtcagtcaataatcatgatttttctatacaggtcccggattctaagatacggaatggaactctgatatttgagaggccggagcgcttactacaaaggagttagtacaatccctcagatgtgcgaccatgaattaaatcgtgcaagagcttcttaaactcacccataggtatttggattccagtctgcctcactccaagtcttatccatattctcgagctctgaggccgatagaattgctgcgaatgaacttgtaataacgacgcgcttcacagtcggcgcatacttctggactgcttcgagaactgaggttgttcccttgatagcgggatctaagagctccgtctttggatctgtgaagttgtaatggaatggtgacgctgtatgctggacatattcaagatctggtgtttgcatcacctcgtcgaaggcaccaggctgagctagatcaggaacaatcacaacggtgagcttcgcatctgggtaagcagcgcgaatcttctccgccttgtcttccgagcgcacagtggtcacgacatcgtggcctcgttccaaaagtaaggcaaggacatgcgctgctctcctattagttccatgtcgagtgctcttcaaggttcaatgcttctactgaccggcaatgaagccagaaccacctatacatttgaatagtaatagtcagttgatatccgttcatttccacttccaaatcacacccatcggtgtcgtaatgcgggggtcacgaaccggttaggagaaccttcggcatcgtgaggagaggttccttttcagattcctgatcaaagtctcagtttcacggaacagacgagcctggaaagctgaagtctcgagtaaatgagagagtattatagcatgagaatggaaatgaaaaccaaattattatatactaaatcttcgggctgcgtgctttatcaatcaatatttaataatcccacagtcaagcggggttagcgacgatacgtcactataggtgcagttgcgaccgccaactcctatgaccgactagttcgcttttcggcgataataaatggtacgttagtcataaaaagcaacagagtcgctcacccactgtatctgcggatacatatactacctcagacgttccaggacttaaaaagtcaattgctcttagatgctgtggtttaacatagcatgcgtaagtatacgttaactccgcgcatcgagcaatcatccggctttttgacgcgagagtgagcctcgatttcagttacatcagtcatggtacattaacgtacagtctaccctatgtggagctacaagacttgttatgtgcgatattcttttctctctatacgctaccggtacagcatttgcaacggaaccttgggccaatctagtagttatgctagaatggtattctatcaggaaagctctgctcacaatctcataaagtttac

SEQ ID NO: 17539 - DNA, 1773 bp, Muscodor strobelii
  misc_feature: SGI cDNA ID NO. 565859
  misc_feature: Reduced expression when VOC is produced
  misc_feature: Encodes the peptide sequence at SEQ ID NO 17540
atgagctccaggttctctggctatcctcgagcgcgggagtgtcccattgccaatccagccttcgccgaagagtcaaatccagtgttaaggggctggcctttggtcattttcgctaatcttgtctcgcgatttccgtctcttgccaagttgacatgggccaatgcgaaatttgggcacattaaagacatatctggccttgaacagtatgactggcgactccatcctgtcgttacgccacttcgatcagacggcgatgagacccacaagttggatatatcaccagagcgctttccacggcaaccagaagacttgactggtcgcttttactcggctgccgactaccacgaactatataaatctggtaatttgactccgcttcaggtagtcgaagttttgctacctttagtatctcgaaacggaaaatacgaatcagcatggtccgacattcaaaaggaatttctatttgaggctgcgaagtcctccactgttcggtatcgtgaaggcaagtctcttggagtgttagacggcgttccaatcggcgtgaaagaagatacagacgtccgaggcttgacatgctttcatgggcaacaacctcagccctcgaatccctactttataccagctgaaaatacggcatggccagttgctcgcctagtagacgaaggtgccctagtaatagggcatctcgccatgcatgaactcggcctcgacatatccggctgtaatcctcttcgcgggacgcccaagaactggaataacacttcatactacccgggcggctcatcctctggcgcaggttcagcattatgtgctggtttaatccccattgcagtcgggacagatgccggtggcagcattaggataccgtcgagcttgtgtggtgtattcgggttgaaaccgacactgcaccgcatgaaaacaatgcaaagctctgtctgcgtgatcggtcccttggctgctactgcggccgatcttaccattgcatacagagtaatgtcggcccctaaccctgatgacgctttacaaagctgttttgcgccctctgtcctaccttcgccaacagcaaagaaaacaatcggcatttgccgggagtggaatgcccgtgcgtcacccgtagtccgggaaattaccgagaaagcaatagcttatttcgccgacaagcttgattacgatatcgtggacattcacattccatatctccaggaaggtcaatgggcccatgctgcatgggcgttgaccgagggcgtggaccttctaaggtcacgagtcaaggagaaagcaatgtcgacaattaacaacaccaccaggacactcctgtctgttggagcctgtactgcaggcaccgatatgatcaagtactcacaaatgcgcggattattgatggaccatctagcattcctctttaaaaaacaccctggcttgctgattgttacgccgactaccgccgaacccggatggaaaatccatcccggagacgaagcctacgggttcagcgatggaaatctgaccatgcgaatgatgatgtatatctggcttgcaaactccaccggctgtcccgcggtgagtgctccggtgggatattccgagcccgaacaaggtgaaggaaagttacctattggcttgatggcactcggtgagtggggagcggaagagcaattgctcgcatgggcgggcgaagccgaaggatacttgaacggtgtcttgcaaggcggaagaaggagaccggaagcgtgggtggacgtcgtcaacttgacagacggtgcacaagcctag

SEQ ID NO: 17540 - protein, 590 aa, Muscodor strobelii
  misc_feature: SGI Peptide ID NO. 565859
  misc_feature (130)..(554): Pfam Id: PF01425 Pfam Desc: Amidase
  misc_feature (156)..(402): Pfam Id: PF01425 Pfam Desc: Amidase
  misc_feature (3)..(588): NCBI GI: 46107650 Blast Desc: FG00708.1 [Gibberella zeae PH-1]
  misc_feature (3)..(585): NCBI GI: 256734759 Blast Desc: NECHADRAFT_65857 [Nectria haematococca mpVI 77-13-4]
  misc_feature (1)..(587): NCBI GI: 171694898 Blast Desc: protein product [Podospora anserina] gi|170947691|emb|CAP59853.1| protein product [Podospora anserina]
  misc_feature (5)..(584): NCBI GI: 145614010 Blast Desc: MGG_11270 [Magnaporthe grisea 70-15] gi|145021003|gb|EDK05132.1| MGG_11270 [Magnaporthe grisea 70-15]
  misc_feature (2)..(587): NCBI GI: 85111196 Blast Desc: NCU00905 [Neurospora crassa OR74A] gi|28925560|gb|EAA34586.1| [Neurospora crassa OR74A] gi|38636458|emb|CAE81993.1| related to amidase [Neurospora
  misc_feature (2)..(584): NCBI GI: 116182600 Blast Desc: CHGG_01928 [Chaetomium globosum CBS 148.51] gi|88186225|gb|EAQ93693.1| CHGG_01928 [Chaetomium globosum CBS 148.51]
  misc_feature (4)..(584): NCBI GI: 156040583 Blast Desc: SS1G_12308 [Sclerotinia sclerotiorum 1980] gi|154696364|gb|EDN96102.1| SS1G_12308 [Sclerotinia sclerotiorum 1980]
  misc_feature (2)..(590): NCBI GI: 169616900 Blast Desc: SNOG_11626 [Phaeosphaeria nodorum SN15] gi|111060214|gb|EAT81334.1| SNOG_11626 [Phaeosphaeria nodorum SN15]
  misc_feature (4)..(582): NCBI GI: 154295346 Blast Desc: BC1G_13254 [Botryotinia fuckeliana B05.10] gi|150844121|gb|EDN19314.1| BC1G_13254 [Botryotinia fuckeliana B05.10]
  misc_feature (4)..(583): NCBI GI: 169771975 Blast Desc: [Aspergillus oryzae RIB40] gi|83768316|dbj|BAE58455.1| protein product [Aspergillus oryzae]
  misc_feature (168)..(529): SWISSPROT Homolog: EC 3.5.1.4 Amidase
  misc_feature: Useful for introducing or modulating the production of volatile compounds
MSSRFSGYPRARECPIANPAFAEESNPVLRGWPLVIFANLVSRFPSLAKLTWANAKFGHIKDISGLEQYDWRLHPVVTPLRSDGDETHKLDISPERFPRQPEDLTGRFYSAADYHELYKSGNLTPLQVVEVLLPLVSRNGKYESAWSDIQKEFLFEAAKSSTVRYREGKSLGVLDGVPIGVKEDTDVRGLTCFHGQQPQPSNPYFIPAENTAWPVARLVDEGALVIGHLAMHELGLDISGCNPLRGTPKNWNNTSYYPGGSSSGAGSALCAGLIPIAVGTDAGGSIRIPSSLCGVFGLKPTLHRMKTMQSSVCVIGPLAATAADLTIAYRVMSAPNPDDALQSCFAPSVLPSPTAKKTIGICREWNARASPVVREITEKAIAYFADKLDYDIVDIHIPYLQEGQWAHAAWALTEGVDLLRSRVKEKAMSTINNTTRTLLSVGACTAGTDMIKYSQMRGLLMDHLAFLFKKHPGLLIVTPTTAEPGWKIHPGDEAYGFSDGNLTMRMMMYIWLANSTGCPAVSAPVGYSEPEQGEGKLPIGLMALGEWGAEEQLLAWAGEAEGYLNGVLQGGRRRPEAWVDVVNLTDGAQA

SEQ ID NO: 17541 - DNA, 5106 bp, Muscodor strobelii
  misc_feature: SGI EST ID NO. CUFF.41194.0
  misc_feature: Variant of the nucleotide sequence at SEQ ID NO 17539
tttcaaacacgtccctcacccttcgctaccgcggcgccatctacgctactgtctgtcccttctttattttggccatcatctcataaccaaatccaaataacgatcctcaatccttcgcctctcggtgacacatacatgctctgctagcctcgccacgacttcaaaaatgtcacccaatccacctggaccaaagccatacaccctccaaatcgcggaacgcatcaataacacgacaggtaaagacaagctgccaacgatctgtttgtcgggcttcctactagaaacgctatggcattccgtaattgagcgaagaaccttgaacacctcggccccagcagttaggaaagcgatgatgcgagctgcggtgttctggcctggcttatatatcgctacgagtgttggattggcttgggcgcagaggaaagttgaccaagctgcaaaagccgaacagccaaagacagaatcatggtagagcgccattgccttcacgaaattattctaatctgagtgtgagatgtctagaggtcaaccgttagacacgtagacagcaatccttgaggtcgggaacacagatgcgtcgcgtctagctgctcatgccacatttcacaccccaacctgcacgtggtagcttcagtaacgtatcaaatacattgatgtatccaattttgggtcgtgtcttgaccttaattttcttctatggctattttcctagaccttcagtaccatattttgctctggtgacgctgaatggtgtgatcagccctatcaatcacgtcaaccctggcaattgttactggctccaccatgcttcaacatcgacaaaatcattcgcaaaacgtgggatgcgaaagcaagaggcgagagcgcacaagtaaaaagttgctgtcaaacaacgtataagactagggtgccactttctgtgcctcactatgatgacacaggttctggtggattctcctgcgcctgttgcgtctgtcgacacaggatccatgaatgacgacggcgcctgttcttttgcatagtttaattccgtggatacggacgccatgaaggacgtcctgtctacacaacactcaaggtttgtctgcttagtggaggagcgggtaaaaaaagacctgcaataacggagatttgtgttacatcaacgtcggcatttgggctcgcctaatatcgcactgcattgaagttcatgccacctagtcgctgcattcattatgtcagacttggactgctttccatcatttccacgattaccaacagagattagacgcttgatctgggcgtatgcgctcccgagaggccgaatccagcttttcgcgaggagcgtaccgtgggaggactggcgcctgcttccaccgttaatctcacgagtgtgccacgaggcgcgagatgttgccaaaagtcttgcggtcatccgtggcttcccaacggctcacgacaagcacaatgaaacctggttcatcggaaccagagatgtgctagaactagccagcgggtacccatacccattgtcgaacccagagcctttcttcgcggccgcagaggccttagctataaatggtggagattttaggggcgacttcaggctcctccttcgagatctaattgaggaaaccaaatttcgttccgccaaggtggtctatctcattatcgatcaggtcaccactgcgtactggcctgggtttaggccagatgtcacggatcaggacaaaggaaaagggaccatactggatttgtgcgacactgttgataacaaaagcatcaaggaatacatggcttgggctcgcgcgcaggaaatgtcgccgatcttcccacgtcttgaagatgttcagttgtctctccgagtatctcttaatgaagttattgtggaggaactgaatcgatttcgtcaacaagcgacgatagagcatgattatggtcatagaggaaccagagcaagaccttcagggcgagaactaagtcgtgatcacccttggatacaacagcgatgtgatcgattaccggaattccgtcccgcaattctagtactgggatggacgtgagagcagtctctatattttggggtccttcgtaaggcaactaatacgctattgctgactgtgacggtcaatggtggtctcaggctcaacgcttgatttttaccaagatacctaagtcatgaccaaaatatcgatgcccaggattattttcctggccatcaggaagggcagaagtatgtggttacatacgttatatgcggcttctgtatcttagaaggcattgatacagtttcgatacgacctggctaatcttcctcataatacacacaagatattggtgcatgtgtagcaatgataaacctgtaattgcacatgcaacactacagggatgacctagatattgaatacgatccttgtgtaggtgacacttgtgcatgtgtcccagcttacccatatagtgacaattagtagaaccatcattccaggcctaatagggtccccgagctcgaagacagcgtcatgaaaatgaggccgattatggggagatgttagcttaaggaagggaggatagtggattaatttggttggactttcccgctattgcgcatccccgtaatgacaccaatggggcaccgccatctgcatcagggacggcctaaaatatctccgtcggcggcgctggcgacctcggcaagagacgcagcaatcctccaggggtgcgctctcatgaaatcttcgatggtatttcaatccgtgtcttcattcagctcaagtctcaatctgttgatgaagtcctcttctaaaggttgagagttttgttcatcgccgcttgcgcaatttgacctcatcatgagctccaggttctctggctatcctcgagcgcgggagtgtcccattgccaatccagccttcgccgaagagtcaaatccagtgttaaggggctggcctttggtcattttcgctaatcttgtctcgcgatttccgtctcttgccaagttgacatgggccaatgcgaaatttgggcacattaaagacatatctggccttgaacagtatgactggcgactccatcctgtcgttacgccacttcgatcagacggcgatgagacccacaagttggatatatcaccagagcgctttccacggcaaccagaagacttgactggtcgcttttactcggctgccgactaccacgaactatataaatctggtaatttgactccgcttcaggtagtcgaagttttgctacctttagtatctcgaaacggaaaatacgaatcagcatggtccgacattcaaaaggaatttctatttgaggctgcgaagtcctccactgttcggtatcgtgaaggcaagtctcttggagtgttagacggcgttccaatcggcgtgaaagaagatacagacgtccgaggcttgacatgctttcatgggcaacaacctcagccctcgaatccctactttataccagctgaaaatacggcatggccagttgctcgcctagtagacgaaggtgccctagtaatagggcatctcgccatgcatgaactcggcctcgacatatccggctgtaatcctcttcgcgggacgcccaagaactggaataacacttcatactacccgggcggctcatcctctggcgcaggttcagcattatgtgctggtttaatccccattgcagtcgggacagatgccggtggcagcattaggataccgtcgagcttgtgtggtgtattcgggttgaaaccgacactgcaccgcatgaaaacaatgcaaagctctgtctgcgtgatcggtcccttggctgctactgcggccgatcttaccattgcatacagagtaatgtcggcccctaaccctgatgacgctttacaaagctgttttgcgccctctgtcctaccttcgccaacagcaaagaaaacaatcggcatttgccgggagtggaatgcccgtgcgtcacccgtagtccgggaaattaccgagaaagcaatagcttatttcgccgacaagcttgattacgatatcgtggacattcacattccatatctccaggaaggtcaatgggcccatgctgcatgggcgttgaccgagggcgtggaccttctaaggtcacgagtcaaggagaaagcaatgtcgacaattaacaacaccaccaggacactcctgtctgttggagcctgtactgcaggcaccgatatgatcaagtactcacaaatgcgcggattattgatggaccatctagcattcctctttaaaaaacaccctggcttgctgattgttacgccgactaccgccgaacccggatggaaaatccatcccggagacgaagcctacgggttcagcgatggaaatctgaccatgcgaatgatgatgtatatctggcttgcaaactccaccggctgtcccgcggtgagtgctccggtgggatattccgagcccgaacaaggtgaaggaaagttacctattggcttgatggcactcggtgagtggggagcggaagagcaattgctcgcatgggcgggcgaagccgaaggatacttgaacggtgtcttgcaaggcggaagaaggagaccggaagcgtgggtggacgtcgtcaacttgacagacggtgcacaagcctaggggaattgaggagcactgttactaggttaccatgaatgaaaataccgaaacttgctgcagcgccaggtctcgcatttgacgataccgcagtctcgagataatagaacttgagtaatcgatcagacccagatgtgtacaggccatggaaagagaaactccggatcattgaaatccgaggtaggggattgagctgtacaactttctaaaggacagcccaccgatggcatccgaaaccgatggatatatcatctagacgttgcgactctacgattctctttcatctcatgttatatcaatgcctgtttgatcttctacaaatatcctcaagaaggcagctttgcgatcatctattgtggccattcagacgcattcagacagctccaacttcgcttaaccattgggttttgataacggatacgttttcactagtccgcgatacgagtatgacaaatgcagcagttgccaagctattggacatcctttgggtgccaagcgcgcctgcagc

SEQ ID NO: 17542 - DNA, 807 bp, Muscodor strobelii
  misc_feature: SGI cDNA ID NO. 565860
  misc_feature: Encodes the peptide sequence at SEQ ID NO 17543
atgaaggacgtcctgtctacacaacactcaagacgcttgatctgggcgtatgcgctcccgagaggccgaatccagcttttcgcgaggagcgtaccgtgggaggactggcgcctgcttccaccgttaatctcacgagtgtgccacgaggcgcgagatgttgccaaaagtcttgcggtcatccgtggcttcccaacggctcacgacaagcacaatgaaacctggttcatcggaaccagagatgtgctagaactagccagcgggtacccatacccattgtcgaacccagagcctttcttcgcggccgcagaggccttagctataaatggtggagattttaggggcgacttcaggctcctccttcgagatctaattgaggaaaccaaatttcgttccgccaaggtggtctatctcattatcgatcaggtcaccactgcgtactggcctgggtttaggccagatgtcacggatcaggacaaaggaaaagggaccatactggatttgtgcgacactgttgataacaaaagcatcaaggaatacatggcttgggctcgcgcgcaggaaatgtcgccgatcttcccacgtcttgaagatgttcagttgtctctccgagtatctcttaatgaagttattgtggaggaactgaatcgatttcgtcaacaagcgacgatagagcatgattatggtcatagaggaaccagagcaagaccttcagggcgagaactaagtcgtgatcacccttggatacaacagcgatgtgatcgattaccggaattccgtcccgcaattctagtactgggatggacgtga

SEQ ID NO: 17543 - protein, 268 aa, Muscodor strobelii
  misc_feature: SGI Peptide ID NO. 565860
MKDVLSTQHSRRLIWAYALPRGRIQLFARSVPWEDWRLLPPLISRVCHEARDVAKSLAVIRGFPTAHDKHNETWFIGTRDVLELASGYPYPLSNPEPFFAAAEALAINGGDFRGDFRLLLRDLIEETKFRSAKVVYLIIDQVTTAYWPGFRPDVTDQDKGKGTILDLCDTVDNKSIKEYMAWARAQEMSPIFPRLEDVQLSLRVSLNEVIVEELNRFRQQATIEHDYGHRGTRARPSGRELSRDHPWIQQRCDRLPEFRPAILVLGWT

SEQ ID NO: 17544 - DNA, 1494 bp, Muscodor strobelii
  misc_feature: SGI cDNA ID NO. 565861
  misc_feature: Encodes the peptide sequence at SEQ ID NO 17545
atggcgtacaaaatagacatcgagagtggattcagctcaagtcgctcgactatagaggcatcctcaacaacatctgggacagtgacgcccacgacgaaacctggctctatcagtgactcggatccgaacgataatgaaaagtctggcgtcatacaacgggaacgcgcagttctaccagatcagcttggaaccgatttatctaggaaagttcgttatagctatgcttcatcttacaggaagatcttcggagtgattttcactattaatttggcggtcttcgttgccttattggtcaaaggtcgagggtcacctagttcgaaggacatcggtagcgctgcttcattcaacctcctcgtctgtatcttattccggcaagaagagttcgtcaatattgtttatgaaatcttcgtgcgtgcgcctcacagctggccaattgcaattcgcaagcgcttagcgaaagtattccactatggagggtgccattctggtgcagggaccgctgcagtcgtgtggtttagtctatacaccattctcgttacgcaggaatacttcgaacagcggcattgggatactctcgccaacctgatcaccagctgggtggttgtcagtatgttcattatcattctcaccgcggctcatcctaatttacgtcgaaagtaccacgatcactttgaggctttccaccgctttgctggttgggctgctctcctcgctttttgggtgcataacattgtttcagccaatgtaactgccagacaatggcatcgaagcatcggctacgttctcgtgcgatcgccgaatttctggtttatcatcttgtcaacgtcttgcaccatcgcctcttggtctcgcctccgtcatcgagttgtataccccgagaagctgagcgatcacgccacacgtcttcacttcaagtataggcatatgcaacccttctatggattgaaaattagcgatagacccctcactgaatggcatgccttcgccacgataccagacgtagaccaagaatctggaaaaatcaacggcttcagtgttgtggttagcaatgccggcgattggactaagaagcagattatgacagctaatgaacgtaagttatgggtgcgaggcgcgccacttcatgggctcttgtacacttctcggctcttccaacgaatcgtggttgtggccactggttcggggatcggaccgtgtctttcgctgcttttcgcaaatgtcacaccccgccgagttctctggagtactcgcgatcctaagaagacctacgggcctcaggtagtaaacgaagttttgaaagcggacccgaacgcccttatctggaacaccaatgagaaaggttatccagatatagtgggcgagacataccagctggtgcatgaaacaaatgccgaagctgtcttcatcatatctaatcctaaggtgacagagaaggtagtctttggtatgcaatctcgaggcataccagcctatggtgcgattttcgactcttga

SEQ ID NO: 17545 - protein, 497 aa, Muscodor strobelii
  misc_feature: SGI Peptide ID NO. 565861
  misc_feature (58)..(497): NCBI GI: 46126645 Blast Desc: FG07700.1 [Gibberella zeae PH-1]
  misc_feature (13)..(497): NCBI GI: 46139559 Blast Desc: FG11294.1 [Gibberella zeae PH-1]
  misc_feature (51)..(497): NCBI GI: 256725410 Blast Desc: NECHADRAFT_106273 [Nectria haematococca mpVI 77-13-4]
  misc_feature (59)..(497): NCBI GI: 169858552 Blast Desc: CC1G_03009 [Coprinopsis cinerea okayama7#130] gi|116503091|gb|EAU85986.1| CC1G_03009 [Coprinopsis cinerea okayama7#130]
  misc_feature (34)..(497): NCBI GI: 171691184 Blast Desc: protein product [Podospora anserina] gi|170945540|emb|CAP71652.1| protein product [Podospora anserina]
  misc_feature (58)..(496): NCBI GI: 46126207 Blast Desc: FG07481.1 [Gibberella zeae PH-1]
  misc_feature (58)..(495): NCBI GI: 256730877 Blast Desc: NECHADRAFT_106355 [Nectria haematococca mpVI 77-13-4]
  misc_feature (58)..(478): NCBI GI: 261353901 Blast Desc: surfactin synthetase subunit 3 [Verticillium albo-atrum VaMs.102]
  misc_feature (38)..(497): NCBI GI: 169860053 Blast Desc: CC1G_06250 [Coprinopsis cinerea okayama7#130] gi|116502339|gb|EAU85234.1| CC1G_06250 [Coprinopsis cinerea okayama7#130]
  misc_feature (12)..(497): NCBI GI: 169860023 Blast Desc: CC1G_06235 [Coprinopsis cinerea okayama7#130] gi|116502324|gb|EAU85219.1| CC1G_06235 [Coprinopsis cinerea okayama7#130]
MAYKIDIESGFSSSRSTIEASSTTSGTVTPTTKPGSISDSDPNDNEKSGVIQRERAVLPDQLGTDLSRKVRYSYASSYRKIFGVIFTINLAVFVALLVKGRGSPSSKDIGSAASFNLLVCILFRQEEFVNIVYEIFVRAPHSWPIAIRKRLAKVFHYGGCHSGAGTAAVVWFSLYTILVTQEYFEQRHWDTLANLITSWVVVSMFIIILTAAHPNLRRKYHDHFEAFHRFAGWAALLAFWVHNIVSANVTARQWHRSIGYVLVRSPNFWFIILSTSCTIASWSRLRHRVVYPEKLSDHATRLHFKYRHMQPFYGLKISDRPLTEWHAFATIPDVDQESGKINGFSVVVSNAGDWTKKQIMTANERKLWVRGAPLHGLLYTSRLFQRIVVVATGSGIGPCLSLLFANVTPRRVLWSTRDPKKTYGPQVVNEVLKADPNALIWNTNEKGYPDIVGETYQLVHETNAEAVFIISNPKVTEKVVFGMQSRGIPAYGAIFDS

SEQ ID NO: 17546 - DNA, 1172 bp, Muscodor strobelii
  misc_feature: SGI EST ID NO. CUFF.41197.2
  misc_feature: Variant of the nucleotide sequence at SEQ ID NO 17544
cgagggtcacctagttcgaaggacatcggtagcgctgcttcattcaacctcctcgtctgtatcttattccggcaagaagagttcgtcaatattgtttatgaaatcttcgtgcgtgcgcctcacagctggccaattgcaattcgcaagcgcttagcgaaagtattccactatggagggtgccattctggtgcagggaccgctgcagtcgtgtggtttagtctatacaccattctcgttacgcaggaatacttcgaacagcggcattgggatactctcgccaacctgatcaccagctgggtggttgtcagtatgttcattatcattctcaccgcggctcatcctaatttacgtcgaaagtaccacgatcactttgaggctttccaccgctttgctggttgggctgctctcctcgctttttgggtgcataacattgtttcagccaatgtaactgccagacaatggcatcgaagcatcggctacgttctcgtgcgatcgccgaatttctggtttatcatcttgtcaacgtcttgcaccatcgcctcttggtctcgcctccgtcatcgagttgtataccccgagaagctgagcgatcacgccacacgtcttcacttcaagtataggcatatgcaacccttctatggattgaaaattagcgatagacccctcactgaatggcatgccttcgccacgataccagacgtagagtaagaaaaccatagatttaattctagtgtatttctattcatgagggacaattactgactgaagctgttgcagccaagaatctggaaaaatcaacggcttcagtgttgtggttagcaatgccggcgattggactaagaagcagtaagttcatctcttcgtttctatagttcttgtcccttacagggcaaaggggtgtatcttatatccagacaaacgctgacactttattggcaggattatgacagctaatgaacgtaagttatgggtgcgaggcgcgccacttcatgggctcttgtacacttctcggctcttccaacgaatcgtggttgtggccactggttcggggatcggaccgtgtctttcgctgcttttcgcaaatgtcacaccccgccgagttctctggagtactcgcgatcctaagaagacctacgggcctcaggtagtaaacgaagttttgaaagcggacc

SEQ ID NO: 17547 - DNA, 1488 bp, Muscodor strobelii
  misc_feature: SGI cDNA ID NO. 565862
  misc_feature: Encodes the peptide sequence at SEQ ID NO 17548
atgcgagcttccaaccgcctggtgccctttctcggccgctggggcggcatcctgctggctgtcttccttgtctactacatcatccgcgcccctatatctctcgccgtctcctctgcacatctcaacgacgccacgacaaagggaagcaagcagaatggccctgccactgaccccaagggcagccgtgacggcaagggcccaacacacgggcccgaggcagagcctaaatttgtaaaacagttcaagggccatatgcccaggccaaagcccgtcgacgaccacttcccctggttgacatacaacggccacaagagcaaaggggctccaattcctcccaacaaccgacctcctctaccacatgtcgatgaagccactcctctactcgtcggcttcacgcgcaactggccgatgctactgcagtgtgtcagcagctacattgcggccggttggccacctggagacatctacgtcgtcgaaaacacgggcgttttcagcgctaaccagcggggcgatctttctcttcagaatcaattcttcttaaatcatacggcccttcaccagctgggcgtgaatgtgctcattgcaccaactctgctcacttttgcgcagctgcagaatttctttctgcacacggctctgcagcgggactggcgcaactatttctggacgcaccaggacgtcattgtcttcagcgacgaagatgtgaggaggaaagaccgcgaccacgattgggatcacgaccccttcgctaccatgtacgagcgcagcattggtcttatgcgatatctcaatggacccgagatgccaccgtggtcgactcatttcttttcttacgaccattttactctcgtcaaccgtgacgcttacctcgaggtcggcgcctgggacactcacattccgttctacgccaccgactgcgacatgtatctacgacttcactgggctgggtattggcaaccgcagagcgagtcgggattggtatacgatgtcaaccgaccgttgaaagatattggggcactcttccggataccgggcgctcatgctagattcgagggtgaccccgtattcgcggggcacgacagcaagcgaccacatcgcgaggcggagctcaagcgcgaggaggacatgtacagctgggtagaaaaagagggcgagacatacacgcatctcatcgaagtggcaggccgcatgcaagaggtcaaatgggcggacacagaaacattgggcagcgtatggaaagaacatcagtttggaggggagggcgaacccttctaccgcgaccccgaaggcttcaagtcgggagttgagataacgacggacgcgggtcggcgcgtgttcgcggagaaatggggacaccgaggctgcgatttgctcgagttgggtatcgagggcaaagacatttggaaattggagcgagattgggatattaccgagtcctctggcagcgtcgggggcagctggggcaaggattggagtaaggaattttag

SEQ ID NO: 17548 - protein, 495 aa, Muscodor strobelii
  misc_feature: SGI Peptide ID NO. 565862
  misc_feature (126)..(475): NCBI GI: 85109940 Blast Desc: NCU09494 [Neurospora crassa OR74A] gi|28924824|gb|EAA33924.1| [Neurospora crassa OR74A]
  misc_feature (78)..(470): NCBI GI: 116205237 Blast Desc: CHGG_10502 [Chaetomium globosum CBS 148.51] gi|88176630|gb|EAQ84098.1| CHGG_10502 [Chaetomium globosum CBS 148.51]
  misc_feature (90)..(475): NCBI GI: 171689688 Blast Desc: protein product [Podospora anserina] gi|170944806|emb|CAP70918.1| protein product [Podospora anserina]
  misc_feature (72)..(474): NCBI GI: 156054056 Blast Desc: SS1G_05876 [Sclerotinia sclerotiorum 1980] gi|154703656|gb|EDO03395.1| SS1G_05876 [Sclerotinia sclerotiorum 1980]
  misc_feature (126)..(475): NCBI GI: 38524260 Blast Desc: [Neurospora crassa]
  misc_feature (110)..(475): NCBI GI: 156043813 Blast Desc: SS1G_10910 [Sclerotinia sclerotiorum 1980] gi|154695297|gb|EDN95035.1| SS1G_10910 [Sclerotinia sclerotiorum 1980]
  misc_feature (91)..(474): NCBI GI: 171679058 Blast Desc: protein product [Podospora anserina] gi|170937600|emb|CAP62259.1| protein product [Podospora anserina]
  misc_feature (110)..(475): NCBI GI: 154317025 Blast Desc: BC1G_03930 [Botryotinia fuckeliana B05.10] gi|150845542|gb|EDN20735.1| BC1G_03930 [Botryotinia fuckeliana B05.10]
  misc_feature (126)..(474): NCBI GI: 116205900 Blast Desc: CHGG_02243 [Chaetomium globosum CBS 148.51] gi|88182840|gb|EAQ90308.1| CHGG_02243 [Chaetomium globosum CBS 148.51]
  misc_feature (88)..(470): NCBI GI: 171683125 Blast Desc: protein product [Podospora anserina] gi|170941522|emb|CAP67174.1| protein product [Podospora anserina]
MRASNRLVPFLGRWGGILLAVFLVYYIIRAPISLAVSSAHLNDATTKGSKQNGPATDPKGSRDGKGPTHGPEAEPKFVKQFKGHMPRPKPVDDHFPWLTYNGHKSKGAPIPPNNRPPLPHVDEATPLLVGFTRNWPMLLQCVSSYIAAGWPPGDIYVVENTGVFSANQRGDLSLQNQFFLNHTALHQLGVNVLIAPTLLTFAQLQNFFLHTALQRDWRNYFWTHQDVIVFSDEDVRRKDRDHDWDHDPFATMYERSIGLMRYLNGPEMPPWSTHFFSYDHFTLVNRDAYLEVGAWDTHIPFYATDCDMYLRLHWAGYWQPQSESGLVYDVNRPLKDIGALFRIPGAHARFEGDPVFAGHDSKRPHREAELKREEDMYSWVEKEGETYTHLIEVAGRMQEVKWADTETLGSVWKEHQFGGEGEPFYRDPEGFKSGVEITTDAGRRVFAEKWGHRGCDLLELGIEGKDIWKLERDWDITESSGSVGGSWGKDWSKEF

SEQ ID NO: 17549 - DNA, 2667 bp, Muscodor strobelii
  misc_feature: SGI EST ID NO. CUFF.41292.1
  misc_feature: Variant of the nucleotide sequence at SEQ ID NO 17547
cccaggttgcccagtctgttcctggtagccatcgcgcatcttagactcagggtcgaccagtcgccagaaatctttttttccccttggaggcccctgcctggctattttcatcagtctgtcagtctgagcctcgacgaccctgacgacctcatcgcggcatcactgtgacatcgtctggcatcatcaccggcgcctttcgcttctcttcgtctccttgcttttgctctgcggcttgcccgctggtccttttttcttcacgtgcagacagttcgcattggctttgccagccaacagcggatttcattacggcccctggcgttactgcgttgcactctggacgccctggcaatttctgataatagactgttgtctgccacaattccctctcgctgtatgacctgaacaccaccgcgtaccggcctctcgagcgctcgacgctgatcgacattctgctcatcgcgcagacggcgcacaggacctgtgagcgtctcaccggctcggcttggactggcggcactaggcgcacaggggcaacccgatctcatcaccatccgaccgatcaatatgcccaacagtgcctcgtagattgtgtccacgtagcagccacgcgcagttttatcatgcgagcttccaaccgcctggtgccctttctcggccgctggggcggcatcctgctggctgtcttccttgtctactacatcatccgcgcccctatatctctcgccgtctcctctgcacatctcaacgacgccacgacaaagggaagcaagcagaatggccctgccactgaccccaagggcagccgtgacggcaagggcccaacacacgggcccgaggcagagcctaaatttgtaaaacagttcaagggccatatgcccaggccaaagcccgtcgacgaccacttcccctggttgacatacaacggccacaagagcaaaggggctccaattcctcccaacaaccgacctcctctaccacatgtcgatgaagccactcctctactcgtcggcttcacgcgcaactggccgatgctactgcagtgtgtcagcagctacattgcggccggttggccacctggagacatctacgtcgtcgaaaacacgggcgttttcagcgctaaccagcggggcgatctttctcttcagaatcaattcttcttaaatcatacggcccttcaccagctgggcgtgaatgtgctcattgcaccaactctgctcacttttgcgcagctgcagaatttctttctgcacacggctctgcagcgggactggcgcaactatttctggacgcaccaggacgtcattgtcttcagcgacgaagatgtgaggaggaaagaccgcgaccacgattgggatcacgaccccttcgctaccatgtacgagcgcagcattggtcttatgcgatatctcaatggacccgagatgccaccgtggtcgactcatttcttttcttacgaccattttactctcgtcaaccgtgacgcttacctcgaggtcggcgcctgggacactcacattccgttctacgccaccgactgcgacatgtatctacgacttcactgggctgggtattggcaaccgcagagcgagtcgggattggtatacgatgtcaaccgaccgttgaaagatattggggcactcttccggataccgggcgctcatgctagattcgagggtgaccccgtattcgcggggcacgacagcaagcgaccacatcgcgaggcggagctcaagcgcgaggaggacatgtacagctgggtagaaaaagagggcgagacatacacgcatctcatcgaagtggcaggccgcatgcaagaggtcaaatgggcggacacagaaacattgggcagcgtatggaaagaacatcagtttggaggggagggcgaacccttctaccgcgaccccgaaggcttcaagtcgggagttgagataacgacggacgcgggtcggcgcgtgttcgcggagaaatggggacaccgaggctgcgatttgctcgagttgggtatcgagggcaaagacatttggaaattggagcgagattgggatattaccgagtcctctggcagcgtcgggggcagctggggcaaggattggatgacaggaaccgagtagagaatagaagaaagaagaacaaactgaacgatcacaacgttcgcccttcatgtgctgcggttaccggatagacaacgatataacgatgaacgaacggaaaattcttcgtctacctattataccatcattttgtacacatacacacaacaatgtcgataccatttcgtttttccgcggccggcaacaacgaaggttgtcgggcgaatcgtatatatggagtggacgagataaggaaagtcacagtcaccgtcacgaatttgatatatgacacgacggtgagaggagatacctcccagatgttgcatgaaggggcttggtgatgaagtaagaagtcgttgtgggcgtttatcgcagggtcttgtgtatatcggttcttgggaggtgataccatgatgaatgatctgagactggggaatggagactgggggctagggattggggatgagtggttcattgtatatactcgtatattcttgcataaccttttgggtcaggttctcatggcatgctcttttgggctcaatcaattttatggattttcaatatgttttccgag

SEQ ID NO: 17550 - DNA, 6168 bp, Muscodor strobelii
  misc_feature: SGI cDNA ID NO. 565863
  misc_feature: Encodes the peptide sequence at SEQ ID NO 17551
atgccctggcaaccgctgccgcgaatcgcctttgccgtcgcgaccttccccttcgatgccaagctcgagaacgagctgcccctcgagattggcgatgacctctacatcatcgaggagaccctcgacggcaaatggatgcgcggctacctccttgctcctcctgccctgctcgcaggcctgacctcggtgaagggccaggctttggaggctcgtgtcttttctggtgtcttcccccgcagctgcatagagatacgcgaggtcctgggtgatggagaagaaaatggatacggtcaagacgagcaggtctcagcacggggtgatgatgctgtctctcagcgtcgaagtgactctggcaagagtggagtctcccccagatcacaccaccactcgcacagcatagacgtgggaaggatgaggcccagtggcgaaacccatctcccgagcccaacctcgatggataccaagtctcctctgcggtccccgaacacgatggcctcggggtcagtcccaccgagagagcgcccgcctgctcccacccccatgctccagctgggcgacgaaacccccacaaccatcaacgaacctttaatcgacgagattgcctcttgcctgcgagagtggcactcaacaaacatccacgagctgcttctgaatcgggaatatgccaagttggagcgcgtggctcattacattcagactcttgacttagcccggcgtcaattacttcataatctcctcacagaccgcgaagcgaatgcactccgggagaagacggtctgggacttggttcagggcaacaagctctgtggcggagatgtcatcgtacgcgatccggcccagcgcggcaaggttctgactggagacgactctgtgatcgaagtcacaaagctgcagtctgccatgagtttactagagagcccaccacagtcccatgttgagacttccaccctgcaccatgtcatggtggacatcaagagcttcgcaggagcttctagtgaacctacaacactggacctgtctctcgccaccaaatctggcaatggctcggttacgatgctttcagaaacatacacagtcgaggtaccagctggcagttcgctgggatcaacagacggacaggtacccatgcggactcttttcacgaacctaacgtcgaccgatattggagatgctccatcgaccgagtctgaattatacctggttgtaaaagctcgtgcgctgcaacaagtgatcccagggaagccgccgtcgaggtctggcaccttcccgcaaccacatgcccccttttcgagagaaaaaccgccactatccgcaaatggtactgtcaaaacttctaggagaagtctgatgtggggatcgacacgatctgcattctctagaggaggactgaagctcgatgccctggccgagcagccagaggaccggcccaggacaggaccacgcgatacgtctgtgcagcctccaagcacaccgagctctgtttccggccgcacatctacagacggctcacaaaactcacatacaatcgccgaccgattagtcggcgtgggcgttctgaacctgaaatccgcaatgaaaggagagggagaatctgaacaaatagtgaccctctggtcgccagcttctaagcctagttctgataggacagagacaggcagagcgtgggatagtctgattcccgaattattcgatagtgaatctggccactatgagaaatccaggagagcagaaaggctacatatccatttgaaggcattcagtaactctgatgcggacatcctgatcaaagaaacgccaacgctactatccgggattaagaagactagcaagatgggcttctctggcgcgcctaccaaggctcgatctgatatttatgtcacaatcaacgaagctctcttagcccgccagaatcttctttcgcgacacggcggcagtgccatccccatatccagcaatatgccgggaaataacctggccgtatcagtggaggtacggcggcagggtggcgagcgaattgaatcctgcgtctactcatcgtccaattcggacgccgtgacaacatggtcaacatttgccgtacaacgaggcgagcgctggaaacagaccctgcgcctgtgtcttactccagcagatgtagccaattctcacatcgtgttttcggtctcagaacttccgagctcgcccttcgccattgcgtacttaccgctttgggactcgcaggctttcatcagcgatgggctgcactctttacttttctacaggcttgacgagttgacgcagattgctcaacccgacgcattagggaaaggtggatatttgcgccttccatggagtgctcgtagtgatgcatctgatgtcacgggcccccttgctactcttcgtgtcgacacctatctctgtagcacaaggttctcccaggatcgtaccattcttggcttgctaaaatggaaagaaagctccaaagacaatatccctacactactgcggcaactgatcttcgttccggaaatcgaagtggtcaaacttctaaacgatgttttagactcccttttcggaatcttggttgacaatcaaggaaacgatgagtttgaagatctggtgttcacagctctagtgagagttctcggcatagttcatgatcgccggttcaatatgagtcccctggtcgaccagtacgcagagagcaagttcaactatcctttcgcgacgccatgtctcgtcagatcatttaccagactgttgacaaagccaactgagcctgagaccgcccgaaaacttcgagccacattgaaggtcgttcgtcacattctcaagttcattacacatgcgagaggacagcagaaggagaaagaagctggaataggaatcactacttctactcctggatttacaagacatttgcagagcatattcaaagccctcgacgccatgatgcgtagtaccgcaccagtgcttgtcggcagtcagactctcgcagtgcaacatttccacacctggcttcctgagctgacgggcttgctcacaaccgaagagattctgcacatcgccattgacttcatggactcttgcgctctggttaagggcaaattggtactatataaacttatcctcatcatcaactattcaaagctggacctcttttcccatccagagcagagatcggctctgagcgcaaacactgtccgatggattgcaccccattggggccagaccgatgatgtcacaagccagtggaaagaacaagtgcgcttgtgttgttccgttttggctacgcaggttgactaccttaactcggagatacctgactacgtgccaaagatcgtggattcgttcctagccatccagtctagtgagaggcaacccagagaccggctttccctcctcttcccacaatcctatccattccccagcaagccacttcccggagaacctgtccgttttgaggaagctttaatcgaactgtcggccatattatctgcattgtcaaactcacctaatgggatgcagcttgaacttgccgtcgatgacataagtatcttgctaaaaaatacccttcaggtgcatttgagcattttacagggggaagcattcccaccaacatggctcagcgtgcacattttccatcacaagtctacaatgcgaacacttcaatacctcgctggtattctactggattcagcgttgccacatccagatgatgctgaagatttcgacacggatctttggcgaatgttcttcacaacactactgaaattggtcggcagtgattgtttggcgcttgagactttcccagaacagaagcgcagggctgtctggaaaattgccggcgacgtccgagagcatggtgcagaacttctcaagcgcacgtgggaagctgttggatgggagacaagtcctgatgagagaatgcgttacggactcgtaaagatgggtggttaccaagttcaatatgtgccaactctagtaggcccaatagtcgagctttgcttgagcgtccatggtggtctgcgaaaagttgccgttgaagttctacaaaccatgatcgtgagcgaatggactttgagcgaagatttatctgtcatacagacagagattatcgattgcctggatattttcttcaaggatcaaagcatgactgaaagcatcatgcagaaactcttcatccaagaaatccttgacaaattcgactctctgtatatcgacgccgagcctttgtattgtgctctcaaggaagtcatcaacattgtcaacgagttcctcgatttgctggttgccgttcatagcggcgagcttaccgatgaagcatccaagctcattgaccgccttcaacttatggaattcctccgagatatggagaaagtagagattttcattcgatacgtccatcaactggccatattacaacgcaactccggaaatcatacagaagccggactagctcttcgactgcatgcggatctctatgattggaatccggtcaaaaccacgcctgcgttgtctgatccggctcttccagagcaaactcacttcgagcggaaggagcgcatatactttgacatgatcaagcatttcgaggacggtgaagcttggagtagtgcaatcgctgcctacaacgagctacgaaatcattacgagaacacggtattcgatttcgccaaacttgcacgaactcaaagagccgttgccacaatctatgaaactatagccaaaggcgagaaacccatgccaaaatacttcagagttgtcttcaaaggactcggctttcctctcaatctacaagacaaggcattcatatatgaagggtccgcaagtgagcggtctactatttttacggaccgcatgcaggaacaatatcaatctgcgcacattatcaccaatggtgatgtggatagcgaagcagaggggcagtatcttgtgatctcggcagtctctccacaccgtgacatcacacatcctgtcttccagcgggctcgagtattgcaaccgattcgcgactaccttctctcatctaatcctcgagtattttccgtctcctccaaacgtgttaccactggtcctgtggaagaacattatgccgagaagattgtgtacacgactgcggagacctttccatcgattcttcgacggagcgaaatcgtaggcgtggagaccataaagctaaatgccaaggaagcgggtctcgaacgtatcgtccgcaagactcaagagatgacagttcttgaaagaagactttcggaaaatgaggtagaggaggagatagctcaaaccatgatcggtgctatcagtatttctgtactgcagaagtcagaagctagcgtggcttgctatcggcaattgctccctgttcctgatgttgtcagtcgtgaaggcgatgaagacgaagatgagatcgagggcgacgaggacgcagagccggaactgagtccgcaagacaatgcgatcaagacagcattaattgatcacgcaattatgctaaaacgatgtctaacgggtttctctcgaagctcgaatccaattctagtacaggcatatcaggatttatacccacattttgcttcaacatttgcagaggaaatagcagtttttgctcctccgcagcctcaaaaggagccaaacttcttggcatcgcctatttggtcgtcgccgactggagagaatgggatgttcaagggacagattccactgtcaagtactaacggcaccaccttcgtagaagaagcagccgccgtacaaccattggctatgagacagcgtggaacgagactcagctttcttggtggcaaaaggaagaattcggtgcattcaaacggagatgcttcaattatgtcgcattccagaatcgatgctatcgaatcgaacagtccgcatagcaagagcaaggagaatctacagcagaagggactactgctccgcacacagtccgctgagacgaatcccagcgggaatcatatcaaccaacaatttaccaacggtagtggggaatatatcagcccagtctctgcctccgaccgctctcataagacgagagaggtcgtcagtgtatcggaaggccggtctccagatggtagtgttttgagaatgggctcggttcgcaagcgactgagcatgttgaagcttggaaagaaaaatagcaagccgaatggattcgtaggcgttgacgaagagtga

SEQ ID NO: 17551 - protein, 2055 aa, Muscodor strobelii
  misc_feature: SGI Peptide ID NO. 565863
  misc_feature (1)..(2055): NCBI GI: 261356936 Blast Desc: conserved [Verticillium albo-atrum VaMs.102]
  misc_feature (1)..(2055): NCBI GI: 171689690 Blast Desc: protein product [Podospora anserina] gi|170944807|emb|CAP70919.1| protein product [Podospora anserina]
  misc_feature (1)..(2055): NCBI GI: 256732995 Blast Desc: [Nectria haematococca mpVI 77-13-4]
  misc_feature (1)..(1931): NCBI GI: 116205239 Blast Desc: CHGG_10503 [Chaetomium globosum CBS 148.51] gi|88176631|gb|EAQ84099.1| CHGG_10503 [Chaetomium globosum CBS 148.51]
  misc_feature (1)..(2055): NCBI GI: 46123277 Blast Desc: FG06016.1 [Gibberella zeae PH-1]
  misc_feature (1)..(1931): NCBI GI: 85109936 Blast Desc: NCU09492 [Neurospora crassa OR74A] gi|28924822|gb|EAA33922.1| conserved [Neurospora crassa OR74A]
  misc_feature (1)..(2044): NCBI GI: 156043401 Blast Desc: SS1G_10704 [Sclerotinia sclerotiorum 1980] gi|154695091|gb|EDN94829.1| SS1G_10704 [Sclerotinia sclerotiorum 1980]
  misc_feature (183)..(1931): NCBI GI: 38524261 Blast Desc: related to dock180 protein [Neurospora crassa]
  misc_feature (217)..(1932): NCBI GI: 145608218 Blast Desc: MGG_03275 [Magnaporthe grisea 70-15] gi|145015720|gb|EDK00210.1| MGG_03275 [Magnaporthe grisea 70-15]
  misc_feature (247)..(2044): NCBI GI: 154316642 Blast Desc: BC1G_04252 [Botryotinia fuckeliana B05.10] gi|150846052|gb|EDN21245.1| BC1G_04252 [Botryotinia fuckeliana B05.10]
MPWQPLPRIAFAVATFPFDAKLENELPLEIGDDLYIIEETLDGKWMRGYLLAPPALLAGLTSVKGQALEARVFSGVFPRSCIEIREVLGDGEENGYGQDEQVSARGDDAVSQRRSDSGKSGVSPRSHHHSHSIDVGRMRPSGETHLPSPTSMDTKSPLRSPNTMASGSVPPRERPPAPTPMLQLGDETPTTINEPLIDEIASCLREWHSTNIHELLLNREYAKLERVAHYIQTLDLARRQLLHNLLTDREANALREKTVWDLVQGNKLCGGDVIVRDPAQRGKVLTGDDSVIEVTKLQSAMSLLESPPQSHVETSTLHHVMVDIKSFAGASSEPTTLDLSLATKSGNGSVTMLSETYTVEVPAGSSLGSTDGQVPMRTLFTNLTSTDIGDAPSTESELYLVVKARALQQVIPGKPPSRSGTFPQPHAPFSREKPPLSANGTVKTSRRSLMWGSTRSAFSRGGLKLDALAEQPEDRPRTGPRDTSVQPPSTPSSVSGRTSTDGSQNSHTIADRLVGVGVLNLKSAMKGEGESEQIVTLWSPASKPSSDRTETGRAWDSLIPELFDSESGHYEKSRRAERLHIHLKAFSNSDADILIKETPTLLSGIKKTSKMGFSGAPTKARSDIYVTINEALLARQNLLSRHGGSAIPISSNMPGNNLAVSVEVRRQGGERIESCVYSSSNSDAVTTWSTFAVQRGERWKQTLRLCLTPADVANSHIVFSVSELPSSPFAIAYLPLWDSQAFISDGLHSLLFYRLDELTQIAQPDALGKGGYLRLPWSARSDASDVTGPLATLRVDTYLCSTRFSQDRTILGLLKWKESSKDNIPTLLRQLIFVPEIEVVKLLNDVLDSLFGILVDNQGNDEFEDLVFTALVRVLGIVHDRRFNMSPLVDQYAESKFNYPFATPCLVRSFTRLLTKPTEPETARKLRATLKVVRHILKFITHARGQQKEKEAGIGITTSTPGFTRHLQSIFKALDAMMRSTAPVLVGSQTLAVQHFHTWLPELTGLLTTEEILHIAIDFMDSCALVKGKLVLYKLILIINYSKLDLFSHPEQRSALSANTVRWIAPHWGQTDDVTSQWKEQVRLCCSVLATQVDYLNSEIPDYVPKIVDSFLAIQSSERQPRDRLSLLFPQSYPFPSKPLPGEPVRFEEALIELSAILSALSNSPNGMQLELAVDDISILLKNTLQVHLSILQGEAFPPTWLSVHIFHHKSTMRTLQYLAGILLDSALPHPDDAEDFDTDLWRMFFTTLLKLVGSDCLALETFPEQKRRAVWKIAGDVREHGAELLKRTWEAVGWETSPDERMRYGLVKMGGYQVQYVPTLVGPIVELCLSVHGGLRKVAVEVLQTMIVSEWTLSEDLSVIQTEIIDCLDIFFKDQSMTESIMQKLFIQEILDKFDSLYIDAEPLYCALKEVINIVNEFLDLLVAVHSGELTDEASKLIDRLQLMEFLRDMEKVEIFIRYVHQLAILQRNSGNHTEAGLALRLHADLYDWNPVKTTPALSDPALPEQTHFERKERIYFDMIKHFEDGEAWSSAIAAYNELRNHYENTVFDFAKLARTQRAVATIYETIAKGEKPMPKYFRVVFKGLGFPLNLQDKAFIYEGSASERSTIFTDRMQEQYQSAHIITNGDVDSEAEGQYLVISAVSPHRDITHPVFQRARVLQPIRDYLLSSNPRVFSVSSKRVTTGPVEEHYAEKIVYTTAETFPSILRRSEIVGVETIKLNAKEAGLERIVRKTQEMTVLERRLSENEVEEEIAQTMIGAISISVLQKSEASVACYRQLLPVPDVVSREGDEDEDEIEGDEDAEPELSPQDNAIKTALIDHAIMLKRCLTGFSRSSNPILVQAYQDLYPHFASTFAEEIAVFAPPQPQKEPNFLASPIWSSPTGENGMFKGQIPLSSTNGTTFVEEAAAVQPLAMRQRGTRLSFLGGKRKNSVHSNGDASIMSHSRIDAIESNSPHSKSKENLQQKGLLLRTQSAETNPSGNHINQQFTNGSGEYISPVSASDRSHKTREVVSVSEGRSPDGSVLRMGSVRKRLSMLKLGKKNSKPNGFVGVDEE

SEQ ID NO: 17552 - DNA, 14490 bp, Muscodor strobelii
  misc_feature: SGI EST ID NO. CUFF.41363.1
  misc_feature: Variant of the nucleotide sequence at SEQ ID NO 17550
caacctgctgctttaaccgttgagttgagatgtgcatgcagctcattggtcaggaagttgaatgctcctttgtattggcagactctatgtaatcttgcatttaagttgagtacattccggaggaggaatgagaattgtatttgtagatttgtgtgtgtgggttgtgtcgtgcagttaggattcagcggtgagcctaagtgcaggggcatataagaagactactgcgaccatgcactgatacgggcaagattttgttaggaaattttttgtataaacatctgcttcactcctcttgttttacattgggctattccttggccttcaggttctttttttacagtgcccgcgctgtcctactgtacaatacccgactaccacttgcaaacatgtcttcctcaaacacagctcaaagagacctcatcccactccttttcaacttctcatctacctgatgagcttgagcttgttcgcgtaccgctattttgcgtctgcatcacgagacgatcgagatacgctgccttgtcaccagttgtcgtgctcgccgtgtaggtagagtggcttcgaacgacgatgcgttctgtagctgtctctggaccccgagataggtagtctttcatcatttctgactgggatcttctatgaaaaaacaagtcagactttgggattatcttgtcttgaagtagacaatccacacttacttggtgtgcgagacttgttgcgatacgccagccatttttggtgatggatcggcaacgatagttcgtcaagtgagtatataacaaaataaggcgcgtttttatgtttctcgtctttcaataataggtatcaaatgatcgaccgttttactcttattgtcctgatgttcaagctgtttcgactcactgttgagctactcatcttcactgatatatactagtccatcgccatgagccgcaacgcgcaccacaatcagtcttgatcaggaacaagatcgcatttgcgttttggcactagagcgcaacgaacggaggattagcccaatggctcagccccaaggccgacccaacattgcggagtgtctttctttcgttggattcattcatcttgcgctcacgagagtgagatttgggtactggaattcgtcggcggcgcacaaccaaaaatggtcccatctgcgtcttcctcttgcgtgtagaaccggcaattgcgcgaaatcggcggtcctcgtccgactttgacaagccacgtcccgtttctgcgccagctctcactgcccacgtacggcatgcaagtttgatgcaattgattggtgatgacccctcacgatagggatatgccatgtaagatcgtatggctagagtgctcattccggtggttcgcggaccgccattgagcgtgctttaagtacgatgggaaggacgttcatgcaggtgaaaaggcaacatctccacctggacgaacgaattggatttaagtgcgctcttgcgcaaaacagtcttgacagctaccggcgcaagctgttaattggggagcagttgcgaataaggagtataagtaatagtcaccgattcagcaggagcccggatatctcagcttcataaaaattcctgtcctgaattgcgcaaaaccattcaacatccattgagtattaagagtcctgttttgttattagcttgctgagcccgaggagattgtacgagatccatttgaacttctatgcgaaacttaccagaaagcctaccatacttttcctcctgaaagctttgtgaaagaaatacaatacaagcatagtgcaaatatcgtccgtgatgacacgaaattgaccctggaatcaggagcaattctcgcccgttcaagctgctgatgcatcctctccctcgtcatcagacatgcgatctcggcatttactggtgactaccgtacataactctcctcagctgccacaggcgatctcaaactggactactcacaacaatacttgcaacgacaatttcaatactcatactccacgtctaccaaggtctggcggttccaagtttgactcccaatcttggaggcaacaaattatccccaaacttgtggctgtgtggtgcaaaaggctcaccaggccgcgatctcgatatatcctcaaacaaaggatggtcagcaaattgaccgctgatcccaacgcgaattccacggccggttcgagcaccaggggtgcgtcgatcccggcacgagcagtgactgagcgacagattgctcatggcaatgggccacgtccgaagaattctgacgtgtgcaaggaaggtttaaatcacgcatacgtcggacatagcgagtccaactacaacgacacaatgaagcgctacgacagcgcttcagggggaaacgaaggtgggcgttcgagaaaacagacccctgaggaattcatcgctcgccagaaacaagccgcggtggatcaactcatggctaaatttgaaaaatggctagataagcgacttgccattatctcatacagcatcgagactgctgtcgccgcagaagacggtggagggggcggcgataccaagcgctccccacgtcagggcagcgaagacaaagactctggtcagtctagccggagaccgaagcgccaacttcaagacgatgaagatgacgataccgctggtggcggagacgacaacgagcaggatagaggagggaacaagcgtgctaagaaagacactgaggattcggtgaagtgggcttgtccttttcacaaacataatccgaaaatccacaataaacccatctgccttcgttcttggccgactattcatcgactcaaagagcatctgtaccgctgtcatctgctgccaaagttcagttgtccacggtgcacggcatcattcgaagatggcaagcaactccatgcccaccagcgcgcagatgtcccatgcaagaaatcagccctgatgcccatcgaaggcatcgacagaacgaccgaagaggagctgagacgtcgcaagaggtacgggtcaaagcagaccgataaggatcgatggggagacatctacttgattttattccctagtacagatccgactgcgatacctagtccttacgcagatcatatcgaaaccagaacaactaagaagcaactggcgcaatgtaagcgtattgtgaagcgcgtcaaaactgagctccctcagcttgtccgcgaccaggtgcagagtagattcgagaccgttgaagctgatgtcttgcgggaaatgtctggtatcatccgcaactgtctgtctaacctgtatcaaggctggccagactcaggcgatgacgggtcctcgacgggcacgagaaacacgtcaaggtctacaacacctggtccagttttgacagaagaacctggcgttgttttaaacgatgaagtcgactgggattttgacgcttatctcggggatggaactgggatcgactttggttttgaccttgactttgattgtaatcatcagttttcttttgatggagcctttggtgcggataaggcgtctgggtctgattccggctatgcttcgactgggactgtggctggtttccaaggccggtgattaggtgtggttatattatcttgatcttattgtatttgttacgattagtccgtggtgtatctgagcatctacttggtgattgaaacctctcagtgattataaccagctgttattgatgtaatcgttgaaagttttgaagtgtactagaagtgtgcattatcaggtgattcgcagcattctgcagtacaactcactctctggacaacatatcttgtttagctcgagagcgcgcgagcttttcttcccgtgcatatcggtatctcttctaaaagacatccattttgctttaatacggaccatagagtttcgcaaatttgttgaggtatcgtatctgtgcactcgtgacttcctcacctgcttctgatagagatctccatgctgctaacttcatgacgcaaggaagtctcacggaaccatatttcaaggctgaggattcgaactctgctgatcctgagacatggttgtccggaagtctgttgaacttcgtgatgacctcgatgcagagatcatacgtactttgatgcatgtatgactgctgcattgtgtatgcaaagtagaagttacgttgacggaattgccatggggaaattctctacatcaccaaagatgaatgccaagcagatggatgaactctacatacaagggatcttgtgtattcgactgcctgatggtagacggagcgttcaaaacgggataatttcgccgtgatgccgatcaagccttcgtggaattgtttgtattgtgccttgatgactgcttggctgttgtcatcgaatcctgtatacttgagatttattatacgccctaaacaagagcttgtgaggcatctaccaagcaaatttcgtaagtaactgtaggagagacatatgttaataaaagatggcattggcatatcattgaaaatataaaatttcgctgcgcgtttgaagttatctggatgtatacgagtgtttggtggaaaccagaggacagctgccatcaagttgagtgaatgcaaggcggtgcgtttggtgcacctaggactgtccgtatttttcagctcttaggtacatgtatctttgttaaaaactggcgtcgtccggaatctcgcaagaacgaggtattgttgatctgcgccttccaggtgaactttacatccgtactggaagtttcctcctagcacatacccatacttgccaagtgggcaggacgaagtgtaaaatggcaggtagcttgcaacttacagtcagtttttgactaagtgaggcacaatcaatgtttgcttcagaggagatggagcaagtaaactggctgatgtgaaatcattggtcacataacaccgtgatttggattgtgaattacctgtgctgtgaacaagacaggcacaaattctggataacatgttctccaagatggttgatatagacgggaccagggttggcaccttggcagccaacagaaatcaaggagatatagtatttactattaaattgcgaacagacctcattctttatggatggtgtgaagacatgaggagattggaatgcctccacaggtgggtgagtagtaatctttgttactgtgcagacgaattagcgttctctacatgtgctggaaaggaggtgattgctaccgacaacaacgaggtcgctctctctcgttatcgtcaggtacggactatcggaggacgtagataccgtcacttacacgtgaatggtaagatctcaatgggaagctctgaaagtcgccaataaggattgtgcccacaccaggatcgagcctgcacaggggacgcgtcggtgctgcgcactgcagcaaagtgacagactgcagtctcggtatcaaatctcacacttttcccctgtgataacatgatataatacacagactgtcggagaaggatcacatctcacatcttatcaccatgatctgagctccagtaccctcacacatccatatttcagtctgaagcaaattcgaggaggaaggcacaggttgtacacagaagacgctccagcagtttagaacctcagctttgggcacctcagacaaggaagtaccaccgctttctcgactgattcgggctaggaggtgcacccgccggcaggtacgatgtgctagcagggttgggtacttgcctggatgaccccagaaaaagttgaggttggatgccagatgtacaccaaatggtgccaaatggacttcaacgacgttccaggtttgcttgcattctcggcgccgtgcagcttgtagcttccagcatcgacgtgataactgcaggtaatttaaccttcgcaccaaaaaacaccctattgtgtcgccgacaatctccatctttaactcatcctcgacgcctgctttgccttgcaaatctgcacgcacacacgcagccttgtttcctcgctgcaggcctcatcttgtgtttttttttccgactcttccatgcatctgtcacctgcgagtttacctgtacattgatatacatactgctttggcgtgtgtttttgcgatcttgatacccttcctcaaaatttattttttccacctcgcttccacactcccaccttacgtgtaacatcaaactcccttcccgccattccattgagtactgttcctgccattggcgatccattggcggcaaaacggacactagtcgatcccaatcgcgaatctcaagcaacaacgaggaaggaccaagacaagcaacgggccaagaagtgtgaatcagatgctgcgcaagtgagacttgctgcacgattccattgggggctcaacggagaaggcgttgccgtacgaccgccctcgacctgcgtcccgccccccactgccacgcattgcccgcctctgcgcgtcgcattccttgcaccaccgctgccacaggtgcgcacagcttgtggccgaggacacgacaccacgcgcagtcgacgcggcttcacgcccgccgctcgcccgcccgcagcggctgcccgagcataccaccacccctcccgcgcacatcagcctccgccttatgcggttgaccgactactcgcagcccttgtgcgaccccttttgtcgccgctgtcccaatgccctggcaaccgctgccgcgaatcgcctttgccgtcgcgaccttccccttcgatgccaagctcgagaacgagctgcccctcgagattggcgatgacctctacatcatcgaggagaccctcgacggcaaatggatgcgcggctacctccttgctcctcctgccctgctcgcaggcctgacctcggtgaagggccaggctttggaggctcgtgtcttttctggtgtcttcccccgcagctgcatagagatacgcgaggtcctgggtgatggagaagaaaatggatacggtcaagacgagcaggtctcagcacggggtgatgatgctgtctctcagcgtcgaagtgactctggcaagagtggagtctcccccagatcacaccaccactcgcacagcatagacgtgggaaggatgaggcccagtggcgaaacccatctcccgagcccaacctcgatggataccaagtctcctctgcggtccccgaacacgatggcctcggggtcagtcccaccgagagagcgcccgcctgctcccacccccatgctccagctgggcgacgaaacccccacaaccatcaacgaacctttaatcgacgagattgcctcttgcctgcgagagtggcactcaacaaacatccacgagctgcttctgaatcgggaatatgccaagttggagcgcgtggctcattacattcagactcttgacttagcccggcgtcaattacttcataatctcctcacagaccgcgaagcgaatgcactccgggagaagacggtctgggacttggttcagggcaacaagctctgtggcggagatgtcatcgtacgcgatccggcccagcgcggcaaggttctgactggagacgactctgtgatcgaagtcacaaagctgcagtctgccatgagtttactagagagcccaccacagtcccatgttgagacttccaccctgcaccatgtcatggtggacatcaagagcttcgcaggagcttctagtgaacctacaacactggacctgtctctcgccaccaaatctggcaatggctcggttacgatgctttcagaaacatacacagtcgaggtaccagctggcagttcgctgggatcaacagacggacaggtacccatgcggactcttttcacgaacctaacgtcgaccgatattggagatgctccatcgaccgagtctgaattatacctggttgtaaaagctcgtgcgctgcaacaagtgatcccagggaagccgccgtcgaggtctggcaccttcccgcaaccacatgcccccttttcgagagaaaaaccgccactatccgcaaatggtactgtcaaaacttctaggagaagtctgatgtggggatcgacacgatctgcattctctagaggaggactgaagctcgatgccctggccgagcagccagaggaccggcccaggacaggaccacgcgatacgtctgtgcagcctccaagcacaccgagctctgtttccggccgcacatctacagacggctcacaaaactcacatacaatcgccgaccgattagtcggcgtgggcgttctgaacctgaaatccgcaatgaaaggagagggagaatctgaacaaatagtgaccctctggtcgccagcttctaagcctagttctgataggacagagacaggcagagcgtgggatagtctgattcccgaattattcgatagtgaatctggccactatgagaaatccaggagagcagaaaggctacatatccatttgaaggcattcagtaactctgatgcggacatcctgatcaaagaaacgccaacgctactatccgggattaagaagactagcaagatgggcttctctggcgcgcctaccaaggctcgatctgatatttatgtcacaatcaacgaagctctcttagcccgccagaatcttctttcgcgacacggcggcagtgccatccccatatccagcaatatgccgggaaataacctggccgtatcagtggaggtacggcggcagggtggcgagcgaattgaatcctgcgtctactcatcgtccaattcggacgccgtgacaacatggtcaacatttgccgtacaacgaggcgagcgctggaaacagaccctgcgcctgtgtcttactccagcagatgtagccaattctcacatcgtgttttcggtctcagaacttccgagctcgcccttcgccattgcgtacttaccgctttgggactcgcaggctttcatcagcgatgggctgcactctttacttttctacaggcttgacgagttgacgcagattgctcaacccgacgcattagggaaaggtggatatttgcgccttccatggagtgctcgtagtgatgcatctgatgtcacgggcccccttgctactcttcgtgtcgacacctatctctgtagcacaaggttctcccaggatcgtaccattcttggcttgctaaaatggaaagaaagctccaaagacaatatccctacactactgcggcaactgatcttcgttccggaaatcgaagtggtcaaacttctaaacgatgttttagactcccttttcggaatcttggttgacaatcaaggaaacgatgagtttgaagatctggtgttcacagctctagtgagagttctcggcatagttcatgatcgccggttcaatatgagtcccctggtcgaccagtacgcagagagcaagttcaactatcctttcgcgacgccatgtctcgtcagatcatttaccagactgttgacaaagccaactgagcctgagaccgcccgaaaacttcgagccacattgaaggtcgttcgtcacattctcaagttcattacacatgcgagaggacagcagaaggagaaagaagctggaataggaatcactacttctactcctggatttacaagacatttgcagagcatattcaaagccctcgacgccatgatgcgtagtaccgcaccagtgcttgtcggcagtcagactctcgcagtgcaacatttccacacctggcttcctgagctgacgggcttgctcacaaccgaagagattctgcacatcgccattgacttcatggactcttgcgctctggttaagggcaaattggtactatataaacttatcctcatcatcaactattcaaagctggacctcttttcccatccagagcagagatcggctctgagcgcaaacactgtccgatggattgcaccccattggggccagaccgatgatgtcacaagccagtggaaagaacaagtgcgcttgtgttgttccgttttggctacgcaggttgactaccttaactcggagatacctgactacgtgccaaagatcgtggattcgttcctagccatccagtctagtgagaggcaacccagagaccggctttccctcctcttcccacaatcctatccattccccagcaagccacttcccggagaacctgtccgttttgaggaagctttaatcgaactgtcggccatattatctgcattgtcaaactcacctaatgggatgcagcttgaacttgccgtcgatgacataagtatcttgctaaaaaatacccttcaggtgcatttgagcattttacagggggaagcattcccaccaacatggctcagcgtgcacattttccatcacaagtctacaatgcgaacacttcaatacctcgctggtattctactggattcagcgttgccacatccagatgatgctgaagatttcgacacggatctttggcgaatgttcttcacaacactactgaaattggtcggcagtgattgtttggcgcttgagactttcccagaacagaagcgcagggctgtctggaaaattgccggcgacgtccgagagcatggtgcagaacttctcaagcgcacgtgggaagctgttggatgggagacaagtcctgatgagagaatgcgttacggactcgtaaagatgggtggttaccaagttcaatatgtgccaactctagtaggcccaatagtcgagctttgcttgagcgtccatggtggtctgcgaaaagttgccgttgaagttctacaaaccatgatcgtgagcgaatggactttgagcgaagatttatctgtcatacagacagagattatcgattgcctggatattttcttcaaggatcaaagcatgactgaaagcatcatgcagaaactcttcatccaagaaatccttgacaaattcgactctctgtatatcgacgccgagcctttgtattgtgctctcaaggaagtcatcaacattgtcaacgagttcctcgatttgctggttgccgttcatagcggcgagcttaccgatgaagcatccaagctcattgaccgccttcaacttatggaattcctccgagatatggagaaagtagagattttcattcgatacgtccatcaactggccatattacaacgcaactccggaaatcatacagaagccggactagctcttcgactgcatgcggatctctatgattggaatccggtcaaaaccacgcctgcgttgtctgatccggctcttccagagcaaactcacttcgagcggaaggagcgcatatactttgacatgatcaagcatttcgaggacggtgaagcttggagtagtgcaatcgctgcctacaacgagctacgaaatcattacgagaacacggtattcgatttcgccaaacttgcacgaactcaaagagccgttgccacaatctatgaaactatagccaaaggcgagaaacccatgccaaaatacttcagagttgtcttcaaaggactcggctttcctctcaatctacaagacaaggcattcatatatgaagggtccgcaagtgagcggtctactatttttacggaccgcatgcaggaacaatatcaatctgcgcacattatcaccaatggtgatgtggatagcgaagcagaggggcagtatcttgtgatctcggcagtctctccacaccgtgacatcacacatcctgtcttccagcgggctcgagtattgcaaccgattcgcgactaccttctctcatctaatcctcgagtattttccgtctcctccaaacgtgttaccactggtcctgtggaagaacattatgccgagaagattgtgtacacgactgcggagacctttccatcgattcttcgacggagcgaaatcgtaggcgtggagaccataaagctaaatgccaaggaagcgggtctcgaacgtatcgtccgcaagactcaagagatgacagttcttgaaagaagactttcggaaaatgaggtagaggaggagatagctcaaaccatgatcggtgctatcagtatttctgtactgcagaagtcagaagctagcgtggcttgctatcggcaattgctccctgttcctgatgttgtcagtcgtgaaggcgatgaagacgaagatgagatcgagggcgacgaggacgcagagccggaactgagtccgcaagacaatgcgatcaagacagcattaattgatcacgcaattatgctaaaacgatgtctaacgggtttctctcgaagctcgaatccaattctagtacaggcatatcaggatttatacccacattttgcttcaacatttgcagaggaaatagcagtttttgctcctccgcagcctcaaaaggagccaaacttcttggcatcgcctatttggtcgtcgccgactggagagaatgggatgttcaagggacagattccactgtcaagtactaacggcaccaccttcgtagaagaagcagccgccgtacaaccattggctatgagacagcgtggaacgagactcagctttcttggtggcaaaaggaagaattcggtgcattcaaacggagatgcttcaattatgtcgcattccagaatcgatgctatcgaatcgaacagtccgcatagcaagagcaaggagaatctacagcagaagggactactgctccgcacacagtccgctgagacgaatcccagcgggaatcatatcaaccaacaatttaccaacggtagtggggaatatatcagcccagtctctgcctccgaccgctctcataagacgagagaggtcgtcagtgtatcggaaggccggtctccagatggtagtgttttgagaatgggctcggttcgcaagcgactgagcatgttgaagcttggaaagaaaaatagcaagccgaatggattcgtaggcgttgacgaagagtgactaggacagcactggtcgagtatgagaaagttgagataatgtcggcgtttgctatttgctggtcacaacattgtggagatgattttgagataccagacaaaggggtcagtcaggataggcgagaagttttgagagattcatccaatagcttctggcatcctggacaatgtaattcggggagatttgcgaattgagctgcactggaagcactatatagtattacgccgttgcactgcaattgtcacagttgcagagattcggtagcactttgttgtaccagacgctggtctgccgagacagagacaaacaaattcgagatgttgtgctctcgttactcccgtcaagatgcggcaatcagtggtgcataagtgagacagaagtcaccataaaccattaggagcaaagagcattgactttactttccaatctcacggtcttcatgccttgcagctccgaatagattaaagatgacgatttctcgcgagtcgtaagaacagacccttggatagaacccctccgaaatccaaccctcccttaacagctatatcgcaggcattggccaatgaaaggcgagagataggtagcacctagtctcgcatcaaaaccggggacagaagaccgggtcgtaacatgtattttcccgtggtcgtccttttttcttcgtattccgggggcaggagttggagctgtagggtttgctcataggcaaatactggtgcatgcatctctacctgatatatctccaacttgggtcttaactacttacttactggaccactaaaggcttctttatgccgatactccgatcttagtggactgaataaagtgaaagatgctaatggaggagagttatcttttttgagacttggattaattccgagtcaagtgcggagtccctcttttaaggagcaaagtgatgtgagaatatctttgtcaaacgccagtttgcggatagatgcgcgggaggatgtgctgaccttccccgaaaggtcgggatctactgcgtgcattgccagatcagggcgatcacggatggaatgggaaagagcagacatggtatcagacgatgaggtgtcagaggctgaaatggaaaatcttctgcgacgatggaagaattgctacgacccagctgcgagtttggatgatcgatgatctatgtcgtgttcgagaaggttacgggagcgaatgacccctgagtctagcgtgtactagtcgtttcgtggatcgacacggtcgcgctttagtgggataatgatgggtagggaaaagggggggcaggctgttgataatagaaatttgatgatgggctttgaaatgctttgaaatttttgggggcaatgtgcatgcaattgatgattgtgaagtaagggcggaggtaaggaaacccgatccagatccgatgatgcggataacttaaatgatatcatacagtcggtacagccttctagcgagctggtggtacgaggtttcattcggatctcagaaatgtatttctgtcaacgtggctggctcggctggtctggggaatgaatgctgtacatgaaatttgaattggacgacaggcagtcgtcttatctctcgaaccaggggtcagtctcgctcagctcagctgtgagccaccatcgcgtccaattgcacactcgttgctcagctcagctttcgatagctcgtgagaaagggtaaacgatgttcaatgactatcctaaaataaatcgaagtcctcgagg

SEQ ID NO: 17553 - DNA, 1431 bp, Muscodor strobelii
  misc_feature: SGI cDNA ID NO. 565864
  misc_feature: Elevated expression when VOC is produced
  misc_feature: Encodes the peptide sequence at SEQ ID NO 17554
atggtcagcaaattgaccgctgatcccaacgcgaattccacggccggttcgagcaccaggggtgcgtcgatcccggcacgagcagtgactgagcgacagattgctcatggcaatgggccacgtccgaagaattctgacgtgtgcaaggaaggtttaaatcacgcatacgtcggacatagcgagtccaactacaacgacacaatgaagcgctacgacagcgcttcagggggaaacgaaggtgggcgttcgagaaaacagacccctgaggaattcatcgctcgccagaaacaagccgcggtggatcaactcatggctaaatttgaaaaatggctagataagcgacttgccattatctcatacagcatcgagactgctgtcgccgcagaagacggtggagggggcggcgataccaagcgctccccacgtcagggcagcgaagacaaagactctggtcagtctagccggagaccgaagcgccaacttcaagacgatgaagatgacgataccgctggtggcggagacgacaacgagcaggatagaggagggaacaagcgtgctaagaaagacactgaggattcggtgaagtgggcttgtccttttcacaaacataatccgaaaatccacaataaacccatctgccttcgttcttggccgactattcatcgactcaaagagcatctgtaccgctgtcatctgctgccaaagttcagttgtccacggtgcacggcatcattcgaagatggcaagcaactccatgcccaccagcgcgcagatgtcccatgcaagaaatcagccctgatgcccatcgaaggcatcgacagaacgaccgaagaggagctgagacgtcgcaagaggtacgggtcaaagcagaccgataaggatcgatggggagacatctacttgattttattccctagtacagatccgactgcgatacctagtccttacgcagatcatatcgaaaccagaacaactaagaagcaactggcgcaatgtaagcgtattgtgaagcgcgtcaaaactgagctccctcagcttgtccgcgaccaggtgcagagtagattcgagaccgttgaagctgatgtcttgcgggaaatgtctggtatcatccgcaactgtctgtctaacctgtatcaaggctggccagactcaggcgatgacgggtcctcgacgggcacgagaaacacgtcaaggtctacaacacctggtccagttttgacagaagaacctggcgttgttttaaacgatgaagtcgactgggattttgacgcttatctcggggatggaactgggatcgactttggttttgaccttgactttgattgtaatcatcagttttcttttgatggagcctttggtgcggataaggcgtctgggtctgattccggctatgcttcgactgggactgtggctggtttccaaggccggtga

SEQ ID NO: 17554 - protein, 476 aa, Muscodor strobelii
  misc_feature: SGI Peptide ID NO. 565864
  misc_feature (89)..(381): NCBI GI: 116205235 Blast Desc: CHGG_10501 [Chaetomium globosum CBS 148.51] gi|88176629|gb|EAQ84097.1| CHGG_10501 [Chaetomium globosum CBS 148.51]
  misc_feature (113)..(401): NCBI GI: 169605515 Blast Desc: SNOG_05782 [Phaeosphaeria nodorum SN15] gi|111065726|gb|EAT86846.1| SNOG_05782 [Phaeosphaeria nodorum SN15]
  misc_feature (181)..(377): NCBI GI: 171683689 Blast Desc: protein product [Podospora anserina] gi|170941804|emb|CAP67458.1| protein product [Podospora anserina]
  misc_feature (148)..(379): NCBI GI: 116194256 Blast Desc: CHGG_03726 [Chaetomium globosum CBS 148.51] gi|88179639|gb|EAQ87107.1| CHGG_03726 [Chaetomium globosum CBS 148.51]
  misc_feature (193)..(381): NCBI GI: 85089659 Blast Desc: NCU06944 [Neurospora crassa OR74A] gi|28919364|gb|EAA28814.1| [Neurospora crassa OR74A]
  misc_feature (88)..(362): NCBI GI: 145608210 Blast Desc: MGG_03279 [Magnaporthe grisea 70-15] gi|145015716|gb|EDK00206.1| MGG_03279 [Magnaporthe grisea 70-15]
  misc_feature (63)..(412): NCBI GI: 145614532 Blast Desc: MGG_04644 [Magnaporthe grisea 70-15] gi|145021440|gb|EDK05569.1| MGG_04644 [Magnaporthe grisea 70-15]
  misc_feature (183)..(387): NCBI GI: 116203989 Blast Desc: CHGG_09878 [Chaetomium globosum CBS 148.51] gi|88176006|gb|EAQ83474.1| CHGG_09878 [Chaetomium globosum CBS 148.51]
  misc_feature (141)..(318): NCBI GI: 46109250 Blast Desc: FG01507.1 [Gibberella zeae PH-1]
  misc_feature (180)..(402): NCBI GI: 171678877 Blast Desc: protein product [Podospora anserina] gi|170937509|emb|CAP62167.1| protein product [Podospora anserina]
  misc_feature: Useful for introducing or modulating the production of volatile compounds
MVSKLTADPNANSTAGSSTRGASIPARAVTERQIAHGNGPRPKNSDVCKEGLNHAYVGHSESNYNDTMKRYDSASGGNEGGRSRKQTPEEFIARQKQAAVDQLMAKFEKWLDKRLAIISYSIETAVAAEDGGGGGDTKRSPRQGSEDKDSGQSSRRPKRQLQDDEDDDTAGGGDDNEQDRGGNKRAKKDTEDSVKWACPFHKHNPKIHNKPICLRSWPTIHRLKEHLYRCHLLPKFSCPRCTASFEDGKQLHAHQRADVPCKKSALMPIEGIDRTTEEELRRRKRYGSKQTDKDRWGDIYLILFPSTDPTAIPSPYADHIETRTTKKQLAQCKRIVKRVKTELPQLVRDQVQSRFETVEADVLREMSGIIRNCLSNLYQGWPDSGDDGSSTGTRNTSRSTTPGPVLTEEPGVVLNDEVDWDFDAYLGDGTGIDFGFDLDFDCNHQFSFDGAFGADKASGSDSGYASTGTVAGFQGR

SEQ ID NO: 17555 - DNA, 14490 bp, Muscodor strobelii; identical to SEQ ID NO: 17552
  misc_feature: SGI EST ID NO. CUFF.41363.1
  misc_feature: Variant of the nucleotide sequence at SEQ ID NO 17553

SEQ ID NO: 17556 - DNA, 3294 bp, Muscodor strobelii
  misc_feature: SGI cDNA ID NO. 565865
  misc_feature: Reduced expression when VOC is produced
  misc_feature: Encodes the peptide sequence at SEQ ID NO 17557
atggctgatgacgagcagcagcctcagcccgagcccacgctgccgccagccgagcagatgcgccagaggcgactggccaagctgggcatgtcatcgtcgaccccatcagccgcatcgccgtcgaatccgcagcctgcctcgtcttctgcctcctcatcctcctcctcgtctgcaccacagccacagtcgcaaccacagtcgcaaccacagttctcctcatcctcgacaccaactgtagcgcccagccgatccatcaacatcacaccggcctccacatccacaccttccacgccgccggccaatcctttcgcccagctcacttctaagaagcaatcagaggaggcaactccagggacacccccggccaagaagaaggtctacacacccgcccctgagcagaatctggaggactggctcgaccgcctgctcggagatgtcttgcacgtcaccctcgaccgatcccgcgtcgctgacgcccgcggcaacccgctcacctacctgcccgagctcgccgccgagatcaccgagtccggggaacccctcaagctcagcacctcgtacatcgactccgccgtcctcgaggccgtcaagcacatcccccacagcacgcccctgctcgactacctgctgccctgctggaagcgcatgatgcgagcgagtaagcccgctcgtcgcccgtctcccgagcgagaagccgtcttgaaggaagccaggcgtttgtgcatgagcaactgcatcttcgccctttccatgccggagtatttcggccgagatgcgaacccgcagcatgacacccttgtgccctacctcctccgaaaccacgataacgaagatggtgtctgtctcgacttcttcacagaggccgtctcgcgcatggccgacgatgacgactccattgcgcccatattcacggatgccatggtggccatgagtgctcgggtcgccaccatgaccatgaacgacgactacaagccttatatcaactgcctcgtgacgtattcgcgattcccgcccctcctagacgccctcgcacgacatccccgtttccaggtgatcccaacaccagaaacgaccaaggagcagttggctctttcgaccgagctcttgaccatcctgggcccgttcttccggatctcgcctctccagaccgaggtcaccaagacctacttcgccagccctcgaacgattgatgctgggcacgtcaagtcatcccagtcggccctgcagatgacactcaaggcccaccaaggagatcttataggcatcgtaaacgcattcgtccgcgccagcaaggcggccaaggagagcatcctccaatggtttgccgttggcttgaatgccaaccacaagcggcgcgccctccaggtgaaggcgaccgacgttgcatctgatggcttcatggtcaatgtcacgcgcgtcttggacaagctttgcgagcccttcctcgactcgacattctccaagatcaataggatagacgtcgattatctccggcgggccccacgcgtcgacatgggcgacgagaccaaactgaacgcagaccaggccacctcggatgcgttctacaacaacagagttgacggcgaatcgaacttcatttccgaggttttcttcttgacgctcgcagctcatcattatgggcttggtgccaccaacgctaagctgaaagatcttgataaggatatcaaatatctggagaagctcatcaagcagatggaagaggaaatagccaaaatacaaaacaatccgatggcagtgtcccgagccagaaatactcgagtcaacgccgtagccgctgttgagaaatatattgccctcaaacatgcgatacaaggtgttgttttagaccaggagatgcaaacactgtccttacagttcatgcgctatgtggctgtgtggctgctgcgcactgccagctcatccgattacgcgcctggaaagaagattggtcttcctctcgcgtcacaaaagccagcggcatttagctgcctacctgaatatgcactccaagacgtcgtcgagaacttcaagttcattttccggtttctaccacagattttgatgtccgcgctgggtgatgagatcatcaccctctgcatcacctttctcagatcctcagagtacataaagaacccctatttgaagtcttctcttgtcactttactattctctgggacttggccgctgtatcaccttagcaagggtgtactcggcgattcgcttatgggttctgagttcgcgaatgaacacttactccattcgctgatgaagttttacatcgaatgcgagcacagtggcgtcagctctgccttttatgacaagtttaatatccgttatgagatattccaggttatcaagacgatctggcccaacaacatctataaagagaagctcagcagagaaagcagggtgaaccgccagttcttcgtacaattcgtcaacttactgctcaacgatgccacgtacttgttagacgaggccttgacaaagcttggcaagattcacgactaccaaaaacagctacaggatcccaatctatctaccgaagaccgggacaaaatcaggacggacctagaacaggccgagcagcagtgtcaatcttggatgcagctggtcaacgacactatgggaatgatgaagctcttcactgaaactttgcgggactcctttaccatgccggagatcgtgactcgactggctggtatgctcaactacaatcttgagtctctggtcggaccgaagagagggcaactaaaggtcgaagatgctcaaaaataccatttcgacccgaagtcgttactgtccgatttcattgacgtctacctaaacttaagcacaaagccagacttcttgagagctgtcgcagctgatggacgctcttacaaacctgcaaacttcgaggcagcatctagactgattagaggtagtcttcagaagccgcctgaggtagccaccgcctgggcaaacttgatgcagaaagttgccaaggctaaagatgagatggaccaggccgaacttgacttgggtgagataccggaggactttgaggatcctctcatgggagagttgatgactgaccccgtcatcttgccgtctggtcatatcctggatcggtctaccatcgtacagcagctgctgtcaactcccaaagatccattctcaaacgtccagatgacgattgatgatgtgagacctgcagatgagttacgcgcaaggattgaggcttggaaagccgagcgaatagcactcgccaagagcagtgcgagtgatgcgatggatactagctctggttag

SEQ ID NO: 17557 - protein, 1097 aa, Muscodor strobelii
  misc_feature: SGI Peptide ID NO. 565865
  misc_feature (1010)..(1083): Pfam Id: PF04564 Pfam Desc: U-box domain
  misc_feature (1010)..(1080): Pfam Id: PF04564 Pfam Desc: U-box domain
  misc_feature (13)..(1085): NCBI GI: 171689002 Blast Desc: protein product [Podospora anserina] gi|170944463|emb|CAP70574.1| protein product [Podospora anserina]
  misc_feature (16)..(1097): NCBI GI: 46109372 Blast Desc: FG01568.1 [Gibberella zeae PH-1]
  misc_feature (3)..(1097): NCBI GI: 261357259 Blast Desc: ubiquitin conjugation factor E4 [Verticillium albo-atrum VaMs.102]
  misc_feature (18)..(1032): NCBI GI: 116199833 Blast Desc: CHGG_08072 [Chaetomium globosum CBS 148.51] gi|88179351|gb|EAQ86819.1| CHGG_08072 [Chaetomium globosum CBS 148.51]
  misc_feature (1)..(1095): NCBI GI: 21622382 Blast Desc: related to ubiquitin fusion degradation protein 2 [Neurospora crassa]
  misc_feature (1)..(1096): NCBI GI: 39942350 Blast Desc: MGG_03255 [Magnaporthe grisea 70-15] gi|145015748|gb|EDK00238.1| MGG_03255 [Magnaporthe grisea 70-15]
  misc_feature (18)..(1096): NCBI GI: 156059854 Blast Desc: SS1G_03940 [Sclerotinia sclerotiorum 1980] gi|154701726|gb|EDO01465.1| SS1G_03940 [Sclerotinia sclerotiorum 1980]
  misc_feature (6)..(1097): NCBI GI: 256730560 Blast Desc: [Nectria haematococca mpVI 77-13-4]
  misc_feature (1)..(1095): NCBI GI: 85080009 Blast Desc: NCU03357 [Neurospora crassa OR74A] gi|28917531|gb|EAA27230.1| conserved [Neurospora crassa OR74A]
  misc_feature (1)..(1079): NCBI GI: 154315992 Blast Desc: BC1G_04568 [Botryotinia fuckeliana B05.10] gi|150846964|gb|EDN22157.1| BC1G_04568 [Botryotinia fuckeliana B05.10]
  misc_feature: Useful for introducing or modulating the production of volatile compounds
MADDEQQPQPEPTLPPAEQMRQRRLAKLGMSSSTPSAASPSNPQPASSSASSSSSSSAPQPQSQPQSQPQFSSSSTPTVAPSRSINITPASTSTPSTPPANPFAQLTSKKQSEEATPGTPPAKKKVYTPAPEQNLEDWLDRLLGDVLHVTLDRSRVADARGNPLTYLPELAAEITESGEPLKLSTSYIDSAVLEAVKHIPHSTPLLDYLLPCWKRMMRASKPARRPSPEREAVLKEARRLCMSNCIFALSMPEYFGRDANPQHDTLVPYLLRNHDNEDGVCLDFFTEAVSRMADDDDSIAPIFTDAMVAMSARVATMTMNDDYKPYINCLVTYSRFPPLLDALARHPRFQVIPTPETTKEQLALSTELLTILGPFFRISPLQTEVTKTYFASPRTIDAGHVKSSQSALQMTLKAHQGDLIGIVNAFVRASKAAKESILQWFAVGLNANHKRRALQVKATDVASDGFMVNVTRVLDKLCEPFLDSTFSKINRIDVDYLRRAPRVDMGDETKLNADQATSDAFYNNRVDGESNFISEVFFLTLAAHHYGLGATNAKLKDLDKDIKYLEKLIKQMEEEIAKIQNNPMAVSRARNTRVNAVAAVEKYIALKHAIQGVVLDQEMQTLSLQFMRYVAVWLLRTASSSDYAPGKKIGLPLASQKPAAFSCLPEYALQDVVENFKFIFRFLPQILMSALGDEIITLCITFLRSSEYIKNPYLKSSLVTLLFSGTWPLYHLSKGVLGDSLMGSEFANEHLLHSLMKFYIECEHSGVSSAFYDKFNIRYEIFQVIKTIWPNNIYKEKLSRESRVNRQFFVQFVNLLLNDATYLLDEALTKLGKIHDYQKQLQDPNLSTEDRDKIRTDLEQAEQQCQSWMQLVNDTMGMMKLFTETLRDSFTMPEIVTRLAGMLNYNLESLVGPKRGQLKVEDAQKYHFDPKSLLSDFIDVYLNLSTKPDFLRAVAADGRSYKPANFEAASRLIRGSLQKPPEVATAWANLMQKVAKAKDEMDQAELDLGEIPEDFEDPLMGELMTDPVILPSGHILDRSTIVQQLLSTPKDPFSNVQMTIDDVRPADELRARIEAWKAERIALAKSSASDAMDTSSG

SEQ ID NO: 17558 - DNA, 3903 bp, Muscodor strobelii
  misc_feature: SGI EST ID NO. CUFF.41357.0
  misc_feature: Variant of the nucleotide sequence at SEQ ID NO 17556
ctaacatggcttattattaggcatgtatgtagatggcggcattggtacatcgcatttgaattcgaaggacttccttccagtttgacagttcacatctgcactcgttcaacatcggtgaaagtgccgtgacacagcctttctctttctttctttctgtctttcttcccttctcttccggcgccgccttgtagctcttcgccaagttcccagcctttccatcgccgtcccgcatcctcgacggccacccaccttctcgctttagacgatacgatcattcatcgcataacccaacagaaggtctgggaaagattcaagatggctgatgacgagcagcagcctcagcccgagcccacgctgccgccagccgagcagatgcgccagaggcgactggccaagctgggcatgtcatcgtcgaccccatcagccgcatcgccgtcgaatccgcagcctgcctcgtcttctgcctcctcatcctcctcctcgtctgcaccacagccacagtcgcaaccacagtcgcaaccacagttctcctcatcctcgacaccaactgtagcgcccagccgatccatcaacatcacaccggcctccacatccacaccttccacgccgccggccaatcctttcgcccagctcacttctaagaagcaatcagaggaggcaactccagggacacccccggccaagaagaaggtctacacacccgcccctgagcagaatctggaggactggctcgaccgcctgctcggagatgtcttgcacgtcaccctcgaccgatcccgcgtcgctgacgcccgcggcaacccgctcacctacctgcccgagctcgccgccgagatcaccgagtccggggaacccctcaagctcagcacctcgtacatcgactccgccgtcctcgaggccgtcaagcacatcccccacagcacgcccctgctcgactacctgctgccctgctggaagcgcatgatgcgagcgagtaagcccgctcgtcgcccgtctcccgagcgagaagccgtcttgaaggaagccaggcgtttgtgcatgagcaactgcatcttcgccctttccatgccggagtatttcggccgagatgcgaacccgcagcatgacacccttgtgccctacctcctccgaaaccacgataacgaagatggtgtctgtctcgacttcttcacagaggccgtctcgcgcatggccgacgatgacgactccattgcgcccatattcacggatgccatggtggccatgagtgctcgggtcgccaccatgaccatgaacgacgactacaagccttatatcaactgcctcgtgacgtattcgcgattcccgcccctcctagacgccctcgcacgacatccccgtttccaggtgatcccaacaccagaaacgaccaaggagcagttggctctttcgaccgagctcttgaccatcctgggcccgttcttccggatctcgcctctccagaccgaggtcaccaagacctacttcgccagccctcgaacgattgatgctgggcacgtcaagtcatcccagtcggccctgcagatgacactcaaggcccaccaaggagatcttataggcatcgtaaacgcattcgtccgcgccagcaaggcggccaaggagagcatcctccaatggtttgccgttggcttgaatgccaaccacaagcggcgcgccctccaggtgaaggcgaccgacgttgcatctgatggcttcatggtcaatgtcacgcgcgtcttggacaagctttgcgagcccttcctcgactcgacattctccaagatcaataggatagacgtcgattatctccggcgggccccacgcgtcgacatgggcgacgagaccaaactgaacgcagaccaggccacctcggatgcgttctacaacaacagagttgacggcgaatcgaacttcatttccgaggttttcttcttgacgctcgcagctcatcattatgggcttggtgccaccaacgctaagctgaaagatcttgataaggatatcaaatatctggagaagctcatcaagcagatggaagaggaaatagccaaaatacaaaacgtgagtcgcctctctacctttctcgcttgatgaagtttgttaattttgtacagaatccgatggcagtgtcccgagccagaaatactcgagtcaacgccgtagccgctgttgagaaatatattgccctcaaacatgcgatacaaggtgttgttttagaccaggagatgcaaacactgtccttacagttcatgcgctatgtggctgtgtggctgctgcgcactgccagctcatccgattacgcgcctggaaagaagattggtcttcctctcgcgtcacaaaagccagcggcatttagctgcctacctgaatatgcactccaagacgtcgtcgagaacttcaagttcattttccggtttctaccacagattttgatgtccgcgctgggtgatgagatcatcaccctctgcatcacctttctcagatcctcagagtacataaagaacccctatttgaagtcttctcttgtcactttactattctctgggacttggccgctgtatcaccttagcaagggtgtactcggcgattcgcttatgggttctgagttcgcgaatgaacacttactccattcgctgatgaagttttacatcgaatgcgagcacagtggcgtcagctctgccttttatgacaagtttaatatccgttatgagatattccaggttatcaagacgatctggcccaacaacatctataaagagaagctcagcagagaaagcagggtgaaccgccagttcttcgtacaattcgtcaacttactgctcaacgatgccacgtacttgttagacgaggccttgacaaagcttggcaagattcacgactaccaaaaacagctacaggatcccaatctatctaccgaagaccgggacaaaatcaggacggacctagaacaggccgagcagcagtgtcaatcttggatgcagctggtcaacgacactatgggaatgatgaagctcttcactgaaactttgcgggactcctttaccatgccggagatcgtgactcgactggctggtatgctcaactacaatcttgagtctctggtcggaccgaagagagggcaactaaaggtcgaagatgctcaaaaataccatttcgacccgaagtcgttactgtccgatttcattgacgtctacctaaacttaagcacaaagccagacttcttgagagctgtcgcagctgatggacgctcttacaaacctgcaaacttcgaggcagcatctagactgattagaggtagtcttcagaagccgcctgaggtagccaccgcctgggcaaacttgatgcagaaagttgccaaggctaaagatgagatggaccaggccgaacttgacttgggtgagataccggaggactttgaggatcctctcatgggagagttgatgactgaccccgtcatcttgccgtctggtcatatcctggatcggtctaccatcgtacagcagctgctgtcaactcccaaagatccattctcaaacgtccagatgacgattgatgatgtgagacctgcagatgagttacgcgcaaggattgaggcttggaaagccgagcgaatagcactcgccaagagcagtgcgagtgatgcgatggatactagctctggttagagaaagggacgggagtctctatagcttttatgggcttgagtatgcgctatggtaaagctataatagaggttgctagaacaatcaacgttccgcactattagatccgtagcgaattgcctccgcggtttcacaacgttctgcgcagtttatccagctgtgagatcatatattacgataataaaggcacataatacaaataagggtaagtagaagggatatacatatctgaatagatctccgc

SEQ ID NO: 17559 - DNA, 1422 bp, Muscodor strobelii
  misc_feature: SGI cDNA ID NO. 565866
  misc_feature: Encodes the peptide sequence at SEQ ID NO 17560
atgaacgtagtaaagcaccttcggtccgccttgtctcccgaagcgtctatctacttccccgggtccgagggttacgaaaatgctacgaagagaggggattggggcggacctactttctcagttgcggtggctgttgcgacggaaagtgacgttcagaagacggttcaaattgccaatttgcttgctgttccattcttagcagtcgcaggttctcacggatctattagctcgcttgaaaaactgcagcatggtattgaaatatggctgagacgattgaacgcggtcgagctggctcaagatgggacgtcagccataatgggaggcggcattctgtcaatcgaggccaccaatgccctttgggcggctggaaaacagactgtatctggcgcttgtgattgtacctccttgttaggcccaggcctcggcggtgggtacggcatactgcagggccggtatggattagtgacagacacgctccttgagttgaccgttgtcttagcaaatggctccctggtgacggcgtctgaacactcccactccgacctattctgggccatgaaaggagcgggccacaactatggtattgtgacgtcgtttcgaaaagcggtgtttgacgtccccacggacgatgtatggtctgtttttgaatttgtattcacctctgataagcttgaagacgtttttgaagtcaccaatacgaattccaacttcaatgaagaaggaggtcagccgcctgttcagctgctttcctggatttcttatgagcgcatggtggatgtggacgccgttaagcctgttgtgcattactatctgctctggcagggcgaaccttcgcaagccgagccctacactgcgccgcttattgccctaggcccggttgtgtcgtctgtccagacggtttcgtatcccgaactcacgattgtcactggaagaggacttcaagatccagtgtgcgaagtgagggggtcgagtagacagcgcttcccgatcaacaccatgaagtacaacactacggcccagagacgtgtctttgacgtgtacgacgaatatacctctaaatatcctggactgaatacctcggtcctactgaatgagggttatcctttggagggagtgagagcggttccagccgagagtacagcttttcctcatcgcggaaagaacctgctgctatcgcctgtcatgagatacgtagatcctgcatatgcggatgcggcgcgagaaggtggtatgaagattcgaacagagtggcttgcaggctctggatctactcaattagatgcatatgcgaactatgccaatggagacgagactgtgcaggagctgtatggtcacgaggagtggcggatcgagaagttgaaggctgtcaagaagttatatgatccattgaacaagtttcggtattatgctcctattgtgtag

SEQ ID NO: 17560 - protein, 473 aa, Muscodor strobelii
  misc_feature: SGI Peptide ID NO. 565866
  misc_feature (428)..(473): Pfam Id: PF08031 Pfam Desc: Berberine and berberine like
  misc_feature (39)..(175): Pfam Id: PF01565 Pfam Desc: FAD binding domain
  misc_feature (428)..(468): Pfam Id: PF08031 Pfam Desc: Berberine and berberine like
  misc_feature (4)..(472): NCBI GI: 119473675 Blast Desc: FAD binding domain protein [Neosartorya fischeri NRRL 181] gi|119406866|gb|EAW16816.1| FAD binding domain protein [Neosartorya fischeri NRRL 181]
  misc_feature (4)..(472): NCBI GI: 70985799 Blast Desc: FAD-dependent oxygenase [Aspergillus fumigatus Af293] gi|66846034|gb|EAL86367.1| FAD-dependent oxygenase, [Aspergillus fumigatus Af293] gi|159128459|gb|EDP53574.1| FAD-dependent A1163]
  misc_feature (4)..(472): NCBI GI: 145234607 Blast Desc: An03g00460 [Aspergillus niger] gi|134057623|emb|CAK38023.1| protein product [Aspergillus niger]
  misc_feature (4)..(472): NCBI GI: 238491442 Blast Desc: FAD-dependent oxygenase, [Aspergillus flavus NRRL3357] gi|220697371|gb|EED53712.1| FAD-dependent oxygenase, [Aspergillus flavus NRRL3357]
  misc_feature (2)..(472): NCBI GI: 169777457 Blast Desc: [Aspergillus oryzae RIB40] gi|83771931|dbj|BAE62061.1| protein product [Aspergillus oryzae]
  misc_feature (2)..(472): NCBI GI: 169786187 Blast Desc: [Aspergillus oryzae RIB40] gi|83776302|dbj|BAE66421.1| protein product [Aspergillus oryzae]
  misc_feature (7)..(472): NCBI GI: 239609939 Blast Desc: FAD binding domain-containing protein [Ajellomyces dermatitidis ER-3]
  misc_feature (7)..(472): NCBI GI: 261198773 Blast Desc: FAD binding domain-containing protein [Ajellomyces dermatitidis SLH14081] gi|239594940|gb|EEQ77521.1| FAD binding domain-containing protein [Ajellomyces dermatitidis SLH14081]
  misc_feature (7)..(472): NCBI GI: 39975155 Blast Desc: MGG_00276 [Magnaporthe grisea 70-15] gi|145018851|gb|EDK03130.1| MGG_00276 [Magnaporthe grisea 70-15]
  misc_feature (5)..(472): NCBI GI: 189192595 Blast Desc: conserved [Pyrenophora tritici-repentis Pt-1C-BFP] gi|187978200|gb|EDU44826.1| conserved [Pyrenophora tritici-repentis Pt-1C-BFP]
MNVVKHLRSALSPEASIYFPGSEGYENATKRGDWGGPTFSVAVAVATESDVQKTVQIANLLAVPFLAVAGSHGSISSLEKLQHGIEIWLRRLNAVELAQDGTSAIMGGGILSIEATNALWAAGKQTVSGACDCTSLLGPGLGGGYGILQGRYGLVTDTLLELTVVLANGSLVTASEHSHSDLFWAMKGAGHNYGIVTSFRKAVFDVPTDDVWSVFEFVFTSDKLEDVFEVTNTNSNFNEEGGQPPVQLLSWISYERMVDVDAVKPVVHYYLLWQGEPSQAEPYTAPLIALGPVVSSVQTVSYPELTIVTGRGLQDPVCEVRGSSRQRFPINTMKYNTTAQRRVFDVYDEYTSKYPGLNTSVLLNEGYPLEGVRAVPAESTAFPHRGKNLLLSPVMRYVDPAYADAAREGGMKIRTEWLAGSGSTQLDAYANYANGDETVQELYGHEEWRIEKLKAVKKLYDPLNKFRYYAPIV

SEQ ID NO: 17561 - DNA, 2466 bp, Muscodor strobelii
  misc_feature: SGI EST ID NO. CUFF.41231.1
  misc_feature: Variant of the nucleotide sequence at SEQ ID NO 17559
cagacagcagtgttggtttatggtccaactactttatcgttcgcctcccctcatcttacgcacgcacatttcaacgctccatctccaactcggtggcacttgttttgaccttctcaaccgacccctccggaatacgacgtatccggacctcgccaattactttgcactatcacttaagatgtctccacaactccgaatccgctcataccggttgatcgtccaagaccgccgagactctagtcggcggagtaagaagcggtgttgttaactggcgaggctcctatgtgtcgagatgtgccgatcttttgcggcaatctcttaccaatgaccttcggtggggctgaaatagatcgaaaaccctggcaagtgaaaacatgatgttaaactaaccttgccttgcctttgattgagagcattcaatgccttgtttatcatgtttctgaagacgtttcatttccttacggcctctctagccttggggtcggcggccactggctccgtagcttcctttgatgatgacacggaggcgggaattccgacaaatgcggagatcatgaacgtagtaaagcaccttcggtccgccttgtctcccgaagcgtctatctacttccccgggtccgagggttacgaaaatgctacgaagagaggggattggggcggacctactttctcagttgcggtggctgttgcgacggaaagtgacgttcagaagacggttcaaattgccaatttgcttgctgttccattcttagcagtcgcaggttctcacggatctattagctcgcttgaaaaactgcagcatggtattgaaatatggctgagacgattgaacgcggtcgagctggctcaagatgggacgtcagccataatgggaggcggcattctgtcaatcgaggccaccaatgccctttgggcggctggaaaacagactgtatctggcgcttgtgattgtacctccttgttaggcccaggcctcggcggtgggtacggcatactgcagggccggtatggattagtgacagacacgctccttgagttgaccgttgtcttagcaaatggctccctggtgacggcgtctgaacactcccactccgacctattctgggccatgaaaggagcgggccacaactatggtattgtgacgtcgtttcgaaaagcggtgtttgacgtccccacggacgatgtatggtctgtttttgaatttgtattcacctctgataagcttgaagacgtttttgaagtcaccaatacgaattccaacttcaatgaagaaggaggtcagccgcctgttcagctgctttcctggatttcttatgagcgcatggtggatgtggacgccgttaagcctgttgtgcattactatctgctctggcagggcgaaccttcgcaagccgagccctacactgcgccgcttattgccctaggcccggttgtgtcgtctgtccagacggtttcgtatcccgaactcacgattgtcactggaagaggacttcaagatccagtgtgcgaagtgagggggtcgagtagacagcgcttcccgatcaacaccatgaagtacaacactacggcccagagacgtgtctttgacgtgtacgacgaatatacctctaaatatcctggactgaatacctcggtcctactgaatgagggttatcctttggagggagtgagagcggttccagccgagagtacagcttttcctcatcgcggaaagaacctgctgctatcgcctgtcatgagatacgtagatcctgcatatgcggatgcggcgcgagaaggtggtatgaagattcgaacagagtggcttgcaggctctggatctactcaattagatgcatatgcgaactatgccaatggagacgagactgtgcaggagctgtatggtcacgaggagtggcggatcgagaagttgaaggctgtcaagaagttatatgatccattgaacaagtttcggtattatgctcctattgtgtagataattatctacagttgtcttattaagctaagttcactaagttcattataacaagttaagaagaagttatgctagagcaatagcatgtgagtatggagtcaaaaagggtcgtggatggcgcaatttcagatgtctctattcacacatgcatcacaggtcttcacggatgtgttatccgaaagtgacagcctggaagaaggcctgtcgcctgtctcgcctgtgcgctttgggcgggacggcactgtgggggagctaccccaccattgtgtggtgctctgaagtgagtggtggggcagatagatagctgacaatgctgtgaatgacagcagcagggcatggatgaaattaatgctacagcagctgaggttctgtacttgtacagacatcttaacagcacaggtaacatcgccttacaaacaaacatcatccatcccaactaaggcccaaatatgtcaatccagagttagatagaattgattcctattgattcc

SEQ ID NO: 17562 - DNA, 1419 bp, Muscodor strobelii
  misc_feature: SGI cDNA ID NO. 565867
  misc_feature: Encodes the peptide sequence at SEQ ID NO 17563
atgctgataccacaattagccagtgctgatcgcattattaatacttgccaaaagtacgttaaatgtaactcggtcctgcgaggtcgtgagcttactttaagtagtaatggaatttactcgatcgaagatccagggccgccgcccgcgggctactgtgctttaccggcaccgaaaacgttatcaataggggcctgggagagtccaacgggaggagcattcaccgtagagtcaatagcaccagctatttctactccggtgtcgactacaacatctttagtcgtgactgctgctgcaacaacagcagcagctcctgaagcttcaacaacaagagacccagcgatggcgggagccgagcctgctacgaatcttacaggaggtgccaaagcagctataggaatattttctgttctggcactattgtcagtcactgccatactcttgttcatatttcgtcgacgtaaaaagcgaaggagcatggcagcatccgagtcgctcgttgcgactcatcgccggagtagtccatattcagaaccgccgagtggttctcagacgcccctgatactaccacctccaacggcatccaccagaaaccttcccttgacaccgcctgcaagactcagtgacagaaggtacttacagtctattctcaaaaacggcaaattctatgatccagacacaccagctatcagtgaactggctctaccatcgacagctggacaagcgttagccaatggggcacggtcaactcgacctgagaagagaaccactgcgcacagtatcgtcttccctctagctacagaagcacctatgacgcattatgcacagagcagcgtctattcgctaagtagcggacacggccactcgacggtcacggtgcagtccatcaaagcaagctcgatccattcagggtcggcaacgataaccggcacgaacacaccacccctatctcctactcgactaggtcgctcctttgacgagcccgaggttctaaaccctgtaaacccttccggaccaccgccgacaagagccttacccgcacctccgctcaatcatcctaattcgccgacattctccgtatcatcgatgtcacctcaatcgccacggtcgccgacgttttcggctcgctccgcaatttgcaacaataacccagccgtgagcagcaaacagggtagtattaagacaccttctatttctgcgtcgaccaaggagctctgtgagctgacagagtcatacgcacgtgaggcgagagagtcttggggaagttggagtggctatggtggtggaggtgcaggtgtccagcccttagggagaaagagagggagcggaagtccgagaggaggaacagagaataaagcagagccaacacaacctgcagttattgaggagctggacttggagaaactaggtggtggatattga

SEQ ID NO: 17563 - protein, 472 aa, Muscodor strobelii
  misc_feature: SGI Peptide ID NO. 565867
  misc_feature (6)..(212): NCBI GI: 116199789 Blast Desc: CHGG_08050 [Chaetomium globosum CBS 148.51] gi|88179329|gb|EAQ86797.1| CHGG_08050 [Chaetomium globosum CBS 148.51]
  misc_feature (12)..(356): NCBI GI: 256730821 Blast Desc: NECHADRAFT_25441 [Nectria haematococca mpVI 77-13-4]
  misc_feature (12)..(356): NCBI GI: 46109190 Blast Desc: FG01477.1 [Gibberella zeae PH-1]
MLIPQLASADRIINTCQKYVKCNSVLRGRELTLSSNGIYSIEDPGPPPAGYCALPAPKTLSIGAWESPTGGAFTVESIAPAISTPVSTTTSLVVTAAATTAAAPEASTTRDPAMAGAEPATNLTGGAKAAIGIFSVLALLSVTAILLFIFRRRKKRRSMAASESLVATHRRSSPYSEPPSGSQTPLILPPPTASTRNLPLTPPARLSDRRYLQSILKNGKFYDPDTPAISELALPSTAGQALANGARSTRPEKRTTAHSIVFPLATEAPMTHYAQSSVYSLSSGHGHSTVTVQSIKASSIHSGSATITGTNTPPLSPTRLGRSFDEPEVLNPVNPSGPPPTRALPAPPLNHPNSPTFSVSSMSPQSPRSPTFSARSAICNNNPAVSSKQGSIKTPSISASTKELCELTESYAREARESWGSWSGYGGGGAGVQPLGRKRGSGSPRGGTENKAEPTQPAVIEELDLEKLGGGY

SEQ ID NO: 17564 - DNA, 239 bp, Muscodor strobelii
  misc_feature: SGI EST ID NO. CUFF.41239.0
  misc_feature: Variant of the nucleotide sequence at SEQ ID NO 17562
attctatgatccagacacaccagctatcagtgaactggctctaccatcgacagctggacaagcgttagccaatggggcacggtcaactcgacctgagaagagaaccactgcgcacagtatcgtcttccctctagctacagaagcacctatgacgcattatgcacagagcagcgtctattcgctaagtagcggacacggccactcgacggtcacggtgcagtccatcaaagcaagctcga

SEQ ID NO: 17565 - DNA, 993 bp, Muscodor strobelii
  misc_feature: SGI cDNA ID NO. 565868
  misc_feature: Reduced expression when VOC is produced
  misc_feature: Encodes the peptide sequence at SEQ ID NO 17566
atgcctactttaaaactaggtttactgattggactgttgagtctcactagtcaacaggttcaagcgaatcagtattcatacgatgttacaacattcagcgtgacaaagggcacgatacctcagccaagctcgactgagatcacggttacgccgcctctatcaacggtcttatacccaacgaccgtcgtcgacacgaccaccattgtcgacacaagcaccgttgttgatataagcacggtggttgacacgagcaccgttgtcgacactaccaccgttactgataccattactgacaccgttactgacacgtctactgtcgtcgatactactactataatcgacaccaccaccatcatcgacgtctcaacaaccaccgttaccgtctctacaacgcagtactccacgggtaccataactaagcttacaacgccgcctgcgtgtccaaccacttgtagtgtcgctgctggaaccgttcaactgttcttttggcccacaaacaatgattactcgtatccttcaacattcgtcgacacaaggatcgactacacttacacatcgccgtctgtgtacatcgtcataaataccatacacggcacaaactcactcggaaccgttggaccaagtggcacatcagtagtcttccctcttgacttaaatgaagtgtctacgttagaccccgccaatggtgcaacaaggcaactcgagctgagcgacttatacacgaactgccctcaaacggctgaccccgcagtaattgcaaccagtatcccagatggtcactgtgatttcagtctccttgcaccgaaaacagtcaaatctcaccggaggtattataatcacaacgaccgacgaagtgaccaccagtacgacagagccggcgacttccggggctacatcgaccgtggcaacgttgacgacatcttctgcagtcacttctactgtagcgacagaaacaacttctgctggcgtcacatcttctggagccacatctag

SEQ ID NO: 17566 - protein, 330 aa, Muscodor strobelii
  misc_feature: SGI Peptide ID NO. 565868
  misc_feature (147)..(283): NCBI GI: 171680522 Blast Desc: protein product [Podospora anserina] gi|170939888|emb|CAP65114.1| protein product [Podospora anserina]
  misc_feature (149)..(243): NCBI GI: 154300195 Blast Desc: [Botryotinia fuckeliana B05.10] gi|150856762|gb|EDN31954.1| [Botryotinia fuckeliana B05.10]
  misc_feature: Useful for introducing or modulating the production of volatile compounds
MPTLKLGLLIGLLSLTSQQVQANQYSYDVTTFSVTKGTIPQPSSTEITVTPPLSTVLYPTTVVDTTTIVDTSTVVDISTVVDTSTVVDTTTVTDTITDTVTDTSTVVDTTTIIDTTTIIDVSTTTVTVSTTQYSTGTITKLTTPPACPTTCSVAAGTVQLFFWPTNNDYSYPSTFVDTRIDYTYTSPSVYIVINTIHGTNSLGTVGPSGTSVVFPLDLNEVSTLDPANGATRQLELSDLYTNCPQTADPAVIATSIPDGHCDFSLLAPKTVKSHRRYYNHNDRRSDHQYDRAGDFRGYIDRGNVDDIFCSHFYCSDRNNFCWRHIFWSHI

SEQ ID NO: 17567 - DNA, 1969 bp, Muscodor strobelii
  misc_feature: SGI EST ID NO. CUFF.41311.0
  misc_feature: Variant of the nucleotide sequence at SEQ ID NO 17565
gatcaagagcctgggacttcgcgaatcgcgatgagtatttgtggcgacctgacaaggcgatggctgacaacaagacatgtcattcgctgacgacttcgggaaccaattgcatccgaatatcaccttgttcctcccaatgggcgctgtaaataatacgaggaatagtctgctctttgccacataaaacacatatacactacgtgacaatagtaaaccagtacgcatcttctctcgctattggaaactcttgctgtttgttttgcgtgttgtcacaaactctcaacttccctcgcttgtatcaatcattcacgcttggcttgattgccttatcccaatcgttgtgtttaacgctcgttcaagtcgttgcgcgaagggagacgaagatgcctactttaaaactaggtttactgattggactgttgagtctcactagtcaacaggttcaaggtgagtggcagtaatttcttcatgatgtcgttgactcacgaagattaatgggccaaaagcgaatcagtattcatacgatgttacaacattcagcgtgacaaagggcacgatacctcagccaagctcgactgagagtcagtcttatactttcaaaggcccagattcctcatcagactgcccgccagaaacagaaacaacgttctcaattacgtcgacaattgcatatcctacatgtgtagcaacaaccgaaacctcaacagtcacggttacgccgcctctatcaacggtcttatacccaacgaccgtcgtcgacacgaccaccattgtcgacacaagcaccgttgttgatataagcacggtggttgacacgagcaccgttgtcgacactaccaccgttactgataccattactgacaccgttactgacacgtctactgtcgtcgatactactactataatcgacaccaccaccatcatcgacgtctcaacaaccaccgttaccgtctctacaacgcagtactccacgggtaccataactaagcttacaacgccgcctgcgtgtccaaccacttgtagtgtcgctgctggaaccgttcaactgttcttttggcccacaaacaatgattactcgtatccttcaacattcgtcgacacaaggatcgactacacttacacatcgccgtctgtgtacatcgtcataaataccatacacggcacaaactcactcggaaccgttggaccaagtggcacatcagtagtcttccctcttgacttaaatgaagtgtctacgttagaccccgccaatggtgcaacaaggcaactcgagctgagcgacttatacacgaactgccctcaaacggctgaccccgcagtaattgcaaccagtatcccagatggtcactgtgatttcagtctccttgcaccgaaaacagtcaaatcgtgggctgaaccatgtggtgcctgtgagagactaggactcttcgatccaccttatgcgatcccgacagtcaccggaggtattataatcacaacgaccgacgaagtgaccaccagtacgacagagccggcgacttccggggctacatcgaccgtggcaacgttgacgacatcttctgcagtcacttctactgtagcgacagaaacaacttctgctggcgtcacatcttctggagccacatctagctcggatccaaccagctcaacttcttctgtacccactgccggaggaaactcaatcaaacttacttcaagcacattcttgatgtgcttcttcatctttgcatgctttttctaaagcaataatagccctaatgatacccaccattaatgacgatacggattgtatgtatactgagaaacagaaagctatacgagtaggatttggcgagggcgaccttttcaatgtcatgaaacttgaataggcgccatagatattgttttgtgtttaatagccattagacagaaatatgaacatagtcctacaccacaatcaatgcattgcaatagcaacgtgtacttttat

SEQ ID NO: 17568 - DNA, 1944 bp, Muscodor strobelii
  misc_feature: SGI cDNA ID NO. 565869
  misc_feature: Encodes the peptide sequence at SEQ ID NO 17569
atgctggcgctcttgttcacttcgacattgctatgctgtgctcttgcccgtggggtagatgtcgtggctcgcgcctcagcaaacaatagcaactcggcagttgtgatatcgcccagtcaatacttcgagggtaatgatggcccatggagcacctttgatctccgagttggcgaaaatcgtcaagatgtcagagtgatcgtgtccacggcatcgccagaatcatttgtggtactctcagggcctgggtgctcgagtgcagtatttccggaaggggtgcctgatgattgcggagtgtcacgaggcaacctgttcaaccccaatgattcaagcacatggaatttggtcggggactatggaatcaatcagaatggtgttggtctcgaggcgaatctcggatacgctgccaatgtgaccttcgctttggaaactttcggtataggactaacagggccaattcttgataaccagacggttgccggcctttattacccagaaccattctacctcgggttgtttggactaaacaatcagcctgtaaacttcagctcgctagggaactattcttcgccgtctttcattacaacgttaaaagatcagggtcaaatcccgagcttgagttggagttataccgccggtgcgaagtatcgtctcaaacaagtttacggccaactcattttctctggatacgatacatcccggttcaccgagaactcggtatctttcacgatggctgacgattacacgcgcgatcttgtagtctctcttcagtctattagttatagcggatcaacgacatccattctgctctccgattcaattgacatctttatcgattcgacggatcccaacttatggctacctgacgatgtatgcgatgctttcgagcaggctttcgggttaactattgatgatacgaccggtctgtatcttgtgaatgatacacatcgcgccacattgcagaattcgaatgcccaagttacgttcagagtgtctgatgtgatttcgggtggctctgctgtaacgatcactcttccctacgatgcattcgatcttcaagcagagagtccgctggtcaatgatacaagctattacttcccgctcaaacgggcagctaactcgacacaatacacgcttggtcggaccttcctacaagaagcctatcttacggcggactatgaacgcggtgtcttcaacgtatcagcatgcacgtggcaggaaggggccgagtctactatcgtcacgatcccgcccagtgatggtggttcatcagcatcaaacggctcacacaattcatcgtcgagtcttggcggaggtgctatagctggcatagtcattggctcgatatttggcgcgctactcataggcgctattgttatattctgccttcgtcgccaacggaagaaatccgaactcgttgcatccgacccggagcctgatatggctgttataactggtccagtgcataatctcagagcagcagcgtcaaccagaacagggaaattctattctccggagacgcttggtacgagcacgggcgcagcgaatagcgaaaatctcgcggaaagcaatgcaggaagtaacggggcaagccaacaagagcttgatgctgaagagacagagattcaaccacccactgaactcgatgccagcgatgcgcgcgaagagacaagtgtaccagacaaaaagccaacatatcatgaattaggaggcaaagaaatagcgaaagcagacggcgatcaaatatctacacttggtgtcctacctacccacagcaggagagaagatgaagaagtcgaagatagtatcgattcgccctttgtatcaacattgggaacaatggggtggcagggtgaagacggtgatcggtcttcagatctgatatcacctgtcacacctgttcatgacaaccgtttttcgaggtcacctgcccgagacgctgactga

SEQ ID NO: 17569 - protein, 647 aa, Muscodor strobelii
  misc_feature: SGI Peptide ID NO. 565869
  misc_feature (25)..(418): NCBI GI: 256721557 Blast Desc: NECHADRAFT_78521 [Nectria haematococca mpVI 77-13-4]
  misc_feature (118)..(468): NCBI GI: 154300193 Blast Desc: BC1G_10472 [Botryotinia fuckeliana B05.10] gi|150856761|gb|EDN31953.1| BC1G_10472 [Botryotinia fuckeliana B05.10]
  misc_feature (32)..(473): NCBI GI: 169605479 Blast Desc: SNOG_05763 [Phaeosphaeria nodorum SN15] gi|111065707|gb|EAT86827.1| SNOG_05763 [Phaeosphaeria nodorum SN15]
  misc_feature (35)..(453): NCBI GI: 189199240 Blast Desc: conserved [Pyrenophora tritici-repentis Pt-1C-BFP] gi|187983056|gb|EDU48544.1| conserved [Pyrenophora tritici-repentis Pt-1C-BFP]
  misc_feature (35)..(457): NCBI GI: 169608932 Blast Desc: SNOG_07550 [Phaeosphaeria nodorum SN15] gi|111063896|gb|EAT85016.1| SNOG_07550 [Phaeosphaeria nodorum SN15]
  misc_feature (32)..(577): NCBI GI: 189193117 Blast Desc: conserved [Pyrenophora tritici-repentis Pt-1C-BFP] gi|187978461|gb|EDU45087.1| conserved [Pyrenophora tritici-repentis Pt-1C-BFP]
  misc_feature (275)..(632): NCBI GI: 171680524 Blast Desc: protein product [Podospora anserina] gi|170939889|emb|CAP65115.1| protein product [Podospora anserina]
  misc_feature (36)..(495): NCBI GI: 238840396 Blast Desc: conserved [Microsporum canis CBS 113480]
  misc_feature (35)..(491): NCBI GI: 166163611 Blast Desc: aspartyl protease-containing protein [Leptosphaeria maculans]
  misc_feature (35)..(633): NCBI GI: 189199728 Blast Desc: conserved [Pyrenophora tritici-repentis Pt-1C-BFP] gi|187983300|gb|EDU48788.1| conserved [Pyrenophora tritici-repentis Pt-1C-BFP]
MLALLFTSTLLCCALARGVDVVARASANNSNSAVVISPSQYFEGNDGPWSTFDLRVGENRQDVRVIVSTASPESFVVLSGPGCSSAVFPEGVPDDCGVSRGNLFNPNDSSTWNLVGDYGINQNGVGLEANLGYAANVTFALETFGIGLTGPILDNQTVAGLYYPEPFYLGLFGLNNQPVNFSSLGNYSSPSFITTLKDQGQIPSLSWSYTAGAKYRLKQVYGQLIFSGYDTSRFTENSVSFTMADDYTRDLVVSLQSISYSGSTTSILLSDSIDIFIDSTDPNLWLPDDVCDAFEQAFGLTIDDTTGLYLVNDTHRATLQNSNAQVTFRVSDVISGGSAVTITLPYDAFDLQAESPLVNDTSYYFPLKRAANSTQYTLGRTFLQEAYLTADYERGVFNVSACTWQEGAESTIVTIPPSDGGSSASNGSHNSSSSLGGGAIAGIVIGSIFGALLIGAIVIFCLRRQRKKSELVASDPEPDMAVITGPVHNLRAAASTRTGKFYSPETLGTSTGAANSENLAESNAGSNGASQQELDAEETEIQPPTELDASDAREETSVPDKKPTYHELGGKEIAKADGDQISTLGVLPTHSRREDEEVEDSIDSPFVSTLGTMGWQGEDGDRSSDLISPVTPVHDNRFSRSPARDAD

SEQ ID NO: 17570 - DNA, 3663 bp, Muscodor strobelii
  misc_feature: SGI EST ID NO. CUFF.41247.0
  misc_feature: Variant of the nucleotide sequence at SEQ ID NO 17568
cagggatcagagctgtgatgacgatggttgcattgggcacaacctgtcttcggagctttagctgcggaggtgacaggggttccaactgaccagttgagccagtgtcgactcccaattgagaacaagagacaaaacaagaaaggttgggacaacaacgcaatcgtgccgctggttgctgtcgagctgtcgaaagcttggggttgatcggcagcaaccttgcaaactagagggcacacgaacatgtatcatgacatacttgcgttcctcctcatatcttgattcttagacaacatagagtatgccaaagtcagtgaatgctgcatcattttccaaagaatcgcattgtacttgatcgacctacacacggcattaaaatggtctagtgaacacgagttgatgttttgaattggaaagaaattctcatattgccatgctggcgctcttgttcacttcgacattgctatgctgtgctcttgcccgtggggtagatgtcgtggctcgcgcctcagcaaacaatagcaactcggcagttgtgatatcgcccagtcaatacttcgagggtaatgatggcccatggagcacctttgatctccgagttggcgaaaatcgtcaagatgtcagagtgatcgtgtccacggcatcgccagaatcatttgtggtactctcagggcctgggtgctcgagtgcagtatttccggaaggggtgcctgatgattgcggagtgtcacgaggcaacctgttcaaccccaatgattcaagcacatggaatttggtcggggactatggaatcaatcagaatggtgttggtctcgaggcgaatctcggatacgctgccaatgtgaccttcgctttggaaactttcggtataggactaacagggccaattcttgataaccagacggttgccggcctttattacccagaaccattctacctcgggttgtttggactaaacaatcagcctgtaaacttcagctcgctagggaactattcttcgccgtctttcattacaacgttaaaagatcagggtcaaatcccgagcttgagttggagttataccgccggtgcgaagtatcgtctcaaacaagtttacggccaactcattttctctggatacgatacatcccggttcaccgagaactcggtatctttcacgatggctgacgattacacgcgcgatcttgtagtctctcttcagtctattagttatagcggatcaacgacatccattctgctctccgattcaattgacatctttatcgattcgacggatcccaacttatggctacctgacgatgtatgcgatgctttcgagcaggctttcgggttaactattgatgatacgaccggtctgtatcttgtgaatgatacacatcgcgccacattgcagaattcgaatgcccaagttacgttcagagtgtctgatgtgatttcgggtggctctgctgtaacgatcactcttccctacgatgcattcgatcttcaagcagagagtccgctggtcaatgatacaagctattacttcccgctcaaacgggcagctaactcgacacaatacacgcttggtcggaccttcctacaagaagcctatcttacggcggactatgaacgcggtgtcttcaacgtatcagcatgcacgtggcaggaaggggccgagtctactatcgtcacgatcccgcccagtgatggtggttcatcagcatcaaacggctcacacaattcatcgtcgagtcttggcggaggtgctatagctggcatagtcattggctcgatatttggcgcgctactcataggcgctattgttatattctgccttcgtcgccaacggaagaaatccgaactcgttgcatccgacccggagcctgatatggctgttataactggtccagtgcataatctcagagcagcagcgtcaaccagaacagggaaattctattctccggagacgcttggtacgagcacgggcgcagcgaatagcgaaaatctcgcggaaagcaatgcaggaagtaacggggcaagccaacaagagcttgatgctgaagagacagagattcaaccacccactgaactcgatgccagcgatgcgcgcgaagagacaagtgtaccagacaaaaagccaacatatcatgaattaggaggcaaagaaatagcgaaagcagacggcgatcaaatatctacacttggtgtcctacctacccacagcaggagagaagatgaagaagtcgaagatagtatcgattcgccctttgtatcaacattgggaacaatggggtggcagggtgaagacggtgatcggtcttcagatctgatatcacctgtcacacctgttcatgacaaccgtttttcgaggtcacctgcccgagacgctgactgatcctatctgggtaccgagacgagagtcggatactatagtaatgatattgtacatcgatgagcccatattggaagaggctatatacgtgtatttatgatgtatacaccttgtatatattgtcaaaagcgaaggttgattaatcgagattacgattccggtaatgatggaccgcatttcaattacaagcaagagattcctccccttaggctcatggatatgccaactagcatcaaaggagatctatatgcaccatattcgacgtagtatgcgaaaatggctatctggagcgttggttcatggaagcttgagattaggtggctaggctgagttccaatttcagtcatggcctgacagagtcacatgacagagggcttgtgctctgcgactagagtagtggaaagttcggcttctctggagacagaggagccatatcgtcaagctcataaaacatggtctagatttacatgcatcgccgacctttcgtgcaacgtgccacagagcgtagcccatcacaacgaaactgatttatcttgtcgcattcacggcccgtttctccttcacaccccatgcacaaggtccaccccgcatccggtgacggcaaagaaccaggtcctcgcaatacgttctttcaaccgtgcgtgcacataaaggtatttggcataattggggcgcagaattgtagaccatcggcctactcttaggtaatacagtatcgactaaagtatcaatcgccacccgcccaagtatatttcaaacctataatctgtatttaattgagtctgaacccattgaagctcgccattgagcttcgatggcctttttggcagaaatttcttgagatggtcagtttagggtccagcctctcaatttccagggtctcgagtccgaagattgacgagattggtggaataaaccaggataagctggaagaattcccctgccagtggactcactaaccccaggttccccaaattccccaagatgtttgctcaacgatcacaagattcgaagcgtataattggaccgcgtctagtatttggaggaataaatcctaggtcacgatggcatcgaaagccgtgggccgatgcggccgatggaacctcgctaccatgctgcaggtagtcgacaggcaagtcaatggtagcttataatgcaacgtgcgcccagctgaatgccatcgttgactgtcgacgagctgggactcgttgtgtagcttcgaagtgtaaaccaagccttacttactgagagtcacgtatttgtggactcgccatggcatcagcagtggaagt

SEQ ID NO: 17571 - DNA, 1629 bp, Muscodor strobelii
  misc_feature: SGI cDNA ID NO. 565870
  misc_feature: Encodes the peptide sequence at SEQ ID NO 17572
atggcatcagcagtggaagtgaccacagcccagaagatcgccgatagggatcttgaagagaaactgggacatggcgcaatcttcgaggcgaagaaggcagccgacgacgagcacgcccaaacacttcgcgaagctctccgagagaatcgcaaggccgtcatttggtcattcctgatctccttgacaatcattatggaaggctatgacacgattctcattagtacatttttcgcctatcctgagtttaacaagaagtatggacaatactaccccgatctcgacatatatcaagtcccgggcccatggcagacgggactcaaccaagcgagtacagctggtgcaatcattggtggtttgctcaatggttatattgcacaaaagttcggatatcgatgggtcatgattgtatcgctgggcttaatcaacttcttcatcctaattgtgttcctggcccaagatcttaagacccttcttgccggcgaggtcctctgcggtctttcgtggggcgtatttgccacgttggctccagcttatgcttccgaagtctgtccaacaaatcttcgtggatatatgacgacttatgtcaacctttgctgggctactggtcagctcatagctgctggagttctgcaaggttgcctcaccattgagggacaatgggcgtatcgtatcccttttgctgtccaatggatttggcccatccccttgatggtggtgtgctacttcgcacccgagagtccctggtggcttgtccgagccaatcgtttggaacaagctaagcattcgataaggagattaaccggtggaaagacggaagagcagatcaacaaccaagttgccatgatggttcacaccactacaatggaatcggaagcaacaaaaggcgcagaatacaccgactgtttcaagggttcgaacttgcgccgcacagaaatagtatgcttcgccttcgcgggacagattttgtctggaagcactttcgcctacactcctacttatttctttacacaagccggcctgcccacgtcgggcgccttcagtctgagccttggcgctaaggcgtttggtttcctgggaacactctcttcctggtttctcatcacaagatggggtcggcgaactctatacgtgaatggggtcggattcctatcgctaatcctattcataattggaatcttaagcgtttccgccgggacgagaggcctctggccatctggtggactttgcgttctatggcttttcgtctactcgctcacagttgggcctctagcatacagtatcatatccgaaacatcgtcagttcgacttcgacccctatctgttgtgctttcgcgaacgagctaccagattatcaacatcatttcacaattcttgaacacgtacatggtcagtaagacagagtggaactggtctggcaaaagtggcttcttctggggcggcaccgcgtttatcactttcgtttgggcatacttccgcctaccggagatcaaaggccgtacctacgaagagttggatatcttgttcatgaacaaggtcccggcacgtcagttctcaaagactcatgtcgacgcatatgccgatgtacgatcagaggatacgatggatgtgagtcataaaggagaggagtga

SEQ ID NO: 17572 - protein, 542 aa, Muscodor strobelii
  misc_feature: SGI Peptide ID NO. 565870
  misc_feature (59)..(456): Pfam Id: PF07690 Pfam Desc: Major Facilitator Superfamily
  misc_feature (55)..(508): Pfam Id: PF00083 Pfam Desc: Sugar (and other) transporter
  misc_feature (109)..(247): Pfam Id: PF07690 Pfam Desc: Major Facilitator Superfamily
  misc_feature (58)..(542): NCBI GI: 116203077 Blast Desc: CHGG_09423 [Chaetomium globosum CBS 148.51] gi|88177941|gb|EAQ85409.1| CHGG_09423 [Chaetomium globosum CBS 148.51]
  misc_feature (11)..(526): NCBI GI: 212538571 Blast Desc: maltose permease, [Penicillium marneffei ATCC 18224] gi|210069183|gb|EEA23274.1| maltose permease, [Penicillium marneffei ATCC 18224]
  misc_feature (8)..(541): NCBI GI: 115492863 Blast Desc: ATEG_00973 [Aspergillus terreus NIH2624] gi|114197919|gb|EAU39619.1| ATEG_00973 [Aspergillus terreus NIH2624]
  misc_feature (1)..(542): NCBI GI: 255930847 Blast Desc: Pc12g00780 [Penicillium chrysogenum Wisconsin 54-1255] gi|211581599|emb|CAP79705.1| Pc12g00780 [Penicillium chrysogenum Wisconsin 54-1255]
  misc_feature (11)..(526): NCBI GI: 242806427 Blast Desc: sugar transporter, [Talaromyces stipitatus ATCC 10500] gi|218715366|gb|EED14788.1| sugar transporter, [Talaromyces stipitatus ATCC 10500]
  misc_feature (29)..(525): NCBI GI: 169766646 Blast Desc: [Aspergillus oryzae RIB40] gi|83765649|dbj|BAE55792.1| protein product [Aspergillus oryzae]
  misc_feature (29)..(525): NCBI GI: 238483399 Blast Desc: sugar transporter, [Aspergillus flavus NRRL3357] gi|220700988|gb|EED57326.1| sugar transporter, [Aspergillus flavus NRRL3357]
  misc_feature (38)..(525): NCBI GI: 256728327 Blast Desc: NECHADRAFT_97753 [Nectria haematococca mpVI 77-13-4]
  misc_feature (30)..(527): NCBI GI: 149209083 Blast Desc: MGCH7_ch7g34 [Magnaporthe grisea 70-15] gi|86195989|gb|EAQ70627.1| MGCH7_ch7g34 [Magnaporthe grisea 70-15]
  misc_feature (30)..(527): NCBI GI: 145614969 Blast Desc: MGG_09607 [Magnaporthe grisea 70-15] gi|145021852|gb|EDK05929.1| MGG_09607 [Magnaporthe grisea 70-15]
MASAVEVTTAQKIADRDLEEKLGHGAIFEAKKAADDEHAQTLREALRENRKAVIWSFLISLTIIMEGYDTILISTFFAYPEFNKKYGQYYPDLDIYQVPGPWQTGLNQASTAGAIIGGLLNGYIAQKFGYRWVMIVSLGLINFFILIVFLAQDLKTLLAGEVLCGLSWGVFATLAPAYASEVCPTNLRGYMTTYVNLCWATGQLIAAGVLQGCLTIEGQWAYRIPFAVQWIWPIPLMVVCYFAPESPWWLVRANRLEQAKHSIRRLTGGKTEEQINNQVAMMVHTTTMESEATKGAEYTDCFKGSNLRRTEIVCFAFAGQILSGSTFAYTPTYFFTQAGLPTSGAFSLSLGAKAFGFLGTLSSWFLITRWGRRTLYVNGVGFLSLILFIIGILSVSAGTRGLWPSGGLCVLWLFVYSLTVGPLAYSIISETSSVRLRPLSVVLSRTSYQIINIISQFLNTYMVSKTEWNWSGKSGFFWGGTAFITFVWAYFRLPEIKGRTYEELDILFMNKVPARQFSKTHVDAYADVRSEDTMDVSHKGEE

SEQ ID NO: 17573 - DNA, 2006 bp, Muscodor strobelii
  misc_feature: SGI EST ID NO. CUFF.41254.0
  misc_feature: Variant of the nucleotide sequence at SEQ ID NO 17571
cttcgcgaagctctccgagagaatcgcaaggccgtcatttggtcattcctgatctccttgacaatcattatggaaggctatgacacgattctcattagtacatttttcgcctatcctgagtttaacaagaagtatggacaatactaccccgatctcgacatatatcaagtcccgggcccatggcagacgggactcaaccaagcgagtacagctggtgcaatcattggtggtttgctcaatggttatattgcacaaaagttcggatatcgatgggtcatgattgtatcgctgggcttaatcaacttcttcatcctaattgtgttcctggcccaagatcttaagacccttcttgccggcgaggtcctctgcggtctttcgtggggcgtatttgccacgttggctccagcttatgcttccgaagtctgtccaacaaatcttcgtggatatatgacgacttatgtcaacctttgctgggctactggtcagctcatagctgctggagttctgcaaggttgcctcaccattgagggacaatgggcgtatcgtatcccttttgctgtccaatggatttggcccatccccttgatggtggtgtgctacttcgcacccgagagtccctggtggcttgtccgagccaatcgtttggaacaagctaagcattcgataaggagattaaccggtggaaagacggaagagcagatcaacaaccaagttgccatgatggttcacaccactacaatggaatcggaagcaacaaaaggcgcagaatacaccgactgtttcaagggttcgaacttgcgccgcacagaaatagtatgcttcgccttcgcgggacagattttgtctggaagcactttcgcctacactcctacttatttctttacacaagccggcctgcccacgtcgggcgccttcagtctgagccttggcgctaaggcgtttggtttcctgggaacactctcttcctggtttctcatcacaagatggggtcggcgaactctatacgtgaatggggtcggattcctatcgctaatcctattcataattggaatcttaagcgtttccgccgggacgagaggcctctggccatctggtggactttgcgttctatggcttttcgtctactcgctcacagttgggcctctagcatacagtatcatatccgaaacatcgtcagttcgacttcgacccctatctgttgtgctttcgcgaacgagctaccagattatcaacatcatttcacaattcttgaacacgtacatggtcagtaagacagagtggaactggtctggcaaaagtggcttcttctggggcggcaccgcgtttatcactttcgtttgggcatacttccgcctaccggagatcaaaggccgtacctacgaagagttggatatcttgttcatgaacaaggtcccggcacgtcagttctcaaagactcatgtcgacgcatatgccgatgtacgatcagaggatacgatggatgtgagtcataaaggagaggagtgaataggaagatgattgccattggtatcgcaaagtgcgcatttaggtttactatatggttactcggatagcacaactgtcttgccgtatgtcttgatgtgaaagcatccgcggcgatatattgtacattgtcacattgtcgagcatcacaatatgtgaggattccagattgtgaccctcccctgctaaatggagaatccttggtgattcagcactgtctatcttactactgttctaaacaattggtccgcgagctgaatcgatactagctacattcacgacttcattatgattgtctagacgggctattttcagagctgcgcgcaaattgataaaaccatgcacacaacatcaagaggtgcgttatcttcgagcagattacccaactctaccaaggaatctaaacagaacatggcttcgcaaagtgttagttcctccgccgcacaaactgcgctcggggtcccagagctccttcacatgattctcatggaaaccgataaacg

SEQ ID NO: 17574 - DNA, 504 bp, Muscodor strobelii
  misc_feature: SGI cDNA ID NO. 565871
  misc_feature: Encodes the peptide sequence at SEQ ID NO 17575
atgttcgcagttcaccacgtccgctactcaccaaagttctatgggctggttaatgatacacactggcgacaaatccttagcctcatagcgctggcatctggccttgttgctgctggatgcctcatactgctctcgatttttgataccgtcgatgcacatcgtccacatctatatctattgatgggtacctttgcaggcctatgcgtgagcgcgcttaccactacggtcgtgtggtgggaccagactgccggcccagttgtcttcgtcggcatacgaaaatggtgcatatttaatgtctgcttggtagtatgtcaattcgttattggagttctattcattggattcttatactctggccacttcatggaatcgggaattttagaatggtgcattacctatatggggtccttctggttgatgtcatttataggctatactagatttcacgagggatacgaaccggagtttgagtcgcaaggagagcgcgagccattactaccatag

SEQ ID NO: 17575 - protein, 167 aa, Muscodor strobelii
  misc_feature: SGI Peptide ID NO. 565871
  misc_feature (5)..(167): NCBI GI: 238490013 Blast Desc: conserved [Aspergillus flavus NRRL3357] gi|220698632|gb|EED54972.1| conserved [Aspergillus flavus NRRL3357]
MFAVHHVRYSPKFYGLVNDTHWRQILSLIALASGLVAAGCLILLSIFDTVDAHRPHLYLLMGTFAGLCVSALTTTVVWWDQTAGPVVFVGIRKWCIFNVCLVVCQFVIGVLFIGFLYSGHFMESGILEWCITYMGSFWLMSFIGYTRFHEGYEPEFESQGEREPLLP

SEQ ID NO: 17576 - DNA, 1354 bp, Muscodor strobelii
  misc_feature: SGI EST ID NO. CUFF.41289.0
  misc_feature: Variant of the nucleotide sequence at SEQ ID NO 17574
tctatttcgtgaatctcatcgttaagctttcaggaaccgagcagacatcatggcgcggcgcctgtggtatgagattaccctccaggactttataagcaatcgcaatttatggctatttccgttatttgcaggaacaacatggtttctaacccttagcatattgttgatacgttggattagtatggggcagccacaatacccaggtcaagtcaatccatatgtgccttttatgtaagctatctttgctttcaagcagaagcagtattagaccaaacattcttcggcaaccagaacgaatgaccatgctgatacaactttatcttccagaagcgacatcgcggcgcaggttttccaaccagtgtttatagttggctgcgctactaccggaatatgctttcttggcacgatgttcgcagttcaccacgtccgctactcaccaaagttctatgggctggttaatgatacacactggcgacaaatccttagcctcatagcgctggcatctggccttgttgctgctggatgcctcatactgctctcgatttttgataccgtcgatgcacatcgtccacatctatatctattgatgggtacctttgcaggcctatgcgtgagcgcgcttaccactacggtcgtgtggtgggaccagactgccggcccagttgtcttcgtcggcatacgaaaatggtgcatatttaatgtctgcttggtagtatgtcaattcgttattggagttctattcattggattcttatactctggccacttcatggaatcgggaattttagaatggtgcattacctatatggggtccttctggttgatgtcatttataggctatactaggtatgtcttccaatgtaatgaggctggctacgttactgacggatatagatttcacgagggatacgaaccggagtttgagtcgcaaggagagcgcgagccattactaccatagacctagaattcacacaaataaagaaagcttaattagagaacatattcatgtgaaagttttacttgtctctcagatcagtactttttaattacaacatttgtaactatgtcccgacacataagtgagtatgaagtgtattgacttagagtatcgacgtttctctcacatgtaactggcttgtctaaactgttcattggtacgagtgcagtataaaatcacctcctaaatagctctccattccttaggaacctaaaagtattccgagttgccctatcatgtgttagcaattcatctaacaaccagttcatgaactagaaaggtgtccgttacttgtctggcttcctaccaaagtgagtaatctgtaacaagctgtcagcctcacgtcgctgatgagaa

SEQ ID NO: 17577 - DNA, 1221 bp, Muscodor strobelii
  misc_feature: SGI cDNA ID NO. 565872
  misc_feature: Reduced expression when VOC is produced
  misc_feature: Encodes the peptide sequence at SEQ ID NO 17578
atgccttcagcgagaaggccgtcggccagcgctgtggtggtaggagccgggcctggtgggatcacggttgttggcaacctcttagagtatggctccgaactgcaaacagacaaacaaccattggtctgggtagacccaaatttcaagggtggacgggtgaatgaccgctatcgcgaggtccccagcaataccaaagtcaatctctttgtacaatttgccaatgaagtatcagcttttaggactgtcttaaaaactacttctaagccgaatgcaattactgctctagagcagctgccccaagatcaaggatgccgtcttagctatgctgccgatatgtgccttatgctcacagacgggttagccaaggaccggagaatacagcaggagcaagccaatgtcgcgagcgccaccttggacgaacaaagaaatatctggatggtcaccttggacagcggcgagacatttgagtcgtctaaaatggttctctgcacgggttcgataccagtatcggctacgatatcggccattgaaaagatatcaacccccatgatatcagtcgatctagatacggcactcgctccctcgaaactggccaagactttcgatcctacagactccagcactgttgctgttgtcggtgcctctcactcagcaatcctagtactcatgaatctcgtcgcactggcccagtcatcacatccccatctccgtatcaagtggttcacccgcaacaaattacgttatgctgagtacatggatggatggatattgagggacaacacaggattgaaaggccaggctgcagattgggcccgcgacaatttagacgagaatacttttcccaagagccctgtcagtgactatatcaccaaggtatggacagccggcagagaggacgaggcatatgaggcagagcttcccgaatgcactcacatcgtccaggctgtaggctatgctcgaaaccctttgccacagctagagattgctccaaaatctgggggacctttgaagccactggaggtggagtacgataatatgagtggacggttctttgataaatcaggctcgaagcacgatcatattcccgggctattcggtgcaggaatcgccttcccagagcgcgttaccgatccacatggtaatgttgaatatgcggtcgggttttggaagttcatgaaatttatcaagaaagtcgtaccgaattgggttaatggttcttag

SEQ ID NO: 17578 - protein, 406 aa, Muscodor strobelii
  misc_feature: SGI Peptide ID NO. 565872
  misc_feature (9)..(403): NCBI GI: 70983436 Blast Desc: conserved [Aspergillus fumigatus Af293] gi|66844871|gb|EAL85207.1| conserved [Aspergillus fumigatus Af293] gi|159123749|gb|EDP48868.1| conserved [Aspergillus A1163]
  misc_feature (9)..(404): NCBI GI: 121719691 Blast Desc: conserved [Aspergillus clavatus NRRL 1] gi|119404756|gb|EAW15118.1| conserved [Aspergillus clavatus NRRL 1]
  misc_feature (9)..(402): NCBI GI: 238508435 Blast Desc: conserved [Aspergillus flavus NRRL3357] gi|220688930|gb|EED45282.1| conserved [Aspergillus flavus NRRL3357]
  misc_feature (9)..(403): NCBI GI: 255953661 Blast Desc: Pc21g05370 [Penicillium chrysogenum Wisconsin 54-1255] gi|211589294|emb|CAP95434.1| Pc21g05370 [Penicillium chrysogenum Wisconsin 54-1255]
  misc_feature (9)..(398): NCBI GI: 145253304 Blast Desc: An16g08670 [Aspergillus niger] gi|134083727|emb|CAK42966.1| protein product [Aspergillus niger]
  misc_feature (9)..(403): NCBI GI: 119484164 Blast Desc: NFIA_097110 [Neosartorya fischeri NRRL 181] gi|119410141|gb|EAW20088.1| conserved [Neosartorya fischeri NRRL 181]
  misc_feature (9)..(403): NCBI GI: 115491019 Blast Desc: conserved [Aspergillus terreus NIH2624] gi|114196997|gb|EAU38697.1| conserved [Aspergillus terreus NIH2624]
  misc_feature (10)..(403): NCBI GI: 242798975 Blast Desc: conserved [Talaromyces stipitatus ATCC 10500] gi|218716624|gb|EED16045.1| conserved [Talaromyces stipitatus ATCC 10500]
  misc_feature (10)..(403): NCBI GI: 212541346 Blast Desc: conserved [Penicillium marneffei ATCC 18224] gi|210068127|gb|EEA22219.1| conserved [Penicillium marneffei ATCC 18224]
  misc_feature (9)..(406): NCBI GI: 171684315 Blast Desc: protein product [Podospora anserina] gi|170942118|emb|CAP67770.1| protein product [Podospora anserina]
  misc_feature: Useful for introducing or modulating the production of volatile compounds
MPSARRPSASAVVVGAGPGGITVVGNLLEYGSELQTDKQPLVWVDPNFKGGRVNDRYREVPSNTKVNLFVQFANEVSAFRTVLKTTSKPNAITALEQLPQDQGCRLSYAADMCLMLTDGLAKDRRIQQEQANVASATLDEQRNIWMVTLDSGETFESSKMVLCTGSIPVSATISAIEKISTPMISVDLDTALAPSKLAKTFDPTDSSTVAVVGASHSAILVLMNLVALAQSSHPHLRIKWFTRNKLRYAEYMDGWILRDNTGLKGQAADWARDNLDENTFPKSPVSDYITKVWTAGREDEAYEAELPECTHIVQAVGYARNPLPQLEIAPKSGGPLKPLEVEYDNMSGRFFDKSGSKHDHIPGLFGAGIAFPERVTDPHGNVEYAVGFWKFMKFIKKVVPNWVNGS

SEQ ID NO: 17579 - DNA, 1609 bp, Muscodor strobelii
  misc_feature: SGI EST ID NO. CUFF.41272.0
  misc_feature: Variant of the nucleotide sequence at SEQ ID NO 17577
cgcagatgctggccagagctgggaactgagagaaatcctagtgccccacatggccgccggtcgcggttggcttacacgtagtcacattttaagaggtttccagccgactgttccaaccgatggcaccgttcaccgcaaaacgctgcacatcgtgagtagccgataacacgcggcgtacttcccgtgcgccagagtgtagatgtcgcacataatgtcgcgacgtcttcggaccttcagattatgcctggcgtctactaataagaatgtctgggacccggtgcctcagaccttaccgtccagcaaacatgcatcctttcgattctactcagctgcagtcaagatgccttcagcgagaaggccgtcggccagcgctgtggtggtaggagccgggcctggtgggatcacggttgttggcaacctcttagagtatggctccgaactgcaaacagacaaacaaccattggtctgggtagacccaaatttcaagggtggacgggtgaatgaccgctatcgcgaggtccccagcaataccaaagtcaatctctttgtacaatttgccaatgaagtatcagcttttaggactgtcttaaaaactacttctaagccgaatgcaattactgctctagagcagctgccccaagatcaaggatgccgtcttagctatgctgccgatatgtgccttatgctcacagacgggttagccaaggaccggagaatacagcaggagcaagccaatgtcgcgagcgccaccttggacgaacaaagaaatatctggatggtcaccttggacagcggcgagacatttgagtcgtctaaaatggttctctgcacgggttcgataccagtatcggctacgatatcggccattgaaaagatatcaacccccatgatatcagtcgatctagatacggcactcgctccctcgaaactggccaagactttcgatcctacagactccagcactgttgctgttgtcggtgcctctcactcagcaatcctagtactcatgaatctcgtcgcactggcccagtcatcacatccccatctccgtatcaagtggttcacccgcaacaaattacgttatgctgagtacatggatggatggatattgagggacaacacaggattgaaaggccaggctgcagattgggcccgcgacaatttagacgagaatacttttcccaagagccctgtcagtgactatatcaccaaggtatggacagccggcagagaggacgaggcatatgaggcagagcttcccgaatgcactcacatcgtccaggctgtaggctatgctcgaaaccctttgccacagctagagattgctccaaaatctgggggacctttgaagccactggaggtggagtacgataatatgagtggacggttctttgataaatcaggctcgaagcacgatcatattcccgggctattcggtgcaggaatcgccttcccagagcgcgttaccgatccacatggtaatgttgaatatgcggtcgggttttggaagttcatgaaatttatcaagaaagtcgtaccgaattgggttaatggttcttagacgctgcatatagattcatgattcgttcctcaaggacgccatctgaac

SEQ ID NO: 17580 - DNA, 2691 bp, Muscodor strobelii
  misc_feature: SGI cDNA ID NO. 565873
  misc_feature: Encodes the peptide sequence at SEQ ID NO 17581
atggccgaagaaactcaatttcagaccagcgaggttgaaaacacatccgcgccagaacatacgtccacagatgcgaacgaagccccagaaacgaacagccatgtctcacccgaggaaggcttgccagccacgattgacgagacagagctatcacatgacgacataattgcaactgattcagtcgatgcagatgcagcctccgaacagagttttacaatagaacaagaagcggacatctcgatggcaagtcatccagagcaaggacaagacgagtcagagttacaacccagtattgaatccgatgatgccgatgtcatacaagcccgaaaggacagatcagcgaacagctccagagcgtcctcacggaggccctctaagcggaccgaagatctaatccaccaggctgcaagagatattgttgctcaaatcgaacacgacaaacccactaacgagtccgatgtacagcaagatgatggagatgtctctcagctggaccagtccatgatttccgactcaacaccgagaatggatgatggcgcagaaagtagctcacagcatgatgacgatgtcttcagcgataagagttatcgtagctcattgggttcttatgatggtggttcagagtcaggcaaaaaggtggacttggacaatatgacgacaattacccgctctcctcggatctcagatatttcccagtatgacaaggaagacttcattcccaccgcacgaggaaccccgcgacctgctttccgcacaccatccgacattcgagcaatgcaaatgtcatcacctcccgcatctgtccttggctctccaagatcgactcggaagcatttcccgacagtctccagattaggcacaccgtcggcctcagcacaatactctcccagaaggcggtctacaccggagcgattcaaatcgcgacaggaacctccccttgtgcttctccatgtgacacttctgccgctgcgatggatgtggggtgatcttgtcaacaacctcgaccctgctgatatgagcgaacaaacgaagacattacgcgattcgtggcgcatcctgcaggatcgagtgggagacacgaccatcgagagaggcatccttcttggtcatcctcagaacgactacgaggttctcgaggagcgtctgctagaagcattggatttgcctgttcgtcggcgcgcacggatcttggaatgtggccactacctcggaccctctaatgagaacactatcgcagaagaagatgaggatagcgatgacggctacggccaagagcgccgcaaatcagggccaaaacgtcactggtgcggaacttgcaagaacgagattcgatatgatgcactcggtgatgccaagatctttcgtgtgaaggtctacgccagcaacggtcttatgagggccggtgcctgggacgcttgctggaaagagatggaacgtgtcgatgtcgaaattgaacctatcgttgagccttcaatccaagatgagattgttcgtctcgctgctgtgcagcaagagcgtgagatggcgcaacaggaggaggctgagatcgcaaagcaagtcgcacaacagtttgaggagcaccggcaaagtgaggaacgactcctgctccaagcagaagcggagttggcagcctcatcaccacctcctcttccagagattgcagcaagccctgtgccagaaccgacgccagaaccgacgccagagcacgcacgtgaatccagggcttcccgacgccgtcatgaagatgaagataggttacgtgagatatatggacagaccccggtagcccaggagtctacgtctaattcacgacagccaagttctcaccatcacccagactcatatatccccccaccaactcctcgctctccatcagaagaggcttatcaacgtagggaaacgcggcgccgtagccaccagtctgattccctgcctgaactcctcctgcagtccttcagagtgctcatgcgagacagcaagaatgttgctatcctgactctcagtgtcgccgttctgatattcgctatgcgcaagagtcccgcccatgatgagtacagaatgcagccggtcatgcccatggcggagtcggctcctgagatgcaagcccaagcacctcaggctatgcaccaagagacaacccagagcagggtaacagaccatgttgttacgacgccaagttcagagccccaagcgagtgttgcctaccaagagcctgctccggttgtcagcatggcatctcaagcaccgcctcctccggctgaggagacgcactcggctagccccagcgtctcgacggtctatgaaccctgcgagacaccgacgagctcatctgcctcggttgaagtccagccacaggagacggagatcgtaacggagaagaaagtggtcaagattgtccagacggtcaccgaaacacagactgagtatgaaactgcgacagctgtggagacgatcaagatcaaggctaccgaaatggcacaacctgaagcggatcagacggaagttgaagcggatatgcctgcagacgacgttgaagctgaagctgtgctcgtaaaggaaatcgagactccaaacgaggacgaaattgaacgccaggccactgatatagaggcagcggccatcgaggaatctgatgtccacgtacctgataccgaagtacctgacatccaggttgaaggagccgatgtctag

SEQ ID NO: 17581 - protein, 896 aa, Muscodor strobelii
  misc_feature: SGI Peptide ID NO. 565873
  misc_feature (81)..(792): NCBI GI: 261357228 Blast Desc: conserved [Verticillium albo-atrum VaMs.102]
  misc_feature (122)..(533): NCBI GI: 256730721 Blast Desc: NECHADRAFT_74101 [Nectria haematococca mpVI 77-13-4]
  misc_feature (125)..(509): NCBI GI: 46109504 Blast Desc: FG01634.1 [Gibberella zeae PH-1]
  misc_feature (106)..(525): NCBI GI: 39942412 Blast Desc: MGG_03286 [Magnaporthe grisea 70-15] gi|145015709|gb|EDK00199.1| MGG_03286 [Magnaporthe grisea 70-15]
  misc_feature (177)..(513): NCBI GI: 171689686 Blast Desc: protein product [Podospora anserina] gi|170944805|emb|CAP70917.1| protein product [Podospora anserina]
  misc_feature (187)..(499): NCBI GI: 156043994 Blast Desc: SS1G_10100 [Sclerotinia sclerotiorum 1980] gi|154694489|gb|EDN94227.1| SS1G_10100 [Sclerotinia sclerotiorum 1980]
  misc_feature (243)..(499): NCBI GI: 154320353 Blast Desc: BC1G_02157 [Botryotinia fuckeliana B05.10] gi|150854896|gb|EDN30088.1| BC1G_02157 [Botryotinia fuckeliana B05.10]
  misc_feature (177)..(676): NCBI GI: 189209097 Blast Desc: [Pyrenophora tritici-repentis Pt-1C-BFP] gi|187976974|gb|EDU43600.1| [Pyrenophora tritici-repentis Pt-1C-BFP]
  misc_feature (239)..(532): NCBI GI: 169599288 Blast Desc: SNOG_02462 [Phaeosphaeria nodorum SN15] gi|160704571|gb|EAT90674.2| SNOG_02462 [Phaeosphaeria nodorum SN15]
  misc_feature (249)..(496): NCBI GI: 119494836 Blast Desc: NFIA_010050 [Neosartorya fischeri NRRL 181] gi|119412383|gb|EAW22324.1| conserved [Neosartorya fischeri NRRL 181]
MAEETQFQTSEVENTSAPEHTSTDANEAPETNSHVSPEEGLPATIDETELSHDDIIATDSVDADAASEQSFTIEQEADISMASHPEQGQDESELQPSIESDDADVIQARKDRSANSSRASSRRPSKRTEDLIHQAARDIVAQIEHDKPTNESDVQQDDGDVSQLDQSMISDSTPRMDDGAESSSQHDDDVFSDKSYRSSLGSYDGGSESGKKVDLDNMTTITRSPRISDISQYDKEDFIPTARGTPRPAFRTPSDIRAMQMSSPPASVLGSPRSTRKHFPTVSRLGTPSASAQYSPRRRSTPERFKSRQEPPLVLLHVTLLPLRWMWGDLVNNLDPADMSEQTKTLRDSWRILQDRVGDTTIERGILLGHPQNDYEVLEERLLEALDLPVRRRARILECGHYLGPSNENTIAEEDEDSDDGYGQERRKSGPKRHWCGTCKNEIRYDALGDAKIFRVKVYASNGLMRAGAWDACWKEMERVDVEIEPIVEPSIQDEIVRLAAVQQEREMAQQEEAEIAKQVAQQFEEHRQSEERLLLQAEAELAASSPPPLPEIAASPVPEPTPEPTPEHARESRASRRRHEDEDRLREIYGQTPVAQESTSNSRQPSSHHHPDSYIPPPTPRSPSEEAYQRRETRRRSHQSDSLPELLLQSFRVLMRDSKNVAILTLSVAVLIFAMRKSPAHDEYRMQPVMPMAESAPEMQAQAPQAMHQETTQSRVTDHVVTTPSSEPQASVAYQEPAPVVSMASQAPPPPAEETHSASPSVSTVYEPCETPTSSSASVEVQPQETEIVTEKKVVKIVQTVTETQTEYETATAVETIKIKATEMAQPEADQTEVEADMPADDVEAEAVLVKEIETPNEDEIERQATDIEAAAIEESDVHVPDTEVPDIQVEGADV

SEQ ID NO: 17582 - DNA, 3589 bp, Muscodor strobelii
  misc_feature: SGI EST ID NO. CUFF.41275.0
  misc_feature: Variant of the nucleotide sequence at SEQ ID NO 17580
aaatgatcaagttaatatatgccatgttgacttattagaatttggaaggcagataattgcagacaaaaaagttgggtcccaacgacagctacgtcccagttgacagggcaaccaacgtcaacagtactctgccacctcacacaccgacaggcgcctaaccacagaaagcagccgaatctcctgtgcatccagccaacgggaagtgcagatgcgagaccaccccgacagactcgtggactatcaaaacaaagacagcaggtctacgtttctttagccgactaatccggactcgcacagcataccgtctctgttgcggaacgaattgcagttgtgtacatcgcattgcatgcatgcttgggggcgttgccacagctttgcatcatatatcttgtacaacataaaatcaataaatctctggagtgcatcagcctagttcaatttctcttttaccaatgcctcgttcaaaaccagacgacgattttgaaatccacgtcgaccaatcctgcttaagcacgccaatggccgaagaaactcaatttcagaccagcgaggttgaaaacacatccgcgccagaacatacgtccacagatgcgaacgaagccccagaaacgaacagccatgtctcacccgaggaaggcttgccagccacgattgacgagacagagctatcacatgacgacataattgcaactgattcagtcgatgcagatgcagcctccgaacagagttttacaatagaacaagaagcggacatctcgatggcaagtcatccagagcaaggacaagacgagtcagagttacaacccagtattgaatccgatgatgccgatgtcatacaagcccgaaaggacagatcagcgaacagctccagagcgtcctcacggaggccctctaagcggaccgaagatctaatccaccaggctgcaagagatattgttgctcaaatcgaacacgacaaacccactaacgagtccgatgtacagcaagatgatggagatgtctctcagctggaccagtccatgatttccgactcaacaccgagaatggatgatggcgcagaaagtagctcacagcatgatgacgatgtcttcagcgataagagttatcgtagctcattgggttcttatgatggtggttcagagtcaggcaaaaaggtggacttggacaatatgacgacaattacccgctctcctcggatctcagatatttcccagtatgacaaggaagacttcattcccaccgcacgaggaaccccgcgacctgctttccgcacaccatccgacattcgagcaatgcaaatgtcatcacctcccgcatctgtccttggctctccaagatcgactcggaagcatttcccgacagtctccagattaggcacaccgtcggcctcagcacaatactctcccagaaggcggtctacaccggagcgattcaaatcgcgacaggaacctccccttgtgcttctccatgtgacacttctgccgctgcgatggatgtggggtgatcttgtcaacaacctcgaccctgctgatatgagcgaacaaacgaagacattacgcgattcgtggcgcatcctgcaggatcgagtgggagacacgaccatcgagagaggcatccttcttggtcatcctcagaacgactacgaggttctcgaggagcgtctgctagaagcattggatttgcctgttcgtcggcgcgcacggatcttggaatgtggccactacctcggaccctctaatgagaacactatcgcagaagaagatgaggatagcgatgacggctacggccaagagcgccgcaaatcagggccaaaacgtcactggtgcggaacttgcaagaacgagattcgatatgatgcactcggtgatgccaagatctttcgtgtgaaggtctacgccagcaacggtcttatgagggccggtgcctgggacgcttgctggaaagagatggaacgtgtcgatgtcgaaattgaacctatcgttgagccttcaatccaagatgagattgttcgtctcgctgctgtgcagcaagagcgtgagatggcgcaacaggaggaggctgagatcgcaaagcaagtcgcacaacagtttgaggagcaccggcaaagtgaggaacgactcctgctccaagcagaagcggagttggcagcctcatcaccacctcctcttccagagattgcagcaagccctgtgccagaaccgacgccagaaccgacgccagagcacgcacgtgaatccagggcttcccgacgccgtcatgaagatgaagataggttacgtgagatatatggacagaccccggtagcccaggagtctacgtctaattcacgacagccaagttctcaccatcacccagactcatatatccccccaccaactcctcgctctccatcagaagaggcttatcaacgtagggaaacgcggcgccgtagccaccagtctgattccctgcctgaactcctcctgcagtccttcagagtgctcatgcgagacagcaagaatgttgctatcctgactctcagtgtcgccgttctgatattcgctatgcgcaagagtcccgcccatgatgagtacagaatgcagccggtcatgcccatggcggagtcggctcctgagatgcaagcccaagcacctcaggctatgcaccaagagacaacccagagcagggtaacagaccatgttgttacgacgccaagttcagagccccaagcgagtgttgcctaccaagagcctgctccggttgtcagcatggcatctcaagcaccgcctcctccggctgaggagacgcactcggctagccccagcgtctcgacggtctatgaaccctgcgagacaccgacgagctcatctgcctcggttgaagtccagccacaggagacggagatcgtaacggagaagaaagtggtcaagattgtccagacggtcaccgaaacacagactgagtatgaaactgcgacagctgtggagacgatcaagatcaaggctaccgaaatggcacaacctgaagcggatcagacggaagttgaagcggatatgcctgcagacgacgttgaagctgaagctgtgctcgtaaaggaaatcgagactccaaacgaggacgaaattgaacgccaggccactgatatagaggcagcggccatcgaggaatctgatgtccacgtacctgataccgaagtacctgacatccaggttgaaggagccgatgtctagaaactcacattcttatctaacctatttcctaacctaaacgataagtaggacaagtgaggatggtatctgtaatggggtcatcaatgaaatgttggaagggatgactgaaattttgggaaggttgtgatcccatgagcatgctggaggtttcgggttctgagcccatcttttttgcaagtttttcaacttacctcgacttgaatgattgattgattgagtatcgaataagcaaacaagcaagcaaacgagcatgaaaagcacccgcgatgaattattgttcatgactcgttcagattgcgatagatcgacgataccaatatagtacctatttttcttgatcctcaacacaaactttgcatatctaacgaatgtgaatgtgg

SEQ ID NO: 17583 - DNA, 876 bp, Muscodor strobelii
  misc_feature: SGI cDNA ID NO. 565874
  misc_feature: Reduced expression when VOC is produced
  misc_feature: Encodes the peptide sequence at SEQ ID NO 17584
atgacggccaacagcgtgccccagcgcaccctgctgcttgcccctccatccgttgctgcgcacgaggagacacttcgtgatgtctacaccaccttcgatcgcgccacatccgacttgaccatgcttgatcgtctgtctgccggcctactcacccttcccacagccacatacgatctagttgtcgtcctcacatccggcgccggcgccaaccgcgacgaagcctccaaactcctcacacgaagcatctacgactctgtcgctgcctcgatgaagccgggtgccatcctcagagcccagacgggtcccccgctacccgcgaccgaagccatcctcgctggtctggtgcagaagaccgacggcacattcgagaaggccgaggaggaagcccccgtcatgctgcgtctgggcgccaagaagaagaccaatggcgcaaacaacaacggcagtgtccctgtgcctaagacagtaactctcagcctagacgatgatctcgatgattctgatgacgagctcatcgacgaggacacacttctcaccgaggaagacaagaaccaggccctccaagctcctgctgagtgcatccccaagatcggcaagcgacggcgcgcctgcaaagactgcacctgtggtctagccgccaaactcgaggccgaggaccgcgcccgtcgtgcaaaggcagatgccggtcttgagatgctcaagcttgatgatctcaacgatctcgagtcggacttcaccgtcaagggcaaggtcggctcatgcggtagctgcagcctcggagacgctttccgctgtgcagactgcccatacattggcttgccggccttcaagcctggtgaggagattaagatcctgaataatgccattcagctataa

SEQ ID NO: 17584 - protein, 291 aa, Muscodor strobelii
  misc_feature: SGI Peptide ID NO. 565874
  misc_feature (11)..(284): Pfam Id: PF05093 Pfam Desc: Anamorsin family
  misc_feature (3)..(291): NCBI GI: 238500337 Blast Desc: AFLA_095840 [Aspergillus flavus NRRL3357] gi|220693156|gb|EED49502.1| AFLA_095840 [Aspergillus flavus NRRL3357]
  misc_feature (3)..(291): NCBI GI: 169779663 Blast Desc: [Aspergillus oryzae RIB40] gi|121799615|sp|Q2U5K2.1|DRE2_ASPOR RecName: Full=Protein dre2 gi|83773035|dbj|BAE63163.1| protein product [Aspergillus oryzae]
  misc_feature (4)..(291): NCBI GI: 242772904 Blast Desc: TSTA_084010 [Talaromyces stipitatus ATCC 10500] gi|218721751|gb|EED21169.1| TSTA_084010 [Talaromyces stipitatus ATCC 10500]
  misc_feature (8)..(291): NCBI GI: 255941884 Blast Desc: Pc16g14130 [Penicillium chrysogenum Wisconsin 54-1255] gi|211586334|emb|CAP94083.1| Pc16g14130 [Penicillium chrysogenum Wisconsin 54-1255]
  misc_feature (2)..(291): NCBI GI: 115449639 Blast Desc: conserved [Aspergillus terreus NIH2624] gi|121733084|sp|Q0C7M4.1|DRE2_ASPTN RecName: Full=Protein dre2 gi|114187607|gb|EAU29307.1| conserved [Aspergillus terreus
  misc_feature (8)..(291): NCBI GI: 212531431 Blast Desc: conserved [Penicillium marneffei ATCC 18224] gi|210071236|gb|EEA25325.1| conserved [Penicillium marneffei ATCC 18224]
  misc_feature (1)..(291): NCBI GI: 226502658 Blast Desc: LOC100273429 [Zea mays] gi|194704068|gb|ACF86118.1| [Zea mays]
  misc_feature (1)..(291): NCBI GI: 145233861 Blast Desc: An02g11750 [Aspergillus niger] gi|171769789|sp|A2QEP2.1|DRE2_ASPNC RecName: Full=Protein dre2 gi|134057240|emb|CAK37876.1| protein product [Aspergillus niger]
  misc_feature (8)..(291): NCBI GI: 67902996 Blast Desc: AN8485.2 [Aspergillus nidulans FGSC A4] gi|74592825|sp|Q5AT95.1|DRE2_EMENI RecName: Full=Protein dre2 gi|40747951|gb|EAA67107.1| AN8485.2 [Aspergillus nidulans FGSC
  misc_feature (9)..(291): NCBI GI: 156043115 Blast Desc: SS1G_10560 [Sclerotinia sclerotiorum 1980] gi|171704409|sp|A7EYZ4.1|DRE2_SCLS1 RecName: Full=Protein dre2 gi|154694948|gb|EDN94686.1| SS1G_10560 [Sclerotinia sclerotiorum
  misc_feature: Useful for introducing or modulating the production of volatile compounds
MTANSVPQRTLLLAPPSVAAHEETLRDVYTTFDRATSDLTMLDRLSAGLLTLPTATYDLVVVLTSGAGANRDEASKLLTRSIYDSVAASMKPGAILRAQTGPPLPATEAILAGLVQKTDGTFEKAEEEAPVMLRLGAKKKTNGANNNGSVPVPKTVTLSLDDDLDDSDDELIDEDTLLTEEDKNQALQAPAECIPKIGKRRRACKDCTCGLAAKLEAEDRARRAKADAGLEMLKLDDLNDLESDFTVKGKVGSCGSCSLGDAFRCADCPYIGLPAFKPGEEIKILNNAIQL

SEQ ID NO: 17585 - DNA, 1797 bp, Muscodor strobelii
  misc_feature: SGI EST ID NO. CUFF.41374.1
  misc_feature: Variant of the nucleotide sequence at SEQ ID NO 17583
aggagacctccgctgccgtggatttctaaacttattggtaatccccactacttccttcgtcactgccattttcctacgccgatacattaacctacgaactcgttggacacaccctcgcgcttcccatcacctctgccctactttcttagccatcgcgaccgatcgtcctaaacacaaccctcttgcaaccctgattccgcaaccccaccaccatgacggccaacagcgtgccccagcgcaccctgctgcttgcccctccatccgttgctgcgcacgaggagacacttcgtgatgtctacaccaccttcgatcgcgccacatccgacttgaccatgcttgatcgtctgtctgccggcctactcacccttcccacagccacatacgatctagttgtcgtcctcacatccggcgccggcgccaaccgcgacgaagcctccaaactcctcacacgaagcatctacgactctgtcgctgcctcgatgaagccgggtgccatcctcagagcccagacgggtcccccgctacccgcgaccgaagccatcctcgctggtctggtgcagaagaccgacggcacattcgagaaggccgaggaggaagcccccgtcatgctgcgtctgggcgccaagaagaagaccaatggcgcaaacaacaacggcagtgtccctgtgcctaagacagtaactctcagcctagacgatgatctcgatgattctgatgacgagctcatcgacgaggacacacttctcaccgaggaagacaagaaccaggccctccaagctcctgctgagtgcatccccaagatcggcaagcgacggcgcgcctgcaaagactgcacctgtggtctagccgccaaactcgaggccgaggaccgcgcccgtcgtgcaaaggcagatgccggtcttgagatgctcaagcttgatgatctcaacgatctcgagtcggacttcaccgtcaagggcaaggtcggctcatgcggtagctgcagcctcggagacgctttccgctgtgcagactgcccatacattggcttgccggccttcaagcctggtgaggagattaagatcctgaataatgccattcagctataaaggcagccattgcttttcgtcacgctgcgggatcggaccccgccaaatccgaaagtcgacaagcttgcattgtacacaacatattcaggaccaggtatctcgccatgctctatgtggctacatgatgatggctgagaagggcagtcaaggaagtttaatcaagactgaccatacagatgaacacagatgcttagcgtctcacctctttaattctcatagaaatgcaatgcaacgtaggccagcactaccctatgagttgagagggagagactcatattatggcattgccccggagtttgggtgaaccactggatcacgtagtggatatcagaaataaaggcttgtcacgaccccagatcgactgctagttgtcaagtgatttgaatatggcgttttcagcatataatcttatagtcgggcattagtgaattcagagatcattggggtgtatcgtgagaaactcgtgtcgatttcccaatcgtcctagagtctacgaccaaacagcagtcacataacactccaggctgagcaggaagatgttgaatagtgtgaccatgtcgctaggccaaaggtttgtatgtactgacatgttacctggagttcgatgacactggtccatatacttccaactccccagtcagcgtcatggtgatgatgaaatgcctgtcgcaacctattggattcgttgctgtatcacaatacacgttcg

SEQ ID NO: 17586 - DNA, 309 bp, Muscodor strobelii
  misc_feature: SGI cDNA ID NO. 565875
  misc_feature: Reduced expression when VOC is produced
  misc_feature: Encodes the peptide sequence at SEQ ID NO 17587
atggttaatatcccgaaaacgcgcaagacctattgcgccaaggagaacaaacacacacgagtcacccagtacaaggctggcaaggcctctcctttcgcccagggaaagcgccgttacgaccgcaagcagtccggttacggtggtcagacaaagcccgtcttccacaagaaggccaagaccaccaagaaggtcgtgctgcgtctcgagtgcaatggctgcaaggccaagaagcagctgcctctgaagcgatgcaagcactttgagctgggcggtgacaagaagaccaagggtgccgccctcgttttctaa

SEQ ID NO: 17587 - protein, 102 aa, Muscodor strobelii
  misc_feature: SGI Peptide ID NO. 565875
  misc_feature (17)..(91): Pfam Id: PF00935 Pfam Desc: Ribosomal protein L44
  misc_feature (1)..(102): NCBI GI: 171695508 Blast Desc: protein product [Podospora anserina] gi|170947996|emb|CAP60160.1| protein product [Podospora anserina]
  misc_feature (1)..(102): NCBI GI: 145611252 Blast Desc: 60S ribosomal protein L44 [Magnaporthe grisea 70-15] gi|145018553|gb|EDK02832.1| 60S ribosomal protein L44 [Magnaporthe grisea 70-15]
  misc_feature (1)..(102): NCBI GI: 145236008 Blast Desc: protein product [Aspergillus niger] gi|134075101|emb|CAK39112.1| protein product [Aspergillus niger]
  misc_feature (1)..(102): NCBI GI: 119480597 Blast Desc: ribosomal protein L44, [Neosartorya fischeri NRRL 181] gi|119408481|gb|EAW18430.1| ribosomal protein L44, [Neosartorya fischeri NRRL 181]
  misc_feature (1)..(102): NCBI GI: 238493821 Blast Desc: 60S ribosomal protein L44 [Aspergillus flavus NRRL3357] gi|220696641|gb|EED52983.1| 60S ribosomal protein L44 [Aspergillus flavus NRRL3357]
  misc_feature (2)..(102): NCBI GI: 146322850 Blast Desc: 60S ribosomal protein L44 [Aspergillus fumigatus Af293] gi|129558491|gb|EAL93110.2| 60S ribosomal protein L44 [Aspergillus fumigatus Af293]
  misc_feature (1)..(102): NCBI GI: 189191664 Blast Desc: 60S ribosomal protein L44 [Pyrenophora tritici-repentis Pt-1C-BFP] gi|187973777|gb|EDU41276.1| 60S ribosomal protein L44 [Pyrenophora tritici-repentis Pt-1C-BFP]
  misc_feature (2)..(102): NCBI GI: 159129244 Blast Desc: conserved [Aspergillus fumigatus A1163]
  misc_feature (1)..(102): NCBI GI: 169599557 Blast Desc: SNOG_02602 [Phaeosphaeria nodorum SN15] gi|111068213|gb|EAT89333.1| SNOG_02602 [Phaeosphaeria nodorum SN15]
  misc_feature (1)..(102): NCBI GI: 238837760 Blast Desc: 60S ribosomal protein L44 [Microsporum canis CBS 113480]
  misc_feature: Useful for introducing or modulating the production of volatile compounds
MVNIPKTRKTYCAKENKHTRVTQYKAGKASPFAQGKRRYDRKQSGYGGQTKPVFHKKAKTTKKVVLRLECNGCKAKKQLPLKRCKHFELGGDKKTKGAALVF

SEQ ID NO: 17588 - DNA, 893 bp, Muscodor strobelii
  misc_feature: SGI EST ID NO. CUFF.41391.0
  misc_feature: Variant of the nucleotide sequence at SEQ ID NO 17586
aatacctttctggctaccagtccacagagtcacccagtacaaggctggcaaggcctctcctttcgcccagggaaagcgccgttacgaccgttagtacacccgaggtgtccagattcctgcccgtcaaatttcttcatccccgaccgagacatgcgatatccacgaaacgaagaacttggagcattggcggggatgaggagcaagacggacgcgacggaatccacggaatgaatcacgatgaaataggacaatggctgatgagtaatatgtctacaggcaagcagtccggttacggtggtcagacaaagcccgtcttccacaagaaggccaagaccaccaagaaggtcgtgctgcgtctcgagtgcaatggctgcaaggccaagaagcagctgcctctgaagcgatgcaagcactttgagctgggcggtgacaagaagaccaagggtgccgccctcgttttctaaacgaaacgaaacgacatcctccccaaacccccaaccgagaagacaatacacaaaaaaacaacaaatatccgacgatacgaagataacgagagacttgcgtcacttcacattcggcggtgcgagaacccccgacgtactcaagatccgatggcatcttgcagcatgaggcgaaatggatggtaccaggaaccgggatttcttttgcatgggttcgcagtgttccggagtttctcctgtgtgggctaggcatagcataggcatagcataggcaggctggcatcaaggtagagagacccggtagcagttcctgtgcggtgaaaaattctacattattcacgaaagccaaatctcgtccgttcgtgtttggtcagtccatggtgtctttgacttgtgctgcttcgtcagtgaccaaaattccctatgacggaa

SEQ ID NO: 17589 - DNA, 822 bp, Muscodor strobelii
  misc_feature: SGI cDNA ID NO. 565876
  misc_feature: Reduced expression when VOC is produced
  misc_feature: Encodes the peptide sequence at SEQ ID NO 17590
atgccttcatatttgataactggcgtatctcgaggaattgggttcgagttccttcgccaaatttctgccgacccagaaaatgtggtcgtgggtctcgttcgagacaaagcttctaccgacacgaaggttcttgcagagcttaaccgtcccaatattcacattgttgaggccgacttagttgatagggctgctctagagaaatcggtagaggctgtatccgctatcgttaacggatcactcgactatatcatcgcaaatgcggctttagtccccaaatggggtggctatgactccatcggcctccttgcacaacaggacgcggatcatctggagaacgaactgttagagtgtttcaaggtcaacgtagtagggaacattaacctgttccacctctatacacctcttgttctgcgcggcgaggcaaagaagtgcattgccatctcaaccgggatatcagatgttgagatctccgcaaaatacagacttttccacggggccccgtatgccatttccaagagtgctttgaacatggccgtaactaagttccacgcacaatatgccgaccaaggtgtgctctttgtgagcatctgcccggggctcgtggatacaggcggttatgcaggattgaacgagcaccagcttcaacagatgcaaatagttggccagaaattcgcgcaatatcagccgacttttgacggaaagccactgacgaccgaagcatctgtgagagatattctgcgaacaatggagaaagcgagcctcgaagatgggtatggcggtatcctcatctcacactatggcaagggggaaaagtacctgtga

SEQ ID NO: 17590 - protein, 273 aa, Muscodor strobelii
  misc_feature: SGI Peptide ID NO. 565876
  misc_feature (2)..(187): Pfam Id: PF00106 Pfam Desc: short chain dehydrogenase
  misc_feature (1)..(267): NCBI GI: 256730666 Blast Desc: NECHADRAFT_29697 [Nectria haematococca mpVI 77-13-4]
  misc_feature (1)..(270): NCBI GI: 226281597 Blast Desc: conserved [Paracoccidioides brasiliensis Pb01]
  misc_feature (1)..(267): NCBI GI: 256730091 Blast Desc: NECHADRAFT_95010 [Nectria haematococca mpVI 77-13-4]
  misc_feature (1)..(270): NCBI GI: 67540978 Blast Desc: AN6659.2 [Aspergillus nidulans FGSC A4] gi|40738998|gb|EAA58188.1| AN6659.2 [Aspergillus nidulans FGSC A4] gi|259480241|tpe|CBF71192.1| TPA: short chain dehydrogenase
  misc_feature (1)..(270): NCBI GI: 242772417 Blast Desc: short chain dehydrogenase (AtsC), [Talaromyces stipitatus ATCC 10500] gi|218721654|gb|EED21072.1| short chain dehydrogenase (AtsC), [Talaromyces stipitatus ATCC 10500]
  misc_feature (1)..(268): NCBI GI: 258575181 Blast Desc: conserved [Uncinocarpus reesii 1704] gi|237902038|gb|EEP76439.1| conserved [Uncinocarpus reesii 1704]
  misc_feature (1)..(267): NCBI GI: 46114388 Blast Desc: FG03036.1 [Gibberella zeae PH-1]
  misc_feature (1)..(267): NCBI GI: 121714479 Blast Desc: short chain dehydrogenase (AtsC), [Aspergillus clavatus NRRL 1] gi|119403004|gb|EAW13424.1| short chain dehydrogenase (AtsC), [Aspergillus clavatus NRRL 1]
  misc_feature (1)..(267): NCBI GI: 119473497 Blast Desc: short chain dehydrogenase (AtsC), [Neosartorya fischeri NRRL 181] gi|119406777|gb|EAW16727.1| short chain dehydrogenase (AtsC), [Neosartorya fischeri NRRL 181]
  misc_feature (17)..(270): NCBI GI: 169609661 Blast Desc: SNOG_07923 [Phaeosphaeria nodorum SN15] gi|160701890|gb|EAT84199.2| SNOG_07923 [Phaeosphaeria nodorum SN15]
  misc_feature: Useful for introducing or modulating the production of volatile compounds
MPSYLITGVSRGIGFEFLRQISADPENVVVGLVRDKASTDTKVLAELNRPNIHIVEADLVDRAALEKSVEAVSAIVNGSLDYIIANAALVPKWGGYDSIGLLAQQDADHLENELLECFKVNVVGNINLFHLYTPLVLRGEAKKCIAISTGISDVEISAKYRLFHGAPYAISKSALNMAVTKFHAQYADQGVLFVSICPGLVDTGGYAGLNEHQLQQMQIVGQKFAQYQPTFDGKPLTTEASVRDILRTMEKASLEDGYGGILISHYGKGEKYL

SEQ ID NO: 17591 - DNA, 1353 bp, Muscodor strobelii
  misc_feature: SGI EST ID NO. CUFF.41302.0
  misc_feature: Variant of the nucleotide sequence at SEQ ID NO 17589
gcgtcttagagccacgtactcaacgattacaaatctgacgatggccaagttaagcccgagaacttgctgttcaggcaagaatgtgcgacgggcgtactattgcctatcgctttttgtttgagaccatgtggatgcgccgtcaacgggctcaatatgctcggtaagctgtataagcaagcaagtagctatctgtatataaatacaaggaaacggcgctcaatgtagccaaacaaatgctcataaagtcgctgacaacagagaaaaacgtacattattcaacgctcacagctcctataagtgctttcctagttcatcatgccttcatatttgataactggcgtatctcgaggaattgggttcgagttccttcgccaaatttctgccgacccagaaaatgtggtcgtgggtctcgttcgagacaaagcttctaccgacacgaaggttcttgcagagcttaaccgtcccaatattcacattgttgaggccgacttagttgatagggctgctctagaggtaagtgcctatagcttagagctaaataccttgaaaacgtcaactaagcactacagttagaaatcggtagaggctgtatccgctatcgttaacggatcactcgactatatcatcgcaaatgcggctttagtccccaaatggggtggctatgactccatcggcctccttgcacaacaggacgcggatcatctggagaacgaactgttagagtgtttcaaggtcaacgtagtagggaacattaacctgttccacctctatacacctcttgttctgcgcggcgaggcaaagaagtgcattgccatctcaaccgggatatcagatgttgagatctccgcaaaatacagacttttccacggggccccgtatgccatttccaagagtgctttgaacatggccgtaactaagttccacgcacaatatgccgaccaaggtgtgctctttgtgagcatctgcccggggctcgtggatacaggcggttatgcaggattgaacgagcaccagcttcaacagatgcaaatagttggccagaaattcgcgcaatatcagccgacttttgacggaaagccactgacgaccgaagcatctgtgagagatattctgcgaacaatggagaaagcgagcctcgaagatgggtatggcggtatcctcatctcacactatggcaagggggaaaagtacctgtgatgttcatatccaggtggggatatgctgatttactctcggtatcccgccacagccttggcagagccctgtgcgatgagataaggggtccaatcttctttcgcgatagagggtgttttgatattatgtatttcgaccatataaaattgttcgtttgaa

SEQ ID NO: 17592 - DNA, 1332 bp, Muscodor strobelii
  misc_feature: SGI cDNA ID NO. 565877
  misc_feature: Encodes the peptide sequence at SEQ ID NO 17593
atgttgaacgaaaagttgagcacggatttggtgggccgtcctgcgccatcctgcaacaagactttaaaagcaaaagttggctgctggacttgtaaagggagaggcatatcgggtctcacacgaccgcaagaactcattctgccatgtgcatacgtatggaggccagccaagctcaatgccgcagagcgtgacctatttgtttacttcgaatcgattgccttctcgtctcttgctacactcagtacacttgaaggtgatctccgtaatgcattaattcccatggctctctcaaatgataatgttgcctctcgcggtgttctccatgcgttgctggcagtatcgtcattccaccgtggaggcctgcaagtacaatccgtcgaacataaagtagctgccattggcgcacttgcggcctctttgaaaactggtataaaaaccctgggtgaagctgcccagcatgttgctgctggcatgctgctgtgctcatttgagatctttcagcctttatcggattctaacagccactgggctttgtatctcatgggcgcgaaagacatgatcggtgcggccagactggaaacatgtttgaaccagcttgatattgctcaattagtacaatgggtttcctatcatgactgtctcgccaaggtaagcttgcttcactggcgtcaaggcgaaattcggagggcactgatgatagatatcgacgtcgaacttcgctggcaacgagatctttgcgcagctgcctataagctccagcctaatatgggcgtacataacatgattctatcaaccgtggcttacgctttcgaccatttatgcaattacgaggaaaggcgtatcacaaaagatgagctgcagtacgaaatcgaagccttagagaatcaactacttaagattccggagtttccaatcacgcaaagctcgtccttgaactcgaagatctctgtgctcacggagctctttcgtcttgcaactctcatttatattgcgcgaatctccgagagtctgttttgtggctacaggaatattgattctcttctagacacagcatttaggcaggtgggggacgttgatacctgcgagcgattgctgcccctcttcatcattggctgcgaggcaaaaacagacgagcgcagactcttgatactcaacctaattagccgcacaaaggaacggacatacgtaagagatactcgctgtttggaggcagcactttccattgcatggaaccaagaagatttgcatgccgatgaagacatcaatctcgattatatacagaagctcaacgtcattgtgagcagcagttcaaaacttccaaccttcgcttag

SEQ ID NO: 17593 - protein, 443 aa, Muscodor strobelii
  misc_feature: SGI Peptide ID NO. 565877
  misc_feature (54)..(443): NCBI GI: 256721370 Blast Desc: NECHADRAFT_82373 [Nectria haematococca mpVI 77-13-4]
  misc_feature (71)..(438): NCBI GI: 256730463 Blast Desc: NECHADRAFT_73999 [Nectria haematococca mpVI 77-13-4]
  misc_feature (72)..(397): NCBI GI: 261358229 Blast Desc: conserved [Verticillium albo-atrum VaMs.102]
  misc_feature (70)..(435): NCBI GI: 238494944 Blast Desc: conserved [Aspergillus flavus NRRL3357] gi|220695358|gb|EED51701.1| conserved [Aspergillus flavus NRRL3357]
  misc_feature (43)..(442): NCBI GI: 242797958 Blast Desc: TSTA_009570 [Talaromyces stipitatus ATCC 10500] gi|218716414|gb|EED15835.1| TSTA_009570 [Talaromyces stipitatus ATCC 10500]
  misc_feature (52)..(442): NCBI GI: 171681172 Blast Desc: protein product [Podospora anserina] gi|170940544|emb|CAP65772.1| protein product [Podospora anserina]
  misc_feature (9)..(442): NCBI GI: 212532425 Blast Desc: conserved [Penicillium marneffei ATCC 18224] gi|210071733|gb|EEA25822.1| conserved [Penicillium marneffei ATCC 18224]
  misc_feature (50)..(442): NCBI GI: 242797963 Blast Desc: TSTA_009570 [Talaromyces stipitatus ATCC 10500] gi|218716415|gb|EED15836.1| TSTA_009570 [Talaromyces stipitatus ATCC 10500]
  misc_feature (53)..(442): NCBI GI: 256724599 Blast Desc: NECHADRAFT_84314 [Nectria haematococca mpVI 77-13-4]
  misc_feature (70)..(442): NCBI GI: 67522384 Blast Desc: AN1649.2 [Aspergillus nidulans FGSC A4] gi|40745613|gb|EAA64769.1| [Aspergillus nidulans FGSC A4] gi|259486985|tpe|CBF85292.1| TPA: conserved [Aspergillus nidulans
MLNEKLSTDLVGRPAPSCNKTLKAKVGCWTCKGRGISGLTRPQELILPCAYVWRPAKLNAAERDLFVYFESIAFSSLATLSTLEGDLRNALIPMALSNDNVASRGVLHALLAVSSFHRGGLQVQSVEHKVAAIGALAASLKTGIKTLGEAAQHVAAGMLLCSFEIFQPLSDSNSHWALYLMGAKDMIGAARLETCLNQLDIAQLVQWVSYHDCLAKVSLLHWRQGEIRRALMIDIDVELRWQRDLCAAAYKLQPNMGVHNMILSTVAYAFDHLCNYEERRITKDELQYEIEALENQLLKIPEFPITQSSSLNSKISVLTELFRLATLIYIARISESLFCGYRNIDSLLDTAFRQVGDVDTCERLLPLFIIGCEAKTDERRLLILNLISRTKERTYVRDTRCLEAALSIAWNQEDLHADEDINLDYIQKLNVIVSSSSKLPTFA

SEQ ID NO: 17594 - DNA, 1299 bp, Muscodor strobelii
  misc_feature: SGI cDNA ID NO. 565878
  misc_feature: Encodes the peptide sequence at SEQ ID NO 17595
atggttcatacttcatatttcgaagtagacctataccactatctggtcgacctcaacaacaaaaggagaggcatatcgggtctcacacgaccgcaagaactcattctgccatgtgcatacgtatggaggccagccaagctcaatgccgcagagcgtgacctatttgtttacttcgaatcgattgccttctcgtctcttgctacactcagtacacttgaaggtgatctccgtaatgcattaattcccatggctctctcaaatgataatgttgcctctcgcggtgttctccatgcgttgctggcagtatcgtcattccaccgtggaggcctgcaagtacaatccgtcgaacataaagtagctgccattggcgcacttgcggcctctttgaaaactggtataaaaaccctgggtgaagctgcccagcatgttgctgctggcatgctgctgtgctcatttgagatctttcagcctttatcggattctaacagccactgggctttgtatctcatgggcgcgaaagacatgatcggtgcggccagactggaaacatgtttgaaccagcttgatattgctcaattagtacaatgggtttcctatcatgactgtctcgccaaggtaagcttgcttcactggcgtcaaggcgaaattcggagggcactgatgatagatatcgacgtcgaacttcgctggcaacgagatctttgcgcagctgcctataagctccagcctaatatgggcgtacataacatgattctatcaaccgtggcttacgctttcgaccatttatgcaattacgaggaaaggcgtatcacaaaagatgagctgcagtacgaaatcgaagccttagagaatcaactacttaagattccggagtttccaatcacgcaaagctcgtccttgaactcgaagatctctgtgctcacggagctctttcgtcttgcaactctcatttatattgcgcgaatctccgagagtctgttttgtggctacaggaatattgattctcttctagacacagcatttaggcaggtgggggacgttgatacctgcgagcgattgctgcccctcttcatcattggctgcgaggcaaaaacagacgagcgcagactcttgatactcaacctaattagccgcacaaaggaacggacatacgtaagagatactcgctgtttggaggcagcactttccattgcatggaaccaagaagatttgcatgccgatgaagacatcaatctcgattatatacagaagctcaacgtcattgtgagcagcagttcaaaacttccaaccttcgcttag

SEQ ID NO: 17595 - protein, 432 aa, Muscodor strobelii
  misc_feature: SGI Peptide ID NO. 565878
  misc_feature (43)..(432): NCBI GI: 256721370 Blast Desc: NECHADRAFT_82373 [Nectria haematococca mpVI 77-13-4]
  misc_feature (60)..(427): NCBI GI: 256730463 Blast Desc: NECHADRAFT_73999 [Nectria haematococca mpVI 77-13-4]
  misc_feature (1)..(431): NCBI GI: 171681172 Blast Desc: protein product [Podospora anserina] gi|170940544|emb|CAP65772.1| protein product [Podospora anserina]
  misc_feature (61)..(386): NCBI GI: 261358229 Blast Desc: conserved [Verticillium albo-atrum VaMs.102]
  misc_feature (59)..(424): NCBI GI: 238494944 Blast Desc: conserved [Aspergillus flavus NRRL3357] gi|220695358|gb|EED51701.1| conserved [Aspergillus flavus NRRL3357]
  misc_feature (32)..(431): NCBI GI: 242797958 Blast Desc: TSTA_009570 [Talaromyces stipitatus ATCC 10500] gi|218716414|gb|EED15835.1| TSTA_009570 [Talaromyces stipitatus ATCC 10500]
  misc_feature (39)..(431): NCBI GI: 242797963 Blast Desc: TSTA_009570 [Talaromyces stipitatus ATCC 10500] gi|218716415|gb|EED15836.1| TSTA_009570 [Talaromyces stipitatus ATCC 10500]
  misc_feature (42)..(431): NCBI GI: 256724599 Blast Desc: NECHADRAFT_84314 [Nectria haematococca mpVI 77-13-4]
  misc_feature (59)..(431): NCBI GI: 67522384 Blast Desc: AN1649.2 [Aspergillus nidulans FGSC A4] gi|40745613|gb|EAA64769.1| [Aspergillus nidulans FGSC A4] gi|259486985|tpe|CBF85292.1| TPA: conserved [Aspergillus nidulans
  misc_feature (33)..(431): NCBI GI: 212532425 Blast Desc: conserved [Penicillium marneffei ATCC 18224] gi|210071733|gb|EEA25822.1| conserved [Penicillium marneffei ATCC 18224]
MVHTSYFEVDLYHYLVDLNNKRRGISGLTRPQELILPCAYVWRPAKLNAAERDLFVYFESIAFSSLATLSTLEGDLRNALIPMALSNDNVASRGVLHALLAVSSFHRGGLQVQSVEHKVAAIGALAASLKTGIKTLGEAAQHVAAGMLLCSFEIFQPLSDSNSHWALYLMGAKDMIGAARLETCLNQLDIAQLVQWVSYHDCLAKVSLLHWRQGEIRRALMIDIDVELRWQRDLCAAAYKLQPNMGVHNMILSTVAYAFDHLCNYEERRITKDELQYEIEALENQLLKIPEFPITQSSSLNSKISVLTELFRLATLIYIARISESLFCGYRNIDSLLDTAFRQVGDVDTCERLLPLFIIGCEAKTDERRLLILNLISRTKERTYVRDTRCLEAALSIAWNQEDLHADEDINLDYIQKLNVIVSSSSKLPTFA

SEQ ID NO: 17596 - DNA, 540 bp, Muscodor strobelii
  misc_feature: SGI cDNA ID NO. 565879
  misc_feature: Elevated expression when VOC is produced
  misc_feature: Encodes the peptide sequence at SEQ ID NO 17597
atgcagttcgcgagttcccttctcttcttggctctggcggcttcgggtctagcaaagaaggataaggcttccgggccaactgtatatctcattagacacggcgaaaagcccgatgacgacggcatcggtctatctgcgcagggtcaacagcgagcgcagtgtctgagaagtgtctttggagcttcatcggggtacaacatcggctatatcctggcgcagacaccagatgatgacggaaccagagagcgacccttgctcacagtcgagcctctcgctggcgacttgggcttgacggtggacacatcatgtgaccgagacgacgagaagtgtgtcaaggatgctgttaaggactacaatggaagcggaaatatcctgatctgctgggagcataagcaattgaacaacctcgctgaagagctgggtgccgacaatgtagacggataccctgacgactcctacgacatcatctggacgcagccttacgactattctaagattactgatgtaacgagtgagaattgtcccggtttagatagctag

SEQ ID NO: 17597 - protein, 179 aa, Muscodor strobelii
  misc_feature: SGI Peptide ID NO. 565879
  misc_feature (10)..(178): NCBI GI: 256728792 Blast Desc: NECHADRAFT_106440 [Nectria haematococca mpVI 77-13-4]
  misc_feature (11)..(178): NCBI GI: 119483196 Blast Desc: phosphoglycerate mutase family protein, [Neosartorya fischeri NRRL 181] gi|119409781|gb|EAW19729.1| phosphoglycerate mutase family protein, [Neosartorya fischeri NRRL 181]
  misc_feature (9)..(179): NCBI GI: 238492191 Blast Desc: phosphoglycerate mutase family protein, [Aspergillus flavus NRRL3357] gi|220695826|gb|EED52168.1| phosphoglycerate mutase family protein, [Aspergillus flavus NRRL3357]
  misc_feature (4)..(178): NCBI GI: 70986692 Blast Desc: phosphoglycerate mutase family protein [Aspergillus fumigatus Af293] gi|66846466|gb|EAL86798.1| phosphoglycerate mutase family protein, [Aspergillus fumigatus Af293]
  misc_feature (4)..(178): NCBI GI: 159123396 Blast Desc: phosphoglycerate mutase family protein, [Aspergillus fumigatus A1163]
  misc_feature (26)..(179): NCBI GI: 145251519 Blast Desc: An15g07520 [Aspergillus niger] gi|134082807|emb|CAK48581.1| protein product [Aspergillus niger]
  misc_feature (2)..(179): NCBI GI: 121711793 Blast Desc: conserved [Aspergillus clavatus NRRL 1] gi|119401663|gb|EAW12086.1| conserved [Aspergillus clavatus NRRL 1]
  misc_feature (26)..(177): NCBI GI: 242795678 Blast Desc: phosphoglycerate mutase family protein, [Talaromyces stipitatus ATCC 10500] gi|218719229|gb|EED18649.1| phosphoglycerate mutase family protein, [Talaromyces stipitatus
  misc_feature (1)..(177): NCBI GI: 212536446 Blast Desc: phosphoglycerate mutase family protein, [Penicillium marneffei ATCC 18224] gi|210070778|gb|EEA24868.1| phosphoglycerate mutase family protein, [Penicillium marneffei
  misc_feature (7)..(178): NCBI GI: 255951180 Blast Desc: Pc22g24690 [Penicillium chrysogenum Wisconsin 54-1255] gi|211593374|emb|CAP99757.1| Pc22g24690 [Penicillium chrysogenum Wisconsin 54-1255]
  misc_feature: Useful for introducing or modulating the production of volatile compounds
MQFASSLLFLALAASGLAKKDKASGPTVYLIRHGEKPDDDGIGLSAQGQQRAQCLRSVFGASSGYNIGYILAQTPDDDGTRERPLLTVEPLAGDLGLTVDTSCDRDDEKCVKDAVKDYNGSGNILICWEHKQLNNLAEELGADNVDGYPDDSYDIIWTQPYDYSKITDVTSENCPGLDS

SEQ ID NO: 17598 - DNA, 1625 bp, Muscodor strobelii
  misc_feature: SGI EST ID NO. CUFF.41403.0
  misc_feature: Variant of the nucleotide sequence at SEQ ID NO 17596
aaacgatatatttcacgacctgccggttcccgacgaatctgcggaacgatctacgtcgacggcgccggcaaatgggacccgcctaccgaaagaggcaggtttcaactacatttgcatccacagctctgccacaggtcacaccgtagccaattacgcccctgccaaccgcaacgtgtggtaccatattcctgctgcgagtgacaaaaggggacgacccttgaatgctactacccttcgctttgagcacgtgtctaaggactacttttgtatataaacacggagtcagagctcttggccggatcttcaaactaagtcatcaagacttgtacgatttcttcaaaattcgagaacaaaatgcagttcgcgagttcccttctcttcttggctctggcggcttcgggtctagcaaagaaggataaggcttccgggccaactgtatatctcattagacacggcgaaaagcccgatgacgacggcatcggtctatctgcgcagggtcaacagcgagcgcagtgtctgagaagtgtctttggagcttcatcggggtacaacatcggctatatcctggcgcagacaccagatgatgacggaaccagagagcgacccttgctcacagtcgagcctctcgctggcgacttgggcttgacggtggacacatcatgtgaccgagacgacgagaagtgtgtcaaggatgctgttaaggactacaatggaagcggaaatatcctgatctgctgggagcataagcaattgaacaacctcgctgaagagctgggtgccgacaatgtagacggataccctgacgactcctacgacatcatctggacgcagccttacgactattctaagattactgatgtaacgagtgagaattgtcccggtttagatagctagatagcggcgcggaaaatagaataaaacgacgcaggcgatcaatcttcggctgccctaagcgaaggttggaagttttgaactgctgctcacaatgacgttgagcttctgtatataatcgagattgatgtcttcatcggcactattgtaaatgagaggtcagaataacaatgtgaaatgtgcactgcattgtatagaataagtatgaaagtggcatcaagctggagaagggatagagaaatcttgaaagcatactgcaaatcttcttggttccatgcaatggaaagtgctgcctccaaacagcgagtatctcttacgtatgtccgttcctttgtgcggctaattaggttgagtatcaagagtctgcgctcgtctgtttttgcctcgcagccaatgatgaagaggggcagcaatcgctcgcaggtatcaacgtcccccacctgcctaaatgctgtgtctagaagagaatcaatattcctgtagccacaaaacagactctcggagattcgcgcaatataaatgagagttgcaagacgaaagagctccgtgagcacagagatcttcgagttcaaggacgagctttgcgtgattggaaactccggaatcttaagtagttgattctctaaggcttcgatttcgtactgcagctcatcttttgtgatacgcctttcctcgtaattgcataaatggtcgaaagcgtaagccacggttgatagaatcatgttatgtacgcc

SEQ ID NO: 17599 - DNA, 1035 bp, Muscodor strobelii
  misc_feature: SGI cDNA ID NO. 565880
  misc_feature: Encodes the peptide sequence at SEQ ID NO 17600
atgttgttctcaagactgagtgttctcatcactgtagtcgctacaggcgtttcagctacatcgttacctggcttctcgagtctttctcttccatctcgtacaatcttccaactaaacgataccggcacattcttcgagagtatcacacagcgctcgaatggcgatctgctagtgacactgcttcaacctgccgcaactgtataccaaatcaagaaccctttgtcagaatcgcctgagggatctatccttaccacttttgacaacgcgaatggtacttccggtattgtcgagatcgccccagacgtgttcgcagtcgcaactggcaagttcagtgctcttgcaacgccggttgctgaaacggccgtcatctacgaactgaatttgtctggatccaagccaaccacgcgtgttctggccaagatgcccaaggctacgtttttgaatggcttgaccaagattcacaattgctcagggcctactcataccattctggctgctgatactggactgagcttgacttggcgcattgatgtaaacaccggcgaatacgacatcgcggctcagtttccacaaatgaacgcaaactcctctgccgccatcccaatcggtatcaacggcatcaaagtcaagcgtggattcctgtactggtctaactcgaacttccacaccattttccgcgttcctatcagcaaagatggctacgcttcaaaagacgcaatcgttgagcctgttgcgcgtttcgagaacggatttattgacgacttccaatttgatgcggatggcgctatctggggtgccaccaacctaaagaatacagttgaagtatcgaaggacaacgggaccggcgtcgtggtggcgggctcgcctgtccagctcactgtcgctggtgacactgctgtctcattcggtcgcactgacaaggacaaggatatcgtctacgtgagcaatggaggtgctatcgcgaaccccgtcaacggtactctgacagagccggctaaggttgtagcgattgatagatcagggttcgttttctag

SEQ ID NO: 17600 - protein, 344 aa, Muscodor strobelii
  misc_feature: SGI Peptide ID NO. 565880
  misc_feature (27)..(338): NCBI GI: 256729493 Blast Desc: NECHADRAFT_47685 [Nectria haematococca mpVI 77-13-4]
  misc_feature (21)..(338): NCBI GI: 256722873 Blast Desc: NECHADRAFT_52990 [Nectria haematococca mpVI 77-13-4]
  misc_feature (9)..(343): NCBI GI: 171683788 Blast Desc: protein product [Podospora anserina] gi|170941854|emb|CAP67507.1| protein product [Podospora anserina]
  misc_feature (29)..(336): NCBI GI: 46110901 Blast Desc: FG02332.1 [Gibberella zeae PH-1]
  misc_feature (138)..(342): NCBI GI: 85095914 Blast Desc: NCU05626 [Neurospora crassa OR74A] gi|28921649|gb|EAA30934.1| [Neurospora crassa OR74A]
  misc_feature (34)..(337): NCBI GI: 115397413 Blast Desc: [Aspergillus terreus NIH2624] gi|114192489|gb|EAU34189.1| [Aspergillus terreus NIH2624]
  misc_feature (34)..(337): NCBI GI: 119482818 Blast Desc: NFIA_026140 [Neosartorya fischeri NRRL 181] gi|119409592|gb|EAW19540.1| conserved [Neosartorya fischeri NRRL 181]
  misc_feature (1)..(338): NCBI GI: 154294557 Blast Desc: BC1G_13881 [Botryotinia fuckeliana B05.10] gi|150844721|gb|EDN19914.1| BC1G_13881 [Botryotinia fuckeliana B05.10]
  misc_feature (5)..(292): NCBI GI: 238846091 Blast Desc: conserved [Microsporum canis CBS 113480]
  misc_feature (34)..(340): NCBI GI: 256721057 Blast Desc: NECHADRAFT_55444 [Nectria haematococca mpVI 77-13-4]
MLFSRLSVLITVVATGVSATSLPGFSSLSLPSRTIFQLNDTGTFFESITQRSNGDLLVTLLQPAATVYQIKNPLSESPEGSILTTFDNANGTSGIVEIAPDVFAVATGKFSALATPVAETAVIYELNLSGSKPTTRVLAKMPKATFLNGLTKIHNCSGPTHTILAADTGLSLTWRIDVNTGEYDIAAQFPQMNANSSAAIPIGINGIKVKRGFLYWSNSNFHTIFRVPISKDGYASKDAIVEPVARFENGFIDDFQFDADGAIWGATNLKNTVEVSKDNGTGVVVAGSPVQLTVAGDTAVSFGRTDKDKDIVYVSNGGAIANPVNGTLTEPAKVVAIDRSGFVF

SEQ ID NO: 17601 - DNA, 1731 bp, Muscodor strobelii
  misc_feature: SGI cDNA ID NO. 565881
  misc_feature: Reduced expression when VOC is produced
  misc_feature: Encodes the peptide sequence at SEQ ID NO 17602
atgtcaacgtcacgtagtcccgtgggaggtgtcgaccctctggaaatgttggatctatcagaatacgacgccatgccgtatcagtcgccatcagtgtcgccggctacgtcgaataagccacagtttggacgtgccacggcggcaatggccacaacatcgagcatcatgccaccgaaccaggttctatccggccctagccatcagtatgaccagtacaagcaacagactcccttcgtgccgggtgctttggccagcacgctcgccatcaacgaaagcaatgtccacatcaccggctataatctggaatacatcaacccgggcgaggagctcttcgacttcaactccgccccgtctcagaactcgttgacgccggacatggatctggattttgactcgcccgccgatcaggcgtttttcttcccgcctaccccttcgacctcaatgccccagcatgggcttgatatgcgctcgccgaccgtgcccactacagtcagcaacgttggcaaaatgtaccccggcatgcaccagcaggctgctttggccaaggcccaggcacagcagaggcagcagcagcagatcatccagcaccagcaacgcacccagcagcaacagcagatgagcaagccgcagccacgatctaaagctgccttgccggctgatcctcttgtcgaacagaagattactcaactgctaaattcgatgaggtcaagggtcgcctcgtccgaggatggagatgactcgccgattctgcaaatcaaccgccccaagaaggaggaggatgaaatggatgaagacgagcgactactcgccagtgaggagggcaagaagctgagcagcaaagaacgtcgccaactgcggaacaaggtttctgctcgtgccttccggtcaaggagaaaagaatatatcggtcagcttgagagcgagattgctggaaaggttactgagaatagcgagctccgtgcacagaatcgcgctttgatggaggagaacaaacggttgacagatctcacacgcatgctgctttcctcttcgtcattctcggacttcttggatggtcttagccggaatcctacggtccctgcagtgcagccccaaatcgagcaaagacatgccgaacctcaacgggcacccaaagatgtcaacccatacaatggcgcaggtcagaaccagcaccaacagattggcatggtcatgatccctgaacagacaatggatttctccatgttgaacatcaacaatgacgtcttcaactaccaaccccaagtcttcgccgtcctagagacacccgaacccccggtcatcgataccgatactctgagaggcaaatcttctaattttgtgggcgagtcgtcactagaagaaagtgacaagacagacgcccctatccttgaggcacccatcgcacctattgtcgagaagtcgcagccgtctgagattccggtcgcttccgagaacgtcgtcgaaaaaaagcctgccaacctggatgctgatatcttcgacgacgacgagacttgcactcaaccaccagcatcggtcgaactagacacagaggcgctcgctacagagggtgtctttggtggtgtcgaaccggagaaggcccttgcccgttatgagttgactgaagcttgtgaagaagatgaggtcgctaccgttgccttgaggaggatagaacgtcttacctccagcatcgagtctactattaccagattagagcggttctgtcttgaatag

SEQ ID NO: 17602 - protein, 576 aa, Muscodor strobelii
  misc_feature: SGI Peptide ID NO. 565881
  misc_feature (275)..(338): Pfam Id: PF00170 Pfam Desc: bZIP transcription factor
  misc_feature (275)..(329): Pfam Id: PF07716 Pfam Desc: Basic region leucine zipper
  misc_feature (16)..(575): NCBI GI: 261357245 Blast Desc: conserved [Verticillium albo-atrum VaMs.102]
  misc_feature (9)..(576): NCBI GI: 256730776 Blast Desc: NECHADRAFT_65174 [Nectria haematococca mpVI 77-13-4]
  misc_feature (2)..(571): NCBI GI: 39942416 Blast Desc: MGG_03288 [Magnaporthe grisea 70-15] gi|145015707|gb|EDK00197.1| MGG_03288 [Magnaporthe grisea 70-15]
  misc_feature (1)..(575): NCBI GI: 171689678 Blast Desc: protein product [Podospora anserina] gi|170944801|emb|CAP70913.1| protein product [Podospora anserina]
  misc_feature (11)..(576): NCBI GI: 46109346 Blast Desc: FG01555.1 [Gibberella zeae PH-1]
  misc_feature (2)..(575): NCBI GI: 156065637 Blast Desc: SS1G_00829 [Sclerotinia sclerotiorum 1980] gi|154691688|gb|EDN91426.1| SS1G_00829 [Sclerotinia sclerotiorum 1980]
  misc_feature (11)..(575): NCBI GI: 225561351 Blast Desc: conserved [Ajellomyces capsulatus G186AR]
  misc_feature (64)..(570): NCBI GI: 239612647 Blast Desc: conserved [Ajellomyces dermatitidis ER-3]
  misc_feature (61)..(570): NCBI GI: 115397495 Blast Desc: conserved [Aspergillus terreus NIH2624] gi|114192530|gb|EAU34230.1| conserved [Aspergillus terreus NIH2624]
  misc_feature (30)..(570): NCBI GI: 238483973 Blast Desc: bZIP transcription factor (LziP), [Aspergillus flavus NRRL3357] gi|220701275|gb|EED57613.1| bZIP transcription factor (LziP), [Aspergillus flavus NRRL3357]
  misc_feature: Useful for introducing or modulating the production of volatile compounds
MSTSRSPVGGVDPLEMLDLSEYDAMPYQSPSVSPATSNKPQFGRATAAMATTSSIMPPNQVLSGPSHQYDQYKQQTPFVPGALASTLAINESNVHITGYNLEYINPGEELFDFNSAPSQNSLTPDMDLDFDSPADQAFFFPPTPSTSMPQHGLDMRSPTVPTTVSNVGKMYPGMHQQAALAKAQAQQRQQQQIIQHQQRTQQQQQMSKPQPRSKAALPADPLVEQKITQLLNSMRSRVASSEDGDDSPILQINRPKKEEDEMDEDERLLASEEGKKLSSKERRQLRNKVSARAFRSRRKEYIGQLESEIAGKVTENSELRAQNRALMEENKRLTDLTRMLLSSSSFSDFLDGLSRNPTVPAVQPQIEQRHAEPQRAPKDVNPYNGAGQNQHQQIGMVMIPEQTMDFSMLNINNDVFNYQPQVFAVLETPEPPVIDTDTLRGKSSNFVGESSLEESDKTDAPILEAPIAPIVEKSQPSEIPVASENVVEKKPANLDADIFDDDETCTQPPASVELDTEALATEGVFGGVEPEKALARYELTEACEEDEVATVALRRIERLTSSIESTITRLERFCLE

SEQ ID NO: 17603 - DNA, 2494 bp, Muscodor strobelii
  misc_feature: SGI EST ID NO. CUFF.41340.0
  misc_feature: Variant of the nucleotide sequence at SEQ ID NO 17601
ccgctgttccctcgccatcgagcgttgttccggcttgagttttatgtatcctcattcccccaatccacgtccgcgcggccccttaccctcctcattcttgtccaatctagatcctatctcatctacattcttccttccacatctctcaataattatccatcaattatcgactctgtccacctatccaacattgacgtcgcttgctctacacttctctgcaattgcacttgagaccccagagaagctctaacgaacactatctactatccagcgctttactaatccgaggagccgggccaacgctatcagacccggactgccgacgacttcatctcgtctcgcccttcggccaccgcatctcccatagcaaatgtcaacgtcacgtagtcccgtgggaggtgtcgaccctctggaaatgttggatctatcagaatacgacgccatgccgtatcagtcgccatcagtgtcgccggctacgtcgaataagccacagtttggacgtgccacggcggcaatggccacaacatcgagcatcatgccaccgaaccaggttctatccggccctagccatcagtatgaccagtacaagcaacagactcccttcgtgccgggtgctttggccagcacgctcgccatcaacgaaagcaatgtccacatcaccggctataatctggaatacatcaacccgggcgaggagctcttcgacttcaactccgccccgtctcagaactcgttgacgccggacatggatctggattttgactcgcccgccgatcaggcgtttttcttcccgcctaccccttcgacctcaatgccccagcatgggcttgatatgcgctcgccgaccgtgcccactacagtcagcaacgttggcaaaatgtaccccggcatgcaccagcaggctgctttggccaaggcccaggcacagcagaggcagcagcagcagatcatccagcaccagcaacgcacccagcagcaacagcagatgagcaagccgcagccacgatctaaagctgccttgccggctgatcctcttgtcgaacagaagattactcaactgctaaattcgatgaggtcaagggtcgcctcgtccgaggatggagatgactcgccgattctgcaaatcaaccgccccaagaaggaggaggatgaaatggatgaagacgagcgactactcgccagtgaggagggcaagaagctgagcagcaaagaacgtcgccaactgcggaacaaggtttctgctcgtgccttccggtcaaggagaaaagaatatatcggtcagcttgagagcgagattgctggaaaggttactgagaatagcgagctccgtgcacagaatcgcgctttgatggaggagaacaaacggttgacagatctcacacgcatgctgctttcctcttcgtcattctcggacttcttggatggtcttagccggaatcctacggtccctgcagtgcagccccaaatcgagcaaagacatgccgaacctcaacgggcacccaaagatgtcaacccatacaatggcgcaggtcagaaccagcaccaacagattggcatggtcatgatccctgaacagacaatggatttctccatgttgaacatcaacaatgacgtcttcaactaccaaccccaagtcttcgccgtcctagagacacccgaacccccggtcatcgataccgatactctgagaggcaaatcttctaattttgtgggcgagtcgtcactagaagaaagtgacaagacagacgcccctatccttgaggcacccatcgcacctattgtcgagaagtcgcagccgtctgagattccggtcgcttccgagaacgtcgtcgaaaaaaagcctgccaacctggatgctgatatcttcgacgacgacgagacttgcactcaaccaccagcatcggtcgaactagacacagaggcgctcgctacagagggtgtctttggtggtgtcgaaccggagaaggcccttgcccgttatgagttgactgaagcttgtgaagaagatgaggtcgctaccgttgccttgaggaggatagaacgtcttacctccagcatcgagtctactattaccagattagagcggttctgtcttgaatagcatgttttcacgtctactacttgttgattcttgttacaataccttttgggatctatgagcaaaggtggacgaatcggcgttagggatggcaaagagaattcacagagcggctcgcattaattttcctatttcaccatatatagttgggtataccttggggacggagtcatgttatcacatgagcgaagaccatggcttattattagccgcaaccacattggtcctttttatgagaaaactaagatctgggttctatataccctggaacgagatagatagctaggccttaagccttcatcttaatgaggatatagtcctcattacattgatctcgtactttgtgtgatgtactttgtgtgtcatgtgaacgtagctcaccaatgccaaattgta

SEQ ID NO: 17604 - DNA, 546 bp, Muscodor strobelii
  misc_feature: SGI cDNA ID NO. 565882
  misc_feature: Encodes the peptide sequence at SEQ ID NO 17605
atggtcatgatccctgaacagacaatggatttctccatgttgaacatcaacaatgacgtcttcaactaccaaccccaagtcttcgccgtcctagagacacccgaacccccggtcatcgataccgatactctgagaggcaaatcttctaattttgtgggcgagtcgtcactagaagaaagtgacaagacagacgcccctatccttgaggcacccatcgcacctattgtcgagaagtcgcagccgtctgagattccggtcgcttccgagaacgtcgtcgaaaaaaagcctgccaacctggatgctgatatcttcgacgacgacgagacttgcactcaaccaccagcatcggtcgaactagacacagaggcgctcgctacagagggtgtctttggtggtgtcgaaccggagaaggcccttgcccgttatgagttgactgaagcttgtgaagaagatgaggtcgctaccgttgccttgaggaggatagaacgtcttacctccagcatcgagtctactattaccagattagagcggttctgtcttgaatag

SEQ ID NO: 17605 - protein, 181 aa, Muscodor strobelii
  misc_feature: SGI Peptide ID NO. 565882
  misc_feature (1)..(180): NCBI GI: 261357245 Blast Desc: conserved [Verticillium albo-atrum VaMs.102]
  misc_feature (1)..(181): NCBI GI: 256730776 Blast Desc: NECHADRAFT_65174 [Nectria haematococca mpVI 77-13-4]
  misc_feature (1)..(176): NCBI GI: 39942416 Blast Desc: MGG_03288 [Magnaporthe grisea 70-15] gi|145015707|gb|EDK00197.1| MGG_03288 [Magnaporthe grisea 70-15]
  misc_feature (1)..(181): NCBI GI: 46109346 Blast Desc: FG01555.1 [Gibberella zeae PH-1]
  misc_feature (1)..(176): NCBI GI: 171689678 Blast Desc: protein product [Podospora anserina] gi|170944801|emb|CAP70913.1| protein product [Podospora anserina]
  misc_feature (1)..(180): NCBI GI: 156065637 Blast Desc: SS1G_00829 [Sclerotinia sclerotiorum 1980] gi|154691688|gb|EDN91426.1| SS1G_00829 [Sclerotinia sclerotiorum 1980]
  misc_feature (1)..(175): NCBI GI: 239612647 Blast Desc: conserved [Ajellomyces dermatitidis ER-3]
  misc_feature (1)..(68): NCBI GI: 67517357 Blast Desc: AN0951.2 [Aspergillus nidulans FGSC A4] gi|40746824|gb|EAA65980.1| AN0951.2 [Aspergillus nidulans FGSC A4] gi|259488757|tpe|CBF88457.1| TPA: b-zip transcription factor
  misc_feature (1)..(175): NCBI GI: 261191544 Blast Desc: conserved [Ajellomyces dermatitidis SLH14081] gi|239589946|gb|EEQ72589.1| conserved [Ajellomyces dermatitidis SLH14081]
  misc_feature (1)..(175): NCBI GI: 115397495 Blast Desc: conserved [Aspergillus terreus NIH2624] gi|114192530|gb|EAU34230.1| conserved [Aspergillus terreus NIH2624]
MVMIPEQTMDFSMLNINNDVFNYQPQVFAVLETPEPPVIDTDTLRGKSSNFVGESSLEESDKTDAPILEAPIAPIVEKSQPSEIPVASENVVEKKPANLDADIFDDDETCTQPPASVELDTEALATEGVFGGVEPEKALARYELTEACEEDEVATVALRRIERLTSSIESTITRLERFCLE

SEQ ID NO: 17606 - DNA, 2494 bp, Muscodor strobelii; identical to SEQ ID NO: 17603
  misc_feature: SGI EST ID NO. CUFF.41340.0
  misc_feature: Variant of the nucleotide sequence at SEQ ID NO 17604

SEQ ID NO: 17607 - DNA, 1605 bp, Muscodor strobelii
  misc_feature: SGI cDNA ID NO. 565883
  misc_feature: Elevated expression when VOC is produced
  misc_feature: Encodes the peptide sequence at SEQ ID NO 17608
atgctatcccgaatatcagtctcgcctcttctgactccatctgatttcgactcagcgcatgaatggtacgtggacccctaccttcgcatcaatgccgtagctctcgaagttgcttccagtgctaataatattgtacaatatggacaaatactgcgcgagaaacctcaccatagtgtgggattctgggatcgtaaattgaacaacgtgcggaatcacgtgctcggaaaatggcttacgacccttttcatcttgattgtatttgtattcggtgtactctcactacactggggagttctatacgtcgtgccgcggaaattgaacaacctcactgtccatgtcgtggacttcgatggcgcacaaccaccgtataccaacgtgacaccgatcgtcggaccggtaatgacgaacttgacacaacgactgaactgggaagaggactccaaattgctcacctaccatgtcgtcccgcctcgacaataccaatacgacccaattgccgtgcgcaaggcggtatacgacttcaagatatgggcagcgatcatcatcaacccgaatgccacgacggcactcatagacgccatcatgaggggcaacgcttcgtatgatccgacaggcgcagtgcagtatatcatcgtgtctgcgcgccaggagatgacttacaacgaatacatccgaccacagctacaaagtatcacttcggacttcatgacgcaattcggcaaaaattggacacagaccatcctatcgaataactcatacgcacctgcggtcatggctcgcgccgcggcagccgtgaatcccggcgtcgtacctctcgagatcgatctacgtcctttcggaccatcaactgctaatcctgctgttagcatcgggctcatctatctcatcatgattgcgtttttctcattctcattcttcatgcctatccacatcaatttcctcaaacccaaggaccacccaccactacacttcaggcacctaataatctggcgctggctcgccacaataacaacctacctcttcctatccctaacctactccctcatatccctctgtttcggcgtgccattcttcaacccccccgcctcaccaacagaagtagccatcaacgcaacagcctacgggcactactcattccccatctactggggcataaacttcctcggcctctcctctttaggactcgcctgcgagaacgcaatcatgatcctagggcagccctggagcgccatatggctgatgctttggatgacgatgaacgtcgcgacttcattttactctcttgagttggcgccgggtttcttcaggtgggggtatgtctggccgcttcaccatgttgttgaggcgactagacatgtgatttttgacctgaagagtaatttgggagttaatttgggggtgctgggtgcttggtgtgcggttggcacgggattgttccctgtttgttcgtgggttatgtggtggcgtatgagatttgaacagaggaagagggataaggcggaggatagggcagttgggaatatgatggatggggacttggagatctcgaagaaagttggtgtgatgccgccgaagatgaagagggggtttatgaggggtggttag

SEQ ID NO: 17608 - protein, 534 aa, Muscodor strobelii
  misc_feature: SGI Peptide ID NO. 565883
  misc_feature (53)..(491): NCBI GI: 238492671 Blast Desc: conserved [Aspergillus flavus NRRL3357] gi|220696066|gb|EED52408.1| conserved [Aspergillus flavus NRRL3357]
  misc_feature (35)..(491): NCBI GI: 119487180 Blast Desc: NFIA_029800 [Neosartorya fischeri NRRL 181] gi|119410602|gb|EAW20548.1| conserved [Neosartorya fischeri NRRL 181]
  misc_feature (53)..(491): NCBI GI: 121714495 Blast Desc: conserved [Aspergillus clavatus NRRL 1] gi|119403012|gb|EAW13432.1| conserved [Aspergillus clavatus NRRL 1]
  misc_feature (54)..(491): NCBI GI: 255933802 Blast Desc: Pc12g14760 [Penicillium chrysogenum Wisconsin 54-1255] gi|211582899|emb|CAP81103.1| Pc12g14760 [Penicillium chrysogenum Wisconsin 54-1255]
  misc_feature (53)..(491): NCBI GI: 145248902 Blast Desc: An14g01630 [Aspergillus niger] gi|134081463|emb|CAK46476.1| protein product [Aspergillus niger]
  misc_feature (85)..(493): NCBI GI: 169611306 Blast Desc: SNOG_08763 [Phaeosphaeria nodorum SN15] gi|160702262|gb|EAT83931.2| SNOG_08763 [Phaeosphaeria nodorum SN15]
  misc_feature (33)..(497): NCBI GI: 242815522 Blast Desc: conserved [Talaromyces stipitatus ATCC 10500] gi|218714924|gb|EED14347.1| conserved [Talaromyces stipitatus ATCC 10500]
  misc_feature (52)..(491): NCBI GI: 67541971 Blast Desc: AN7149.2 [Aspergillus nidulans FGSC A4] gi|40742211|gb|EAA61401.1| AN7149.2 [Aspergillus nidulans FGSC A4]
  misc_feature (52)..(491): NCBI GI: 259483520 Blast Desc: TPA: conserved [Aspergillus nidulans FGSC A4]
  misc_feature (59)..(491): NCBI GI: 189205615 Blast Desc: MNNG and nitrosoguanidine resistance protein [Pyrenophora tritici-repentis Pt-1C-BFP] gi|187975235|gb|EDU41861.1| MNNG and nitrosoguanidine resistance
  misc_feature: Useful for introducing or modulating the production of volatile compounds
MLSRISVSPLLTPSDFDSAHEWYVDPYLRINAVALEVASSANNIVQYGQILREKPHHSVGFWDRKLNNVRNHVLGKWLTTLFILIVFVFGVLSLHWGVLYVVPRKLNNLTVHVVDFDGAQPPYTNVTPIVGPVMTNLTQRLNWEEDSKLLTYHVVPPRQYQYDPIAVRKAVYDFKIWAAIIINPNATTALIDAIMRGNASYDPTGAVQYIIVSARQEMTYNEYIRPQLQSITSDFMTQFGKNWTQTILSNNSYAPAVMARAAAAVNPGVVPLEIDLRPFGPSTANPAVSIGLIYLIMIAFFSFSFFMPIHINFLKPKDHPPLHFRHLIIWRWLATITTYLFLSLTYSLISLCFGVPFFNPPASPTEVAINATAYGHYSFPIYWGINFLGLSSLGLACENAIMILGQPWSAIWLMLWMTMNVATSFYSLELAPGFFRWGYVWPLHHVVEATRHVIFDLKSNLGVNLGVLGAWCAVGTGLFPVCSWVMWWRMRFEQRKRDKAEDRAVGNMMDGDLEISKKVGVMPPKMKRGFMRGG

SEQ ID NO: 17609 - DNA, 2573 bp, Muscodor strobelii
  misc_feature: SGI EST ID NO. CUFF.41386.0
  misc_feature: Variant of the nucleotide sequence at SEQ ID NO 17607
ttttcatcttgattgtatttgtattcggtgtactctcactacactggggagttctatacgtcgtgccgcggaaattgaacaacctcactgtccatgtcgtggacttcgatggcgcacaaccaccgtataccaacgtgacaccgatcgtcggaccggtaatgacgaacttgacacaacgactgaactgggaagaggactccaaattgctcacctaccatgtcgtcccgcctcgacaataccaatacgacccaattgccgtgcgcaaggcggtatacgacttcaagatatgggcagcgatcatcatcaacccgaatgccacgacggcactcatagacgccatcatgaggggcaacgcttcgtatgatccgacaggcgcagtgcagtatatcatcgtgtctgcgcgccaggagatgacttacaacgaatacatccgaccacagctacaaagtatcacttcggacttcatgacgcaattcggcaaaaattggacacagaccatcctatcgaataactcatacgcacctgcggtcatggctcgcgccgcggcagccgtgaatcccggcgtcgtacctctcgagatcgatctacgtcctttcggaccatcaactgctaatcctgctgttagcatcgggctcatctatctcatcatgattgcgtttttctcattctcattcttcatgcctatccacatcaatttcctcaaacccaaggaccacccaccactacacttcaggcacctaataatctggcgctggctcgccacaataacaacctacctcttcctatccctaacctactccctcatatccctctgtttcggcgtgccattcttcaacccccccgcctcaccaacagaagtagccatcaacgcaacagcctacgggcactactcattccccatctactggggcataaacttcctcggcctctcctctttaggactcgcctgcgagaacgcaatcatgatcctagggcagccctggagcgccatatggctgatgctttggatgacgatgaacgtcgcgacttcattttactctcttgagttggcgccgggtttcttcaggtgggggtatgtctggccgcttcaccatgttgttgaggcgactagacatgtgatttttgacctgaagagtaatttgggagttaatttgggggtgctgggtgcttggtgtgcggttggcacgggattgttccctgtttgttcgtgggttatgtggtggcgtatgagatttgaacagaggaagagggataaggcggaggatagggcagttgggaatatgatggatggggacttggagatctcgaagaaagttggtgtgatgccgccgaagatgaagagggggtttatgaggggtggttagggggagtgagatggtgaagttcttgttgtgtatatgtatccatgtggtgatgagggaggataggtggtttggaggatgtaatagtaatgtctatcatatatatcgatttttacgggtgaggtttctctacttagaatgaggtcggaagaccgtgttcacgctttgttgaattactggtaattgatgatagatctgtgacaccatctgtcttgcatgtgatattaagtgacgttgcacataattccatctttgtttgcatgagaaattcctgacggaatttgctgtcacacatcatcacggtgagattcagataatgcccgttgatacccgttgaggaattatcatgcgaggatatccctaggactcatttcttcaacatctcaacctggaaataatttcgaagtttccaaagaaacgaagatctcgaagcaatcgacgggatcttcttctgctaactgaattcgtctcggcattacttggatattcaaatcatatcaccgattgatccccaccgcacttcgcttcagtaggtaggcaacgccttggacctggatgccggaatgtcattatctcggcccggaggtccagaccaagtggaatgaagtggatggatcttgtcgcgttgccgccgctatctggaggatttgggggctgaggacaagttcaatcaatagtgttattgatggtgagaaggatccttacgagatatcacgaagcgagcaagggcatcggcaaggacttaacgccgtaaccaaggtaagcctggtctaggttgatacccaagtccgaaaaattggtgttctacggcactgaccaacctcaatacatacgtgggtgttaggtcctggggaaaaggtatttgcgtaagcgtaaaagacgtcaccatcacgtataggtcgtacgttggcaagtaattaatcgaatctcgaattgacaaacatgagctcgatcgaccaacagatgagatgcgcggccggcatatgtacatgtaaagcatagactattgggtaggtggtattgcgacagcaatggactggggtaacgaaaaacccgagatcgactcgatgggggtaaattgacctggggactgcgttgtgaacatcgcgaggtcaacgcaagggtggttttgataagctgcgatctacagtaactgtgttccccaaaggctcgattgaagccccatgtaagggggagctctcaataattgag

SEQ ID NO: 17610 - DNA, 876 bp, Muscodor strobelii
  misc_feature: SGI cDNA ID NO. 565884
  misc_feature: Reduced expression when VOC is produced
  misc_feature: Encodes the peptide sequence at SEQ ID NO 17611
atgtcgtatctgccaaccaagcgccagcgatccaacacgtcccgagagtcgagcaacgccatccctcagaccaacccgcccgccctgaggcagcacccttcccatctcaacgccaaccttgctctctatccctccgctgccgctgctgctgccgccgccaccgccgtctccaatggctacaccaacagtccctacgcaaccgccgtctctcccgtccaccaccagccccagtccgtcaactacgcacagtacccgactgcctccgtgaccgcacacgcccagcacaatggctatagcacaaccggcagtccggggccgtaccagaatcccgcctcgactgctgcctacggtgcctcggccacctacggcaacgcccaccaggccaacccctatgccaaccagtacacacatgccacggcgagcccgcagctctcgcctctccctggacagtacactacggctgccctgaacagcgtcacgaatgggaactacggtcagacgactcacaatccccaacaagccacccggatgccgtattctccggtctctgccagccatcagtcgacagcatcatatcatcacccttcccagagaagcgacaccctcggctcgcttcacacgcccccacagcataacctctcctcgtatggagactcgtacgcctctcacgcgacatcgcatgcctcacagtaccagcctgcgcactctccgtatcccgagtcactgggaactcactacagcccaccgcctctgccgactccccacgatgtctcccgccatatgtctgaagacttgccccaacatgatatagacgatgaggatgcccagggggagccggcagacgaatcacccgaggtacatggccaccccctatag

SEQ ID NO: 17611 - protein, 291 aa, Muscodor strobelii
  misc_feature: SGI Peptide ID NO. 565884
  misc_feature: Useful for introducing or modulating the production of volatile compounds
MSYLPTKRQRSNTSRESSNAIPQTNPPALRQHPSHLNANLALYPSAAAAAAAATAVSNGYTNSPYATAVSPVHHQPQSVNYAQYPTASVTAHAQHNGYSTTGSPGPYQNPASTAAYGASATYGNAHQANPYANQYTHATASPQLSPLPGQYTTAALNSVTNGNYGQTTHNPQQATRMPYSPVSASHQSTASYHHPSQRSDTLGSLHTPPQHNLSSYGDSYASHATSHASQYQPAHSPYPESLGTHYSPPPLPTPHDVSRHMSEDLPQHDIDDEDAQGEPADESPEVHGHPL

SEQ ID NO: 17612 - DNA, 3094 bp, Muscodor strobelii
  misc_feature: SGI EST ID NO. CUFF.41532.1
  misc_feature: Variant of the nucleotide sequence at SEQ ID NO 17610
ctcgcgtctccgtcgctggctaggtctagtgtgcaatttgccttaattctgtacatgtacatacatgcctgtaccgtaaggtaggtatctgttgaggccggtaatctgtactcgcgtgtaaatggtgttgtcttttgcaaattgaattccaagttgaagctgggcaggcaggttcaatgttggtagcgcggggccgtttgctggacgccacttttatttttttcctgcccttgaatccgcccgtacctgatgttggccgggatgtatctctgaaatttggagagttatggatgtagcgtaggagcatgatcaccacgtatctcgtctgctcagggtggtcagaaaatccgaattatttctaaacacgtgcaggctttgcacatcatcttgcacatcactctcactctctcacccacaccgtcggatctcccaccgggactaatctaatcctcacgtacagtctgtaccttacacatgtgtcctctacattgcttctactttctaccttactccctgcatacctccttcactcctctgtcgttctcttccattcgccatctagattttgctagagtgtagcggtagcggatgctgggccacaccatcgcatcaattagacgaacctggatgacctagacaccctagactcggcgcccggagacaccttgtcctagatttactcaagattcacatccaagattcgaggaagaagcagcaggggatccaaacggtgacgctgtgctgatgtagagcacacaacgcttccggctcgaccaggcagacgacgcagaacctatccaacggtgtgtgtgtgttgctaacgaacggagtcaacggtgtgaccggaaccgaggaggcccttgtgtgtcatcgcccgctcgcccgctcgcacaattgccatgtcgtatctgccaaccaagcgccagcgatccaacacgtcccgagagtcgagcaacgccatccctcagaccaacccgcccgccctgaggcagcacccttcccatctcaacgccaaccttgctctctatccctccgctgccgctgctgctgccgccgccaccgccgtctccaatggctacaccaacagtccctacgcaaccgccgtctctcccgtccaccaccagccccagtccgtcaactacgcacagtacccgactgcctccgtgaccgcacacgcccagcacaatggctatagcacaaccggcagtccggggccgtaccagaatcccgcctcgactgctgcctacggtgcctcggccacctacggcaacgcccaccaggccaacccctatgccaaccagtacacacatgccacggcgagcccgcagctctcgcctctccctggacagtacactacggctgccctgaacagcgtcacgaatgggaactacggtcagacgactcacaatccccaacaagccacccggatgccgtattctccggtctctgccagccatcagtcgacagcatcatatcatcacccttcccagagaagcgacaccctcggctcgcttcacacgcccccacagcataacctctcctcgtatggagactcgtacgcctctcacgcgacatcgcatgcctcacagtaccagcctgcgcactctccgtatcccgagtcactgggaactcactacagcccaccgcctctgccgactccccacgatgtctcccgccatatgtctgaagacttgccccaacatgatatagacgatgaggatgcccagggggagccggcagacgaatcacccgaggtacatggccaccccctatagggcgtcagttccgttatatggtgttacgtaaagacaaagctaacattagagccaatttttagatatatacgcattcagaaccatcgagaccagtctcctcgatacccactccatcgaccgatccaaccgacctctccaagaccaacgagccgaagtgtaattgtaaaaagggacggggcaagaagaaagcttgccagtcttgtgattgtagcaaatatggcatgccctgcagtaccttgtgttcatgcggtcccagctgcgggaacccctttgccgatctctctaccttctttggaccaaatagcagttcctcaaaaccctgcggcgccaacccttgttttgcgacgtggttgacaaaccagttaaatatagaagacctcgatgtggaattaatggtagacattctgctgacggacgacgaatcgtgggcacaaattcggggctataccgaggcattccagcgatgggaagacgcgtggaagaaagtgcggaatggcaaggccaagaaggccaaagaggaacgagagcgtctggaattcgagctcctgcgcggcgcgctaggcaacagctcccctgacgattttaatggttatcggtacagtttttgccagagcaagtgggttcccagcgacctctgggaacactgtcccgagtgcgcaacatgccgcgctgcgggagaatggcattgcgataggcacggaagatgcaccaaggaccggatatgtcccagctgtgcatcaacgacgacacttccttaccatcttcaacaacatcacccagtacagcagcaacagcagctcatgtactcaacgcatggcacctaatgatcgggtaaaataatgatagaggaacggatttttcttgtcatctctcaaaaagcgggttcgagcaaggttcaaacgcatggcatctcaacggcgcaggttataggaaatacaggttgaatgacgtcaaacataacaaggttacccggatgtaattgcatagatattcggagtacgttcggtatataagggattcagttatgactataagacgagtcgctctacctcatgtaaggtagtcagtctggggatggttcataatatcatagacgtcggctggacactcgggtcgcttgatctcattacccaattatgaggatcaaagtgttcgggtggaaataaatgaagaccacgtctaccatgcctacctacataaatcaacatgtgacagatgttggtatctagattgatcgatacgacacacttatagatccggtattttagagaacccatcatgtaggaccctcaagttgccctatctcccttattagtcgc

SEQ ID NO: 17613 - DNA, 662 bp, Muscodor strobelii
  misc_feature: SGI cDNA ID NO. 565885
  misc_feature: Reduced expression when VOC is produced
  misc_feature: Encodes the peptide sequence at SEQ ID NO 17614
atgggtggtggtggtggtgaagacgggcaaagaccgagtgaggctcgcgggccaagacgaagcgggagcagagccagctgcagtggtctcttgtctgcttcgactggagatgtctggcggggccgcagtgcgatgtgttgttgttgcgctgctgctgcgctgatgcgatctctgcgacagcgaggagccttgagctctgtctgcaacaacacactgctcgccggaatgccgccgctcggtcgccttgctcagggcgccctgaggtcagccaccgtctcgtccagagctgtgcccgtcgccaacctcggcaacaccatcttcgccagctgcatcgtcgccgtccgcccgcggaactacattagcacgacagccccccagcccctccgcaactgggccaacccgtcgcgggcgcaggacacgcagtacgacgacgacatcacggccatctccaggcccagcacagaggcctacaacaacccgggcttcgcatccgacctcggcgacctcgtcatcgagatcggcgacctcacgcgcgcccaggacaagcccaactccgagaaggcccccgccgagaagcaccacctgcgcctcgtcccccgcaccggccgcaccgtccacgtcggcaagggcgtcgacgtcgcccgctccttcaagctgctcgc

SEQ ID NO: 17614 - protein, 220 aa, Muscodor strobelii
  misc_feature: SGI Peptide ID NO. 565885
  misc_feature: Useful for introducing or modulating the production of volatile compounds
MGGGGGEDGQRPSEARGPRRSGSRASCSGLLSASTGDVWRGRSAMCCCCAAAALMRSLRQRGALSSVCNNTLLAGMPPLGRLAQGALRSATVSSRAVPVANLGNTIFASCIVAVRPRNYISTTAPQPLRNWANPSRAQDTQYDDDITAISRPSTEAYNNPGFASDLGDLVIEIGDLTRAQDKPNSEKAPAEKHHLRLVPRTGRTVHVGKGVDVARSFKLL

SEQ ID NO: 17615 - DNA, 525 bp, Muscodor strobelii
  misc_feature: SGI EST ID NO. CUFF.41360.0
  misc_feature: Variant of the nucleotide sequence at SEQ ID NO 17613
ggatgacttccaatagtccaatggacccaaacgacagcatcgccatctgcaactaagctctgtctgcaacaacacactgctcgccggaatgccgccgctcggtcgccttgctcagggcgccctgaggtcagccaccgtctcgtccagagctgtgcccgtcgccaacctcggcaacaccatcttcgccagctgcatcgtcgccgtccgcccgcggaactacattagcacgacagccccccagcccctccgcaactgggccaacccgtcgcgggcgcaggacacgcagtacgacgacgacatcacggccatctccaggcccagcacagaggcctacaacaacccgggcttcgcatccgacctcggcgacctcgtcatcgagatcggcgacctcacgcgcgcccaggacaagcccaactccgagaaggcccccgccgagaagcaccacctgcgcctcgtcccccgcaccggccgcaccgtccacgtcggcaagggcgtcgacgtcgcccgctccttcaagctgctcgc

SEQ ID NO: 17616 - DNA, 2199 bp, Muscodor strobelii
  misc_feature: SGI cDNA ID NO. 565886
  misc_feature: Reduced expression when VOC is produced
  misc_feature: Encodes the peptide sequence at SEQ ID NO 17617
atgtcctatagcccctacggtgccgctcctggcttcggccctccgcccacctatgcgtcttaccccggcgccaatggccctcccggcatgccctcggctccgggactcgctcccccgcccggcatggctgccccgggcatggccccgccccccggcgtccaccagtccaacctcaaccagcccagccggccctccggcatgccccccagcttccaggcgcccccgaacatgcccaacatcaacttcaacgcccccagacctggcctgggagccgatcgcggcttggaccagacgcgccaggccatacgggacaatatgcaagccctggccccgccctcgagggaggagaccgtgcgcaccatctttgtgagcgggatcacggatgggctgggcgggaatcaggccatcgaacagcttcttgctgtggccggcaacctgcgccgttgggaccgtcccctcgactcggccggcaaggagctgagctttggctttgctcagtacgacgacgccgaatcgctgtggctcgcctcggagatcctgcgcgacatccaggtgcccctcaagaagcagactccctcggagacccctgcggccgacgacgacgagacttacgacaagttcgacaaggcgcccctccacttccgtctcgacgagaactctgcaaagtacttggagacgtaccaagagggcaggaccgatgagtcggcctcagaagcaagactcgaggctgcgagaggtgcgttgagacagatgatcaagaacctgttctaccctgcgctgcgctctggcgccgacgaagatgtcaccatgggcgatgcgcccgcctccaacggagagaacgtcgaggtggttaatatccctttggcacaggaggacgaacttgccgatatccctgccgagatgcgcgaaaccgttgctgcagagattgccgctttcagagatcggagcatcaagcgggacctggagcgcctcaagcgagaagaagaactggaagccctcgagcgacaacggaatggcgcgccgcgaccctcgaggttggcatcaccaccgccctccagctccaacaacattcctctcgggccccggggcgtccccaacgccccctccggtccgaaaggccagaaatcagaaatgggtaaagactacaatcgatccgtcaatttcatcaatggaggcatcaccaatggtggcatgacctatcatcgggaagacgaggacgactcggcaagcgacgaagagctgcagcaacgccgcatggcaaaacagaaatcagacgcagagaaggcctatctcgacgcggagagacgctggctgaaccgcgagaagtcacgcacggcggctctagagcgtgagaaggggcgtgatgctgccgacgaggagagcgctgctgccaagcgtgacgaagcactgcactggctcaaaaccttcgacgacgacgctgagatggccaggaagaaagagagctactataaggaccgcagcgcctggattcgtgatcgcgcggccttcaggggaagagagaatgcggccgatgaagctgaccgccaagcggaggaccaggagcgcttgaaggaggaagcggagcaagcacaggccaaaggcatggcagactcattcctcgagagacaagcgcaggaaatggaacagcgaccatcgaacagagtcggtctcaccgcaccgcagcccttcaagttgtctctgggtgcagcagccaaggcccaagcccaacgcgcagcgccgcagaggaagaccatcgccgaggtcgagggtctcctggaggacgaagacgaagacgccagcacgagacggcagcttatcccaatcaagtttgaacccatggcggcagcggccatgtcggacgaagagcgcgatcaggcggtgcgtgctttggcgcaagagatacccaacgaaaaggccgggttgtgggcatgggaggtcaaatgggatttcctggatgagggcgtcatccgcgaaaagctccgaccgttcgtggagaagaagctggtcgaatatctgggcgttcaagaggacctcctcatcgaagtcgtggaggagcacttgcgaaagcatggacagcctggagaattagtggacgaactggctgaggcacttgacgacgaggctgaggctctagtgaagaaactatggcgaatggtcatcttctttaccgagagcgagaagcgcggtctctctgcgtag

SEQ ID NO: 17617 - protein, 732 aa, Muscodor strobelii
  misc_feature: SGI Peptide ID NO. 565886
  misc_feature (1)..(732): NCBI GI: 156030448 Blast Desc: SS1G_14448 [Sclerotinia sclerotiorum 1980] gi|154700839|gb|EDO00578.1| SS1G_14448 [Sclerotinia sclerotiorum 1980]
  misc_feature (1)..(732): NCBI GI: 154291255 Blast Desc: BC1G_15117 [Botryotinia fuckeliana B05.10] gi|150847020|gb|EDN22213.1| BC1G_15117 [Botryotinia fuckeliana B05.10]
  misc_feature (1)..(732): NCBI GI: 170940219 Blast Desc: protein product [Podospora anserina]
  misc_feature (3)..(732): NCBI GI: 258576925 Blast Desc: conserved [Uncinocarpus reesii 1704] gi|237902910|gb|EEP77311.1| conserved [Uncinocarpus reesii 1704]
  misc_feature (3)..(732): NCBI GI: 212536198 Blast Desc: conserved [Penicillium marneffei ATCC 18224] gi|210070654|gb|EEA24744.1| conserved [Penicillium marneffei ATCC 18224]
  misc_feature (17)..(732): NCBI GI: 85108596 Blast Desc: NCU06959 [Neurospora crassa OR74A] gi|28924209|gb|EAA33363.1| [Neurospora crassa OR74A]
  misc_feature (3)..(732): NCBI GI: 119177876 Blast Desc: CIMG_07832 [Coccidioides immitis RS]
  misc_feature (3)..(732): NCBI GI: 240107550 Blast Desc: CPC735_041730 [Coccidioides posadasii C735 delta SOWgp]
  misc_feature (3)..(732): NCBI GI: 169783582 Blast Desc: [Aspergillus oryzae RIB40] gi|83774997|dbj|BAE65120.1| protein product [Aspergillus oryzae]
  misc_feature (3)..(732): NCBI GI: 238842088 Blast Desc: U1 snRNP-associated protein Usp107 [Microsporum canis CBS 113480]
  misc_feature: Useful for introducing or modulating the production of volatile compounds
MSYSPYGAAPGFGPPPTYASYPGANGPPGMPSAPGLAPPPGMAAPGMAPPPGVHQSNLNQPSRPSGMPPSFQAPPNMPNINFNAPRPGLGADRGLDQTRQAIRDNMQALAPPSREETVRTIFVSGITDGLGGNQAIEQLLAVAGNLRRWDRPLDSAGKELSFGFAQYDDAESLWLASEILRDIQVPLKKQTPSETPAADDDETYDKFDKAPLHFRLDENSAKYLETYQEGRTDESASEARLEAARGALRQMIKNLFYPALRSGADEDVTMGDAPASNGENVEVVNIPLAQEDELADIPAEMRETVAAEIAAFRDRSIKRDLERLKREEELEALERQRNGAPRPSRLASPPPSSSNNIPLGPRGVPNAPSGPKGQKSEMGKDYNRSVNFINGGITNGGMTYHREDEDDSASDEELQQRRMAKQKSDAEKAYLDAERRWLNREKSRTAALEREKGRDAADEESAAAKRDEALHWLKTFDDDAEMARKKESYYKDRSAWIRDRAAFRGRENAADEADRQAEDQERLKEEAEQAQAKGMADSFLERQAQEMEQRPSNRVGLTAPQPFKLSLGAAAKAQAQRAAPQRKTIAEVEGLLEDEDEDASTRRQLIPIKFEPMAAAAMSDEERDQAVRALAQEIPNEKAGLWAWEVKWDFLDEGVIREKLRPFVEKKLVEYLGVQEDLLIEVVEEHLRKHGQPGELVDELAEALDDEAEALVKKLWRMVIFFTESEKRGLSA

SEQ ID NO: 17618 - DNA, 4734 bp, Muscodor strobelii
  misc_feature: SGI EST ID NO. CUFF.41798.1
  misc_feature: Variant of the nucleotide sequence at SEQ ID NO 17616
ctgcgcctgggaagctagccccccgataaccacgttcttcggatcttatcacaaagtcgacgtcgcgacgggaccaactcatcccaacctatcccagcctatcccaacctcaaggctcctcgctgtcgcagagatcgcatcagcgcagcagcagcgcaacaacaacacatcgcactgcggccccgccagacatctccagtcgaagcagacaagagaccactgcagctggctctgctcccgcttcgtcttggcccgcgagcctcactcggtctttgcccgtcttcaccaccaccaccacccatcttcggccgccctcgactcgtgtctgcatgtccgccactcgcgcccttgcctcctcgtccctgtccgcccggccctcctgctacggtggcactgcccgccgacagcctggccatgtcctatagcccctacggtgccggtgagaaccactcgtgtccattcctcgtgcccctcgagccgctgccgcccgctgttagtgctgatcacctcaatcccagctcctggcttcggccctccgcccacctatgcgtcttaccccggcgccaatggccctcccggcatgccctcggctccgggactcgctcccccgcccggcatggctgccccgggcatggccccgccccccggcgtccaccagtccaacctcaaccagcccagccggccctccggcatgccccccagcttccaggcgcccccgaacatgcccaacatcaacttcaacgccccgtcatccgtctcggcaccctgtccgccaaaccccagggcgccggtccccgggccgcaaagaccccgacgccccctcctcttccagcagacctggcctgggagccgatcgcggcttggaccagacgcgccaggccatacgggacaatatgcaagccctggccccgccctcgagggaggagaccgtgcgcaccatctttgtgagcgggatcacggatgggctgggcgggaatcaggccatcgaacagcttcttgctgtggccggcaacctgcgccgttgggaccgtcccctcgactcggccggcaaggagctgagctttggctttgctcagtacgacgacgccgaatcgctgtggctcgcctcggagatcctgcgcgacatccaggtgcccctcaagaagcagactccctcggagacccctgcggccgacgacgacgagacttacgacaagttcgacaaggcgcccctccacttccgtctcgacgagaactctgcaaagtacttggagacgtaccaagagggcaggaccgatgagtcggcctcagaagcaagactcgaggctgcgagaggtgcgttgagacagatgatcaagaacctgttctaccctgcgctgcgctctggcgccgacgaagatgtcaccatgggcgatgcgcccgcctccaacggagagaacgtcgaggtggttaatatccctttggcacaggaggacgaacttgccgatatccctgccgagatgcgcgaaaccgttgctgcagagattgccgctttcagagatcggagcatcaagcgggacctggagcgcctcaagcgagaagaagaactggaagccctcgagcgacaacggaatggcgcgccgcgaccctcgaggttggcatcaccaccgccctccagctccaacaacattcctctcgggccccggggcgtccccaacgccccctccggtccgaaaggccagaaatcagaaatgggtaaagactacaatcgatccgtcaatttcatcaatggaggcatcaccaatggtggcatgacctatcatcgggaagacgaggacgactcggcaagcgacgaagagctgcagcaacgccgcatggcaaaacagaaatcagacgcagagaaggcctatctcgacgcggagagacgctggctgaaccgcgagaagtcacgcacggcggctctagagcgtgagaaggggcgtgatgctgccgacgaggagagcgctgctgccaagcgtgacgaagcactgcactggctcaaaaccttcgacgacgacgctgagatggccaggaagaaagagagctactataaggaccgcagcgcctggattcgtgatcgcgcggccttcaggggaagagagaatgcggccgatgaagctgaccgccaagcggaggaccaggagcgcttgaaggaggaagcggagcaagcacaggccaaaggcatggcagactcattcctcgagagacaagcgcaggaaatggaacagcgaccatcgaacagagtcggtctcaccgcaccgcagcccttcaagttgtctctgggtgcagcagccaaggcccaagcccaacgcgcagcgccgcagaggaagaccatcgccgaggtcgagggtctcctggaggacgaagacgaagacgccagcacgagacggcagcttatcccaatcaagtttgaacccatggcggcagcggccatgtcggacgaagagcgcgatcaggcggtgcgtgctttggcgcaagagatacccaacgaaaaggccgggttgtgggcatgggaggtcaaatgggatttcctggatgagggcgtcatccgcgaaaagctccgaccgttcgtggagaagaagctggtcgaatatctgggcgttcaagaggacctcctcatcgaagtcgtggaggagcacttgcgaaagcatggacagcctggagaattagtggacgaactggctgaggcacttgacgacgaggctgaggctctagtgaagaaactatggcgaatggtcatcttctttaccgagagcgagaagcgcggtctctctgcgtagacaagacacgatgaatatcaaacaaaatgtgctattatgtatactatcactgaggacctggccgtgtgcctgccaattcatcatcggcaatcctacacttgatcattagatgcttacccgcctatgtgtacgtgtcccaccgcatattcacagacaggattttgacgcgtcacccaggtgctatgtacctagtttgcccatggagcgtggcgagacaaatacaatgaaagaaaatcatcaacgaggtatgtctgtagagatggagattggcgagagtggtacccaggaagaggggagcttcaagactgcttgcgaaactatgtctggccgttcacgtaggcagcataccaatattgacattgccggtggatctggggtagacatgcctgtcggatgtcagacctggagctacccctttgcttgggcaggagtcttgtggggatggatcccttgcggaatgcggagtcactcacccggctcgaccaagctccccagacttgccgaggcccactgcgatcctcacctcccagctccgagtctccgaaataacaaagagaatctgcctgacaattcgaatctgctttctcctttcgagtcacaaatacagagcgaggatcacataagcacctcagttccaattctatctacctagtttatacatatcaaattcttattgtagatagacctcaagacagaatcctacttacagaagtaagctctctactcctacgagaaacagtttcgcaatgtctgctccctcttacacgcagctgccacccaatctttcttcgccgccgcctccagtcaaagatgtgctggtctcgtttccttcatcacacgtcctactcgtacaactgaaccgccccaaacagctgaacgccattccgcgtccatcgcattttgcctttgacagactatggagttggtatgatgaagaaccatcccttcgctgcgcggtcatcaccggtagtggacgcgccttcagcgcaggcgccgacctcaaggaatgggcaaaactcaacgagccagccgaagcctctgcggacggtaagagtcccgagcaccaagggctgccgatggataaaccgagcacccggttttcgccgggcggattcggtgggataagtaaccgcagtggtgtcaagcccatcatcgcagctgttaacgggatctgctttggcgggggtatggaaatcgcgcttaactgcgatctcgtcatcgcttccgagaaggcgacgttttcgcttcccgaggtcacgataggtgtcgttgcgctggccggggcgcttccgaggctcgctagatcgctggggaagcagcgcgcagccgagatggcacttagtgggaagcagtacactgcggatgagatgttatcctgggggcttgtcaacgagattgtgaagcatgaggaggtggtcaaggctgcactggcttgggcggagaggatagcgggaaatagccccgatgccgtcattgtgactcgtgaagccttgaagatgggctgggagcccgtcggtccccaccaaggtgtcgaaatcattaataagggatggtatgggcggattgagaaaggagacaatatgatcgaaggtgtgaaaagttttgtggagagaaggaagccgatttggaagaatagcaagctttaggagtgagatggaggtatggaaatcgcgatgtgactctgcaacagtacaaaatcacatcgctttacctcctgatacggcatattcatttcaggatggatagaagaatacattcctggtcaggtttcccttaaggcaaatgctctcggagactttcaagggcgacacacgtacagcatcgcgaagtagctcgtcgtaaagaatgtctccggatgtgtatgaatttacattcacattgtgactgagtgctttgatatgggagcatggcaatgtttgtagtcagcgaacctgttttgtttagagattaaggcaga

SEQ ID NO: 17619 - DNA, 900 bp, Muscodor strobelii
  misc_feature: SGI cDNA ID NO. 565887
  misc_feature: Encodes the peptide sequence at SEQ ID NO 17620
atgtctgctccctcttacacgcagctgccacccaatctttcttcgccgccgcctccagtcaaagatgtgctggtctcgtttccttcatcacacgtcctactcgtacaactgaaccgccccaaacagctgaacgccattccgcgtccatcgcattttgcctttgacagactatggagttggtatgatgaagaaccatcccttcgctgcgcggtcatcaccggtagtggacgcgccttcagcgcaggcgccgacctcaaggaatgggcaaaactcaacgagccagccgaagcctctgcggacggtaagagtcccgagcaccaagggctgccgatggataaaccgagcacccggttttcgccgggcggattcggtgggataagtaaccgcagtggtgtcaagcccatcatcgcagctgttaacgggatctgctttggcgggggtatggaaatcgcgcttaactgcgatctcgtcatcgcttccgagaaggcgacgttttcgcttcccgaggtcacgataggtgtcgttgcgctggccggggcgcttccgaggctcgctagatcgctggggaagcagcgcgcagccgagatggcacttagtgggaagcagtacactgcggatgagatgttatcctgggggcttgtcaacgagattgtgaagcatgaggaggtggtcaaggctgcactggcttgggcggagaggatagcgggaaatagccccgatgccgtcattgtgactcgtgaagccttgaagatgggctgggagcccgtcggtccccaccaaggtgtcgaaatcattaataagggatggtatgggcggattgagaaaggagacaatatgatcgaaggtgtgaaaagttttgtggagagaaggaagccgatttggaagaatagcaagctttag

SEQ ID NO: 17620 - protein, 299 aa, Muscodor strobelii
  misc_feature: SGI Peptide ID NO. 565887
  misc_feature (33)..(219): Pfam Id: PF00378 Pfam Desc: Enoyl-CoA hydratase/isomerase family
  misc_feature (133)..(219): Pfam Id: PF00378 Pfam Desc: Enoyl-CoA hydratase/isomerase family
  misc_feature (33)..(87): Pfam Id: PF00378 Pfam Desc: Enoyl-CoA hydratase/isomerase family
  misc_feature (9)..(299): NCBI GI: 170940218 Blast Desc: protein product [Podospora anserina]
  misc_feature (9)..(299): NCBI GI: 256731165 Blast Desc: NECHADRAFT_48735 [Nectria haematococca mpVI 77-13-4]
  misc_feature (17)..(299): NCBI GI: 46122989 Blast Desc: FG05872.1 [Gibberella zeae PH-1]
  misc_feature (20)..(299): NCBI GI: 145607663 Blast Desc: MGG_12244 [Magnaporthe grisea 70-15] gi|145015174|gb|EDJ99742.1| MGG_12244 [Magnaporthe grisea 70-15]
  misc_feature (9)..(299): NCBI GI: 261352621 Blast Desc: carnitinyl-CoA dehydratase [Verticillium albo-atrum VaMs.102]
  misc_feature (15)..(299): NCBI GI: 156032607 Blast Desc: enoyl-CoA hydratase/carnithine racemase [Sclerotinia sclerotiorum 1980] gi|154699403|gb|EDN99141.1| enoyl-CoA hydratase/carnithine racemase [Sclerotinia sclerotiorum 1980]
  misc_feature (15)..(299): NCBI GI: 154298652 Blast Desc: BC1G_11581 [Botryotinia fuckeliana B05.10] gi|150857753|gb|EDN32945.1| BC1G_11581 [Botryotinia fuckeliana B05.10]
  misc_feature (13)..(299): NCBI GI: 119481027 Blast Desc: enoyl-CoA hydratase [Neosartorya fischeri NRRL 181] gi|119408696|gb|EAW18645.1| enoyl-CoA hydratase [Neosartorya fischeri NRRL 181]
  misc_feature (7)..(299): NCBI GI: 67539608 Blast Desc: AN5974.2 [Aspergillus nidulans FGSC A4] gi|40738533|gb|EAA57723.1| AN5974.2 [Aspergillus nidulans FGSC A4]
  misc_feature (12)..(299): NCBI GI: 259479844 Blast Desc: TPA: enoyl-CoA hydratase (AFU_orthologue; AFUA_2G10650) [Aspergillus nidulans FGSC A4]
  misc_feature (34)..(296): SWISSPROT Homolog: EC 4.2.1.17 Enoyl-CoA hydratase
MSAPSYTQLPPNLSSPPPPVKDVLVSFPSSHVLLVQLNRPKQLNAIPRPSHFAFDRLWSWYDEEPSLRCAVITGSGRAFSAGADLKEWAKLNEPAEASADGKSPEHQGLPMDKPSTRFSPGGFGGISNRSGVKPIIAAVNGICFGGGMEIALNCDLVIASEKATFSLPEVTIGVVALAGALPRLARSLGKQRAAEMALSGKQYTADEMLSWGLVNEIVKHEEVVKAALAWAERIAGNSPDAVIVTREALKMGWEPVGPHQGVEIINKGWYGRIEKGDNMIEGVKSFVERRKPIWKNSKL

SEQ ID NO: 17621 - DNA, 4734 bp, Muscodor strobelii; identical to SEQ ID NO: 17618
  misc_feature: SGI EST ID NO. CUFF.41798.1
  misc_feature: Variant of the nucleotide sequence at SEQ ID NO 17619

SEQ ID NO: 17622 - DNA, 810 bp, Muscodor strobelii
  misc_feature: SGI cDNA ID NO. 565888
  misc_feature: Encodes the peptide sequence at SEQ ID NO 17623
atgtatttctcagacaatggaacggtatctatcgtcaacggtggaatcccaagtctggtgagcgacacgactgtcgacctgggagccaactcggagactcaactcctaagacaatatgcctctcacagaaaccttcggaccgtgataacaaccgcagaagtatactatcgcatcgtagcgagcaaaaaagccggtattaataccctagcggatctgaagggtaaacgaattggtgctgttccctcgacctacctcgcaaccgtcgggctcaaaccctcagattataccattgttgctggtggcgcatgcttacagactccctgtggatcaggaacatacccgagcatgctgaaggcaggaactattcaagctatcgctatgtgggagccgtctgtgcagctgggcgctgaagcgcttggttctgacgctatagtgttcggcgacaaccaaacgacatatcgtgagatttacaacttggccacgacggcggagaaacttgcggaccccgcgaagcgagcagagattgtgcagttcctacgtgctttggtcaaaaccgagagcatattcatgagtgatcctgacaaggtcgtcgcaagagcggcggcagccgtcaagacgaacgcaacgctattcaaagaagtgtggcccgttcatcattggaccgcacggaatccaccagatctcatcgatgtcctcgttgaggaggataaatacgtagctgggcaagaccgtaggacggccatggctcgggatgtactcgccaatattgtcgatacaacagttcttgcagacgccatgaaggacctctga

SEQ ID NO: 17623 - protein, 269 aa, Muscodor strobelii
  misc_feature: SGI Peptide ID NO. 565888
  misc_feature (56)..(98): Pfam Id: PF09084 Pfam Desc: NMT1/THI5 like
  misc_feature (6)..(266): NCBI GI: 171676870 Blast Desc: protein product [Podospora anserina] gi|170936502|emb|CAP61162.1| protein product [Podospora anserina]
  misc_feature (2)..(264): NCBI GI: 169600095 Blast Desc: SNOG_02877 [Phaeosphaeria nodorum SN15] gi|160705374|gb|EAT89608.2| SNOG_02877 [Phaeosphaeria nodorum SN15]
  misc_feature (9)..(267): NCBI GI: 116205187 Blast Desc: [Chaetomium globosum CBS 148.51] gi|88176605|gb|EAQ84073.1| [Chaetomium globosum CBS 148.51]
  misc_feature (15)..(266): NCBI GI: 116204217 Blast Desc: [Chaetomium globosum CBS 148.51] gi|88176120|gb|EAQ83588.1| [Chaetomium globosum CBS 148.51]
  misc_feature (7)..(269): NCBI GI: 269922665 Blast Desc: conserved [Brevundimonas subvibrioides ATCC 15264] gi|269143092|gb|EEZ69514.1| conserved [Brevundimonas subvibrioides ATCC 15264]
  misc_feature (15)..(238): NCBI GI: 222055918 Blast Desc: NMT1/THI5 like domain protein [Geobacter sp. FRC-32] gi|221565207|gb|ACM21179.1| NMT1/THI5 like domain protein [Geobacter sp. FRC-32]
  misc_feature (3)..(232): NCBI GI: 27380913 Blast Desc: ABC transporter substrate-binding protein [Bradyrhizobium japonicum USDA 110] gi|27354079|dbj|BAC51067.1| ABC transporter substrate-binding protein [Bradyrhizobium USDA
  misc_feature (57)..(215): NCBI GI: 254425418 Blast Desc: NMT1/THI5 like family [Synechococcus sp. PCC 7335] gi|196192907|gb|EDX87871.1| NMT1/THI5 like family [Synechococcus sp. PCC 7335]
  misc_feature (49)..(238): NCBI GI: 91788267 Blast Desc: ABC-type nitrate/sulfonate/bicarbonate transport systems periplasmic components-like [Polaromonas sp. JS666] gi|91697492|gb|ABE44321.1| ABC-type nitrate/sulfonate/bicarbonate
  misc_feature (26)..(245): NCBI GI: 117923576 Blast Desc: extracellular solute-binding protein [Magnetococcus sp. MC-1] gi|117607332|gb|ABK42787.1| extracellular solute-binding protein, family 3 [Magnetococcus sp. MC-1]
MYFSDNGTVSIVNGGIPSLVSDTTVDLGANSETQLLRQYASHRNLRTVITTAEVYYRIVASKKAGINTLADLKGKRIGAVPSTYLATVGLKPSDYTIVAGGACLQTPCGSGTYPSMLKAGTIQAIAMWEPSVQLGAEALGSDAIVFGDNQTTYREIYNLATTAEKLADPAKRAEIVQFLRALVKTESIFMSDPDKVVARAAAAVKTNATLFKEVWPVHHWTARNPPDLIDVLVEEDKYVAGQDRRTAMARDVLANIVDTTVLADAMKDL

SEQ ID NO: 17624 - DNA, 1785 bp, Muscodor strobelii
  misc_feature: SGI cDNA ID NO. 565889
  misc_feature: Reduced expression when VOC is produced
  misc_feature: Encodes the peptide sequence at SEQ ID NO 17625
atggcacaccatcacaaccacctccacgcgaggctgccccgcaaggagctggagaagaaggcacccgaaaccatcttcaagaccgtctacgaaaccatgtcggccgacttcgacggccccattgctggatggaccacgattggcgttgacgggaagaccaccaagaccaagacggccgaggccaccgtcacctcagacccatcgccgactcacactgcaggtgctaagggcaactcgggtgacgacacgtcggacctgccccagtctctgacctcccactcggtcgacctcgacggccactccaccctcgccctggcatccagcacctccattgccgcctccctcactgccagcgcctccagcaacacactcgctgccaccgacgcagccattacttccagccccagcgcgtcctcggctgccaccgccagcagctccggctccagcgcaggcaccattgccggcatcgtcatcggtgttcttggcggcatcctcgtcgtcgctctgctggtcttcttcttgttcaacaggcgtaagaaggatctcgagaggcagcgacaggcgcaggaggaggagaagagcagcggcggcccctatgtcggcggcggcggcgtcacgcgcaccgcctcggtccacaccacccgcaccacggccacggcccccaggctcagcctccgccccgtcaccgagttcaaccctaccttcaacgaacgccgctcaagcaagggtgctggcttgatgcttgccaccgccggtgcttcccagcaggctgcaaagggcggcagtctgtgggagcgtccctccgccggccacaacgccaaccctgaaaaccccttcgccgatgctgcgcgagccatcacccctactggcgacggcccagcagccggccacgagcagccacggaaccccttcgattcacccgagcatgtcgtgggcatggctcataccacggatatgcccgctatgcccgtctccccagaaagcatcgaccaagaaggccgactccccccctctctggatctcacgatgcctgccggccctcccagccctactggcaccgagttcagcatgaattcagtcgcccccggtcaatctcctggcccctccaagagtgctgctgctattgccgaagctggcggtcctccttctactgcggtccatcgtgttcagcttgacttccacccatctatggatgatgagatggagctgcgagccggtcatcttgttagaatcctccacgagtacgatgacggctggactttgtgcatccgtctcgatcgttctcagcaaggtgttgtgcctcgaacctgcttatcgacccgtcccgtcaagcctcgacccgccggtggccctcctgggtctcgaaatggcggacccccggtcaacccgcagcgtggtcctcgaggccctggtcccaatcatgccggccccggccagagaccaatgacgcctcagggtggtcctcctcgaggtccgcctcacggccggcccgaatctcctatgcgcccgatggctggacgaccacagtcgcctgctcagatgcgcccttactctcccgcccacggccgcccgatgagtcccgctggtcgtcctgcttcacctgccggcaaccgtcccatgagcccagctggccagccgcgacctcagagccctagcggccctggccctcgccatgctcctgcaggtcccagccccatgaacccaaacaacgacatgggctaccgtggccccccaccttccaacggacaggttggtcgcaagcccgtgccgggccaggcttactag

SEQ ID NO: 17625 - protein, 594 aa, Muscodor strobelii
  misc_feature: SGI Peptide ID NO. 565889
  misc_feature (385)..(441): Pfam Id: PF00018 Pfam Desc: SH3 domain
  misc_feature (107)..(594): NCBI GI: 46136219 Blast Desc: FG09625.1 [Gibberella zeae PH-1]
  misc_feature (142)..(463): NCBI GI: 116195298 Blast Desc: CHGG_04247 [Chaetomium globosum CBS 148.51] gi|88180160|gb|EAQ87628.1| CHGG_04247 [Chaetomium globosum CBS 148.51]
  misc_feature (337)..(594): NCBI GI: 256727040 Blast Desc: NECHADRAFT_76622 [Nectria haematococca mpVI 77-13-4]
  misc_feature (132)..(593): NCBI GI: 39969009 Blast Desc: MGG_10115 [Magnaporthe grisea 70-15] gi|145015245|gb|EDJ99781.1| MGG_10115 [Magnaporthe grisea 70-15]
  misc_feature (5)..(551): NCBI GI: 156045461 Blast Desc: SS1G_09919 [Sclerotinia sclerotiorum 1980] gi|154694314|gb|EDN94052.1| SS1G_09919 [Sclerotinia sclerotiorum 1980]
  misc_feature (1)..(488): NCBI GI: 169600381 Blast Desc: SNOG_03024 [Phaeosphaeria nodorum SN15] gi|160705426|gb|EAT89755.2| SNOG_03024 [Phaeosphaeria nodorum SN15]
  misc_feature (104)..(464): NCBI GI: 171691292 Blast Desc: protein product [Podospora anserina] gi|170945594|emb|CAP71707.1| protein product [Podospora anserina]
  misc_feature (97)..(461): NCBI GI: 85076351 Blast Desc: NCU04456 [Neurospora crassa OR74A] gi|28916944|gb|EAA26678.1| [Neurospora crassa OR74A] gi|40882164|emb|CAF05990.1| conserved [Neurospora crassa]
  misc_feature (1)..(513): NCBI GI: 238489125 Blast Desc: SH3 domain protein [Aspergillus flavus NRRL3357] gi|220698188|gb|EED54528.1| SH3 domain protein [Aspergillus flavus NRRL3357]
  misc_feature (26)..(446): NCBI GI: 258563412 Blast Desc: [Uncinocarpus reesii 1704] gi|237907958|gb|EEP82359.1| [Uncinocarpus reesii 1704]
  misc_feature: Useful for introducing or modulating the production of volatile compounds
MAHHHNHLHARLPRKELEKKAPETIFKTVYETMSADFDGPIAGWTTIGVDGKTTKTKTAEATVTSDPSPTHTAGAKGNSGDDTSDLPQSLTSHSVDLDGHSTLALASSTSIAASLTASASSNTLAATDAAITSSPSASSAATASSSGSSAGTIAGIVIGVLGGILVVALLVFFLFNRRKKDLERQRQAQEEEKSSGGPYVGGGGVTRTASVHTTRTTATAPRLSLRPVTEFNPTFNERRSSKGAGLMLATAGASQQAAKGGSLWERPSAGHNANPENPFADAARAITPTGDGPAAGHEQPRNPFDSPEHVVGMAHTTDMPAMPVSPESIDQEGRLPPSLDLTMPAGPPSPTGTEFSMNSVAPGQSPGPSKSAAAIAEAGGPPSTAVHRVQLDFHPSMDDEMELRAGHLVRILHEYDDGWTLCIRLDRSQQGVVPRTCLSTRPVKPRPAGGPPGSRNGGPPVNPQRGPRGPGPNHAGPGQRPMTPQGGPPRGPPHGRPESPMRPMAGRPQSPAQMRPYSPAHGRPMSPAGRPASPAGNRPMSPAGQPRPQSPSGPGPRHAPAGPSPMNPNNDMGYRGPPPSNGQVGRKPVPGQAY

SEQ ID NO: 17626 - DNA, 3509 bp, Muscodor strobelii
  misc_feature: SGI EST ID NO. CUFF.41381.0
  misc_feature: Variant of the nucleotide sequence at SEQ ID NO 17624
ggcgaaggagggtggatgggatgggcagcaacccgggaaacagaaaagtgtacagtacagtctgtaggtacagtggaggtgggcggagcgacaggtctagctagctgtgctcccttcctaccccagcgcttcgacgaccacacacactcccgtccttccccccagcctgctgctccctctcactccccgaggtctcgcgctctagaaactaaggtaggtacactgcggcgagtcttctctttcctccgccttccaccctccaccttccacatcgccgtctcttcatcccaagagtgcgtgttggctctcgcgacctcagccgaccactcgtccgttcatttgtgtcttgcactcaccttactgtcgttcactacccaacctgtgatctctttcgactcacagcacgcccggcgcccttccattcggcccatcgcccatcgccattccgaccttggttcgacctcctgttgttcttccttcttacgccgtagccttctgtgcctaccactgcatagtccattgggacctgtgtcttgataacacagttcaattccgacgtaaacagtgttgtattttctgtggcgttggcgctcgaggacgcccacatctcttgaggtgtacccgaacggccggcctccaagatatatcccagaatagaatctcgagtccggttggacaatcggtcaaaatggcacaccatcacaaccacctccacgcgaggctgccccgcaaggagctggagaagaaggcacccgaaaccatcttcaagaccgtctacgaaaccatgtcggccgacttcgacggccccattgctggatggaccacgattggcgttgacgggaagaccaccaagaccaagacggccgaggccaccgtcacctcagacccatcgccgactcacactgcaggtgctaagggcaactcgggtgacgacacgtcggacctgccccagtctctgacctcccactcggtcgacctcgacggccactccaccctcgccctggcatccagcacctccattgccgcctccctcactgccagcgcctccagcaacacactcgctgccaccgacgcagccattacttccagccccagcgcgtcctcggctgccaccgccagcagctccggctccagcgcaggcaccattgccggcatcgtcatcggtgttcttggcggcatcctcgtcgtcgctctgctggtcttcttcttgttcaacaggcgtaagaaggatctcgagaggcagcgacaggcgcaggaggaggagaagagcagcggcggcccctatgtcggcggcggcggcgtcacgcgcaccgcctcggtccacaccacccgcaccacggccacggcccccaggctcagcctccgccccgtcaccgagttcaaccctaccttcaacgaacgccgctcaagcaagggtgctggcttgatgcttgccaccgccggtgcttcccagcaggctgcaaagggcggcagtctgtgggagcgtccctccgccggccacaacgccaaccctgaaaaccccttcgccgatgctgcgcgagccatcacccctactggcgacggcccagcagccggccacgagcagccacggaaccccttcgattcacccgagcatgtcgtgggcatggctcataccacggatatgcccgctatgcccgtctccccagtttccccagtctctcctgtcgatcccgtcgctgttgccggcgcctctctgacgaggaaagcatcgaccaagaaggccgactccccccctctctggatctcacgatgcctgccggccctcccagccctactggcaccgagttcagcatgaattcagtcgcccccggtcaatctcctggcccctccaagagtgctgctgctattgccgaagctggcggtcctccttctactgcggtccatcgtgttcagcttgacttccacccatctatggatgatgagatggagctgcgagccggtcatcttgttagaatcctccacgagtacgatgacggctggactttgtgcatccgtctcgatcgttctcagcaaggtgttgtgcctcgaacctgcttatcgacccgtcccgtcaagcctcgacccgccggtggccctcctgggtctcgaaatggcggacccccggtcaacccgcagcgtggtcctcgaggccctggtcccaatcatgccggccccggccagagaccaatgacgcctcagggtggtcctcctcgaggtccgcctcacggccggcccgaatctcctatgcgcccgatggctggacgaccacagtcgcctgctcagatgcgcccttactctcccgcccacggccgcccgatgagtcccgctggtcgtcctgcttcacctgccggcaaccgtcccatgagcccagctggccagccgcgacctcagagccctagcggccctggccctcgccatgctcctgcaggtcccagccccatgaacccaaacaacgacatgggctaccgtggccccccaccttccaacggacaggttggtcgcaagcccgtgccgggccaggcttactagatttaagttgtccacgcggatgctctatcgaggactgataacagggaacagcccttacctcccaaactctatttgccactagtttatagcagtcgagcaccacaccatcaatgagatgctgcgcaaccgtcacatcgagattcctggctcggcatggcctggcacccccatcttcggacttggggagaccaccttgacgaacttgacgaatattggaacgatattaaaaacttctctacactcgtttccgacctgtttgctttccggtccttctcttctcatctttgtaccacgcactatttcgtttcatcactgtgccacaacgtggctgatagagcaccaatcctacgcgaatatctgacgaacctgattcgaatcgctaggtttgcactggtgttcaggaccgaataatcggataattttctgttgataatttttagttcatggcgatttgagttgcctggccctccgggtgcttgaactcgtctcacgctctggatgcctgagctatggaggattttgtatggaggcacaaagcgaggcatcgcacagcacttgataccagtatgggttcttcgacagaaccagacgcatgctttagcagcatccacttgatgtctctcccgcatgaagcaggcttttttcaatttggtcttctgtgcgccaagtcgatgggtcccatcgggatcttggtttccctgatgccaatgacatacggatggatcgcgtgttggtctagaagatacctgattggacagaggttccaggagacgtgaaaggagcgccgctgcgctgaggttgaggagggatgcatcaggctttcgcaactatgtttttcccatggctagccggggctttgcaattgactgtagcatgaaagatgaatcaaaagaggttgtcatagactggaacctattttgtgattagctgtgctgtgacatgatacatcgtagctgtggattaaaaccccaataccggag

SEQ ID NO: 17627 - DNA, 1809 bp, Muscodor strobelii
  misc_feature: SGI cDNA ID NO. 565890
  misc_feature: Reduced expression when VOC is produced
  misc_feature: Encodes the peptide sequence at SEQ ID NO 17628
atgtcaggttttcaaattcccggtctcaacactctggctggaacggccagcaccattgacttgcagtcttcatctatctctcaatccaatgtaccacacgttgtgaaggaatctgcagtacctactcgggacaacgttaaatttcaaatagcaaacgaggctgccagcaacgcagcgatctcgcaagacaacagttatgaaccgtctgagtttgaggaccagctggaccgtactcatgacgatgtgatccccgatcaagagactaatgcagtggccacacaagatcaggatgccacgacttgcgataaagctccaagcccgccatcacttacatctggtttggaggctatgcttgggggactagatcccttacccagtcaaccaggtcccgaggcttctgcctctactactatgaatggtgatgacatatcacatcgagacgacgcgccgagtgcaggccaagaatgggaagaagactcgtctccatatgagtcgtcatcggaatctagtacctcgagtgactccgatgaagactcggagggcgagaaggactacaaaatcatgggtcctgaagagactgcacggatccttatggaaatggacggtggctccgacgaagaaggggaaggcaagggaaagggaaacggctcttccatggtgcgaactaagaacgagctcgttgaagccattattccacgccctcaagtagatatcacacctgacatggaaatagtccagcttggaactattgaacatcttgtcggaaatatgatcgtcatcagagctaatatttcaggcgagtatcaggttctggatacgggatcagttctctgcctccgagatcgtaccgtggttgctgccgttgcggacatcattgcagctgtacgggagccccgatacacagcagggtttgcgaccgaggacgaaatcaagtcgctaggcttggaagtcggaactgaaatatactatccaccgaaactggcaaagcttggcttgacgcaagcacttcgtgctgacaaaggcacggatgccagcaattggcatgatgaagaggttggtgatgatgagatggaattctcagacgatgagaaggaggcagaattcaagagacagcagaaagcaaaaaaacgaggagcacgtggcggtcgtgacggaactgctgctcatgctagtcgtagcgatgccgcccatgggtcatcctttgcaggacctcctagtttgagatatgaagatggtgaggaagacgaggatggcccgtaccggccattgtcccggcctgctgggtttggacaaggtcaggcaccgcataccagtaccgagtcttcgatcggaggttaccgaggagggagaggagatttgcgaggccgagggacgcgtggtcgcggtggtcgtgggggaaatcgcggcaaacgacctcaagcacagcagaattttgcacaggccgggctgcgaccgcagtataacactccttcttttagctccgctacatctatgaatgctgcgcaagcatttcccacatttcctttccaaacgaatggccagctccttccaccaccgccgccagcaccactgcaacagcccagcaatcagcagttcccttttgcttggccaatagcccctcaaccaggctcgtttccacctcccccaccgcaattcactagccagcacaatggaaatggcatgtttcttgaccccaatgttcttgcagctctacaacagctccaagcgcaccagaatcaggggcagggcacacagtctcagggccggagcagtaacacccaatggcccaggcagggtggacaaggatga

SEQ ID NO: 17628 - protein, 602 aa, Muscodor strobelii
  misc_feature: SGI Peptide ID NO. 565890
  misc_feature (213)..(378): Pfam Id: PF05492 Pfam Desc: NAF1 domain
  misc_feature (84)..(432): NCBI GI: 256727406 Blast Desc: NECHADRAFT_90849 [Nectria haematococca mpVI 77-13-4]
  misc_feature (97)..(432): NCBI GI: 156062510 Blast Desc: SS1G_01371 [Sclerotinia sclerotiorum 1980] gi|154696707|gb|EDN96445.1| SS1G_01371 [Sclerotinia sclerotiorum 1980]
  misc_feature (80)..(435): NCBI GI: 116195302 Blast Desc: CHGG_04249 [Chaetomium globosum CBS 148.51] gi|88180162|gb|EAQ87630.1| CHGG_04249 [Chaetomium globosum CBS 148.51]
  misc_feature (92)..(462): NCBI GI: 85076346 Blast Desc: NCU04455 [Neurospora crassa OR74A] gi|28916943|gb|EAA26677.1| [Neurospora crassa OR74A] gi|40882165|emb|CAF05991.1| related to nuclear assembly factor
  misc_feature (1)..(432): NCBI GI: 46121731 Blast Desc: FG05244.1 [Gibberella zeae PH-1]
  misc_feature (108)..(432): NCBI GI: 154305004 Blast Desc: BC1G_08592 [Botryotinia fuckeliana B05.10] gi|150853755|gb|EDN28947.1| BC1G_08592 [Botryotinia fuckeliana B05.10]
  misc_feature (159)..(429): NCBI GI: 70996006 Blast Desc: snoRNP assembly factor Naf1 [Aspergillus fumigatus Af293] gi|44889979|emb|CAF32097.1| , conserved [Aspergillus fumigatus] gi|66850393|gb|EAL90720.1| snoRNP assembly factor
  misc_feature (159)..(431): NCBI GI: 159131512 Blast Desc: snoRNP assembly factor Naf1, [Aspergillus fumigatus A1163]
  misc_feature (187)..(432): NCBI GI: 225681894 Blast Desc: conserved [Paracoccidioides brasiliensis Pb03]
  misc_feature (185)..(432): NCBI GI: 226289061 Blast Desc: conserved [Paracoccidioides brasiliensis Pb18]
  misc_feature: Useful for introducing or modulating the production of volatile compounds
MSGFQIPGLNTLAGTASTIDLQSSSISQSNVPHVVKESAVPTRDNVKFQIANEAASNAAISQDNSYEPSEFEDQLDRTHDDVIPDQETNAVATQDQDATTCDKAPSPPSLTSGLEAMLGGLDPLPSQPGPEASASTTMNGDDISHRDDAPSAGQEWEEDSSPYESSSESSTSSDSDEDSEGEKDYKIMGPEETARILMEMDGGSDEEGEGKGKGNGSSMVRTKNELVEAIIPRPQVDITPDMEIVQLGTIEHLVGNMIVIRANISGEYQVLDTGSVLCLRDRTVVAAVADIIAAVREPRYTAGFATEDEIKSLGLEVGTEIYYPPKLAKLGLTQALRADKGTDASNWHDEEVGDDEMEFSDDEKEAEFKRQQKAKKRGARGGRDGTAAHASRSDAAHGSSFAGPPSLRYEDGEEDEDGPYRPLSRPAGFGQGQAPHTSTESSIGGYRGGRGDLRGRGTRGRGGRGGNRGKRPQAQQNFAQAGLRPQYNTPSFSSATSMNAAQAFPTFPFQTNGQLLPPPPPAPLQQPSNQQFPFAWPIAPQPGSFPPPPPQFTSQHNGNGMFLDPNVLAALQQLQAHQNQGQGTQSQGRSSNTQWPRQGGQG

SEQ ID NO: 17629 - DNA, 2936 bp, Muscodor strobelii
  misc_feature: SGI EST ID NO. CUFF.41414.1
  misc_feature: Variant of the nucleotide sequence at SEQ ID NO 17627
tagttctatgctaaggtcgtcttttcagggctcctaagactgagacgatatcgtggctctgtcatacgacttctgtcaatcttcactggtctcattccccttcaagacaacacacctcgcttggtttcacaaaccgagctgctgcacaccaggcggaattctttgttgccctcgactagagtttcagattaatgtcccggtcacaatctcgccttgcataatgtcaggttttcaaattcccggtctcaacactctggctggaacggccagcaccattgacttgcagtcttcatctatctctcaatccaatgtaccacacgttgtgaaggaatctgcagtacctactcgggacaacgttaaatttcaaatagcaaacgaggctgccagcaacgcagcgatctcgcaagacaacagttatgaaccgtctgagtttgaggaccagctggaccgtactcatgacgatgtgatccccgatcaagagactaatgcagtggccacacaagatcaggatgccacgacttgcgataaagctccaagcccgccatcacttacatctggtttggaggctatgcttgggggactagatcccttacccagtcaaccaggtcccgaggcttctgcctctactactatgaatggtgatgacatatcacatcgagacgacgcgccgagtgcaggccaagaatgggaagaagactcgtctccatatgagtcgtcatcggaatctagtacctcgagtgactccgatgaagactcggagggcgagaaggactacaaaatcatgggtcctgaagagactgcacggatccttatggaaatggacggtggctccgacgaagaaggggaaggcaagggaaagggaaacggctcttccatggtgcgaactaagaacgagctcgttgaagccattattccacgccctcaagtagatatcacacctgacatggaaatagtccagcttggaactattgaacatcttgtcggaaatatgatcgtcatcagagctaatatttcaggcgagtatcaggttctggatacgggatcagttctctgcctccgagatcgtaccgtggttgctgccgttgcggacatcattgcagctgtacgggagccccgatacacagcagggtttgcgaccgaggacgaaatcaagtcgctaggcttggaagtcggaactgaaatatactatccaccgaaactggcaaagcttggcttgacgcaagcacttcgtgctgacaaaggcacggatgccagcaattggcatgatgaagaggttggtgatgatgagatggaattctcagacgatgagaaggaggcagaattcaagagacagcagaaagcaaaaaaacgaggagcacgtggcggtcgtgacggaactgctgctcatgctagtcgtagcgatgccgcccatgggtcatcctttgcaggacctcctagtttgagatatgaagatggtgaggaagacgaggatggcccgtaccggccattgtcccggcctgctgggtttggacaaggtcaggcaccgcataccagtaccgagtcttcgatcggaggttaccgaggagggagaggagatttgcgaggccgagggacgcgtggtcgcggtggtcgtgggggaaatcgcggcaaacgacctcaagcacagcagaattttgcacaggccgggctgcgaccgcagtataacactccttcttttagctccgctacatctatgaatgctgcgcaagcatttcccacatttcctttccaaacgaatggccagctccttccaccaccgccgccagcaccactgcaacagcccagcaatcagcagttcccttttgcttggccaatagcccctcaaccaggctcgtttccacctcccccaccgcaattcactagccagcacaatggaaatggcatgtttcttgaccccaatgttcttgcagctctacaacagctccaagcgcaccagaatcaggggcagggcacacagtctcagggccggagcagtaacacccaatggcccaggcagggtggacaaggatgaaccctttactgatcaggctctcagttagcggcattggaaacaaaacgtggaagcaaggtgtcgcaaagaatgaggtgtcttgacctggacatcgtcgtacctgttggtccataacaatcgtaggcaaagctgctgttatatctcaatcggtgcatgttatatcggctggtttgcctatataaccctccgtgatgcacgcttttcagatcttgcaatctgtggagctcagcgaccgatcatgtcaccaacaggagttcaatggagcattttgcaactatgcatagcaaatgtggatagttccctcaacaaattggcatgacggagctgctaaagctaaggtagattgagaggtcatgaacgagtgtatctggcatgggagggttctattctcctacgaagagaatccaaaactctgcttcttttggtgtctgggtactaaccaaggctacctattgcagaaattcactaagaggcagtgaactgactgtcgggacaagttgatgttacagtgtcaaaagaagagataatggatgaagacaaaaatacgctactggtcgagaatagatcacggaaaccgttgcagggatatgtgcagcctaatcaacattgtggtcgattaggtccacgaaagatggcaaaacctcgttatatcaggatggacgcagcacagtcgagagatttcggcagtaaaacattcaacagtgttgataagagcaacggatcaaatgatgtcctttgcgagtttgcatatttatgtatccttcatgttccatcctgcaccgatcctggtagcatgatatcccataattgaacaaagagagcatggaatgcaaacactgtaaagtcgggtcaagcatgatagacgtggataagtaaaaagagaaacagcccaacggatgtgcatcag

SEQ ID NO: 17630 - DNA, 1827 bp, Muscodor strobelii
  misc_feature: SGI cDNA ID NO. 565891
  misc_feature: Encodes the peptide sequence at SEQ ID NO 17631
atgcctcctgtcacggacgcccaaccgcctgagcagtcaaatccgcagactgctcctcgtgcgggaggaaagcgacccccctcgccatatgcaatcaagcctatcacagctttttacctctttctcattgcgaactttgtctcggctctttacgcccccattcaggactgcgacgagacgttcaattactgggagcctactcactaccttgcccatggatatggccttcaaacatgggagtactctcccgactttgccattcggagctggttctacctagcgctgcatgccatcgtgggaagctttcgtaggcttctaccacgttccacaaaggtagccgagttctatttcgttcgatattctctggcattcctgtgtgccttctgtcaggtgctactctttcgggtcatcagcttcaccctcaattccaggattgggttattctttgtcatggccatcgtcatgtcgccaggaaactttaatgcaagcaccgcctttctaccttctagcttcgccatgtatatgtctttcctgggagctgcggctttcatgaactggcgaggtggactaaagacttcttggggcatttggtattttgctgttggcgggatcctggggtggccattcgcttcagccctctgtgccccattcatggtagaggaggctatttttgctatcatgagcgactcagagcgattctgggaagcaatgcttcgtgtttgtcgtggagtcattgctgctcttcttctcgttcttggcgactctgtggtaaacgctttcttctatcgcaaattcgagatcattccctggaatatcgttcgttataacgtattctcgtccactggcggaccaaatctttacgggacggaaccctggacctattattttcgcaacttagccatcaatttcaacgtctggtttgtccttgcacttgtctctttacctctatttctgatacagaaggtctttacgtccaagcagcacagctttcagtccggtatacgtactattgtgtttctaatgccgttttacatgtggctgggcattttcactctccagcctcataaagaagagagattcatgtatcctgcttatccttttcttgccctgaatgctgccctcgcattgcatatagtgctatctgccttcggtacttcgaatcctcagactctgattggcaaagttcccgcccgtttgaaactcttcgtcgttggagttatgcttctggtctccctagatctaggtatcacccgcatcattgggatttccactggatattcagctcctttgaaattgtatgagccattgggagccggagtcgctggcgaggaaggtatcggaggccggggcgatttcatctgcttcggaaaggagtggtatcgatttcccacttcgtacttcctgccacgcgacatgcacgccaaattcatcaggtcagagtttcgtggactgctaccaggcgaattcgctgaggcccgtactggctttggtcttttccctggcacctggcttcccacgagtgggatgaacgaccaaaatcaagaggatttgacgaaatatgttgacgttcgtcaatgctcgttcttagttgacacacggtacccagagaacacagatgagctgccggacttcgagccagattacatatcagatttccattcctggaatgtagtcaagtgtgagccattcttagacgccagccgaactcatttcttgtcacgagtgctctggatgccagagtcagacttggtaccgcgtagataccagaggaagtgggggcaacattgcttgcttcagagaaagctgcagaacctcactaaggcttga

SEQ ID NO: 17631 - protein, 608 aa, Muscodor strobelii
  misc_feature: SGI Peptide ID NO. 565891
  misc_feature (36)..(469): Pfam Id: PF03901 Pfam Desc: Alg9-like mannosyltransferase family
  misc_feature (1)..(601): NCBI GI: 256726838 Blast Desc: glycosyltransferase family 22 [Nectria haematococca mpVI 77-13-4]
  misc_feature (1)..(601): NCBI GI: 46121729 Blast Desc: FG05243.1 [Gibberella zeae PH-1]
  misc_feature (1)..(601): NCBI GI: 261352770 Blast Desc: conserved [Verticillium albo-atrum VaMs.102]
  misc_feature (1)..(601): NCBI GI: 85076341 Blast Desc: NCU04454 [Neurospora crassa OR74A] gi|28916942|gb|EAA26676.1| NCU04454 [Neurospora crassa OR74A] gi|40882166|emb|CAF05992.1| related to mannosyltransferase
  misc_feature (17)..(601): NCBI GI: 171691288 Blast Desc: protein product [Podospora anserina] gi|170945592|emb|CAP71705.1| protein product [Podospora anserina]
  misc_feature (6)..(601): NCBI GI: 116195304 Blast Desc: CHGG_04250 [Chaetomium globosum CBS 148.51] gi|88180163|gb|EAQ87631.1| CHGG_04250 [Chaetomium globosum CBS 148.51]
  misc_feature (17)..(522): NCBI GI: 156062512 Blast Desc: SS1G_01372 [Sclerotinia sclerotiorum 1980] gi|154696708|gb|EDN96446.1| SS1G_01372 [Sclerotinia sclerotiorum 1980]
  misc_feature (9)..(605): NCBI GI: 119186667 Blast Desc: CIMG_03381 [Coccidioides immitis RS]
  misc_feature (8)..(601): NCBI GI: 238842361 Blast Desc: mannosyltransferase [Microsporum canis CBS 113480]
  misc_feature (19)..(602): NCBI GI: 255941524 Blast Desc: Pc16g12320 [Penicillium chrysogenum Wisconsin 54-1255] gi|211586154|emb|CAP93902.1| Pc16g12320 [Penicillium chrysogenum Wisconsin 54-1255]
MPPVTDAQPPEQSNPQTAPRAGGKRPPSPYAIKPITAFYLFLIANFVSALYAPIQDCDETFNYWEPTHYLAHGYGLQTWEYSPDFAIRSWFYLALHAIVGSFRRLLPRSTKVAEFYFVRYSLAFLCAFCQVLLFRVISFTLNSRIGLFFVMAIVMSPGNFNASTAFLPSSFAMYMSFLGAAAFMNWRGGLKTSWGIWYFAVGGILGWPFASALCAPFMVEEAIFAIMSDSERFWEAMLRVCRGVIAALLLVLGDSVVNAFFYRKFEIIPWNIVRYNVFSSTGGPNLYGTEPWTYYFRNLAINFNVWFVLALVSLPLFLIQKVFTSKQHSFQSGIRTIVFLMPFYMWLGIFTLQPHKEERFMYPAYPFLALNAALALHIVLSAFGTSNPQTLIGKVPARLKLFVVGVMLLVSLDLGITRIIGISTGYSAPLKLYEPLGAGVAGEEGIGGRGDFICFGKEWYRFPTSYFLPRDMHAKFIRSEFRGLLPGEFAEARTGFGLFPGTWLPTSGMNDQNQEDLTKYVDVRQCSFLVDTRYPENTDELPDFEPDYISDFHSWNVVKCEPFLDASRTHFLSRVLWMPESDLVPRRYQRKWGQHCLLQRKLQNLTKA

SEQ ID NO: 17632 - DNA, 3223 bp, Muscodor strobelii
  misc_feature: SGI EST ID NO. CUFF.41472.2
  misc_feature: Variant of the nucleotide sequence at SEQ ID NO 17630
cgcaaaacgtaacattccgctatccagccccgaagactcattcaaagcgggccgatgtttgctactcctcagcgcattatcacaaacgcacagagtacagattcccctgcaacactggctcagctgggtcttaattgcgctggtcggctgatgactgcctctcgatgatatgttggttcttcaatcgaccaattcgagaatcacgaacggaggccgagaaaccctatgtccagaaaccttaggtaccttattctgcgcttcccggctggttcttgacctatccaccaacgctctctatcagccaacccgagtgcccgagtgctcgtgaagaagttgtggcagacgtcacttccaaactcgttttcgacgctccgacacaattagttcagcaaacaatctcattgcctcatccgaatcgagaatatgcctcctgtcacggacgcccaaccgcctgagcagtcaaatccgcagactgctcctcgtgcgggaggaaagcgacccccctcgccatatgcaatcaagcctatcacagctttttacctctttctcattgcgaactttgtctcggctctttacgcccccattcaggactgcgacgagacgttcaattactgggagcctactcactaccttgcccatggatatggccttcaaacatgggagtactctcccgactttgccattcggagctggttctacctagcgctgcatgccatcgtgggaagctttcgtaggcttctaccacgttccacaaaggtatctaaccatccgctaggtttccctttcttatactgatcttatctctttttgtcatttaggtagccgagttctatttcgttcgatattctctggcattcctgtgtgccttctgtcaggtgctactctttcgggtcatcagcttcaccctcaattccaggattgggttattctttgtcatggccatcgtcatgtcgccaggaaactttaatgcaagcaccgcctttctaccttctagcttcgccatgtatatgtctttcctgggagctgcggctttcatgaactggcgaggtggactaaagacttcttggggcatttggtattttgctgttggcgggatcctggggtggccattcgcttcagccctctgtgccccattcatggtagaggaggctatttttgctatcatgagcgactcagagcgattctgggaagcaatgcttcgtgtttgtcgtggagtcattgctgctcttcttctcgttcttggcgactctgtggtaaacgctttcttctatcgcaaattcgagatcattccctggaatatcgttcgttataacgtattctcgtccactggcggaccaaatctttacgggacggaaccctggacctattattttcgcaacttagccatcaatttcaacgtctggtttgtccttgcacttgtctctttacctctatttctgatacagaaggtctttacgtccaagcagcacagctttcagtccggtatacgtactattgtgtttctaatgccgttttacatgtggctgggcattttcactctccagcctcataaagaagagagattcatgtatcctgcttatccttttcttgccctgaatgctgccctcgcattgcatatagtgctatctgccttcggtacttcgaatcctcagactctgattggcaaagttcccgcccgtttgaaactcttcgtcgttggagttatgcttctggtctccctagatctaggtatcacccgcatcattgggatttccactggatattcagctcctttgaaattgtatgagccattgggagccggagtcgctggcgaggaaggtatcggaggccggggcgatttcatctgcttcggaaaggagtggtatcgatttcccacttcgtacttcctgccacgcgacatgcacgccaaattcatcaggtcagagtttcgtggactgctaccaggcgaattcgctgaggcccgtactggctttggtcttttccctggcacctggcttcccacgagtgggatgaacgaccaaaatcaagaggatttgacgaaatatgttgacgttcgtcaatgctcgttcttagttgacacacggtacccagagaacacagatgagctgccggacttcgagccagattacatatcagatttccattcctggaatgtagtcaagtgtgagccattcttagacgccagccgaactcatttcttgtcacgagtgctctggatgccagagtcagacttggtaccgcgtagataccagaggaagtgggggcaacattgcttgcttcagagaaagctgcagaacctcactaaggcttgaggacttccgaccacccgtggacgtgccgaccttcggggcattgcgccaagagcttttgtttcgtcggaaccgacgaaacagttgcattgatacactcttcttgggataaagcagggttaggtgatcaggattgcgggttgatgtgcatggcatctgccctagacgtgccaggattggacgaagttgatagactacggctccaaccggatctgcagggtagcggggaatcaccagcttcctcttttggtcctaccgatgcgcgtctaggatttcttccccaacttcacatgggttgtcctctacgagaacaaggtctatgcaatgtttcttatatcgtttgtatcacacgatcgatttctcccgaacttgtgccttacaagtgtgaagccggcggcacgagcgcttctcatagcagaatgcaaatagcattggtattactaaaatcgtgccctctttgtttacgaactactgccaccttatagatgaaggccgatggctgggcaggcttccatgttacgcaaggccaaccttgactttaccttccggtgcttgccatttcaagcttaagtatctgaggtcatgttggcgaacccgactcttggatatgcattgccgccgacttctccgcaaagtcgagcacccatgatttgttgaattacgcaagcttcagatgatttgtttaggagatggtagttatgtaacgttgtagcctcgccttcggggaagcctgtttataacactggccaagacccagatagcaccaacgggctgtgttgggcttacttgcgccgcgatttcagcaacgactgaatggtcgaatgacgagactcggcctcgtctcttcccaccacgttgcctcgtaacatcatctgtcctcatcctagcctcccttgaaacgtgccaatttaaca

SEQ ID NO: 17633 - DNA, 381 bp, Muscodor strobelii
  misc_feature: SGI cDNA ID NO. 565892
  misc_feature: Reduced expression when VOC is produced
  misc_feature: Encodes the peptide sequence at SEQ ID NO 17634
atggctcccggcccagcccccaataccgccggccctcacaagagcgacatgatgaacaaggccgaccctcgtgtcgactccgacctggacggcagcaagacttacggcggaaacaagacctatggggcttcctcgacagagcacagggatcccacggacgctgcgcaggttcctccttctgttcttcagaagcatgttggcccacccaccatcgagcatgatgaccatgggcaccagcgtgagcgtcgtcacagcttgaagtctggtcaggagacgcatcgtggtctacaagcgaatgatgctcgtatatacacacgattaacttcctatgtcatgctcccaggagcgtacagtatcacctcaaaaggtgaacccaagtag

SEQ ID NO: 17634 - protein, 126 aa, Muscodor strobelii
  misc_feature: SGI Peptide ID NO. 565892
  misc_feature (3)..(96): NCBI GI: 46137071 Blast Desc: FG10051.1 [Gibberella zeae PH-1]
  misc_feature (2)..(96): NCBI GI: 171691665 Blast Desc: protein product [Podospora anserina] gi|170945781|emb|CAP72581.1| protein product [Podospora anserina]
  misc_feature (7)..(96): NCBI GI: 256732129 Blast Desc: NECHADRAFT_80428 [Nectria haematococca mpVI 77-13-4]
  misc_feature (1)..(89): NCBI GI: 239608806 Blast Desc: BDCG_09062 [Ajellomyces dermatitidis ER-3]
  misc_feature (1)..(89): NCBI GI: 261203929 Blast Desc: BDBG_00424 [Ajellomyces dermatitidis SLH14081] gi|239586963|gb|EEQ69606.1| BDBG_00424 [Ajellomyces dermatitidis SLH14081]
  misc_feature (2)..(41): NCBI GI: 85092066 Blast Desc: NCU04667 [Neurospora crassa OR74A] gi|28920612|gb|EAA29974.1| [Neurospora crassa OR74A] gi|28950056|emb|CAD70810.1| [Neurospora crassa]
  misc_feature (4)..(41): NCBI GI: 83638421 Blast Desc: DHN1 [Tuber borchii]
  misc_feature (4)..(41): NCBI GI: 156055506 Blast Desc: SS1G_05105 [Sclerotinia sclerotiorum 1980] gi|154702889|gb|EDO02628.1| SS1G_05105 [Sclerotinia sclerotiorum 1980]
  misc_feature (2)..(41): NCBI GI: 116179746 Blast Desc: CHGG_00501 [Chaetomium globosum CBS 148.51] gi|88184798|gb|EAQ92266.1| CHGG_00501 [Chaetomium globosum CBS 148.51]
  misc_feature (4)..(41): NCBI GI: 154310513 Blast Desc: BC1G_07177 [Botryotinia fuckeliana B05.10] gi|150851508|gb|EDN26701.1| BC1G_07177 [Botryotinia fuckeliana B05.10]
  misc_feature: Useful for introducing or modulating the production of volatile compounds
MAPGPAPNTAGPHKSDMMNKADPRVDSDLDGSKTYGGNKTYGASSTEHRDPTDAAQVPPSVLQKHVGPPTIEHDDHGHQRERRHSLKSGQETHRGLQANDARIYTRLTSYVMLPGAYSITSKGEPK

SEQ ID NO: 17635 - DNA, 4185 bp, Muscodor strobelii
  misc_feature: SGI EST ID NO. CUFF.41788.1
  misc_feature: Variant of the nucleotide sequence at SEQ ID NO 17633
ccggcccagcccccaataccgccggccctcacaagagcgacatgatgaacaaggccgaccctcgtgtcgactccgacctggacggcagcaagacttacggcggaaacaagacctatggggcttcctcgacagagcacagggatcccacggacgctgcgcaggttcctccttctgttcttcagaagcatgttggcccacccaccatcgagcatgatgaccatgggcaccagcgtgagcgtcgtcacagcttgaagtctggtcaggagacgcatcgtggtctgtaagatgttctgggcggcagtaatgagttatgattatgcttgcgttgcatgagactgtttcatgtactactagtttcctataagcaatcacattatcacattatcaccaactcatgatgcatcccgtgtgatatgttgatatgaagactaacgataggcttctgactaacttccgaatagacaagcgaatgatgctcgtatatacacacgattaacttcctatgtcatgctcccaggagcgtacagtatcacctcaaaaggtgaacccaagtaggcaggccacttggcgacagacttcaatgtactactatatcgtaatactttccacatgcgcgtgtgtagcacttccatcaccttccatgatcgccagtctctcactcacgtgagaaaatcttcatgtgatctcgaatatatcttatctctttgtgatttcgagcatcctcggacttctgacacccgccaatattcaatcaacatcaacccgctgaagtcgccctatttcgtaaacacacccagaatatgcggcaaaaggtgataccaaggctcgacaggcggttgtccaatatcgacgctagtccacggcccagcactcctcaacgtttgctctgtcggtctacacatttcgcagccgccgatgaacgtcggccagactagattgataaaacctgatattacacccccataagtcattcagttattaaaacattacgacattcgagaaaatttcacttacgttgatataacctcaacaataaataattactaacacgaacatgttcgtatacataccatcttccacctggtttcagtaactcgtataattccctagtgtgctgttctggatcggggatggaacagagacataggactgagaggatgcagtcgacgctgcctttttcgatgttgcctgcccatttatttgagttgtttaggtgctcgattcctacggggactatttcgtagatttctgataggccggcgcgggagatgttttgccgcagggtggggtggtgagaggggtttggctctatgccgtagattttaaggattggtgtgcggcctagggtcgtcttgccccgatttcgcagcgtgttttcgttgggttcggttatgatattgctggagtttggagtgttggagtttatatgacgatcagagaagacgtctacccatagtccgctgcctgcgcctatctctattaccacgcctcctatcccctcacgcacggggttctctacggtaacaccgttgacggttcggccgtctaggaggggtaagactttttgtccggcctcttcgcggattccgggtccgacgagagaccagaagtgggagaaccatgcgtcgcggaattgtgaggagaagatgatgtggagggcggtgaggggtgagtttgtgttgaagatgtcacggattgtgggagggatttgacagagagagacgaagaggaaggcccaggggtcgagtaacgcccagaatgtttcgactgttcgggcgtagagggttggcattgtgatggtggttgttctgttgagtttgtgtggtgttccgtgtgaagagttttccagatagtagaagggccctcggataattgtgggaagtggcgagtgaggatgaaaattataagttcgtgaagattcacaacgtgaccagtacgatgcaagcgatgtaagaaacgaccagaaatcagtcagctatgatgtggttagcgaggtatatccgaaggaaagggattaaggtgaagaggaagggcgaagactaagatagaaaactaacatgagactatcgtaaggaagggcgataaatcgcctactctcaatatcaggccaagaagaatgagagatgaggggagaatgttcccgagggggatggcttttatactagagattcctttaggctcgacctctcagacttgagtaacatccagcctcaatatgtgtaagcgatgtcctaatctgtgcgagaaggacgatgtgattggtcaccgttgtgagactctaacccgtgaaggtatcagggtctcatactattgtgtatgcgtttgtgcggtcatcggcgggactatatcaaacctcagtatcgccgccccacctttggacttcctccatcagtaccaatcccgtttgaggcaggtcctcagaatagtcgactatagtgcagacattcaaccgacacatcgaaccagaccttgggcacgtcttgctatgatttcgtctattggtataagatgctatgcaattaagacccctcctataactcatccgttacatgttgagtctttatgatttcgtcgggccggccgctgtctttatgtaggtccacaccgatcttgcccctccacttctgccagacggaccagaactccttctccatgcccttctccatctgatcggggagcacgacggcatactcgacgtagagcttaccgaactgatatttgtggtatacgttgtcgccgtcttcagcccagataggcataccctcgtctgcgattgtgtcgatctgacctggctgaacgacctggccgcgctctcgcccaagtctgacgacgtggccgtctaagtgtgtgatgttgcgtgtccagtcgcccatccatgcctcgcggagggagagcatctctgtccagaagaggtcgtttcctttccgtcgaaagaagacgccgtccacgtggtcggggttgtcttgttccaaatcgggtgtcttctcgctgaggatgacgaagagatcgccagcgatgtagtcggggctagcgtctgcttcgttctcatacataatccgggaatctctaccagcgccacggccgaccttcagagagactggcgtgggcttgcgaacaacacgctgaccctgacagacggagcaaacatgcttgatcgactttccacggccaccacaagcgtcgcactgggtctggacctgttggaacatgcctggtgccagttgatgcttgatgatccggacacctctgccctggcagtgggggcacgtgtcgacaacgccatccgccgagccagtgccgtcgcagtcctcgcacacgtgctgcttattccagctgaattctgtttctaagccgttgtagaagtctcgaagtgaaagggcgaccttgagctcggcgttgtggcccttgggctgtccccgctggtaatgaccaccaccaccgaagaagcgactgaagaggtcgaaagggtcgtggtgaccgccgccgccgttctgttggcgctgctttagaccctcgtgaccgtatttgtcgtagatcttgcgggactcggagtcgatgagggcttcgtaggcttcggagacttcgacaaacttggcttgcgccgtgtcatcgccactgtaaggaggggtggttagtgacttgtaatggatttattttgaactggaaatcaggcatacgggttcttatctgggtggaacttcttgctgagctgtcgatatgccgacttgatctgtttgtcgttggcttgacgatctatgcctaagacctggaggaggacccctggttagtggacagccaaacggacaaggcgcggggtgatttgactttgtagtagtcttcagcgcaaaacgcaagttgtgcaagtaatatgcaaagcagtaagaataccgctgagcctgggaagaacattgtggcgagaggagagtgtagagaggcccaagaaatctaaatgctgtctatcgaaaagtgacgatgacggtagaagtgggatgctcttagttggtagacgccgacattgcctgagaagcaaagataggaaaagactgtatagaaaatagaaaaccgagcttctacagtggcaactagagagccttgaatggagactatacaatcaaaatagctctcaaactgtctcttagcaaatggtgcggcgttgttctgtagacgtctttcagataaaagcag

SEQ ID NO: 17636 - DNA, 948 bp, Muscodor strobelii
  misc_feature: SGI cDNA ID NO. 565893
  misc_feature: Reduced expression when VOC is produced
  misc_feature: Encodes the peptide sequence at SEQ ID NO 17637
atgccaaccctctacgcccgaacagtcgaaacattctgggcgttactcgacccctgggccttcctcttcgtctctctctgtcaaatccctcccacaatccgtgacatcttcaacacaaactcacccctcaccgccctccacatcatcttctcctcacaattccgcgacgcatggttctcccacttctggtctctcgtcggacccggaatccgcgaagaggccggacaaaaagtcttacccctcctagacggccgaaccgtcaacggtgttaccgtagagaaccccgtgcgtgaggggataggaggcgtggtaatagagataggcgcaggcagcggactatgggtagacgtcttctctgatcgtcatataaactccaacactccaaactccagcaatatcataaccgaacccaacgaaaacacgctgcgaaatcggggcaagacgaccctaggccgcacaccaatccttaaaatctacggcatagagccaaacccctctcaccaccccaccctgcggcaaaacatctcccgcgccggcctatcagaaatctacgaaatagtccccgtaggaatcgagcacctaaacaactcaaataaatgggcaggcaacatcgaaaaaggcagcgtcgactgcatcctctcagtcctatgtctctgttccatccccgatccagaacagcacactagggaattatacgagttactgaaaccaggtggaagatggtatgtatacgaacatgttcgtgttagtaattatttattgttgaggttatatcaacgttttatcaatctagtctggccgacgttcatcggcggctgcgaaatgtgtagaccgacagagcaaacgttgaggagtgctgggccgtggactagcgtcgatattggacaaccgcctgtcgagccttggtatcaccttttgccgcatattctgggtgtgtttacgaaatag

SEQ ID NO: 17637 - protein, 315 aa, Muscodor strobelii
  misc_feature: SGI Peptide ID NO. 565893
  misc_feature (10)..(315): NCBI GI: 256732213 Blast Desc: NECHADRAFT_41285 [Nectria haematococca mpVI 77-13-4]
  misc_feature (10)..(315): NCBI GI: 85099519 Blast Desc: NCU08934 [Neurospora crassa OR74A] gi|28922326|gb|EAA31565.1| conserved [Neurospora crassa OR74A] gi|28950136|emb|CAD70994.1| conserved [Neurospora crassa]
  misc_feature (1)..(315): NCBI GI: 39975825 Blast Desc: MGG_06161 [Magnaporthe grisea 70-15] gi|145011530|gb|EDJ96186.1| MGG_06161 [Magnaporthe grisea 70-15]
  misc_feature (14)..(315): NCBI GI: 171694397 Blast Desc: protein product [Podospora anserina] gi|170947147|emb|CAP73952.1| protein product [Podospora anserina]
  misc_feature (15)..(259): NCBI GI: 46137409 Blast Desc: FG10220.1 [Gibberella zeae PH-1]
  misc_feature (69)..(315): NCBI GI: 261352017 Blast Desc: conserved [Verticillium albo-atrum VaMs.102]
  misc_feature (14)..(315): NCBI GI: 256720605 Blast Desc: NECHADRAFT_72158 [Nectria haematococca mpVI 77-13-4]
  misc_feature (9)..(315): NCBI GI: 154304517 Blast Desc: BC1G_09134 [Botryotinia fuckeliana B05.10] gi|150854114|gb|EDN29306.1| BC1G_09134 [Botryotinia fuckeliana B05.10]
  misc_feature (18)..(315): NCBI GI: 156055074 Blast Desc: SS1G_04888 [Sclerotinia sclerotiorum 1980] gi|154702673|gb|EDO02412.1| SS1G_04888 [Sclerotinia sclerotiorum 1980]
  misc_feature (14)..(261): NCBI GI: 116197649 Blast Desc: CHGG_06980 [Chaetomium globosum CBS 148.51] gi|88178259|gb|EAQ85727.1| CHGG_06980 [Chaetomium globosum CBS 148.51]
  misc_feature: Useful for introducing or modulating the production of volatile compounds
MPTLYARTVETFWALLDPWAFLFVSLCQIPPTIRDIFNTNSPLTALHIIFSSQFRDAWFSHFWSLVGPGIREEAGQKVLPLLDGRTVNGVTVENPVREGIGGVVIEIGAGSGLWVDVFSDRHINSNTPNSSNIITEPNENTLRNRGKTTLGRTPILKIYGIEPNPSHHPTLRQNISRAGLSEIYEIVPVGIEHLNNSNKWAGNIEKGSVDCILSVLCLCSIPDPEQHTRELYELLKPGGRWYVYEHVRVSNYLLLRLYQRFINLVWPTFIGGCEMCRPTEQTLRSAGPWTSVDIGQPPVEPWYHLLPHILGVFTK

SEQ ID NO: 17638 - DNA, 2255 bp, Muscodor strobelii
  misc_feature: SGI EST ID NO. CUFF.41789.0
  misc_feature: Variant of the nucleotide sequence at SEQ ID NO 17636
cacaaacgcatacacaatagtatgagaccctgataccttcacgggttagagtctcacaacggtgaccaatcacatcgtccttctcgcacagattaggacatcgcttacacatattgaggctggatgttactcaagtctgagaggtcgagcctaaaggaatctctagtataaaagccatccccctcgggaacattctcccctcatctctcattcttcttggcctgatattgagagtaggcgatttatcgcccttccttacgatagtctcatctgactgatttctggtcgtttcttacatcgcttgcatcgtactggtcacgttgtgaatcttcacgaacttataattttcatcctcactcgccacttcccacaattatccgagggcccttctactatctggaaaactcttcacacggaacaccacacaaactcaacagaacaaccaccatcacaatgccaaccctctacgcccgaacagtcgaaacattctgggcgttactcgacccctgggccttcctcttcgtctctctctgtcaaatccctcccacaatccgtgacatcttcaacacaaactcacccctcaccgccctccacatcatcttctcctcacaattccgcgacgcatggttctcccacttctggtctctcgtcggacccggaatccgcgaagaggccggacaaaaagtcttacccctcctagacggccgaaccgtcaacggtgttaccgtagagaaccccgtgcgtgaggggataggaggcgtggtaatagagataggcgcaggcagcggactatgggtagacgtcttctctgatcgtcatataaactccaacactccaaactccagcaatatcataaccgaacccaacgaaaacacgctgcgaaatcggggcaagacgaccctaggccgcacaccaatccttaaaatctacggcatagagccaaacccctctcaccaccccaccctgcggcaaaacatctcccgcgccggcctatcagaaatctacgaaatagtccccgtaggaatcgagcacctaaacaactcaaataaatgggcaggcaacatcgaaaaaggcagcgtcgactgcatcctctcagtcctatgtctctgttccatccccgatccagaacagcacactagggaattatacgagttactgaaaccaggtggaagatggtatgtatacgaacatgttcgtgttagtaattatttattgttgaggttatatcaacgttttatcaatctagtctggccgacgttcatcggcggctgcgaaatgtgtagaccgacagagcaaacgttgaggagtgctgggccgtggactagcgtcgatattggacaaccgcctgtcgagccttggtatcaccttttgccgcatattctgggtgtgtttacgaaatagggcgacttcagcgggttgatgttgattgaatattggcgggtgtcagaagtccgaggatgctcgaaatcacaaagagataagatatattcgagatcacatgaagattttctcacgtgagtgagagactggcgatcatggaaggtgatggaagtgctacacacgcgcatgtggaaagtattacgatatagtagtacattgaagtctgtcgccaagtggcctgcctacttgggttcaccttttgaggtgatactgtacgctcctgggagcatgacataggaagttaatcgtgtgtatatacgagcatcattcgcttgtctattcggaagttagtcagaagcctatcgttagtcttcatatcaacatatcacacgggatgcatcatgagttggtgataatgtgataatgtgattgcttataggaaactagtagtacatgaaacagtctcatgcaacgcaagcataatcataactcattactgccgcccagaacatcttacagaccacgatgcgtctcctgaccagacttcaagctgtgacgacgctcacgctggtgcccatggtcatcatgctcgatggtgggtgggccaacatgcttctgaagaacagaaggaggaacctgcgcagcgtccgtgggatccctgtgctctgtcgaggaactgaagggtacaattagttccaaggtccgaacgactggagatggccggtgatgtgccctttcacgaacttacgccccataggtcttgtttccgccgtaagtcttgctgccgtccaggtcggagtcgacacgagggtcggccttgttcatcatgtcgctcttgtgagggccggcggtattgggggctgggccgggagcca

SEQ ID NO: 17639 - DNA, 1257 bp, Muscodor strobelii
  misc_feature: SGI cDNA ID NO. 565894
  misc_feature: Reduced expression when VOC is produced
  misc_feature: Encodes the peptide sequence at SEQ ID NO 17640
atgttcttcccaggctcagcggtattcttactgctttgcatattacttgcacaacttgcgttttgcgctgaagactactacaaagtcttaggcatagatcgtcaagccaacgacaaacagatcaagtcggcatatcgacagctcagcaagaagttccacccagataagaaccctggcgatgacacggcgcaagccaagtttgtcgaagtctccgaagcctacgaagccctcatcgactccgagtcccgcaagatctacgacaaatacggtcacgagggtctaaagcagcgccaacagaacggcggcggcggtcaccacgaccctttcgacctcttcagtcgcttcttcggtggtggtggtcattaccagcggggacagcccaagggccacaacgccgagctcaaggtcgccctttcacttcgagacttctacaacggcttagaaacagaattcagctggaataagcagcacgtgtgcgaggactgcgacggcactggctcggcggatggcgttgtcgacacgtgcccccactgccagggcagaggtgtccggatcatcaagcatcaactggcaccaggcatgttccaacaggtccagacccagtgcgacgcttgtggtggccgtggaaagtcgatcaagcatgtttgctccgtctgtcagggtcagcgtgttgttcgcaagcccacgccagtctctctgaaggtcggccgtggcgctggtagagattcccggattatgtatgagaacgaagcagacgctagccccgactacatcgctggcgatctcttcgtcatcctcagcgagaagacacccgatttggaacaagacaaccccgaccacgtggacggcgtcttctttcgacggaaaggaaacgacctcttctggacagagatgctctccctccgcgaggcatggatgggcgactggacacgcaacatcacacacttagacggccacgtcgtcagacttgggcgagagcgcggccaggtcgttcagccaggtcagatcgacacaatcgcagacgagggtatgcctatctgggctgaagacggcgacaacgtataccacaaatatcagttcggtaagctctacgtcgagtatgccgtcgtgctccccgatcagatggagaagggcatggagaaggagttctggtccgtctggcagaagtggaggggcaagatcggtgtggacctacataaagacagcggccggcccgacgaaatcataaagactcaacatgtaacggatgagttatag

SEQ ID NO: 17640 - protein, 418 aa, Muscodor strobelii
  misc_feature: SGI Peptide ID NO. 565894
  misc_feature (25)..(87): Pfam Id: PF00226 Pfam Desc: DnaJ domain
  misc_feature (146)..(230): Pfam Id: PF00684 Pfam Desc: DnaJ central domain (4 repeats)
  misc_feature (146)..(227): Pfam Id: PF00684 Pfam Desc: DnaJ central domain (4 repeats)
  misc_feature (7)..(409): NCBI GI: 39972401 Blast Desc: MGG_07502 [Magnaporthe grisea 70-15] gi|145016697|gb|EDK01127.1| MGG_07502 [Magnaporthe grisea 70-15] gi|157931190|gb|ABW04815.1| SCJ1 [Magnaporthe oryzae]
  misc_feature (16)..(409): NCBI GI: 171694399 Blast Desc: protein product [Podospora anserina] gi|170947148|emb|CAP73953.1| protein product [Podospora anserina]
  misc_feature (22)..(406): NCBI GI: 46137749 Blast Desc: FG10390.1 [Gibberella zeae PH-1]
  misc_feature (23)..(409): NCBI GI: 164423737 Blast Desc: NCU11102 [Neurospora crassa OR74A] gi|28950130|emb|CAD70988.1| related to SCJ1 protein [Neurospora crassa] gi|157070215|gb|EDO64988.1| conserved [Neurospora crassa
  misc_feature (24)..(418): NCBI GI: 116197655 Blast Desc: CHGG_06983 [Chaetomium globosum CBS 148.51] gi|88178262|gb|EAQ85730.1| CHGG_06983 [Chaetomium globosum CBS 148.51]
  misc_feature (33)..(404): NCBI GI: 256720707 Blast Desc: [Nectria haematococca mpVI 77-13-4]
  misc_feature (1)..(406): NCBI GI: 154304507 Blast Desc: BC1G_09129 [Botryotinia fuckeliana B05.10] gi|150854109|gb|EDN29301.1| BC1G_09129 [Botryotinia fuckeliana B05.10]
  misc_feature (1)..(406): NCBI GI: 156055082 Blast Desc: SS1G_04892 [Sclerotinia sclerotiorum 1980] gi|154702677|gb|EDO02416.1| SS1G_04892 [Sclerotinia sclerotiorum 1980]
  misc_feature (2)..(418): NCBI GI: 189211339 Blast Desc: chaperone protein dnaJ [Pyrenophora tritici-repentis Pt-1C-BFP] gi|187978093|gb|EDU44719.1| chaperone protein dnaJ [Pyrenophora tritici-repentis Pt-1C-BFP]
  misc_feature (22)..(405): NCBI GI: 240105886 Blast Desc: DnaJ domain containing protein [Coccidioides posadasii C735 delta SOWgp]
  misc_feature: Useful for introducing or modulating the production of volatile compounds
MFFPGSAVFLLLCILLAQLAFCAEDYYKVLGIDRQANDKQIKSAYRQLSKKFHPDKNPGDDTAQAKFVEVSEAYEALIDSESRKIYDKYGHEGLKQRQQNGGGGHHDPFDLFSRFFGGGGHYQRGQPKGHNAELKVALSLRDFYNGLETEFSWNKQHVCEDCDGTGSADGVVDTCPHCQGRGVRIIKHQLAPGMFQQVQTQCDACGGRGKSIKHVCSVCQGQRVVRKPTPVSLKVGRGAGRDSRIMYENEADASPDYIAGDLFVILSEKTPDLEQDNPDHVDGVFFRRKGNDLFWTEMLSLREAWMGDWTRNITHLDGHVVRLGRERGQVVQPGQIDTIADEGMPIWAEDGDNVYHKYQFGKLYVEYAVVLPDQMEKGMEKEFWSVWQKWRGKIGVDLHKDSGRPDEIIKTQHVTDEL

SEQ ID NO: 17641 - DNA, 1643 bp, Muscodor strobelii
  misc_feature: SGI EST ID NO. CUFF.41789.2
  misc_feature: Variant of the nucleotide sequence at SEQ ID NO 17639
cttttatctgaaagacgtctacagaacaacgccgcaccatttgctaagagacagtttgagagctattttgattgtatagtctccattcaaggctctctagttgccactgtagaagctcggttttctattttctatacagtcttttcctatctttgcttctcaggcaatgtcggcgtctaccaactaagagcatcccacttctaccgtcatcgtcacttttcgatagacagcatttagatttcttgggcctctctacactctcctctcgccacaatgttcttcccaggctcagcggtattcttactgctttgcatattacttgcacaacttgcgttttgcgctgaagactactacaaagtcttaggcatagatcgtcaagccaacgacaaacagatcaagtcggcatatcgacagctcagcaagaagttccacccagataagaaccctggcgatgacacggcgcaagccaagtttgtcgaagtctccgaagcctacgaagccctcatcgactccgagtcccgcaagatctacgacaaatacggtcacgagggtctaaagcagcgccaacagaacggcggcggcggtcaccacgaccctttcgacctcttcagtcgcttcttcggtggtggtggtcattaccagcggggacagcccaagggccacaacgccgagctcaaggtcgccctttcacttcgagacttctacaacggcttagaaacagaattcagctggaataagcagcacgtgtgcgaggactgcgacggcactggctcggcggatggcgttgtcgacacgtgcccccactgccagggcagaggtgtccggatcatcaagcatcaactggcaccaggcatgttccaacaggtccagacccagtgcgacgcttgtggtggccgtggaaagtcgatcaagcatgtttgctccgtctgtcagggtcagcgtgttgttcgcaagcccacgccagtctctctgaaggtcggccgtggcgctggtagagattcccggattatgtatgagaacgaagcagacgctagccccgactacatcgctggcgatctcttcgtcatcctcagcgagaagacacccgatttggaacaagacaaccccgaccacgtggacggcgtcttctttcgacggaaaggaaacgacctcttctggacagagatgctctccctccgcgaggcatggatgggcgactggacacgcaacatcacacacttagacggccacgtcgtcagacttgggcgagagcgcggccaggtcgttcagccaggtcagatcgacacaatcgcagacgagggtatgcctatctgggctgaagacggcgacaacgtataccacaaatatcagttcggtaagctctacgtcgagtatgccgtcgtgctccccgatcagatggagaagggcatggagaaggagttctggtccgtctggcagaagtggaggggcaagatcggtgtggacctacataaagacagcggccggcccgacgaaatcataaagactcaacatgtaacggatgagttataggaggggtcttaattgcatagcatcttataccaatagacgaaatcatagcaagacgtgcccaaggtctggttcgatgtgtcggttgaatgtctgcactatagtcgactattctg

SEQ ID NO: 17642 - DNA, 3015 bp, Muscodor strobelii
  misc_feature: SGI cDNA ID NO. 565895
  misc_feature: Encodes the peptide sequence at SEQ ID NO 17643
atgagtaaaagatacgcattcgtgcccatgggcgacgaggaaactagattggagcctcagaaaatcgagaagaagtcaaagtcacatcgcaggcgtgacgagaaggagcgatcaaggtcccacaggcatcacagtcgcagtcgcagtcgctcgccgcgccgagacaacagagacgcccacaagtccaagtcgtcaaggcccatacggaacacgcgcgaccgcgactacgatgagcggtggggcgacgaagaggccgagccgacaccctccgctgacgaaggcgacgctgagcccgagttccaggagtctgcttcgaaaaggcagaaggttagtcacaatggccgctccgacgaggtcgaggacgtggacgaagaagataaggatagggccgagcgagaagcgttcgcccagcgactcaaggaccgcgactcgggcaaatccaagcacaccgagagcagagccgaaaaggagcgccagcgtctagccgaccaggtcagcgctaaccgcgccgccatgcccgacctacgagaacgatcccgacaagactacctcaagaagcgagaagcagaaaggctggccttgctgcgcaagcaagtcgccgaggagactgcagagttgaggagcggtgtcaggctgtccgaaaaggagcgggccgagtttgccaagaatagagaactcctccgccttgccgaagagcgcctccgcatcgacgaccaccgcgacggctattatatgcccgaggactacatcacagagaaaggcaagatcgacaagaagcgcaaggaggacgccctgtacaagcgctacgtcgaacgggacgagtacggccaggagaagttcgtgaccgaacacgaggagtgggaacgggagcagacgcaaaaagccaaagctcagatcagccgagcagagcgcgagtacgaaggcgactatgccccggtcctcgaccccgagcagtacatacaatggaacttagggtcgactctggctggcgagggcaagcagctgactcaagaggagagattcctcgccgcccaaatcgatgcagccgagaagaaggctctctccatccaggacacacgaaagagtctgcccatctacaaataccgagacgagttcatcgccgcgctggagcagtatcagatattggtgctggttggtgagacgggaagcggtaaaacgactcagctgcctcaatatctacacgaagctggctacacaaagaacggtcgaaaggtcggatgcacccagccgagacgagtcgcagccatgagtgtcgcagctcgtgtagccgaggaaatgggagtcaaagtcggaaacgaagttggttactctattcgttttgaagataacacgagtgacaagaccatcctgaaatatatgacagatggtatgctgctccgagagttcatgacagagccagatctcgacggatactcagcaatcatgatcgatgaggcccacgaacggacagtccataccgatatcctgctcgctttggtcaaagatctggcaagagaaagaccagatctgaaacttctcatctcctcagcgaccatgaatgctgagaagtttgccaaatactttgacgatgcccctatcttcaacattcctggtcgacggtaccccgttgatatatactatacgccagcgccggaggccaactatctgactgccgctattacaaccatctttcagatccatacctcgcagggaaaaggcgatatcttggttttcttgacgggtcaggatgagatcgaggcagcagaacaacagcttaccgaaacggccagaaagctcggcaatcgcgtcaaggaattaatagtctgtcccatctatgccaatcttccatcagatttgcaatcaaaaatctttgagccaaccccaaataacgctcgcaaggtcgttctcgcaaccaacattgcggaaacgagtttaaccatcgacggcattacctacgtgatcgatcccggtttcgtcaaggaaaacgtctataatccagcgaccggcatgtcgaatctagtagtcgtcccttgttcgcgcgcatctgcaaaccagcgaagtgggcgtgccggacgtgttgggcctggaaagtgtttccgtctttacaccagatatgcttatatgaacgaaatggacgagtcgaccacgcccgagatccagcgaacgaacttaaatggcattgtattgcagctgaaatcgctcggaatcaaccagctactggaattcgaatttatggacccgcctcccaccgaggccctcatcggggctttgaaccagctgtttgcgctccaagccctaaatcacaagggagagcttaccaaggtcggccgtcagatggccgagttccctacggatcccatgcttgcgaaagctgtgctggctgcagataagttcaagtgcgtggacgaggtcctgtcgatcgtctctatgctcagcgaggcctctgcgctcttctttcgacccaaggacaagaaaatccatgccgatagcgcccgcaatcgattcacggtcaaggatggaggtgatcacgtcactttgttgaacatatggaaccaatgggtcgatagcgacttctcaccagtttggtcgcgcgagaacttcctccagcaacgttccttgaccagggcccgcgatgtacgagaccaattagccaagctctgcgaacgtgtagaagtcgctccctccacttgcggctcatccaacctcgaaccgatccagaaggctctgactgcgggcttttttcctaacgcggcacgtctgcaacgtggtggtgatagctaccgaaccctgaaaaacaacacaacagtgtatattcatccctcttcagtattgatgaagtctgatccgccggagaaaactgtagtatatcatgaactggtccttacgaataaggaatacatgagaagttgtatgcctatacggcctcagtggctgaatgaggtggcaccgcacttccataagctgaaggatctcgaattcgatgatcgcaagatgccgaagaatacggggaggtaa

SEQ ID NO: 17643 - protein, 1004 aa, Muscodor strobelii
  misc_feature: SGI Peptide ID NO. 565895
  misc_feature (881)..(985): Pfam Id: PF07717 Pfam Desc: Domain of function (DUF1605)
  misc_feature (755)..(847): Pfam Id: PF04408 Pfam Desc: Helicase associated domain (HA2)
  misc_feature (600)..(694): Pfam Id: PF00271 Pfam Desc: Helicase conserved C-terminal domain
  misc_feature (2)..(1001): NCBI GI: 261352019 Blast Desc: pre-mRNA-splicing factor ATP-dependent RNA helicase PRP16 [Verticillium albo-atrum VaMs.102]
  misc_feature (2)..(1004): NCBI GI: 39972399 Blast Desc: MGG_07501 [Magnaporthe grisea 70-15] gi|145016696|gb|EDK01126.1| MGG_07501 [Magnaporthe grisea 70-15]
  misc_feature (1)..(1000): NCBI GI: 46137751 Blast Desc: FG10391.1 [Gibberella zeae PH-1]
  misc_feature (3)..(1003): NCBI GI: 119480521 Blast Desc: mRNA splicing factor RNA helicase (Cdc28), [Neosartorya fischeri NRRL 181] gi|119408443|gb|EAW18392.1| mRNA splicing factor RNA helicase (Cdc28), [Neosartorya fischeri NRRL
  misc_feature (34)..(1003): NCBI GI: 145235910 Blast Desc: protein product [Aspergillus niger] gi|134075050|emb|CAK44849.1| protein product [Aspergillus niger]
  misc_feature (3)..(1003): NCBI GI: 159129205 Blast Desc: mRNA splicing factor RNA helicase (Cdc28), [Aspergillus fumigatus A1163]
  misc_feature (3)..(1003): NCBI GI: 71000850 Blast Desc: mRNA splicing factor RNA helicase (Cdc28) [Aspergillus fumigatus Af293] gi|66852744|gb|EAL93068.1| mRNA splicing factor RNA helicase (Cdc28), [Aspergillus fumigatus Af293]
  misc_feature (3)..(992): NCBI GI: 169784044 Blast Desc: [Aspergillus oryzae RIB40] gi|238493885|ref|XP_002378179.1| mRNA splicing factor RNA helicase (Cdc28), [Aspergillus flavus NRRL3357] protein product
  misc_feature (2)..(992): NCBI GI: 115386082 Blast Desc: ATP-dependent RNA helicase DHX8 [Aspergillus terreus NIH2624] gi|114190580|gb|EAU32280.1| ATP-dependent RNA helicase DHX8 [Aspergillus terreus NIH2624]
  misc_feature (3)..(1003): NCBI GI: 255935861 Blast Desc: Pc13g05230 [Penicillium chrysogenum Wisconsin 54-1255] gi|211583577|emb|CAP91592.1| Pc13g05230 [Penicillium chrysogenum Wisconsin 54-1255]
MSKRYAFVPMGDEETRLEPQKIEKKSKSHRRRDEKERSRSHRHHSRSRSRSPRRDNRDAHKSKSSRPIRNTRDRDYDERWGDEEAEPTPSADEGDAEPEFQESASKRQKVSHNGRSDEVEDVDEEDKDRAEREAFAQRLKDRDSGKSKHTESRAEKERQRLADQVSANRAAMPDLRERSRQDYLKKREAERLALLRKQVAEETAELRSGVRLSEKERAEFAKNRELLRLAEERLRIDDHRDGYYMPEDYITEKGKIDKKRKEDALYKRYVERDEYGQEKFVTEHEEWEREQTQKAKAQISRAEREYEGDYAPVLDPEQYIQWNLGSTLAGEGKQLTQEERFLAAQIDAAEKKALSIQDTRKSLPIYKYRDEFIAALEQYQILVLVGETGSGKTTQLPQYLHEAGYTKNGRKVGCTQPRRVAAMSVAARVAEEMGVKVGNEVGYSIRFEDNTSDKTILKYMTDGMLLREFMTEPDLDGYSAIMIDEAHERTVHTDILLALVKDLARERPDLKLLISSATMNAEKFAKYFDDAPIFNIPGRRYPVDIYYTPAPEANYLTAAITTIFQIHTSQGKGDILVFLTGQDEIEAAEQQLTETARKLGNRVKELIVCPIYANLPSDLQSKIFEPTPNNARKVVLATNIAETSLTIDGITYVIDPGFVKENVYNPATGMSNLVVVPCSRASANQRSGRAGRVGPGKCFRLYTRYAYMNEMDESTTPEIQRTNLNGIVLQLKSLGINQLLEFEFMDPPPTEALIGALNQLFALQALNHKGELTKVGRQMAEFPTDPMLAKAVLAADKFKCVDEVLSIVSMLSEASALFFRPKDKKIHADSARNRFTVKDGGDHVTLLNIWNQWVDSDFSPVWSRENFLQQRSLTRARDVRDQLAKLCERVEVAPSTCGSSNLEPIQKALTAGFFPNAARLQRGGDSYRTLKNNTTVYIHPSSVLMKSDPPEKTVVYHELVLTNKEYMRSCMPIRPQWLNEVAPHFHKLKDLEFDDRKMPKNTGR

SEQ ID NO: 17644 - DNA, 3230 bp, Muscodor strobelii
  misc_feature: SGI EST ID NO. CUFF.41392.0
  misc_feature: Variant of the nucleotide sequence at SEQ ID NO 17642
cccgtccctgtcaacgccatcaacaccgtcaccatgagtaaaagatacgcattcgtgcccatgggcgacgaggaaactagattggagcctcagaaaatcgagaagaagtcaaagtcacatcgcaggcgtgacgagaaggagcgatcaaggtcccacaggcatcacagtcgcagtcgcagtcgctcgccgcgccgagacaacagagacgcccacaagtccaagtcgtcaaggcccatacggaacacgcgcgaccgcgactacgatgagcggtggggcgacgaagaggccgagccgacaccctccgctgacgaaggcgacgctgagcccgagttccaggagtctgcttcgaaaaggcagaaggttagtcacaatggccgctccgacgaggtcgaggacgtggacgaagaagataaggatagggccgagcgagaagcgttcgcccagcgactcaaggaccgcgactcgggcaaatccaagcacaccgagagcagagccgaaaaggagcgccagcgtctagccgaccaggtcagcgctaaccgcgccgccatgcccgacctacgagaacgatcccgacaagactacctcaagaagcgagaagcagaaaggctggccttgctgcgcaagcaagtcgccgaggagactgcagagttgaggagcggtgtcaggctgtccgaaaaggagcgggccgagtttgccaagaatagagaactcctccgccttgccgaagagcgcctccgcatcgacgaccaccgcgacggctattatatgcccgaggactacatcacagagaaaggcaagatcgacaagaagcgcaaggaggacgccctgtacaagcgctacgtcgaacgggacgagtacggccaggagaagttcgtgaccgaacacgaggagtgggaacgggagcagacgcaaaaagccaaagctcagatcagccgagcagagcgcgagtacgaaggcgactatgccccggtcctcgaccccgagcagtacatacaatggaacttagggtcgactctggctggcgagggcaagcagctgactcaagaggagagattcctcgccgcccaaatcgatgcagccgagaagaaggctctctccatccaggacacacgaaagagtctgcccatctacaaataccgagacgagttcatcgccgcgctggagcagtatcagatattggtgctggttggtgagacgggaagcggtaaaacgactcagctgcctcaatatctacacgaagctggctacacaaagaacggtcgaaaggtcggatgcacccagccgagacgagtcgcagccatgagtgtcgcagctcgtgtagccgaggaaatgggagtcaaagtcggaaacgaagttggttactctattcgttttgaagataacacgagtgacaagaccatcctgaaatatatgacagatggtatgctgctccgagagttcatgacagagccagatctcgacggatactcagcaatcatgatcgatgaggcccacgaacggacagtccataccgatatcctgctcgctttggtcaaagatctggcaagagaaagaccagatctgaaacttctcatctcctcagcgaccatgaatgctgagaagtttgccaaatactttgacgatgcccctatcttcaacattcctggtcgacggtaccccgttgatatatactatacgccagcgccggaggccaactatctgactgccgctattacaaccatctttcagatccatacctcgcagggaaaaggcgatatcttggttttcttgacgggtcaggatgagatcgaggcagcagaacaacagcttaccgaaacggccagaaagctcggcaatcgcgtcaaggaattaatagtctgtcccatctatgccaatcttccatcagatttgcaatcaaaaatctttgagccaaccccaaataacgctcgcaaggtcgttctcgcaaccaacattgcggaaacgagtttaaccatcgacggcattacctacgtgatcgatcccggtttcgtcaaggaaaacgtctataatccagcgaccggcatgtcgaatctagtagtcgtcccttgttcgcgcgcatctgcaaaccagcgaagtgggcgtgccggacgtgttgggcctggaaagtgtttccgtctttacaccagatatgcttatatgaacgaaatggacgagtcgaccacgcccgagatccagcgaacgaacttaaatggcattgtattgcagctgaaatcgctcggaatcaaccagctactggaattcgaatttatggacccgcctcccaccgaggccctcatcggggctttgaaccagctgtttgcgctccaagccctaaatcacaagggagagcttaccaaggtcggccgtcagatggccgagttccctacggatcccatgcttgcgaaagctgtgctggctgcagataagttcaagtgcgtggacgaggtcctgtcgatcgtctctatgctcagcgaggcctctgcgctcttctttcgacccaaggacaagaaaatccatgccgatagcgcccgcaatcgattcacggtcaaggatggaggtgatcacgtcactttgttgaacatatggaaccaatgggtcgatagcgacttctcaccagtttggtcgcgcgagaacttcctccagcaacgttccttgaccagggcccgcgatgtacgagaccaattagccaagctctgcgaacgtgtagaagtcgctccctccacttgcggctcatccaacctcgaaccgatccagaaggctctgactgcgggcttttttcctaacgcggcacgtctgcaacgtggtggtgatagctaccgaaccctgaaaaacaacacaacagtgtatattcatccctcttcagtattgatgaagtctgatccgccggagaaaactgtagtatatcatgaactggtccttacgaataaggaatacatgagaagttgtatgcctatacggcctcagtggctgaatgaggtggcaccgcacttccataagctgaaggatctcgaattcgatgatcgcaagatgccgaagaatacggggaggtaaatatgtatatagatagcgggacggatggtcgtataaacagattgtaacatagcgggatgggcggtcggataagcagtggaatggacttatgacttgatacatgcatagtatactgcgttattcgtggttcaccgtaagcttcgttgtaagtattaagttgtcttgatttatatgtgtcctcg

SEQ ID NO: 17645 - DNA, 1065 bp, Muscodor strobelii
  misc_feature: SGI cDNA ID NO. 565896
  misc_feature: Encodes the peptide sequence at SEQ ID NO 17646
atgtgcttcggcagcaggaagacggacgaagcgggcaatgcccgctcgcgagagctcgataaggtcatcaaacaagatgaaaagcggatggcaaaagaagtcaaacttctactactcggagccggagaatcgggcaagtctacggttttaaaacagatgaagttgatctattcgcaaggtttcagcaagaccgagaagctggagtggaagcccgtcgtcttcaacaatgtcatacagtcaatgcgactcattttcgatgctatggaagactattcgattgagctggaaggcaaagataacgagaaaaacaaagagagaatcctactggacgcagaaatagggcccaacgagcctctacccatcgaatatctccaacctgttaaatcgctctgggcagatgccggagtacagaaggccatcctcaaaggcaacgaatatgcgctacacgataacttggcctatttctgtgaagatgcggatcgtctatgggctcaggactatcttcccacggaccaagatttactgcgatcaagattaagaacgaccggcatcaccgagaccgtgttcgatttaggccagttgacatatcgcatgttcgacgttggtggacagaggtcggagcgcaagaagtggattcattgctttgaaaacgtcaacgccttgatgttcttggtcgccatcagtggctacgatcagtgtctggtggaagacaaggatggcaatcaaatgaacgaagcattgatgctatgggaatccattgccaactcacattggttcacaaagtcggctctgatcctctttcttaacaagatggacttgtttagcgagaagattgtatccagcccgatcacatcacacgggttcactgattacagaggaccacccgatgaccacaagcaggcgagcaagtacttcatggataaattcaaggctctcaaccggaaccccgaaaaggagatctacggccatttcacgaatgccaccgacaccaacctgttgaagatcacgatgacatcagtgcaggacatgatcatacaacggaacctcaagcagttaatactgtga

SEQ ID NO: 17646 - protein, 354 aa, Muscodor strobelii
  misc_feature: SGI Peptide ID NO. 565896
  misc_feature (6)..(354): Pfam Id: PF00503 Pfam Desc: G-protein alpha subunit
  misc_feature (1)..(354): NCBI GI: 116197939 Blast Desc: guanine nucleotide-binding protein alpha-2 subunit [Chaetomium globosum CBS 148.51] gi|88178404|gb|EAQ85872.1| guanine nucleotide-binding protein alpha-2 subunit [Chaetomium
  misc_feature (1)..(354): NCBI GI: 261351988 Blast Desc: guanine nucleotide-binding protein alpha-2 subunit [Verticillium albo-atrum VaMs.102]
  misc_feature (1)..(354): NCBI GI: 171693825 Blast Desc: protein product [Podospora anserina] gi|170946861|emb|CAP73665.1| protein product [Podospora anserina]
  misc_feature (1)..(354): NCBI GI: 20259689 Blast Desc: G-protein alpha subunit CPG-3 [Cryphonectria parasitica]
  misc_feature (1)..(354): NCBI GI: 2293546 Blast Desc: MAGC [Magnaporthe grisea]
  misc_feature (1)..(354): NCBI GI: 193227761 Blast Desc: G alpha subunit 2 [Sordaria macrospora]
  misc_feature (1)..(354): NCBI GI: 585175 Blast Desc: GPA2_NEUCR RecName: Full=Guanine nucleotide-binding protein alpha-2 subunit; AltName: Full=GP2-alpha gi|168814|gb|AAA02559.1| G protein alpha subunit [Neurospora G
  misc_feature (1)..(354): NCBI GI: 4101576 Blast Desc: G protein alpha subunit [Neurospora crassa]
  misc_feature (1)..(354): NCBI GI: 256732053 Blast Desc: [Nectria haematococca mpVI 77-13-4]
  misc_feature (1)..(354): NCBI GI: 40037204 Blast Desc: G-protein alpha subunit [Sporothrix schenckii] gi|61968080|gb|AAX56967.1| G protein alpha subunit 3 [Sporothrix schenckii]
  misc_feature (36)..(334): SWISSPROT Homolog: EC 3.1.3.16 Phosphoprotein phosphatase
MCFGSRKTDEAGNARSRELDKVIKQDEKRMAKEVKLLLLGAGESGKSTVLKQMKLIYSQGFSKTEKLEWKPVVFNNVIQSMRLIFDAMEDYSIELEGKDNEKNKERILLDAEIGPNEPLPIEYLQPVKSLWADAGVQKAILKGNEYALHDNLAYFCEDADRLWAQDYLPTDQDLLRSRLRTTGITETVFDLGQLTYRMFDVGGQRSERKKWIHCFENVNALMFLVAISGYDQCLVEDKDGNQMNEALMLWESIANSHWFTKSALILFLNKMDLFSEKIVSSPITSHGFTDYRGPPDDHKQASKYFMDKFKALNRNPEKEIYGHFTNATDTNLLKITMTSVQDMIIQRNLKQLIL

SEQ ID NO: 17647 - DNA, 2736 bp, Muscodor strobelii
  misc_feature: SGI EST ID NO. CUFF.42161.1
  misc_feature: Variant of the nucleotide sequence at SEQ ID NO 17645
gctcattgtgcctgggatgtgcatgcttgtagacggcgtctaatgagaatacggtatttatcactccttcgctacccacccatgcccgcaccatgatcctcgagagcttcctcttttgcccgtcgctcaacaccccaagatggccgcccgggactaacaacgctgctaggctgcactcaacccgctcttcaattcccaccgacgactagcggtaccatatctcatctccatcttccccaaacacctctctggctcaggtcgatttattttgagggttctcagctctgcagcaggtcccttgggtgcatgtaagggattacttgtacggaaccgtccccatacgagtgcgagactgctcgggactccacaccgaggccacccaacccccgaggccgcgacagtccctcttgtctcaccctcccagctccagcttgaggccgtcgaagcactattgctttgtcgtacctgggtctaccatttggctatcccagcctcccgtaccacataagctagccttgtcaaatctggctgttgcaccagtttctacaatagtattatcgccagctttcagctcgacgacatccgatcgattcgcgtgggccgacgcacactgcatccgccggcttcaattattcgccattgtgcacgctctgtctctcatccgcatcgacgcgccgccttgctccaactggctgcattcgagagtcagccgaagcgatatatccctatttgatccaacatgtgcttcggcagcaggaagacggacgaagcgggcaatgcccgctcgcgagagctcgataaggtcatcaaacaagatgaaaagcggatggcaaaagaagtcaaacttctactactcggagccggagaatcgggcaagtctacggttttaaaacagatgaagttgatctattcgcaaggtttcagcaagaccgagaagctggagtggaagcccgtcgtcttcaacaatgtcatacagtcaatgcgactcattttcgatgctatggaagactattcgattgagctggaaggcaaagataacgagaaaaacaaagagagaatcctactggacgcagaaatagggcccaacgagcctctacccatcgaatatctccaacctgttaaatcgctctgggcagatgccggagtacagaaggccatcctcaaaggcaacgaatatgcgctacacgataacttggcctatttctgtgaagatgcggatcgtctatgggctcaggactatcttcccacggaccaagatttactgcgatcaagattaagaacgaccggcatcaccgagaccgtgttcgatttaggccagttgacatatcgcatgttcgacgttggtggacagaggtcggagcgcaagaagtggattcattgctttgaaaacgtcaacgccttgatgttcttggtcgccatcagtggctacgatcagtgtctggtggaagacaaggatggcgtaagttattcggacacctgacatttgacacccggcccaggaaatgcgagcaaaccggctaatgcgatttggatagaatcaaatgaacgaagcattgatgctatgggaatccattgccaactcacattggttcacaaagtcggctctgatcctctttcttaacaagatggacttgtttagcgagaagattgtatccagcccgatcacatcacacgggttcactgattacagaggaccacccgatgaccacaagcaggcgagcaagtacttcatggataaattcaaggctctcaaccggaaccccgaaaaggagatctacggccatttcacgaatgccaccgacaccaacctgttgaagatcacgatgacatcagtgcaggacatgatcatacaacggaacctcaagcagttaatacttatcacctgagaattgaatcttctgagccggtgaccccttccgggcaccggcttatgtcaaattctaccaatcccgaatgaccgacgcaagagaccaccggctgaagaaacacatgttttaaacacctacgagctgggacctgacaccgtttacctatctattgatcctgcccatgaagacatcgaatgaagaaatgaaagcatagtgtggtatttggggcgtatttctcggcagcgctggataaccacgcatcgagatggtttggatacggagacgatgaacgagaaccgacccgaccgaaaagagacagaaacgctgtgcggctggaggggatgaaggggatatttataccagatgaatgcgggcattgcggaggttcgggcttatctttgatttcttttgtgcaatcgctatctcacggctactgttacgactggatacctactacatacctacctacctgtttgggcttttacgttcggagagcgctttcgacggagacgggagacggggggcggggaacggaagaaggcatgcatgcagatctcgaattgggcgagactaaagctattcgttttggatacacccttatttgtcacatatctaaagtacataccgggatgcgatcgtgctttggccaacgcaatgctggtccaaaggcacgactatcagccgtaagagagtggagaatatcagagctccgctctatgcttgaggagataccccatattcgaattatgataattctgcactttatgtgatgatacactactttactggcaagagcgatctagcgtgtctgtctaataacgagatgcttcaaatagtagtcgcttcagctatcggtcccaatgcaaac

SEQ ID NO: 17648 - DNA, 2487 bp, Muscodor strobelii
  misc_feature: SGI cDNA ID NO. 565897
  misc_feature: Encodes the peptide sequence at SEQ ID NO 17649
atggccgaaccagttgaacccaagagcttcgcgcctgacgttgcacccgtcaaaggcggtggacctgctccagcgcggcgcaagcttaaggagcgtttcccgatcctgaagaagaagcgaggcgtggcggccgtcgttgtgcttctcagtctcccgttgctaggtctgctcggattacttgcacttttgcatggaaggaatttgagtagcaactatgggcaaggcaatagcgggagaatcgtggacgacacttatttctacaaccagtcggaaccagtttatccttctcccccgatgactggtacgggtacttggtctaacgcccatgacaaagccgtcaaatttgtcggcgagcttaccatcgaggagaaggtctcattagtctctggtctttcatcatcgacaggttcatctggagtcctgaatggttgttcaggcaacatcggggcaatcaagcgtatgaacttcacaggcctttgtcttaccgatgctggacaaggtgtccgagccaccgactttgtcagcgggttcccgagtggtctccacgtcggtgcgagctggaacaaggcactcacgcgcagtcgtgcagaagcgatgggtcttgaatttcgagtcaaaggggccaatgttgcacttggtccggtcgtggggccaattggccgcgtcgtctgcggcggccgaaattgggaaggtttctcggttgacccctatctctgcggagttctggctgcggagacggtgataggtgttcaatcccagggtgttattacgagtacaaagcatttcattgcaaatgaacaggagacctatcgacagccacatgacgatgtggaagccgtctcgtccaacattgatgacaggactatgcacgagctttatctctggcccttccaagatgctgtccacgctggcacaggcaatatcatgtgttcttataaccgtgtcaataattcctatggctgtgccaactcgaaaacgcagaatggtctgttgaagaccgagctagggttccagggattcgttgtttcagactgggatgcattgcatgctggtgtagcaagtgccaatgctggagaagatatggtaatgcctagttcccgtctatggggcgatgagttagtcaaatctgtcaaaaatggatccgtagaccgggacaggttggacgatatggcgacgagagttatcgctgcctggtatcaaatgggccaggacgagggctttccggatcctggcgtgggcatcgccgccgatctcacaaagcctcatggaatcatcgatgcgcgaaattcttcatcacgctccacactcctggatggtgccattgagggccatgttttgttgaagaataccaatggagcgctcccgctggataagccgcaaatgctctccatcttcggatattctgcgcgccaaccggatcagtggaattataaatcaaatggtggcgttgcgccatggacttttggcggcgagtccaacaatctaggaagagatacgtcggcaggatttgctggtataactgatgccgacttccaacagattgctctcaatggaactatctatagtggtggtggttctggtgcagtgacaccagcacacgcaatttcacccttcgatgccttgacgcaaagagcatacgacgacaacactgccctcatgtgggacttcttcagcattgatcccgacgtcacaagtgtttcggatgcctgcctcgtactcggtaacgcatttgcttccgaaggatttgatcggcctggtctccgagacaaatttacggaccagttgattgtgaacgtggctaataattgtaacaacaccattgtcatttttcacaatgcaggagtccggctagtagatgaatggatctcccatccaaacgtcactgccttgatatttgcccatttaccaggcgaggcgtccggcaaagctctcgtttcgatcctctacggagatgcgaacccctcgggcaaacttccgtacacggtggcgaagaatgaatctgactacggaaatatcttgaacccggaccttgcagagggtatctatcaactgttcccacaatcaaatttcagcgagggtgtctaccttgactaccgtcatttcgacgcaaagggaattgagccccgctatgagttcgggttcggactttcgtataccacgttcgaattctcgaatctggagatcacgaaaaacactagcgcgaacacagaacatgtagaggtggcaaacacgggtagtgtcgacggtgcggaagtcgcgcagctctacgttagtatcccaggcgcgccagtgaaacagttgcgagggtttgagaagccgttcatgaacgtctcgcagtcggaaaccgtctcgttcgagctgaatagacgggacttgagcgtttgggatgtggtggcgcaaaagtggtcgcttcagagcggcaactacaccatctatgtcggatcgagtagtcgtcagctgccattgaagagcacgctatcgatctga

SEQ ID NO: 17649 - protein, 828 aa, Muscodor strobelii
  misc_feature: SGI Peptide ID NO. 565897
  misc_feature (148)..(364): Pfam Id: PF00933 Pfam Desc: Glycosyl hydrolase family 3 N terminal domain
  misc_feature (444)..(698): Pfam Id: PF01915 Pfam Desc: Glycosyl hydrolase family 3 C terminal domain
  misc_feature (80)..(828): NCBI GI: 171693827 Blast Desc: protein product [Podospora anserina] gi|170946862|emb|CAP73666.1| protein product [Podospora anserina]
  misc_feature (80)..(828): NCBI GI: 256733341 Blast Desc: NECHADRAFT_91612 [Nectria haematococca mpVI 77-13-4]
  misc_feature (56)..(828): NCBI GI: 238488403 Blast Desc: beta-glucosidase, [Aspergillus flavus NRRL3357] gi|220697827|gb|EED54167.1| beta-glucosidase, [Aspergillus flavus NRRL3357]
  misc_feature (56)..(828): NCBI GI: 169762594 Blast Desc: [Aspergillus oryzae RIB40] gi|83770225|dbj|BAE60358.1| protein product [Aspergillus oryzae]
  misc_feature (56)..(828): NCBI GI: 115449679 Blast Desc: ATEG_10320 [Aspergillus terreus NIH2624] gi|114187617|gb|EAU29317.1| ATEG_10320 [Aspergillus terreus NIH2624]
  misc_feature (80)..(828): NCBI GI: 145242946 Blast Desc: An11g00200 [Aspergillus niger] gi|134078691|emb|CAK48253.1| protein product [Aspergillus niger]
  misc_feature (80)..(828): NCBI GI: 119494233 Blast Desc: glycosyl hydrolase, [Neosartorya fischeri NRRL 181] gi|119412174|gb|EAW22115.1| glycosyl hydrolase, [Neosartorya fischeri NRRL 181]
  misc_feature (80)..(828): NCBI GI: 70996706 Blast Desc: beta-glucosidase [Aspergillus fumigatus Af293] gi|66850743|gb|EAL91070.1| beta-glucosidase, [Aspergillus fumigatus Af293]
  misc_feature (80)..(828): NCBI GI: 159131843 Blast Desc: beta-glucosidase, [Aspergillus fumigatus A1163]
  misc_feature (80)..(828): NCBI GI: 154305615 Blast Desc: BC1G_07622 [Botryotinia fuckeliana B05.10] gi|150853141|gb|EDN28333.1| BC1G_07622 [Botryotinia fuckeliana B05.10]
  misc_feature (90)..(737): SWISSPROT Homolog: EC 3.2.1.21 Beta-glucosidase
MAEPVEPKSFAPDVAPVKGGGPAPARRKLKERFPILKKKRGVAAVVVLLSLPLLGLLGLLALLHGRNLSSNYGQGNSGRIVDDTYFYNQSEPVYPSPPMTGTGTWSNAHDKAVKFVGELTIEEKVSLVSGLSSSTGSSGVLNGCSGNIGAIKRMNFTGLCLTDAGQGVRATDFVSGFPSGLHVGASWNKALTRSRAEAMGLEFRVKGANVALGPVVGPIGRVVCGGRNWEGFSVDPYLCGVLAAETVIGVQSQGVITSTKHFIANEQETYRQPHDDVEAVSSNIDDRTMHELYLWPFQDAVHAGTGNIMCSYNRVNNSYGCANSKTQNGLLKTELGFQGFVVSDWDALHAGVASANAGEDMVMPSSRLWGDELVKSVKNGSVDRDRLDDMATRVIAAWYQMGQDEGFPDPGVGIAADLTKPHGIIDARNSSSRSTLLDGAIEGHVLLKNTNGALPLDKPQMLSIFGYSARQPDQWNYKSNGGVAPWTFGGESNNLGRDTSAGFAGITDADFQQIALNGTIYSGGGSGAVTPAHAISPFDALTQRAYDDNTALMWDFFSIDPDVTSVSDACLVLGNAFASEGFDRPGLRDKFTDQLIVNVANNCNNTIVIFHNAGVRLVDEWISHPNVTALIFAHLPGEASGKALVSILYGDANPSGKLPYTVAKNESDYGNILNPDLAEGIYQLFPQSNFSEGVYLDYRHFDAKGIEPRYEFGFGLSYTTFEFSNLEITKNTSANTEHVEVANTGSVDGAEVAQLYVSIPGAPVKQLRGFEKPFMNVSQSETVSFELNRRDLSVWDVVAQKWSLQSGNYTIYVGSSSRQLPLKSTLSI

SEQ ID NO: 17650 - DNA, 3256 bp, Muscodor strobelii
  misc_feature: SGI EST ID NO. CUFF.41405.0
  misc_feature: Variant of the nucleotide sequence at SEQ ID NO 17648
tgaacaatgagtgctttgctgatatcgctagcaaataccaataatcttgtatatcactactgtgttttatttcgaaccgtcctggattgacgattgacaaaaggcgaccggcaaaacgcgtcatcacaatccgtcgggtcggtggttggcgccacacgcaggattcaatgtgtcgtgacacccctatgtgcaacatttcacattgacgtcggtcaacgtaatcgacaacacttatctccagcactcttggggatcgattacgcgatacggactgtctaaagggagcacatcaattagttctcatgaacggccattcgctggcaagccactatttcgcaattgattccgcgggtaaacattgttgaaaccgatacagttaaggcggtatccacatcacatcacgacgccccgtcagttcaatacggatcacctcacacacaacctgcaaatggccgaaccagttgaacccaagagcttcgcgcctgacgttgcacccgtcaaaggcggtggacctgctccagcgcggcgcaagcttaaggagcgtttcccgatcctgaagaagaagcgaggcgtggcggccgtcgttgtgcttctcagtctcccgttgctaggtctgctcggattacttgcacttttgcatggaaggaatttgagtagcaactatgggcaaggcaatagcgggagaatcgtggacgacacttatttctacaaccagtcggaaccagtttatccttctcccccgatgactggtacgggtacttggtctaacgcccatgacaaagccgtcaaatttgtcggcgagcttaccatcgaggagaaggtctcattagtctctggtctttcatcatcgacaggttcatctggagtcctgaatggttgttcaggcaacatcggggcaatcaagcgtatgaacttcacaggcctttgtcttaccgatgctggacaaggtgtccgagccaccgactttgtcagcgggttcccgagtggtctccacgtcggtgcgagctggaacaaggcactcacgcgcagtcgtgcagaagcgatgggtcttgaatttcgagtcaaaggggccaatgttgcacttggtccggtcgtggggccaattggccgcgtcgtctgcggcggccgaaattgggaaggtttctcggttgacccctatctctgcggagttctggctgcggagacggtgataggtgttcaatcccagggtgttattacgagtacaaagcatttcattgcaaatgaacaggagacctatcgacagccacatgacgatgtggaagccgtctcgtccaacattgatgacaggactatgcacgagctttatctctggcccttccaagatgctgtccacgctggcacaggcaatatcatgtgttcttataaccgtgtcaataattcctatggctgtgccaactcgaaaacgcagaatggtctgttgaagaccgagctagggttccagggattcgttgtttcagactgggatgcattgcatgctggtgtagcaagtgccaatgctggagaagatatggtaatgcctagttcccgtctatggggcgatgagttagtcaaatctgtcaaaaatggatccgtagaccgggacaggttggacgatatggcgacgagagttatcgctgcctggtatcaaatgggccaggacgagggctttccggatcctggcgtgggcatcgccgccgatctcacaaagcctcatggaatcatcgatgcgcgaaattcttcatcacgctccacactcctggatggtgccattgagggccatgttttgttgaagaataccaatggagcgctcccgctggataagccgcaaatgctctccatcttcggatattctgcgcgccaaccggatcagtggaattataaatcaaatggtggcgttgcgccatggacttttggcggcgagtccaacaatctaggaagagatacgtcggcaggatttgctggtataactgatgccgacttccaacagattgctctcaatggaactatctatagtggtggtggttctggtgcagtgacaccagcacacgcaatttcacccttcgatgccttgacgcaaagagcatacgacgacaacactgccctcatgtgggacttcttcagcattgatcccgacgtcacaagtgtttcggatgcctgcctcgtactcggtaacgcatttgcttccgaaggatttgatcggcctggtctccgagacaaatttacggaccagttgattgtgaacgtggctaataattgtaacaacaccattgtcatttttcacaatgcaggagtccggctagtagatgaatggatctcccatccaaacgtcactgccttgatatttgcccatttaccaggcgaggcgtccggcaaagctctcgtttcgatcctctacggagatgcgaacccctcgggcaaacttccgtacacggtggcgaagaatgaatctgactacggaaatatcttgaacccggaccttgcagagggtatctatcaactgttcccacaatcaaatttcagcgagggtgtctaccttgactaccgtcatttcgacgcaaagggaattgagccccgctatgagttcgggttcggactttcgtataccacgttcgaattctcgaatctggagatcacgaaaaacactagcgcgaacacagaacagtaccctacgggcccccattatggagggaggccaaactgatctttgggacgtaattgccaacgtgagtgtagaggtggcaaacacgggtagtgtcgacggtgcggaagtcgcgcagctctacgttagtatcccaggcgcgccagtgaaacagttgcgagggtttgagaagccgttcatgaacgtctcgcagtcggaaaccgtctcgttcgagctgaatagacgggacttgagcgtttgggatgtggtggcgcaaaagtggtcgcttcagagcggcaactacaccatctatgtcggatcgagtagtcgtcagctgccattgaagagcacgctatcgatctgagtcgaggcacaggcgtcctcgagacatggcatgtcatcccgatgaaaatggcgtatggattctctcgcgtgggtggtgcattgcgttggttacctggtcctaagttgatgagataccctccctgtttgtaatatggtttctggcttcattgagtatggctggtattgctggcgttataggtactcttagagtttctcaagggatgagacaataagacttcgagaatagatattaatgaatatctttaaaaggaa

SEQ ID NO: 17651 - DNA, 1710 bp, Muscodor strobelii
  misc_feature: SGI cDNA ID NO. 565899
  misc_feature: Encodes the peptide sequence at SEQ ID NO 17652
atgacacctgtaccacgaggcctcttcggccgctggattgatcggttcttcgcccatctcgactcacttgcgcccgagcgttgcagttacacaatagaggctgttcgtattccagtcgcagacaggatcaacgtgaccgcggatctctatcgacctagtggggttgagcagccgcgaggcactattcttgtgcgctcgccatacggatatgaattcccacactccctgagaaccgcccgatactgggcagcacgaggctacaacgtcttgatgagcagctgcagaggcatgtttggttcggacggcgaattcgagccaggccgttatgaaaaagctgatggcctagcgactgtggaatggatgcgcgaacaggactggtacacaggctcgtttgctacgctagggggctcctatatgggcttcacgcaatgggccttactctcagaccctcctcacgacatgaaaacagccatcattacaactggggtcgacgacatgggtggcgtcgcatggtcttatagcggcaccttgtcagcgttcaccattgcctggacggacatcacagagcgaatcaagcggaaggacaatgttttctctattttgcttcaagtacgctatatgtggactcgcatgcagagtctcttcgattctgtcccgttgtatgacggtattaagaaacacttcaaaggcgatataccaaagttcctggagggcgtactgagcaatccagatcagtcggccgatttttgggccaatatggatcatcgaggagcccttgaccgagcaaatattccaattctgctcaccaccggctgggatgatttccaactggaaacagtaatgaaccagtatgctcacttatccgagcgtggctgcgatgttgctctcaccattggtccattcactcatctgagctgtcaagcggacctacctccttcgttggattggcttgacagacatctcggcactcctagctcgagtgagcaaacgacgcaggattctgcgcaattcgttgtaagagcgtatatcacaggacaagaagaatggagggagtcccctgcatggccacctccaagctccccttccgacctgaatcttcatcatcatgggcgcctatcaacccaacaacattcaggcccgcccgactctgcatcatccagtacctcttggatatttgaccctgctgacccaactccatcgatcggttccccgctcggctttgacaatgggccaggtagggccggtggcgatggcgccttagcgaagcgctctgatgttcttaccttcaccactgaacccctggataaagacatgaccgtctgtggcaagccatacttggagttataccacaccacctccactccttatgcagatctaatgattctgcttagcgatgtgaagcctgatggtttctcgcgcacgaggagtgaagtctttgtgaggcttacagatgaagttcgacaggagtatactcagcgtgacgataaagatggcagctatctgcgcctctccctcagcgattgcggtcaccggtttctcaaaggctacaggatacgtttgagcatcatgggcggcgcacatcctcgctatattcgcaatctggggaccggtgagaatgtggtcaccggggtaaatattcagaaggttgaacatactgtcgatcattcgtcgaccgcggtgtcgaaattggtattgccggtcatagagtag

SEQ ID NO: 17652 - protein, 569 aa, Muscodor strobelii
  misc_feature: SGI Peptide ID NO. 565899
  misc_feature (41)..(305): Pfam Id: PF02129 Pfam Desc: X-Pro dipeptidyl-peptidase (S15 family)
  misc_feature (314)..(564): Pfam Id: PF08530 Pfam Desc: X-Pro dipeptidyl-peptidase C-terminal non-catalytic domain
  misc_feature (41)..(175): Pfam Id: PF02129 Pfam Desc: X-Pro dipeptidyl-peptidase (S15 family)
  misc_feature (258)..(305): Pfam Id: PF02129 Pfam Desc: X-Pro dipeptidyl-peptidase (S15 family)
  misc_feature (314)..(473): Pfam Id: PF08530 Pfam Desc: X-Pro dipeptidyl-peptidase C-terminal non-catalytic domain
  misc_feature (501)..(564): Pfam Id: PF08530 Pfam Desc: X-Pro dipeptidyl-peptidase C-terminal non-catalytic domain
  misc_feature (6)..(568): NCBI GI: 256720802 Blast Desc: NECHADRAFT_85481 [Nectria haematococca mpVI 77-13-4]
  misc_feature (2)..(567): NCBI GI: 280964011 Blast Desc: peptidase S15 [Frankia sp. EuI1c] gi|270731933|gb|EFA60160.1| peptidase S15 [Frankia sp. EuI1c]
  misc_feature (11)..(567): NCBI GI: 118467979 Blast Desc: hydrolase [Mycobacterium smegmatis str. MC2 155] gi|118169266|gb|ABK70162.1| hydrolase [Mycobacterium smegmatis str. MC2 155]
  misc_feature (30)..(553): NCBI GI: 183981923 Blast Desc: hydrolase [Mycobacterium marinum M] gi|183175249|gb|ACC40359.1| hydrolase [Mycobacterium marinum M]
  misc_feature (30)..(553): NCBI GI: 118617690 Blast Desc: hydrolase [Mycobacterium ulcerans Agy99] gi|118569800|gb|ABL04551.1| hydrolase [Mycobacterium ulcerans Agy99]
  misc_feature (6)..(567): NCBI GI: 41409000 Blast Desc: MAP2902 [Mycobacterium avium subsp. paratuberculosis K-10] gi|41397359|gb|AAS05219.1| MAP_2902 [Mycobacterium avium subsp. paratuberculosis K-10]
  misc_feature (6)..(567): NCBI GI: 254776121 Blast Desc: hydrolase CocE/NonD family protein [Mycobacterium avium subsp. avium ATCC 25291]
  misc_feature (6)..(567): NCBI GI: 118462527 Blast Desc: hydrolase CocE/NonD family protein [Mycobacterium avium 104] gi|118163814|gb|ABK64711.1| hydrolase CocE/NonD family protein [Mycobacterium avium 104]
  misc_feature (30)..(567): NCBI GI: 15609937 Blast Desc: hydrolase [Mycobacterium tuberculosis H37Rv] gi|15842338|ref|NP_337375.1| diester hydrolase, [Mycobacterium tuberculosis CDC1551] gi|31793976|ref|NP_856469.1| hydrolase BCG
  misc_feature (30)..(567): NCBI GI: 254365451 Blast Desc: hydrolase [Mycobacterium tuberculosis str. Haarlem] gi|134150964|gb|EBA43009.1| hydrolase [Mycobacterium tuberculosis str. Haarlem]
MTPVPRGLFGRWIDRFFAHLDSLAPERCSYTIEAVRIPVADRINVTADLYRPSGVEQPRGTILVRSPYGYEFPHSLRTARYWAARGYNVLMSSCRGMFGSDGEFEPGRYEKADGLATVEWMREQDWYTGSFATLGGSYMGFTQWALLSDPPHDMKTAIITTGVDDMGGVAWSYSGTLSAFTIAWTDITERIKRKDNVFSILLQVRYMWTRMQSLFDSVPLYDGIKKHFKGDIPKFLEGVLSNPDQSADFWANMDHRGALDRANIPILLTTGWDDFQLETVMNQYAHLSERGCDVALTIGPFTHLSCQADLPPSLDWLDRHLGTPSSSEQTTQDSAQFVVRAYITGQEEWRESPAWPPPSSPSDLNLHHHGRLSTQQHSGPPDSASSSTSWIFDPADPTPSIGSPLGFDNGPGRAGGDGALAKRSDVLTFTTEPLDKDMTVCGKPYLELYHTTSTPYADLMILLSDVKPDGFSRTRSEVFVRLTDEVRQEYTQRDDKDGSYLRLSLSDCGHRFLKGYRIRLSIMGGAHPRYIRNLGTGENVVTGVNIQKVEHTVDHSSTAVSKLVLPVIE

SEQ ID NO: 17653 - DNA, 3119 bp, Muscodor strobelii
  misc_feature: SGI EST ID NO. CUFF.41443.0
  misc_feature: Variant of the nucleotide sequence at SEQ ID NO 17651
ccgaatgttacctagcaatgacacccccatcgagcttatatatggtgtactgcagcaatgcatcttgcgtcgctgtggtaagcccttgaaagtctaagctccggatagttagagtatacatatttcggatagactataacagtaaatgtagatttgacttggtgggatgaattggattcacttcgtagtagtaactacgattaactttgaacccaaacaaaacatccaaaaacgacaagcaatttaatatacaccaagtcacccctcgcgttttgagcaatgatgaccagcactatgcctgattatgttcggttttatattgatgctttatgctaatggaaggagttaaagggtttgggtcccttgaaacgtccctagttcctgtaagccgggcatttggtgatcagtatatatgagcgtgagcggacgatgcagactcggcgacataggtcattggccagaaggacggcgcgtatgcatatgagtcttgttctgctctcggctctcaattgatttctgttgctttctgacgataagctcaacccgctatagataagatccagccggcatcgtctgctcgggtccaggcagtaattgttgttttcccattggtgagccatgggtagattgaggacagaactccgattctgtccaagtgtaaccgattcgaaccgatcatgagtggaatagtctgattactggattataggcagcagctaatgtcttgttacgatggaatagggccagcgggtgcatttatatcaaattcgggtcgccttcgacaccactcaaaagcacaccactacaagaacgagctgatgcaacgtaaaatcgttatatatgtaagatacttaaacagtctgtacgtgagcactggacatatgggctggaggacgggacgcgtcgtgatctgaggcaatcgacacagtcctattcaggtcgcagacatgccaatggctttggttccgtgccacaagtctgctgccaacattcgaggaactcaatgtcagattgaattgcgcgactccaagtcagcacaaggaatgggccacaaggatatgcaccaggcgacggcccctgtacttaccttgctcagcttaagatcaaagctatcggtgtccaaatatcaagacatgaaaactttcatgctcgcgatatccgcaccattattgtattgacactcgaactattctacagggcctcatcaacatgacacctgtaccacgaggcctcttcggccgctggattgatcggttcttcgcccatctcgactcacttgcgcccgagcgttgcagttacacaatagaggctgttcgtattccagtcgcagacaggatcaacgtgaccgcggatctctatcgacctagtggggttgagcagccgcgaggcactattcttgtgcgctcgccatacggatatgaattcccacactccctgagaaccgcccgatactgggcagcacgaggctacaacgtcttgatgagcagctgcagaggcatgtttggttcggacggcgaattcgagccaggccgttatgaaaaagctgatggcctagcgactgtggaatggatgcgcgaacaggactggtacacaggctcgtttgctacgctagggggctcctatatgggcttcacgcaatgggccttactctcagaccctcctcacgacatgaaaacagccatcattacaactggggtcgacgacatgggtggcgtcgcatggtcttatagcggcaccttgtcagcgttcaccattgcctggacggacatcacagagcgaatcaagcggaaggacaatgttttctctattttgcttcaagtacgctatatgtggactcgcatgcagagtctcttcgattctgtcccgttgtatgacggtattaagaaacacttcaaaggcgatataccaaagttcctggagggcgtactgagcaatccagatcagtcggccgatttttgggccaatatggatcatcgaggagcccttgaccgagcaaatattccaattctgctcaccaccggctgggatgatttccaactggaaacagtaatgaaccagtatgctcacttatccgagcgtggctgcgatgttgctctcaccattggtccattcactcatctgagctgtcaagcggacctacctccttcgttggattggcttgacagacatctcggcactcctagctcgagtgagcaaacgacgcaggattctgcgcaattcgttgtaagagcgtatatcacaggacaagaagaatggagggagtcccctgcatggccacctccaagctccccttccgacctgaatcttcatcatcatgggcgcctatcaacccaacaacattcaggcccgcccgactctgcatcatccagtacctcttggatatttgaccctgctgacccaactccatcgatcggttccccgctcggctttgacaatgggccaggtagggccggtggcgatggcgccttagcgaagcgctctgatgttcttaccttcaccactgaacccctggataaagacatgaccgtctgtggcaagccatacttggagttataccacaccacctccactccttatgcagatctaatgattctgcttagcgatgtgaagcctgatggtttctcgcgcacgaggagtgaagtctttgtgaggcttacagatgaagttcgacaggagtatactcagcgtgacgataaagatggcagctatctgcgcctctccctcagcgattgcggtcaccggtttctcaaaggctacaggatacgtttgagcatcatgggcggcgcacatcctcgctatattcgcaatctggggaccggtgagaatgtggtcaccggggtaaatattcagaaggttgaacatactgtcgatcattcgtcgaccgcggtgtcgaaattggtattgccggtcatagagtagcaactcgggttgacctgcttttcctgacagctgcagatgcacaatatgtatacccgtctctgaattcccttcagtcggcgatgaatcccgaatgaaaatataagtactagaatccgcaagattgccaatgtcggatttgcgtaatgcaaggctgcttatacgtcgaacttgtaattaacgcagtgattttaagccttggc

SEQ ID NO: 17654 - DNA, 753 bp, Muscodor strobelii
  misc_feature: SGI cDNA ID NO. 565900
  misc_feature: Encodes the peptide sequence at SEQ ID NO 17655
atggatctgtttggggaagatgcccgtcgagctgctggtcgatatatgatggctgttagcgaaagtgctttccggagctccgtgattagtagcacgggcgataggatccgatcactaaaagaccagctagagcgcgagatcaagaacatctccagccaagtccttgcagtaatgaaggcccagtcagatcacgctgatgcggagaacgaaaagagagcaaagcatgctcgcgtacttcaagctgctcagcagtgtcgcttctacacaaacgaacgctacagactctcatccaacgtcgaagagtgtgatgagattatgacgcagttgactgaagccgatactcgtattaagagcttgttcgattctgagcattctatccgcggtgttaaggctcataatgcttacgatttggctactgacaatgccattaatatggtctcccgcactgatgaaccagtcggccctaaggccgatgaagagagcgactcagacgcgtccgtagaaccagttcgtaaccaatacgaagatatacctaaccctaagaccgcaagaattcgtaaattgaaaaggaaaataaaaataaaaataaacataaaaaacgagagcatagacaaatgggctatcgtcgagggccaaaagttcgatagtcagatcgaacgcggccgcccaaatcggactcgcattagacaagcgaagagacgtgccgctagagccgaagctaaagccgttgctcaagatcatggagataattag

SEQ ID NO: 17655 - protein, 250 aa, Muscodor strobelii
  misc_feature: SGI Peptide ID NO. 565900
MDLFGEDARRAAGRYMMAVSESAFRSSVISSTGDRIRSLKDQLEREIKNISSQVLAVMKAQSDHADAENEKRAKHARVLQAAQQCRFYTNERYRLSSNVEECDEIMTQLTEADTRIKSLFDSEHSIRGVKAHNAYDLATDNAINMVSRTDEPVGPKADEESDSDASVEPVRNQYEDIPNPKTARIRKLKRKIKIKINIKNESIDKWAIVEGQKFDSQIERGRPNRTRIRQAKRRAARAEAKAVAQDHGDN

SEQ ID NO: 17656 - DNA, 525 bp, Muscodor strobelii
  misc_feature: SGI cDNA ID NO. 565901
  misc_feature: Reduced expression when VOC is produced
  misc_feature: Encodes the peptide sequence at SEQ ID NO 17657
atgggagtaacgaaggaggcggcctatgagcaggtcctttcgcaggccgaaggattgttctttgagcagagaaattggttgacaagtaaaagcaatctgtccaatgctgcagcgctactatggcacgcgtacaagtctttgccatatccttgcagtgaggtgaactgggctggtttctacacattcgacgcgaacagcacgagaagagagcagcttattctcggcccattccagggcaaagtggcatgccagacaattgcttttgggagaggcgtttgcggtaccgcggcagcaagtcaaatgacacagctcgttcccgatgttgagaaattccccggccacatcgcctgcgacggcgacagcaagagcgaaatcgtagttccgatcatcatcggcgaaggagagaagcagagggtcgtggctatcatcgacgtcgactgtgcggaactcaatgggttcgatgaggtcgatcagtattatctcgaactgctcgctgacttgattgggaagagctgtgactggtag

SEQ ID NO: 17657 - protein, 174 aa, Muscodor strobelii
  misc_feature: SGI Peptide ID NO. 565901
  misc_feature (2)..(174): NCBI GI: 46137093 Blast Desc: FG10062.1 [Gibberella zeae PH-1]
  misc_feature (3)..(174): NCBI GI: 39972029 Blast Desc: MGG_07330 [Magnaporthe grisea 70-15] gi|145019841|gb|EDK04069.1| MGG_07330 [Magnaporthe grisea 70-15]
  misc_feature (2)..(174): NCBI GI: 256731740 Blast Desc: [Nectria haematococca mpVI 77-13-4]
  misc_feature (2)..(174): NCBI GI: 85103505 Blast Desc: NCU01163 [Neurospora crassa OR74A] gi|18376254|emb|CAD21368.1| conserved [Neurospora crassa] gi|28923076|gb|EAA32293.1| [Neurospora crassa OR74A]
  misc_feature (2)..(174): NCBI GI: 169615224 Blast Desc: SNOG_10768 [Phaeosphaeria nodorum SN15] gi|111061042|gb|EAT82162.1| SNOG_10768 [Phaeosphaeria nodorum SN15]
  misc_feature (27)..(174): NCBI GI: 171691967 Blast Desc: protein product [Podospora anserina] gi|170945932|emb|CAP72733.1| protein product [Podospora anserina]
  misc_feature (2)..(174): NCBI GI: 212527316 Blast Desc: GAF domain nucleotide-binding protein [Penicillium marneffei ATCC 18224] gi|210073213|gb|EEA27300.1| GAF domain nucleotide-binding protein [Penicillium marneffei ATCC 18224]
  misc_feature (4)..(174): NCBI GI: 119497877 Blast Desc: GAF domain nucleotide-binding protein [Neosartorya fischeri NRRL 181] gi|119413860|gb|EAW23799.1| GAF domain nucleotide-binding protein [Neosartorya fischeri NRRL 181]
  misc_feature (4)..(174): NCBI GI: 169777599 Blast Desc: [Aspergillus oryzae RIB40] gi|83772002|dbj|BAE62132.1| protein product [Aspergillus oryzae]
  misc_feature (4)..(174): NCBI GI: 115433324 Blast Desc: ATEG_08178 [Aspergillus terreus NIH2624] gi|114189651|gb|EAU31351.1| ATEG_08178 [Aspergillus terreus NIH2624]
  misc_feature: Useful for introducing or modulating the production of volatile compounds
MGVTKEAAYEQVLSQAEGLFFEQRNWLTSKSNLSNAAALLWHAYKSLPYPCSEVNWAGFYTFDANSTRREQLILGPFQGKVACQTIAFGRGVCGTAAASQMTQLVPDVEKFPGHIACDGDSKSEIVVPIIIGEGEKQRVVAIIDVDCAELNGFDEVDQYYLELLADLIGKSCDW

SEQ ID NO: 17658 - DNA, 855 bp, Muscodor strobelii
  misc_feature: SGI EST ID NO. CUFF.41517.2
  misc_feature: Variant of the nucleotide sequence at SEQ ID NO 17656
ctagagtttcagaaaaattcttatattcaattgaaattcaaccgcgcatcataacaatctcaagagacgttagaaaggacaacgaaagtcggagccttctgtcagcaaattgagcccgcaccgcttgcgtacccggcatatcaaaatttttcaacatggttcacgcggacgcgtcgaattttgccatgggagtaacgaaggaggcggcctatgagcaggtcctttcgcaggccgaaggattgttctttgagcagagaaattggcaatctgtccaatgctgcagcgctactatggcacgcgtacaagtctttgccatatccttgcagtgaggtgaactgggctggtttctacacattcgacgcgaacagcacgagaagagagcagcttattctcggcccattccagggcaaagtggcatgccagacaattgcttttgggagaggcgtttgcggtaccgcggcagcaagtcaaatgacacagctcgttcccgatgttgagaaattccccggccacatcgcctgcgacggcgacagcaagagcgaaatcgtagttccgatcatcatcggcgaaggagagaagcagagggtcgtggctatcatcgacgtcgactgtgcggaactcaatgggttcgatgaggtcgatcagtattatctcgaactgctcgctgacttgattgggaagagctgtgactggtagcgaatcattttgcgactgagaattagtgcagggcacgtcatctcagctattgggcgactggagatgttagggaattggaaaatcggagttcaggactgagttcaacatgatacccatatgtaaaatctagacatagaatcctcgatacttcaattcaac

SEQ ID NO: 17659 - DNA, 942 bp, Muscodor strobelii
  misc_feature: SGI cDNA ID NO. 565902
  misc_feature: Reduced expression when VOC is produced
  misc_feature: Encodes the peptide sequence at SEQ ID NO 17660
atggcatcatccaccccaccatccaaggtgctgcagaagcccctcaagctgtcgtgtatccagcttgccagtggcgccgacaaagccgccaacctcgcacacgcccgcgacaaggtcctcgaggccgcaaaggccggcgccaacctcgttgtgttgccagaatgttttaattcaccctatggatgcgactacttcccctcctacgccgagactctccttccgtccccgccgtcagccgaacaatcgccctcttacaatgcgctctcggctatggccgccgaggccaaggtcttcttagtcggtggctcgattcccgagtctgaaccaagctctgagacgaagagcggcaagaaatattataacacatctctgacctttggccccgatggcgctttgctcgcgagccatcgcaagacacatctcttcgatatcgatatacccggcaagatcacattccgcgagagtgatgttttgtcgccggggaacaaggtgacgctcgttgacctgcctgggtatggtcgcattggtattgctatctgctacgatgtgcggttcccagagctggccacgattgctgcgcggcacggctgcttcgcgctcatttacccaggcgcattcaacacgacaaccgggccgctgcattggagattgcagggccaagctcgcgccatggataaccagatatatgtcgctctttgcagccccgcacgtgatatgagcgcgtcatatcacgcctggggccacagtttgatcgtggatcccatggcctctgtcgttgtcgaggccgaggaaaaggagacgatcgtgagctgggaattagatggcgcgaagattgaggagacgaggaagaatattccgatttatacccagaggcggtttgatgtgtatcctgatgttagtaggggaaagatctcatttgacgagcctaacatccccaagtaa

SEQ ID NO: 17660 - protein, 313 aa, Muscodor strobelii
  misc_feature: SGI Peptide ID NO. 565902
  misc_feature (16)..(205): Pfam Id: PF00795 Pfam Desc: Carbon-nitrogen hydrolase
  misc_feature (1)..(306): NCBI GI: 85100115 Blast Desc: NCU06726 [Neurospora crassa OR74A] gi|28922437|gb|EAA31670.1| NCU06726 [Neurospora crassa OR74A] gi|28950282|emb|CAD71250.1| nitrilase (NIT3) [Neurospora crassa]
  misc_feature (8)..(308): NCBI GI: 156044356 Blast Desc: SS1G_10281 [Sclerotinia sclerotiorum 1980] gi|154694670|gb|EDN94408.1| SS1G_10281 [Sclerotinia sclerotiorum 1980]
  misc_feature (8)..(311): NCBI GI: 154304793 Blast Desc: BC1G_08982 [Botryotinia fuckeliana B05.10] gi|150853844|gb|EDN29036.1| BC1G_08982 [Botryotinia fuckeliana B05.10]
  misc_feature (10)..(308): NCBI GI: 238840704 Blast Desc: amidohydrolase [Microsporum canis CBS 113480]
  misc_feature (8)..(312): NCBI GI: 261351993 Blast Desc: hydrolase [Verticillium albo-atrum VaMs.102]
  misc_feature (10)..(303): NCBI GI: 169770319 Blast Desc: [Aspergillus oryzae RIB40] gi|238487284|ref|XP_002374880.1| nitrilase family protein (Nit3), [Aspergillus flavus NRRL3357] gi|83767488|dbj|BAE57627.1| protein
  misc_feature (10)..(303): NCBI GI: 70992703 Blast Desc: nitrilase family protein (Nit3) [Aspergillus fumigatus Af293] gi|66848833|gb|EAL89162.1| nitrilase family protein (Nit3), [Aspergillus fumigatus Af293] gi|159130345|gb|EDP55458.1|
  misc_feature (8)..(304): NCBI GI: 242789544 Blast Desc: nitrilase family protein (Nit3), [Talaromyces stipitatus ATCC 10500] gi|218717969|gb|EED17389.1| nitrilase family protein (Nit3), [Talaromyces stipitatus ATCC 10500]
  misc_feature (10)..(303): NCBI GI: 119472986 Blast Desc: nitrilase family protein (Nit3), [Neosartorya fischeri NRRL 181] gi|119406614|gb|EAW16565.1| nitrilase family protein (Nit3), [Neosartorya fischeri NRRL 181]
  misc_feature (10)..(303): NCBI GI: 121700222 Blast Desc: nitrilase family protein (Nit3), [Aspergillus clavatus NRRL 1] gi|119396518|gb|EAW06950.1| nitrilase family protein (Nit3), [Aspergillus clavatus NRRL 1]
  misc_feature (15)..(296): SWISSPROT Homolog: EC 3.5.1.3 Omega-amidase
  misc_feature: Useful for introducing or modulating the production of volatile compounds
MASSTPPSKVLQKPLKLSCIQLASGADKAANLAHARDKVLEAAKAGANLVVLPECFNSPYGCDYFPSYAETLLPSPPSAEQSPSYNALSAMAAEAKVFLVGGSIPESEPSSETKSGKKYYNTSLTFGPDGALLASHRKTHLFDIDIPGKITFRESDVLSPGNKVTLVDLPGYGRIGIAICYDVRFPELATIAARHGCFALIYPGAFNTTTGPLHWRLQGQARAMDNQIYVALCSPARDMSASYHAWGHSLIVDPMASVVVEAEEKETIVSWELDGAKIEETRKNIPIYTQRRFDVYPDVSRGKISFDEPNIPK

SEQ ID NO: 17661 - DNA, 1423 bp, Muscodor strobelii
  misc_feature: SGI EST ID NO. CUFF.41475.0
  misc_feature: Variant of the nucleotide sequence at SEQ ID NO 17659
ctggaagcttgtgggcaattggcgattagcaatagtagcattaatacctacctacacgtgctgcctcggacgcgatgctaccatgacacgtctatttaagactttgagtctggtttcaaagtctctgtcacccaacgcccgtctgaaccccatcttctccgtcccgacgttcgcgcgcacaatggcatcatccaccccaccatccaaggtgctgcagaagcccctcaagctgtcgtgtatccagcttgccagtggcgccgacaaagccgccaacctcgcacacgcccgcgacaaggtcctcgaggccgcaaaggccggcgccaacctcgttgtgttgccagaatgttttaattcaccctatggatgcgactacttcccctcctacgccgagactctccttccgtccccgccgtcagccgaacaatcgccctcttacaatgcgctctcggctatggccgccgaggccaaggtcttcttagtcggtggctcgattcccgagtctgaaccaagctctgagacgaagagcggcaagaaatattataacacatctctgacctttggccccgatggcgctttgctcgcgagccatcgcaagacacatctcttcgatatcgatatacccggcaagatcacattccgcgagagtgatgttttgtcgccggggaacaaggtgacgctcgttgacctgcctgggtatggtcgcattggtattgctatctgctacgatgtgcggttcccagagctggccacgattgctgcgcggcacggctgcttcgcgctcatttacccaggcgcattcaacacgacaaccgggccgctgcattggagattgcagggccaagctcgcgccatggataaccagatatatgtcgctctttgcagccccgcacgtgatatgagcgcgtcatatcacgcctggggccacagtttgatcgtggatcccatggcctctgtcgttgtcgaggccgaggaaaaggagacgatcgtgagctgggaattagatggcgcgaagattgaggagacgaggaagaatattccgatttatacccagaggcggtttgatgtgtatcctgatgttagtaggggaaagatctcatttgacgagcctaacatccccaagtaaaaagaaaacctgagaactgagtacattcaatactaattatcatgaattatgtgttggggctttgatgctatcactgccagcgaatctggatttattgtaaccaagtttatctctgcctgaagaaccacaataaggggacgtgtacgataggtgatcgcacatcatcgagtagtgttagtcccgtctgaagggaggtgccccgtggtcttacgtgtatgtcctactacttgattacgataaagatcagatgggagatggaagatgctacaccagcagacactagtaatcacattaaacgag

SEQ ID NO: 17662 - DNA, 693 bp, Muscodor strobelii
  misc_feature: SGI cDNA ID NO. 565903
  misc_feature: Encodes the peptide sequence at SEQ ID NO 17663
atggacatcgatttaccgagacatatgcaaaaggaaaggagcgttagcaatcaatacgaccagggcaatctcgacgaggaaagttattatatgccaccagaacttgcgtacgcatgccagcattgggtgcaccatcttagaaattctggtgacatactacttgctaagagcgaagttatcgatttcttcaagagacattggcttcgttggctgggagcaatgttcctgatgggcaagcaacacgatagcgaaagtgctcttgcttatcagctaggacagtctcacgctgatgataatttgtcgacactgttcactgtaatcatcaagttcattgagttttccgaaagaccgcgaatgataatccccgacgaagtgtacagtcgtgcactcctttatattcgggctgcggacatgatgggaatagcctcgacggacgaactgatgcgtaacatgttatccaatccgaaagtcaaaatgtactggcacggtagaaaaacagctgataccataggaacggcatcggaaagtgtccaagactatggtgcgaatgaagacccggctatcccgtacattgtgactgatgggtcttatgagcttgcctcgatagctacctacgatccagtgctggagcgtgttgctgttctcaggggacagcacgatattggcctctactggtcaaagcagagtcattag

SEQ ID NO: 17663 - protein, 230 aa, Muscodor strobelii
  misc_feature: SGI Peptide ID NO. 565903
  misc_feature (8)..(161): NCBI GI: 159124379 Blast Desc: NACHT and WD domain protein [Aspergillus fumigatus A1163]
  misc_feature (29)..(161): NCBI GI: 145241345 Blast Desc: An08g12200 [Aspergillus niger] gi|134077854|emb|CAK40095.1| protein product [Aspergillus niger]
  misc_feature (9)..(178): NCBI GI: 171676738 Blast Desc: protein product [Podospora anserina] gi|170936436|emb|CAP61093.1| protein product [Podospora anserina]
  misc_feature (29)..(220): NCBI GI: 159124395 Blast Desc: wd-repeat protein [Aspergillus fumigatus A1163]
  misc_feature (9)..(178): NCBI GI: 154936828 Blast Desc: NWD2 [Podospora anserina]
  misc_feature (12)..(132): NCBI GI: 242817200 Blast Desc: wd40 protein, [Talaromyces stipitatus ATCC 10500] gi|218713370|gb|EED12794.1| wd40 protein, [Talaromyces stipitatus ATCC 10500]
  misc_feature (30)..(161): NCBI GI: 67903036 Blast Desc: AN8505.2 [Aspergillus nidulans FGSC A4] gi|40747693|gb|EAA66849.1| AN8505.2 [Aspergillus nidulans FGSC A4]
  misc_feature (13)..(220): NCBI GI: 212534082 Blast Desc: Pfs, NACHT and WD domain protein [Penicillium marneffei ATCC 18224] gi|210069596|gb|EEA23686.1| Pfs, NACHT and WD domain protein [Penicillium marneffei ATCC 18224]
  misc_feature (30)..(207): NCBI GI: 145244907 Blast Desc: An11g07530 [Aspergillus niger] gi|134079415|emb|CAK40796.1| protein product [Aspergillus niger]
  misc_feature (30)..(83): NCBI GI: 154310178 Blast Desc: BC1G_07009 [Botryotinia fuckeliana B05.10] gi|150851570|gb|EDN26763.1| BC1G_07009 [Botryotinia fuckeliana B05.10]
MDIDLPRHMQKERSVSNQYDQGNLDEESYYMPPELAYACQHWVHHLRNSGDILLAKSEVIDFFKRHWLRWLGAMFLMGKQHDSESALAYQLGQSHADDNLSTLFTVIIKFIEFSERPRMIIPDEVYSRALLYIRAADMMGIASTDELMRNMLSNPKVKMYWHGRKTADTIGTASESVQDYGANEDPAIPYIVTDGSYELASIATYDPVLERVAVLRGQHDIGLYWSKQSH

SEQ ID NO: 17664 - DNA, 591 bp, Muscodor strobelii
  misc_feature: SGI cDNA ID NO. 565904
  misc_feature: Encodes the peptide sequence at SEQ ID NO 17665
atgaacgtttactggcttaacggaatggccggtacgggaaagaccacgatcgctcatacagtagccgagatggctgctaagagcgaccatctcgcggccagcttcttcttcaagaggggagagaaggatcgtagcgatacctcaaaatttatctccacgatctcagctcatcttgtaaggaaatattacccatcatttgcatttgagctcagatcaagactagaggtacagagtgacatatgcgacaaaggattggatgtgcagtttgaggcactcatacgagaaccactggctgctgtcattcggccggaaagtggtcctgtcctgattgtcgtggatgctctggacgaatgtgacgtggaaaatgatgttgaaaaaattattgagctatttgcgaaaaagacacctattcctgctctccgaatcttcacaacaagccgccccgaattgcccgtaagactaggcttttccgccattgacggctgttacgagcacataatacttcacgacttacctgagcatattgtccgtcaagacctatttgagtacttcaggcctctccaggagagagagagctacgacactgcgtga

SEQ ID NO: 17665 - protein, 196 aa, Muscodor strobelii
  misc_feature: SGI Peptide ID NO. 565904
  misc_feature (2)..(194): NCBI GI: 46130696 Blast Desc: FG08952.1 [Gibberella zeae PH-1]
  misc_feature (2)..(184): NCBI GI: 116182430 Blast Desc: CHGG_01843 [Chaetomium globosum CBS 148.51] gi|88186140|gb|EAQ93608.1| CHGG_01843 [Chaetomium globosum CBS 148.51]
  misc_feature (2)..(184): NCBI GI: 116191741 Blast Desc: CHGG_05588 [Chaetomium globosum CBS 148.51] gi|88181501|gb|EAQ88969.1| CHGG_05588 [Chaetomium globosum CBS 148.51]
  misc_feature (3)..(184): NCBI GI: 154310178 Blast Desc: BC1G_07009 [Botryotinia fuckeliana B05.10] gi|150851570|gb|EDN26763.1| BC1G_07009 [Botryotinia fuckeliana B05.10]
  misc_feature (2)..(184): NCBI GI: 116182592 Blast Desc: CHGG_01924 [Chaetomium globosum CBS 148.51] gi|88186221|gb|EAQ93689.1| CHGG_01924 [Chaetomium globosum CBS 148.51]
  misc_feature (3)..(185): NCBI GI: 154936828 Blast Desc: NWD2 [Podospora anserina]
  misc_feature (2)..(185): NCBI GI: 171676738 Blast Desc: protein product [Podospora anserina] gi|170936436|emb|CAP61093.1| protein product [Podospora anserina]
  misc_feature (3)..(184): NCBI GI: 46138235 Blast Desc: FG10632.1 [Gibberella zeae PH-1]
  misc_feature (2)..(196): NCBI GI: 256723335 Blast Desc: NECHADRAFT_51778 [Nectria haematococca mpVI 77-13-4]
  misc_feature (2)..(184): NCBI GI: 256729581 Blast Desc: NECHADRAFT_83562 [Nectria haematococca mpVI 77-13-4]
MNVYWLNGMAGTGKTTIAHTVAEMAAKSDHLAASFFFKRGEKDRSDTSKFISTISAHLVRKYYPSFAFELRSRLEVQSDICDKGLDVQFEALIREPLAAVIRPESGPVLIVVDALDECDVENDVEKIIELFAKKTPIPALRIFTTSRPELPVRLGFSAIDGCYEHIILHDLPEHIVRQDLFEYFRPLQERESYDTA

SEQ ID NO: 17666 - DNA, 975 bp, Muscodor strobelii
  misc_feature: SGI cDNA ID NO. 565905
  misc_feature: Encodes the peptide sequence at SEQ ID NO 17667
atgaaggtaactcatcttttgcatatcttgcctatctacacccgtggggcagcagccgaatgccctagccaagaggtcaatggctacgcgacagtaggcattggcacgactggtggtgggaatatacctcccgttacggtgactactgcagctcagttagtcacagcggcgaagggcagcggtgctgccgttatcgtcgtccaaggaaccatcaataccggctcggccgcggtgacaataaccagcaacaagaccattaggggcacagatgctagtgccacgatagtcggaggccttgacatgagaaatgtcagcaacattatcatccagaatctcaacgttcaagccggcggtgtagtggacacaattgcctctcgaaacactaccaatgtttggtacgatcatctcaacatttgggacgccagtgacggtctgcttgacatcacgattgaatctgatttgcaaacggtatcgtggtgcaagttttggtatacaaacagctcgagagatcaccgtctcgcgagtctggtcggctctggcggcggtgaccaccctggtgacgagggcaagctccgcgtcacataccatcacaactggtgggcacagaatatagaccaacgcatgccgcgcgtcatgtacggcgatgcacatatttacaacaacttcttcaactctgagggcaacacaaattgcatcggtttcgggtcatacgcctctgtgcgcctcgattgcaactacttcttgaatgtgaagaatccacattacttccagtacgatgtgtatgcgtaccttggagctgcgaataatgtctataacgggactataggcacgaaggaccaaggcgtcaaaggaagtcgagacgtcgccgggcaggagggtttcagctatgctccggttgtgccgccctactcatggaccgagaacagcgccagtgctatccctgatctcgttacgcaatgtgcagggcctcgttga

SEQ ID NO: 17667 - protein, 324 aa, Muscodor strobelii
  misc_feature: SGI Peptide ID NO. 565905
  misc_feature (62)..(247): Pfam Id: PF00544 Pfam Desc: Pectate lyase
  misc_feature (22)..(322): NCBI GI: 261406881 Blast Desc: Pectate lyase/Amb allergen [Geobacillus sp. Y412MC10] gi|261283344|gb|ACX65315.1| Pectate lyase/Amb allergen [Geobacillus sp. Y412MC10]
  misc_feature (9)..(322): NCBI GI: 256005273 Blast Desc: Pectate lyase/Amb allergen [Clostridium thermocellum DSM 2360] gi|255990709|gb|EEU00825.1| Pectate lyase/Amb allergen [Clostridium thermocellum DSM 2360]
  misc_feature (9)..(322): NCBI GI: 125975431 Blast Desc: Pectate lyase/Amb allergen [Clostridium thermocellum ATCC 27405] gi|281419392|ref|ZP_06250407.1| Pectate lyase/Amb allergen [Clostridium thermocellum JW20] Pectate lyase/Amb ATCC
  misc_feature (6)..(321): NCBI GI: 110637570 Blast Desc: pectate lyase [Cytophaga hutchinsonii ATCC 33406] gi|110280251|gb|ABG58437.1| CHU large protein; candidate pectate lyase, polysaccharide lyase family 1 protein [Cytophaga ATCC
  misc_feature (18)..(322): NCBI GI: 256375982 Blast Desc: Pectate lyase/Amb allergen [Actinosynnema mirum DSM 43827] gi|255920285|gb|ACU35796.1| Pectate lyase/Amb allergen [Actinosynnema mirum DSM 43827]
  misc_feature (25)..(322): NCBI GI: 146300321 Blast Desc: Pectate lyase/Amb allergen [Flavobacterium johnsoniae UW101] gi|146154739|gb|ABQ05593.1| Candidate pectin or pectate lyase; Polysaccharide lyase family 1 [Flavobacterium johnsoniae
  misc_feature (52)..(276): NCBI GI: 159899978 Blast Desc: cellulose-binding family II protein [Herpetosiphon aurantiacus ATCC 23779] gi|159893017|gb|ABX06097.1| cellulose-binding family II [Herpetosiphon aurantiacus ATCC
  misc_feature (44)..(322): NCBI GI: 2196707 Blast Desc: pectate lyase [Pseudonocardia sp.]
  misc_feature (2)..(255): NCBI GI: 261416949 Blast Desc: Pectate lyase/Amb allergen [Fibrobacter succinogenes subsp. succinogenes S85] gi|261373405|gb|ACX76150.1| Pectate lyase/Amb allergen [Fibrobacter succinogenes subsp. succinogenes
  misc_feature (18)..(252): NCBI GI: 261414587 Blast Desc: Pectate lyase/Amb allergen [Fibrobacter succinogenes subsp. succinogenes S85] gi|261371043|gb|ACX73788.1| Pectate lyase/Amb allergen [Fibrobacter succinogenes subsp. succinogenes
  misc_feature (58)..(275): SWISSPROT Homolog: EC 4.2.2.2 Pectate lyase
MKVTHLLHILPIYTRGAAAECPSQEVNGYATVGIGTTGGGNIPPVTVTTAAQLVTAAKGSGAAVIVVQGTINTGSAAVTITSNKTIRGTDASATIVGGLDMRNVSNIIIQNLNVQAGGVVDTIASRNTTNVWYDHLNIWDASDGLLDITIESDLQTVSWCKFWYTNSSRDHRLASLVGSGGGDHPGDEGKLRVTYHHNWWAQNIDQRMPRVMYGDAHIYNNFFNSEGNTNCIGFGSYASVRLDCNYFLNVKNPHYFQYDVYAYLGAANNVYNGTIGTKDQGVKGSRDVAGQEGFSYAPVVPPYSWTENSASAIPDLVTQCAGPR

SEQ ID NO: 17668 - DNA, 979 bp, Muscodor strobelii
  misc_feature: SGI EST ID NO. CUFF.41490.0
  misc_feature: Variant of the nucleotide sequence at SEQ ID NO 17666
ccagcaacaagaccattaggggcacagatgctagtgccacgatagtcggaggccttgacatgagaaatgtcagcaacattatcatccagaatctcaacgttcaagccggcggtgtagtggacacaattgcctctcgaaacactaccaatgtttggtacgatcatctcaacatttgggacgccagtgacggtctgcttgacatcacgattgaatctgatttgcaaacggtatcgtggtgcaagttttggtatacaaacagctcgagagatcaccgtctcgcgagtctggtcggctctggcggcggtgaccaccctggtgacgagggcaagctccgcgtcacataccatcacaactggtgggcacagaatatagaccaacgcatgccgcgcgtcatgtacggcgatgcacatatttacaacaacttcttcaactctgagggcaacacaaattgcatcggtttcgggtcatacgcctctgtgcgcctcgattgcaactacttcttgaatgtgaagaatccacattacttccagtacgatgtgtatgcgtaccttggagctgcgaataatgtctataacgggactataggcacgaaggaccaaggcgtcaaaggaagtcgagacgtcgccgggcaggagggtttcagctatgctccggttgtgccgccctactcatggaccgagaacagcgccagtgctatccctgatctcgttacgcaatgtgcagggcctcgttgagtctgttgcggtctttatatcggtgtaatatataaccggtgccaaacaatccagtcaggatttattgatgaaactgggttacgaattgtagcggttggtaaatatgatagctcactataaactcggccctttcagaaattgctcctagttcccaaacaattacgactgcaccgttcggtaaggcgcttgggtttcgtgcagcccatcacatcaggatcctcaataggcgatttaattggaagaac

SEQ ID NO: 17669 - DNA, 639 bp, Muscodor strobelii
  misc_feature: SGI cDNA ID NO. 565906
  misc_feature: Encodes the peptide sequence at SEQ ID NO 17670
atgaccaacagcgagttttccgcatggttccctggtcagggtagcaatggtcgcggcctgcagccatcttcaactcgtcttcgccaggacctcgagggtgctcgcaatcagcagtccagcaatctctcctatcagcagctcaccgcagccacaacagctgttccacagcagatggccagagctcccaatcaaccatctgttttcaagaccaatctgccggctgcagaccacgtatctcgcttcggggatggcccgctctcatccagaagcactggtgccgttcaacagcacgatcgtcatcacctgactggacatactgattcaaagagacaccaacaagataataagtctcgtgatgatcggcctaagaaagttgcgaactcattcattcgtttccgaagttctcagggccgaattatgcatgctaacaatccagccatgtctatgtgcgagatatccgttgcatgtgcataccagtggaagaatatgaccgacaaggaaaaagaaccttatcagcaggagtatgaagaagcacagagagaagagtacgcacgcttcgcggccgaaatgggtcgccggatcgctgaacatgtcggcgatgatatgcctaatctcgacggacaggaggctcgtaattaa

SEQ ID NO: 17670 - protein, 212 aa, Muscodor strobelii
  misc_feature: SGI Peptide ID NO. 565906
  misc_feature (122)..(187): Pfam Id: PF00505 Pfam Desc: HMG (high mobility group) box
  misc_feature (122)..(181): Pfam Id: PF00505 Pfam Desc: HMG (high mobility group) box
  misc_feature (120)..(186): NCBI GI: 47681283 Blast Desc: SRY [Homo sapiens]
  misc_feature (66)..(186): NCBI GI: 22034488 Blast Desc: SRY [Chlorocebus aethiops] gi|22034490|gb|AAL09286.1| SRY [Chlorocebus aethiops] gi|42540534|gb|AAS19183.1| sex-determining region protein [Chlorocebus aethiops] region
  misc_feature (66)..(186): NCBI GI: 56713318 Blast Desc: sex-determining protein SRY [Chlorocebus pygerythrus cynosurus]
  misc_feature (120)..(186): NCBI GI: 62719824 Blast Desc: SRY protein [Homo sapiens]
  misc_feature (117)..(186): NCBI GI: 6094355 Blast Desc: SRY_PONPY RecName: Full=Sex-determining region Y protein; AltName: Full=Testis-determining factor gi|785025|emb|CAA60143.1| SRY [Pongo pygmaeus]
  misc_feature (120)..(191): NCBI GI: 112491006 Blast Desc: SRY_PONPY RecName: Full=Sex-determining region Y protein; AltName: Full=Testis-determining factor gi|785025|emb|CAA60143.1| SRY [Pongo pygmaeus]
  misc_feature (120)..(186): NCBI GI: 998571 Blast Desc: sex-determining gene SRY product {HMG domain} [human, gonadal dysgenesis XY female M.B., Peptide Partial Mutant, 80 aa]
  misc_feature (117)..(186): NCBI GI: 1351116 Blast Desc: SRY_GORGO RecName: Full=Sex-determining region Y protein; AltName: Full=Testis-determining factor gi|784985|emb|CAA60142.1| SRY [Gorilla gorilla]
  misc_feature (120)..(186): NCBI GI: 15988039 Blast Desc: SRY_GORGO RecName: Full=Sex-determining region Y protein; AltName: Full=Testis-determining factor gi|784985|emb|CAA60142.1| SRY [Gorilla gorilla]
  misc_feature (120)..(186): NCBI GI: 157310126 Blast Desc: sex determining region Y [Homo sapiens]
MTNSEFSAWFPGQGSNGRGLQPSSTRLRQDLEGARNQQSSNLSYQQLTAATTAVPQQMARAPNQPSVFKTNLPAADHVSRFGDGPLSSRSTGAVQQHDRHHLTGHTDSKRHQQDNKSRDDRPKKVANSFIRFRSSQGRIMHANNPAMSMCEISVACAYQWKNMTDKEKEPYQQEYEEAQREEYARFAAEMGRRIAEHVGDDMPNLDGQEARN

SEQ ID NO: 17671 - DNA, 1293 bp, Muscodor strobelii
  misc_feature: SGI cDNA ID NO. 565907
  misc_feature: Encodes the peptide sequence at SEQ ID NO 17672
atggcaaatgacggtcgatggactgggtggcatgcccctccgcagcacgcagtgtcccctacggaggagctgccaattgcttccagcaatgagcatgacaatgccgaaactatgcaccaggtggcttgccatattcaacagctcatttatcccccggttccgcagcaatccgcctatcccaatcctcagcagacgaacgtttccaatctcaaccagcagcaaatgaacatggacacccccagccagcagataaatgtgctcaacctcgctcagcaacagatcatgcctccgggttttcagcagatatgtcttccgaaccagtcaatcacaggacatggtgcagagctcgtcattggtgtgcccccaaattgcaatactggcactactggcactactcagagtcctactctcacgccccatgaaatcggcgtacagaggctgctacaaaggcttccagaaggatacgactttgaaaatagtcagtctagtagaatgaagctgattccggatccttgggtgcagttccgcgttgtccacaacgaagcgattcttgaagcctgcccagggattcctaatgtcgagatatcatatcttctcgccgaacaatggcagatgatgagcaccgagcagaagaagccctactacgagttgtgcagactggctctcatgaaagcagcgagtgtacagctagccacgatcgaacgcgcccgtgtatcgcgattcccaccctgtgcgccgccggtgccctttgagtcggcgcaagaaccggccaagaaccctcgtggcgactcgcactccatagcacccgatcgaggtccccaagaaatgcccaactcccatcgccagtctgtcttgaatcaagcgattaggtcgggcatgcccagcccaggtcgtagtccaacctccagaatgacaatgacctcgcgccatcctcatccacacgactcccatcacccaccatacctacgctctcctgtaggttcctcgacatcgctgagtgaaacgcagaggcggctcttgactacgcttcgcgctgcggatgcatcaattcctcgtcagcaaaccaccagcgccagactccctgatcccaatcttggcgctctgacgagtcctgccgcttctcgtttcgatcagagcaaggacccatatatcgcttcatatatcttcggagcagaccctgcgatcagctttaccgaccatgacaatatcatttctcggttgccgcccgtagtcatgaacgctgttcactatctctcgtctcgcacagatatacaagaacgagcataccactag

SEQ ID NO: 17672 - protein, 430 aa, Muscodor strobelii
  misc_feature: SGI Peptide ID NO. 565907
  misc_feature (181)..(217): Pfam Id: PF00505 Pfam Desc: HMG (high mobility group) box
MANDGRWTGWHAPPQHAVSPTEELPIASSNEHDNAETMHQVACHIQQLIYPPVPQQSAYPNPQQTNVSNLNQQQMNMDTPSQQINVLNLAQQQIMPPGFQQICLPNQSITGHGAELVIGVPPNCNTGTTGTTQSPTLTPHEIGVQRLLQRLPEGYDFENSQSSRMKLIPDPWVQFRVVHNEAILEACPGIPNVEISYLLAEQWQMMSTEQKKPYYELCRLALMKAASVQLATIERARVSRFPPCAPPVPFESAQEPAKNPRGDSHSIAPDRGPQEMPNSHRQSVLNQAIRSGMPSPGRSPTSRMTMTSRHPHPHDSHHPPYLRSPVGSSTSLSETQRRLLTTLRAADASIPRQQTTSARLPDPNLGALTSPAASRFDQSKDPYIASYIFGADPAISFTDHDNIISRLPPVVMNAVHYLSSRTDIQERAYH

SEQ ID NO: 17673 - DNA, 813 bp, Muscodor strobelii
  misc_feature: SGI cDNA ID NO. 565908
  misc_feature: Encodes the peptide sequence at SEQ ID NO 17674
atggctgtcaacgacgtctcacttgagggcaaagttgccttggtgacaggttctggacgagagacaggcatcggagcagcgattgcgaaggccttagctcgaaacggcgcatcggttgcaatccattacgtctcggagagctcgaagccgcgtgcagagaacgttgcgaagaacatcgcacaagagacaggatcgaagacagctgtcgttcatggggctgtagagaagcccgacgttgctgaaagaatcatcaaagacacccttaaggcctttggcgctgatcatattgatattcttgtcaataacgccgcagtcatcactttcaatgacctcatggatgcaacagaggcgcaactcaacgaagagttcagcatcaatgtctttagttctgtatatttgacacagtcggtagtcaaagtgggcaggatgcccccgggcggacggattatcaacatcggcagcattggttccaaacttgggccaccgttcggtgcagtatactctgcaagtaaagctgcacaagacagcttgacggcatcttttgccactgtgcttggccatagtcatggcattacggtgaacacaattgcatcgggagctgtgattacggacatgtccaaggcaacacatgaagatccggcattcgctgaaagtcacgcgccagaagttatcattaagcaaacgcgagcagctccgcgcatgggaattcctgaagacattgccgatgccgtccttctgatagcgtccgaaaagagtcgctggatcacggcgcaatggatctctgtgtccgggggtataactggcactatgtag

SEQ ID NO: 17674 - protein, 270 aa, Muscodor strobelii
  misc_feature: SGI Peptide ID NO. 565908
  misc_feature (11)..(186): Pfam Id: PF00106 Pfam Desc: short chain dehydrogenase
  misc_feature (12)..(199): Pfam Id: PF08659 Pfam Desc: KR domain
  misc_feature (1)..(270): NCBI GI: 242797971 Blast Desc: short-chain dehydrogenase, [Talaromyces stipitatus ATCC 10500] gi|218716417|gb|EED15838.1| short-chain dehydrogenase, [Talaromyces stipitatus ATCC 10500]
  misc_feature (1)..(268): NCBI GI: 46126481 Blast Desc: FG07618.1 [Gibberella zeae PH-1]
  misc_feature (1)..(267): NCBI GI: 256721788 Blast Desc: NECHADRAFT_53235 [Nectria haematococca mpVI 77-13-4]
  misc_feature (3)..(267): NCBI GI: 46139135 Blast Desc: FG11082.1 [Gibberella zeae PH-1]
  misc_feature (1)..(267): NCBI GI: 242816001 Blast Desc: short-chain dehydrogenase, [Talaromyces stipitatus ATCC 10500] gi|218715021|gb|EED14444.1| short-chain dehydrogenase, [Talaromyces stipitatus ATCC 10500]
  misc_feature (3)..(268): NCBI GI: 212539528 Blast Desc: short chain type dehydrogenase, [Penicillium marneffei ATCC 18224] gi|210067218|gb|EEA21310.1| short chain type dehydrogenase, [Penicillium marneffei ATCC 18224]
  misc_feature (4)..(266): NCBI GI: 145236743 Blast Desc: An06g01980 [Aspergillus niger] gi|134075480|emb|CAK48041.1| protein product [Aspergillus niger]
  misc_feature (1)..(267): NCBI GI: 116195434 Blast Desc: CHGG_04315 [Chaetomium globosum CBS 148.51] gi|88180228|gb|EAQ87696.1| CHGG_04315 [Chaetomium globosum CBS 148.51]
  misc_feature (3)..(268): NCBI GI: 242804291 Blast Desc: short-chain dehydrogenase, [Talaromyces stipitatus ATCC 10500] gi|218717690|gb|EED17111.1| short-chain dehydrogenase, [Talaromyces stipitatus ATCC 10500]
  misc_feature (6)..(266): NCBI GI: 256721007 Blast Desc: NECHADRAFT_52820 [Nectria haematococca mpVI 77-13-4]
  misc_feature (11)..(266): SWISSPROT Homolog: EC 1.1.1.100 3-oxoacyl-[acyl-carrier-protein] reductase
MAVNDVSLEGKVALVTGSGRETGIGAAIAKALARNGASVAIHYVSESSKPRAENVAKNIAQETGSKTAVVHGAVEKPDVAERIIKDTLKAFGADHIDILVNNAAVITFNDLMDATEAQLNEEFSINVFSSVYLTQSVVKVGRMPPGGRIINIGSIGSKLGPPFGAVYSASKAAQDSLTASFATVLGHSHGITVNTIASGAVITDMSKATHEDPAFAESHAPEVIIKQTRAAPRMGIPEDIADAVLLIASEKSRWITAQWISVSGGITGTM

SEQ ID NO: 17675 - DNA, 290 bp, Muscodor strobelii
  misc_feature: SGI EST ID NO. CUFF.41512.0
  misc_feature: Variant of the nucleotide sequence at SEQ ID NO 17673
tctggacgagagacaggcatcggagcagcgattgcgaaggccttagctcgaaacggcgcatcggttgcaatccattacgtctcggagagctcgaagccgcgtgcagagaacgttgcgaagaacatcgcacaagagacaggatcgaagacagctgtcgttcatggggctgtagagaagcccgacgttgctgaaagaatcatcaaagacacccttaaggcctttggcgctgatcatattgatattcttgtcaataacgccgcagtcatcactttcaatgacctcatggatgc

SEQ ID NO: 17676 - DNA, 1569 bp, Muscodor strobelii
  misc_feature: SGI cDNA ID NO. 565909
  misc_feature: Elevated expression when VOC is produced
  misc_feature: Encodes the peptide sequence at SEQ ID NO 17677
atgaatcacataaccaacggtaatccttacaaggatgctctgctcgagaccacacgtacaccaagatttgggctggcaatcggtaccatcttgataacttgtgttctgtacatgctcgccgctggaaataatgctctggacaagtatccagggccatgggccgcgaaatggacaaatatctggcggctatacactgcgtattcgaagaaatacgcgcctactgtgaagaagcttcatgagaaatatggacctgttgtgcgcacaggacctaatagccttgatctggattacccagacttagggaaggtcatttacaacacagacggtaaatggaaaaagagcgacttctacaagaacaatagtgctgtcgtcgacggcaaggtcacatatcatctattcagccaagtagacaacgtcgaacatgcacgcttgaagcgacctatagtaaggcactattccgtacctagtgtgcttgctttggaacaacatatggataaagtgatcgacgacctgtgcttacatctggacaatcgctttgtcaaccgaggtacagaatgcgacctgggggaatggctcggctactacgcctgggacttcatcagcgccgttaccttcagcaagcgcttcggctacatggaaaagggatgcgatttcgacggtacgcaccacatcgcggatcaatccattgactatctgggaatttgtggacagatgccgtggttagacaactggctcgacaagaaccccgtagtccgcctcggcccaccgaatctcgacaacgtcgcacgcatggcagtcgaggcactgctcccgcggctcaagggcgaggacaaaaacttcgacccagagaacccagatttcctacagtacttcatcgattccaaagccacgcatccggacgtcgtcgacgacgggaccatcattaattaccttcttctcaacttaattgcaggtgcagacaccacagccatcacgatgcgcgctctcttctacaactgcctgaaagatctccagatctggaaacgtctggcaaaagaagtccgagccgcagacctcagcgctgacacgcccgtatcataccaatcggcacgtgcgattccgtatctcgacgctgtggtgcgcgagaccctgcgcatccatccggctgtcagcatgtccatggagcgagtggtaccagactacggactcgacctcccagacggtacattcgtgccgccggggactatagtggggatgaacccgtacataatcgggcggaaccactacgtgttcggggctgacgcagatacattccggccggagcggtggcttaaggggacgtctgaaacagatcaggagtacaatgcacgcaaaatgaaatggaacgcggcagacgtgacgtttggcggcggttcgcgaatttgtctcgggcgccatcttagcctgatggaagtctataagatcgtggcgacgttggctacacggtatgatatcgaactcgtggacccagatgctaaactgaagacggtgtcaaggtggttttatcgcattgagaatggttgcattatctgtagattgaagaaggtctaa

SEQ ID NO: 17677 - protein, 522 aa, Muscodor strobelii
  misc_feature: SGI Peptide ID NO. 565909
  misc_feature (50)..(518): Pfam Id: PF00067 Pfam Desc: Cytochrome P450
  misc_feature (286)..(518): Pfam Id: PF00067 Pfam Desc: Cytochrome P450
  misc_feature (12)..(520): NCBI GI: 171682724 Blast Desc: protein product [Podospora anserina] gi|170941321|emb|CAP66971.1| protein product [Podospora anserina]
  misc_feature (10)..(521): NCBI GI: 256727965 Blast Desc: NECHADRAFT_46422 [Nectria haematococca mpVI 77-13-4]
  misc_feature (15)..(507): NCBI GI: 164425161 Blast Desc: NCU10966 [Neurospora crassa OR74A] gi|157070814|gb|EDO65114.1| conserved [Neurospora crassa OR74A]
  misc_feature (24)..(517): NCBI GI: 116202919 Blast Desc: CHGG_09344 [Chaetomium globosum CBS 148.51] gi|88177862|gb|EAQ85330.1| CHGG_09344 [Chaetomium globosum CBS 148.51]
  misc_feature (27)..(509): NCBI GI: 170940227 Blast Desc: protein product [Podospora anserina]
  misc_feature (35)..(521): NCBI GI: 159124402 Blast Desc: PDA-like cytochrome P450 monooxygenase , [Aspergillus fumigatus A1163]
  misc_feature (21)..(521): NCBI GI: 119470607 Blast Desc: benzoate 4-monooxygenase cytochrome P450 [Neosartorya fischeri NRRL 181] gi|119406206|gb|EAW16157.1| benzoate 4-monooxygenase cytochrome P450 [Neosartorya fischeri NRRL 181]
  misc_feature (27)..(511): NCBI GI: 169785215 Blast Desc: [Aspergillus oryzae RIB40] gi|83775816|dbj|BAE65935.1| protein product [Aspergillus oryzae]
  misc_feature (31)..(439): NCBI GI: 116195528 Blast Desc: CHGG_04362 [Chaetomium globosum CBS 148.51] gi|88180275|gb|EAQ87743.1| CHGG_04362 [Chaetomium globosum CBS 148.51]
  misc_feature (164)..(520): NCBI GI: 261353824 Blast Desc: pisatin demethylase [Verticillium albo-atrum VaMs.102]
  misc_feature (46)..(493): SWISSPROT Homolog: EC 1.14.13.12 Benzoate 4-monooxygenase
  misc_feature: Useful for introducing or modulating the production of volatile compounds
MNHITNGNPYKDALLETTRTPRFGLAIGTILITCVLYMLAAGNNALDKYPGPWAAKWTNIWRLYTAYSKKYAPTVKKLHEKYGPVVRTGPNSLDLDYPDLGKVIYNTDGKWKKSDFYKNNSAVVDGKVTYHLFSQVDNVEHARLKRPIVRHYSVPSVLALEQHMDKVIDDLCLHLDNRFVNRGTECDLGEWLGYYAWDFISAVTFSKRFGYMEKGCDFDGTHHIADQSIDYLGICGQMPWLDNWLDKNPVVRLGPPNLDNVARMAVEALLPRLKGEDKNFDPENPDFLQYFIDSKATHPDVVDDGTIINYLLLNLIAGADTTAITMRALFYNCLKDLQIWKRLAKEVRAADLSADTPVSYQSARAIPYLDAVVRETLRIHPAVSMSMERVVPDYGLDLPDGTFVPPGTIVGMNPYIIGRNHYVFGADADTFRPERWLKGTSETDQEYNARKMKWNAADVTFGGGSRICLGRHLSLMEVYKIVATLATRYDIELVDPDAKLKTVSRWFYRIENGCIICRLKKV

SEQ ID NO: 17678 - DNA, 2191 bp, Muscodor strobelii
  misc_feature: SGI EST ID NO. CUFF.41714.1
  misc_feature: Variant of the nucleotide sequence at SEQ ID NO 17676
cgacattgagtttgtaagcattgagtaagagattacaggcaaaatacgggtatgatcaagatgattctggcagagccaattatatcatatctactcgaaggcggtagtcgaaggttgagatagtaaagcttagcgcagtatcagtccatcgcgacggcgctgtaggctaagtatcagtctgcgacatatgaattgcttgctgatcgcaggtggtaccaatcatgtcataaaaaattttagagactagcgaagctgtgtataagcgcaaatggaggctctgctctagtcccacgcgcaatgatccgtccgtaccatggcagcaatttgcgagattctggggcgatttcctttccgggattcatgcaggaaaagcaactttgtgactgcctgcttggcatgctacctacctagatgcgagagtgaggctctgggttgatgaaattggagaactctgaaatagcgtctgtgcccttgggcacatagcaacaatctttcctctcctcctctggcacaactcgctatcttatccaacatcaagatgaatcacataaccaacggtaatccttacaaggatgctctgctcgagaccacacgtacaccaagatttgggctggcaatcggtaccatcttgataacttgtgttctgtacatgctcgccgctggaaataatgctctggacaagtatccagggccatgggccgcgaaatggacaaatatctggcggctatacactgcgtattcgaagaaatacgcgcctactgtgaagaagcttcatgagaaatatggacctgttgtgcgcacaggacctaatagccttgatctggattacccagacttagggaaggtcatttacaacacagacggtaaatggaaaaagagcgacttctacaagaacaatagtgctgtcgtcgacggcaaggtcacatatcatctattcagccaagtagacaacgtcgaacatgcacgcttgaagcgacctatagtaaggcactattccgtacctagtgtgcttgctttggaacaacatatggataaagtgatcgacgacctgtgcttacatctggacaatcgctttgtcaaccgaggtacagaatgcgacctgggggaatggctcggctactacgcctgggacttcatcagcgccgttaccttcagcaagcgcttcggctacatggaaaagggatgcgatttcgacggtacgcaccacatcgcggatcaatccattgactatctgggaatttgtggacagatgccgtggttagacaactggctcgacaagaaccccgtagtccgcctcggcccaccgaatctcgacaacgtcgcacgcatggcagtcgaggcactgctcccgcggctcaagggcgaggacaaaaacttcgacccagagaacccagatttcctacagtacttcatcgattccaaagccacgcatccggacgtcgtcgacgacgggaccatcattaattaccttcttctcaacttaattgcaggtgcagacaccacagccatcacgatgcgcgctctcttctacaactgcctgaaagatctccagatctggaaacgtctggcaaaagaagtccgagccgcagacctcagcgctgacacgcccgtatcataccaatcggcacgtgcgattccgtatctcgacgctgtggtgcgcgagaccctgcgcatccatccggctgtcagcatgtccatggagcgagtggtaccagactacggactcgacctcccagacggtacattcgtgccgccggggactatagtggggatgaacccgtacataatcgggcggaaccactacgtgttcggggctgacgcagatacattccggccggagcggtggcttaaggggacgtctgaaacagatcaggagtacaatgcacgcaaaatgaaatggaacgcggcagacgtgacgtttggcggcggttcgcgaatttgtctcgggcgccatcttagcctgatggaagtctataagatcgtggcgacgttggctacacggtatgatatcgaactcgtggacccagatgctaaactgaagacggtgtcaaggtggttttatcgcattgagaatggttgcattatctgtagattgaagaaggtctaattcaaacatattctagtggtagtgtaagcatttattcacaattctattgttgaagatggaacagactgttgacagccatccaac

SEQ ID NO: 17679 - DNA, 1602 bp, Muscodor strobelii
  misc_feature: SGI cDNA ID NO. 565910
  misc_feature: Encodes the peptide sequence at SEQ ID NO 17680
atggattattcaatcagcgaacagctcaacgctcgtgttttgcagctaaaggatgtgcagtatgatattgagaagtcttacgagaagactaccagagctaccactttggaacgcgcggccgaacagcgtatgacggcaatagagccggccctaactcgtaatattgagaactacatgatggctgggaaaataagcagaggagaagcgccgtcaatgtttcagcccgagaaaaccaaaagtgactttaacggttcaaacatgtcgaaaagctggtacagaaaactcagaaccgaaaccaatcgcgatttctgggtcggtacagatcaacaagcacgagatgaactccgaactgcggcagaatcacccaaggaggagttagttcatatcataagacaaatcaaggccaacgatcgaagtcttacaagagatcaattttggatacatcagagagatgagaacgctttgaatatgccttctttgtacgcgttacatgaccaggatattgtagtggtcctcgatcaggccggtgagcttatcgcttgcaaagtccgaggtctttttcaactcctactagggcatgagcgaatgcaaaagacagaagaagctgtacagaagtggtctggtacgtgtatcgactattgccatctagttattcgaggtctcttacacaaagcaatactgacttttggtcatgtcgcagctcttccacctttgccaaagcctgaaacgggtcgccacgctgtcgatgaattcattcgacagtttcatcctgagctagatcttgagaaggcagaaactgctgcagagctcgagttgcgcgcccaatgtgttgttcattacggtacatgggcacaacaagggcatctcaatcctgacgacgtatttttgactccagacactacgctcggacgtgggagacctgcaaaggtccaaccgaacttcgtcacgaagctgctcccggtattccagcgcaaagtcttaggtatgggttcggaagtcgtgaggttcctgtttcgctcgctggcccccaaggaatatcaaacatgctgtgatgtgttcaatgctctagacaaaacagatcgaatggcggtatcaggtcaaactttcgcaactctgtgcgttgtcggcattaactccttcactggaatacacaaagacaaaactgacgttattcacgggttcgcaagtctcatcgccctgggagagtatatagactggactggtcaacgcaagtttctcttgtacaccaatcaccaacctgtgagaaactatgcattccgcaagatgggaatactgccacccaagccgaatgatccgtggcacccagaccaagtcaaagcagaggaacaaggccaatacattccaattgcaccaccatcggagcccgatctagaccagtacgacccatgtttcaccgagcccatgagcccaaatcccgagaagctctacatggccgacgtacacggagcaggatacctatcacggcgcgagatgatgggacacgattccgatgatgcgtctgcgagcttgggtgagactgtcgcaggaacaccctctctagagagccgctcaaccgaatccttgaaagacgactcgacataa

SEQ ID NO: 17680 - protein, 533 aa, Muscodor strobelii
  misc_feature: SGI Peptide ID NO. 565910
MDYSISEQLNARVLQLKDVQYDIEKSYEKTTRATTLERAAEQRMTAIEPALTRNIENYMMAGKISRGEAPSMFQPEKTKSDFNGSNMSKSWYRKLRTETNRDFWVGTDQQARDELRTAAESPKEELVHIIRQIKANDRSLTRDQFWIHQRDENALNMPSLYALHDQDIVVVLDQAGELIACKVRGLFQLLLGHERMQKTEEAVQKWSGTCIDYCHLVIRGLLHKAILTFGHVAALPPLPKPETGRHAVDEFIRQFHPELDLEKAETAAELELRAQCVVHYGTWAQQGHLNPDDVFLTPDTTLGRGRPAKVQPNFVTKLLPVFQRKVLGMGSEVVRFLFRSLAPKEYQTCCDVFNALDKTDRMAVSGQTFATLCVVGINSFTGIHKDKTDVIHGFASLIALGEYIDWTGQRKFLLYTNHQPVRNYAFRKMGILPPKPNDPWHPDQVKAEEQGQYIPIAPPSEPDLDQYDPCFTEPMSPNPEKLYMADVHGAGYLSRREMMGHDSDDASASLGETVAGTPSLESRSTESLKDDST

SEQ ID NO: 17681 - DNA, 1248 bp, Muscodor strobelii
  misc_feature: SGI cDNA ID NO. 565911
  misc_feature: Encodes the peptide sequence at SEQ ID NO 17682
atgacaaagtcggtcattattgtcggtggctctctagccggattggttcatgggattcagaacaaacggctgggaaacaatgtcactgtgcttgaacaagaccctggcgagcgaggagttcaagaggcaggcattggtttcggtgatgctatgaatgagttctacaagaagtacgacgcgacccttctacaagcatcaaaatccaatgaagctgtccgctttgcatattatgagcgtccagatgtgtatcgcagagacacgccaatgagtttcacgagctggggtctcatatacagacttttgcgcgccaatttcgacggaatgccctcccctgcttgtccgaatcctccatcctctcttctaggagatggtaccgtatcctatctctctggaagaaaggttacagggcttgagctcgatgccgacaggaccatcgtacacttcgtagacgtgaaaaccaagggagcctgttctatgtccgcggacctagtaattggcgctgatggacttcactcgaccgttcgtcgacttgtcggagctccgaccaaggagcgttatgccggctatgtctcatggagaggtactgtgcgcgaacaagacctctccaaggagacccgcaatcacttctctgatcacctgtgtttcaacatcacgaggaatggttacttagtaggctacgtcgttcccactgatgatggaaacttcacaccgggacagcgactagtcaacttttgttggtaccagaacatggccgattcttctgccgaaatgaccgacactttcaccgatgtggacggcatctatcatcggcagactgtaccacgcgggctcgtacggccagagatttgggaaagggcacgaacacaggttcagatctcgacgccattcgccgaacttctcgcaaaggtcaagagtccttttgttaccaagatcaacgacgccttcagtaagcatgcaagttttcatgacgggaaaatcatcctggtgggggacgcgttcgcgtcctttcgaccacacggagcgtccgctcttgagcagtgtgctctccacagccactcccttgaacaagtttatcgaggacagaaaactcttgcggcgtgggaagtcgaagtccattcccatgcgcgtcgtttggccttggtgagccgagccattggtgatcttggccggagcgctgtcttgtctttcctcacatctgtagccctgtactggacgttcattcttgcacagaagcttctctacagctga

SEQ ID NO: 17682 - protein, 415 aa, Muscodor strobelii
  misc_feature: SGI Peptide ID NO. 565911
  misc_feature (8)..(412): NCBI GI: 171676475 Blast Desc: protein product [Podospora anserina] gi|170936304|emb|CAP60962.1| protein product [Podospora anserina]
  misc_feature (3)..(412): NCBI GI: 121714611 Blast Desc: FAD binding domain protein [Aspergillus clavatus NRRL 1] gi|119403070|gb|EAW13490.1| FAD binding domain protein [Aspergillus clavatus NRRL 1]
  misc_feature (3)..(403): NCBI GI: 116205824 Blast Desc: CHGG_02205 [Chaetomium globosum CBS 148.51] gi|88182802|gb|EAQ90270.1| CHGG_02205 [Chaetomium globosum CBS 148.51]
  misc_feature (3)..(389): NCBI GI: 238498038 Blast Desc: conserved [Aspergillus flavus NRRL3357] gi|220693528|gb|EED49873.1| conserved [Aspergillus flavus NRRL3357]
  misc_feature (3)..(389): NCBI GI: 169768718 Blast Desc: [Aspergillus oryzae RIB40] gi|83766687|dbj|BAE56827.1| protein product [Aspergillus oryzae]
  misc_feature (8)..(412): NCBI GI: 238846081 Blast Desc: FAD binding domain-containing protein [Microsporum canis CBS 113480]
  misc_feature (1)..(314): NCBI GI: 116199061 Blast Desc: CHGG_07686 [Chaetomium globosum CBS 148.51] gi|88178965|gb|EAQ86433.1| CHGG_07686 [Chaetomium globosum CBS 148.51]
  misc_feature (4)..(410): NCBI GI: 156065277 Blast Desc: SS1G_00649 [Sclerotinia sclerotiorum 1980] gi|154691508|gb|EDN91246.1| SS1G_00649 [Sclerotinia sclerotiorum 1980]
  misc_feature (4)..(412): NCBI GI: 154311293 Blast Desc: BC1G_06499 [Botryotinia fuckeliana B05.10] gi|150850896|gb|EDN26089.1| BC1G_06499 [Botryotinia fuckeliana B05.10]
  misc_feature (4)..(413): NCBI GI: 145250487 Blast Desc: An15g02180 [Aspergillus niger] gi|134082277|emb|CAK42321.1| protein product [Aspergillus niger]
MTKSVIIVGGSLAGLVHGIQNKRLGNNVTVLEQDPGERGVQEAGIGFGDAMNEFYKKYDATLLQASKSNEAVRFAYYERPDVYRRDTPMSFTSWGLIYRLLRANFDGMPSPACPNPPSSLLGDGTVSYLSGRKVTGLELDADRTIVHFVDVKTKGACSMSADLVIGADGLHSTVRRLVGAPTKERYAGYVSWRGTVREQDLSKETRNHFSDHLCFNITRNGYLVGYVVPTDDGNFTPGQRLVNFCWYQNMADSSAEMTDTFTDVDGIYHRQTVPRGLVRPEIWERARTQVQISTPFAELLAKVKSPFVTKINDAFSKHASFHDGKIILVGDAFASFRPHGASALEQCALHSHSLEQVYRGQKTLAAWEVEVHSHARRLALVSRAIGDLGRSAVLSFLTSVALYWTFILAQKLLYS

SEQ ID NO: 17683 - DNA, 273 bp, Muscodor strobelii
  misc_feature: SGI EST ID NO. CUFF.41542.0
  misc_feature: Variant of the nucleotide sequence at SEQ ID NO 17681
attcagaacaaacggctgggaaacaatgtcactgtgcttgaacaagaccctggcgagcgaggagttcaagaggcaggcattggtttcggtgatgctatgaatgagttctacaagaagtacgacgcgacccttctacaagcatcaaaatccaatgaagctgtccgctttgcatattatgagcgtccagatgtgtatcgcagagacacgccaatgagtttcacgagctggggtctcatatacagacttttgcgcgccaatttcgacggaatgccc

SEQ ID NO: 17684 - DNA, 327 bp, Muscodor strobelii
  misc_feature: SGI cDNA ID NO. 565912
  misc_feature: Encodes the peptide sequence at SEQ ID NO 17685
atggtctacacaatcgtcgtccacctccgcgccaagccgggcaaagaaaacatcgacaaggttcatgcaaaactgaacgaggcctcagcagtctactcccaggataaggagactatctcttggttcgtgatgcaatctgttcacgacccacaggacttcactattgtcgaacgatatgagaaggagagcagccagacgtaccatcttaacaacccttactggaagaccttcgatcctttcgtcattcccctgctggagaaaccaatggacctgagaagatttgaagaactcgtgcctgttgagggcgaagaatcgcttttgaaataa

SEQ ID NO: 17685 - protein, 108 aa, Muscodor strobelii
  misc_feature: SGI Peptide ID NO. 565912
  misc_feature (1)..(104): NCBI GI: 119473531 Blast Desc: NFIA_000880 [Neosartorya fischeri NRRL 181] gi|119406794|gb|EAW16744.1| conserved [Neosartorya fischeri NRRL 181]
  misc_feature (1)..(104): NCBI GI: 238507229 Blast Desc: conserved [Aspergillus flavus NRRL3357] gi|220689529|gb|EED45880.1| conserved [Aspergillus flavus NRRL3357]
  misc_feature (1)..(104): NCBI GI: 146323123 Blast Desc: conserved [Aspergillus fumigatus Af293] gi|129556476|gb|EAL86319.2| conserved [Aspergillus fumigatus Af293]
  misc_feature (1)..(97): NCBI GI: 67526317 Blast Desc: AN3616.2 [Aspergillus nidulans FGSC A4] gi|40740634|gb|EAA59824.1| [Aspergillus nidulans FGSC A4] gi|259481857|tpe|CBF75770.1| TPA: conserved [Aspergillus nidulans
  misc_feature (1)..(104): NCBI GI: 159128509 Blast Desc: conserved [Aspergillus fumigatus A1163]
  misc_feature (1)..(97): NCBI GI: 145248087 Blast Desc: An13g01530 [Aspergillus niger] gi|134081041|emb|CAK41553.1| protein product [Aspergillus niger]
  misc_feature (1)..(104): NCBI GI: 115389136 Blast Desc: conserved [Aspergillus terreus NIH2624] gi|114194469|gb|EAU36169.1| conserved [Aspergillus terreus NIH2624]
  misc_feature (1)..(102): NCBI GI: 189191816 Blast Desc: PTRG_01914 [Pyrenophora tritici-repentis Pt-1C-BFP] gi|187973853|gb|EDU41352.1| PTRG_01914 [Pyrenophora tritici-repentis Pt-1C-BFP]
  misc_feature (1)..(97): NCBI GI: 255937553 Blast Desc: Pc13g13950 [Penicillium chrysogenum Wisconsin 54-1255] gi|211584423|emb|CAP92464.1| Pc13g13950 [Penicillium chrysogenum Wisconsin 54-1255]
  misc_feature (1)..(97): NCBI GI: 261354501 Blast Desc: conserved [Verticillium albo-atrum VaMs.102]
MVYTIVVHLRAKPGKENIDKVHAKLNEASAVYSQDKETISWFVMQSVHDPQDFTIVERYEKESSQTYHLNNPYWKTFDPFVIPLLEKPMDLRRFEELVPVEGEESLLK

SEQ ID NO: 17686 - DNA, 611 bp, Muscodor strobelii
  misc_feature: SGI EST ID NO. CUFF.41544.0
  misc_feature: Variant of the nucleotide sequence at SEQ ID NO 17684
gcccgcgtcatttacagaggcatctacatcgcattataacgtcgcctcttacacaaaaagtcaagaacaacatacatacacataatttgacgacatcacgactctagattgagacagatttctcaatcgtctgcaagaatggtctacacaatcgtcgtccacctccgcgccaagccgggcaaagaaaacatcgacaaggttcatgcaaaactgaacgaggcctcagcagtctactcccaggataaggagactatctcttggttcgtgatgcaatctgttcacgacccacaggacttcactattgtcgaacgatatgagaaggagagcagccagacgtaccatcttaacaacccttactggaagaccttcgatcctttcgtcattcccctgctggagaaaccaatggacctgagaagatttgaagaactcgtgcctgttgagggcgaagaatcgcttttgaaataagggtctgtatggtagtgagaagctatgaggtgatagtgtcgaagctttgaatggtgcaatacactacgggaatattcagagtccttcagtctcattgacaggatccgtatctacctcacaaatgagcacacaaggttttaaaagaa

SEQ ID NO: 17687 - DNA, 1893 bp, Muscodor strobelii
  misc_feature: SGI cDNA ID NO. 565913
  misc_feature: Encodes the peptide sequence at SEQ ID NO 17688
atgcgcctatccggaggtctcttggccgttttcaccggcctcacttcagccggcggttgtccctatgctgctcgcagtaccgagtccgagtccagcgccggatcgggcgaatcctcgggatcaactgctcccatcgccgggaagaatggtatcatgtacatgaaccgcattgcgccgtcaggtgcgcagctctacatagccaacgcggacggaagcaatgcgaagtctctgatgggaaaccagacgaatgccttcgactaccactcgtcctggtccgctgacggaaagtgggttgtgttcaccagcgagcgccgaaaggacggccagagtgatatctatcggatcaaacctgatggtacccaactagaggcgctggcggatacggatgcattcgaagatgctggtactttatccccagacgggacgaagcttgcctacgtgtcgactcagggcaaccacactgccaatatctgggtaaaagacctcgttactggcgtggcgcagaatttgaccgatactccttcgacacgtggcgacccgtctagtccacaaggtcacttccgcccagcatggtctcctgacggggaatggatcgcgtttagctcagatcgcaacacggattggacgggtcatagtgatggcacgggatgggagcatacgcaaaccctgtctatctatgtgatacgccccgatggtagcgattttcggaagattattggacaagactctttctccctcgcgaatccacaatggtcggcagacggcagccgaatcatttacaacaacatcacaacggagaacacttataatgcccacggtatatcatttggcgcctcggtaccgtccgcgctacatagtgtcgacgtggctaccggcatgaaaatagtgactatcaacgatgacgcagaactaaagctgtcgcaaaattacatcggaaacagttcgaatattggctatgtggtcaaagccggtgccaaccagggcattgcgtatacagtcccagatgctacgcataaggcgtttactgtcgagaacttacgcaacccctcttggtcgccggacggaaccaaggtcgtgtatgaggtgtatgcttgggatcagcgacctgctgaaatggagctgttctctttcaacagtgactgggaatatcgatttatggatgtcttcccccaattccacaacgctacgggtagaatggtcctcacatctaagcaactcggtaactcttcggtctggacttccgacgccgactttgatgacgtctctgaacccttttcgccgttctctgtctgggatgcgtccaacgacacacaactaggctgggtcacacacggaactggcggggcttttcaacccacattcaacagcgacggttcccagattgctgttggactcggtctgtggtttgctggcaggaatagcggcccagccaccatctaccttacctctgcggacgggtcctcctttatgaaccttactgatggcagtttgaatgcgggcttcccttctttctcgcctaatgaaaacaagcttgtatatcggctctgggatcccgcaacctcgtctcctctcgggctgcgcatcctggatctagatacaatggaaacgacaaacctaacgtggggctgggacaacacgcctggctggtcgccggatggagaacgaatcgtattcacgcgtcaggtgaactggacatcgtcatatggcgctcgctggtacgaggacagatttgatgtttttaccattaagcccgacggtagcgagctcacgcagctgacgactagtcatgccaacgacgcacacgctgtgtggagttatgatgggcgcatcatgtggaacagcggtatgtacggcttcagagatgagagtgtaacttatgacaatggtacgtaa

SEQ ID NO: 17688 - protein, 630 aa, Muscodor strobelii
  misc_feature: SGI Peptide ID NO. 565913
  misc_feature (76)..(114): Pfam Id: PF07676 Pfam Desc: WD40-like Beta Propeller Repeat
  misc_feature (178)..(205): Pfam Id: PF07676 Pfam Desc: WD40-like Beta Propeller Repeat
  misc_feature (123)..(159): Pfam Id: PF07676 Pfam Desc: WD40-like Beta Propeller Repeat
  misc_feature (536)..(563): Pfam Id: PF07676 Pfam Desc: WD40-like Beta Propeller Repeat
  misc_feature (47)..(628): NCBI GI: 256721219 Blast Desc: NECHADRAFT_34811 [Nectria haematococca mpVI 77-13-4]
  misc_feature (1)..(628): NCBI GI: 145246330 Blast Desc: An12g03370 [Aspergillus niger] gi|134080129|emb|CAK46110.1| protein product [Aspergillus niger]
  misc_feature (1)..(628): NCBI GI: 154290642 Blast Desc: BC1G_15641 [Botryotinia fuckeliana B05.10] gi|150847472|gb|EDN22665.1| BC1G_15641 [Botryotinia fuckeliana B05.10]
  misc_feature (44)..(628): NCBI GI: 238507612 Blast Desc: conserved [Aspergillus flavus NRRL3357] gi|220688526|gb|EED44878.1| conserved [Aspergillus flavus NRRL3357]
  misc_feature (44)..(628): NCBI GI: 169785140 Blast Desc: [Aspergillus oryzae RIB40] gi|83775778|dbj|BAE65898.1| protein product [Aspergillus oryzae]
  misc_feature (1)..(628): NCBI GI: 145254082 Blast Desc: An18g00460 [Aspergillus niger] gi|134084093|emb|CAK43122.1| protein product [Aspergillus niger]
  misc_feature (1)..(626): NCBI GI: 145237008 Blast Desc: An07g00580 [Aspergillus niger] gi|134075616|emb|CAK39282.1| protein product [Aspergillus niger]
  misc_feature (1)..(627): NCBI GI: 255936369 Blast Desc: Pc13g07820 [Penicillium chrysogenum Wisconsin 54-1255] gi|211583831|emb|CAP91851.1| Pc13g07820 [Penicillium chrysogenum Wisconsin 54-1255]
  misc_feature (1)..(628): NCBI GI: 255930285 Blast Desc: Pc06g00930 [Penicillium chrysogenum Wisconsin 54-1255] gi|211581315|emb|CAP79086.1| Pc06g00930 [Penicillium chrysogenum Wisconsin 54-1255]
  misc_feature (1)..(628): NCBI GI: 67524721 Blast Desc: AN2818.2 [Aspergillus nidulans FGSC A4] gi|40743737|gb|EAA62924.1| AN2818.2 [Aspergillus nidulans FGSC A4] gi|259486257|tpe|CBF83952.1| TPA: conserved [Aspergillus FGSC
MRLSGGLLAVFTGLTSAGGCPYAARSTESESSAGSGESSGSTAPIAGKNGIMYMNRIAPSGAQLYIANADGSNAKSLMGNQTNAFDYHSSWSADGKWVVFTSERRKDGQSDIYRIKPDGTQLEALADTDAFEDAGTLSPDGTKLAYVSTQGNHTANIWVKDLVTGVAQNLTDTPSTRGDPSSPQGHFRPAWSPDGEWIAFSSDRNTDWTGHSDGTGWEHTQTLSIYVIRPDGSDFRKIIGQDSFSLANPQWSADGSRIIYNNITTENTYNAHGISFGASVPSALHSVDVATGMKIVTINDDAELKLSQNYIGNSSNIGYVVKAGANQGIAYTVPDATHKAFTVENLRNPSWSPDGTKVVYEVYAWDQRPAEMELFSFNSDWEYRFMDVFPQFHNATGRMVLTSKQLGNSSVWTSDADFDDVSEPFSPFSVWDASNDTQLGWVTHGTGGAFQPTFNSDGSQIAVGLGLWFAGRNSGPATIYLTSADGSSFMNLTDGSLNAGFPSFSPNENKLVYRLWDPATSSPLGLRILDLDTMETTNLTWGWDNTPGWSPDGERIVFTRQVNWTSSYGARWYEDRFDVFTIKPDGSELTQLTTSHANDAHAVWSYDGRIMWNSGMYGFRDESVTYDNGT

SEQ ID NO: 17689 - DNA, 849 bp, Muscodor strobelii
  misc_feature: SGI EST ID NO. CUFF.41569.0
  misc_feature: Variant of the nucleotide sequence at SEQ ID NO 17687
cggacggaaccaaggtcgtgtatgaggtgtatgcttgggatcagcgacctgctgaaatggagctgttctctttcaacagtgactgggaatatcgatttatggatgtcttcccccaattccacaacgctacgggtagaatggtcctcacatctaagcaactcggtaactcttcggtctggacttccgacgccgactttgatgacgtctctgaacccttttcgccgttctctgtctgggatgcgtccaacgacacacaactaggctgggtcacacacggaactggcggggcttttcaacccacattcaacagcgacggttcccagattgctgttggactcggtctgtggtttgctggcaggaatagcggcccagccaccatctaccttacctctgcggacgggtcctcctttatgaaccttactgatggcagtttgaatgcgggcttcccttctttctcgcctaatgaaaacaagcttgtatatcggctctgggatcccgcaacctcgtctcctctcgggctgcgcatcctggatctagatacaatggaaacgacaaacctaacgtggggctgggacaacacgcctggctggtcgccggatggagaacgaatcgtattcacgcgtcaggtgaactggacatcgtcatatggcgctcgctggtacgaggacagatttgatgtttttaccattaagcccgacggtagcgagctcacgcagctgacgactagtcatgccaacgacgcacacgctgtgtggagttatgatgggcgcatcatgtggaacagcggtatgtacggcttcagagatgagagtgtaacttatgacaatggtacgtaaagaaagatcccac

SEQ ID NO: 17690 - DNA, 1692 bp, Muscodor strobelii
  misc_feature: SGI cDNA ID NO. 565914
  misc_feature: Encodes the peptide sequence at SEQ ID NO 17691
atggatgagagcatactgggtaaagaccaaaggatacttgcaactccagatgagagcatacatatgagcggtggcgaccaacggccgagtaaagttcgcaccagcaagacaaatgtcaagacaggttgcacgagctgcaatacacactcatctttaatcttagacgaagacgcattaaatgcgacgaaatgcggcctgcctgttcaccatgtgttcgcagcgagttactttgttacggggtatcctgcgccacctgaatccaaaacgcgcactcagcccgaaccagtagtcgcaacaccatcactagagcaagtgatggatctgtcatcaagcactgtctcaaggccatcaaattttgcgtctatgaacactcagatgatagcacttaatattcatggaaaccaaagtgtcaatgcatcagacgtttcaatagctaacaaggatgtcacacatactgatccagcgacactgccaagtacttctgagacttctgaggagtttgaccctgctcgtggtggtgagaacgcagcgtatagggcgatggacatgcaagtgaatggtcgaatatctaccgatttcattccgcaaacaagtcatctcttacagaccgacgactcgctgaagagagaaggacaagtcctaatatcccctcctacggaaagagaaacaaatttcggctccttgtccttgaatgacttggaagaaatagacgggcgaagcgcaggcttatacacactgtccggtagagagttcatcgaagcatcgtcagaagattatgagcctctggacctaatagaaacccgaaagaaacaaattctcaacagagtggtgagaacattaacggaaaaagttcgccagtatttctttcgagcacacaaggccagtaatagcacagcagctagagacactcataatggcgacggccctagaagacaggaacaaactgatatacagtcctctgagtcgacagcaaacaagagaaagctgggagaagagcaagacattgaagatcaggaagagcaagaggatacctttacgcctctacacactgacaacgtagataggaaaggtaaagaaaaggaagtaaaacgatttgcttgcccctatttcaagtacaatcctgccgaatatagaaagatggccgtctacgattatgaacagcttgctgaccatcgaggctgcattaccaatttgttaacggagtttgagagatatgttcttcgagaaatgccgctccgacttcatcaaatcttgacgcctgagttagatagagatttccaaatcatttcacagagcctgaagcagcgcgctatcgaatgcaccaactttattcttgtcaaattattcgaagagttccggaagtcaaatcagaagatggcacactctgctccatcgtcaggttcaacatccgagcctagtgcaatatcgcaatacggggcagttgacgtcagcacgataccgctcgaagcttcgtggatcgactcgctagttgacatgcaaaacgtgtttggcgaaaaggatcttggatttgatttcgatctagactttccgcatgcagcaacttcagctttatttagtgatgttcaaagagaggattttcagccgtcttccatcatcgggactcaacagaattccgactctggctatggatcggctaaccatgataaggaacgcgaagatcttgctgactga

SEQ ID NO: 17691 - protein, 563 aa, Muscodor strobelii
  misc_feature: SGI Peptide ID NO. 565914
MDESILGKDQRILATPDESIHMSGGDQRPSKVRTSKTNVKTGCTSCNTHSSLILDEDALNATKCGLPVHHVFAASYFVTGYPAPPESKTRTQPEPVVATPSLEQVMDLSSSTVSRPSNFASMNTQMIALNIHGNQSVNASDVSIANKDVTHTDPATLPSTSETSEEFDPARGGENAAYRAMDMQVNGRISTDFIPQTSHLLQTDDSLKREGQVLISPPTERETNFGSLSLNDLEEIDGRSAGLYTLSGREFIEASSEDYEPLDLIETRKKQILNRVVRTLTEKVRQYFFRAHKASNSTAARDTHNGDGPRRQEQTDIQSSESTANKRKLGEEQDIEDQEEQEDTFTPLHTDNVDRKGKEKEVKRFACPYFKYNPAEYRKMAVYDYEQLADHRGCITNLLTEFERYVLREMPLRLHQILTPELDRDFQIISQSLKQRAIECTNFILVKLFEEFRKSNQKMAHSAPSSGSTSEPSAISQYGAVDVSTIPLEASWIDSLVDMQNVFGEKDLGFDFDLDFPHAATSALFSDVQREDFQPSSIIGTQQNSDSGYGSANHDKEREDLAD

SEQ ID NO: 17692 - DNA, 1587 bp, Muscodor strobelii
  misc_feature: SGI cDNA ID NO. 565915
  misc_feature: Encodes the peptide sequence at SEQ ID NO 17693
atggggtcgccgcatctgcagcactatcctcgcagcgcgaggcagacggcaagactcagacagattctcgtcgtttctgtcatttgtctagctatctattgttttctgctcgttcctgaggagagtctcgactcgtcgcgatcagataatccggagctataccagtctcgaccggcgcgccaaagagagtcagagaaggggggaaacgacggtcacttgctgccttcggagcttttgggcaaccctttccttagcgaagaccagtgtcgggaaagttttccaggattgctgaaggagattgactatgaagttgcaaaaggtccgtttaaactagagcggagcccgagtcatctcggaccgctgattgcacgggtccgagacggccatttatatatactttcggcagcccgccgagtagacttaagtagagacatgctggcccaccgctctgcaaccctacatcaaatcgctaatgcgctcgtgacctggccgcacccgtccgcgttatcctcctcggattcaccctattcgcacatcccaaacacaacattcgccttcagccatcacgatgatcccactcctaacacattctcgtactctcggcctgcagatcgttctctgcgtactgatccttcgactcactctcaattccgatactttcctatcccgcatttctcattctactcctggggccttccaactctgtcttctatgcggtcagcatcttctttgattacaaagctggaaaccgaaatctccttctcccagaagataccaaaggcaatctggcgcggaacgacatggttcaacagcccgcgcgctggccgtttacgacagaatcttgtcgtcgcctttggatctcacagcacctccaaagagcctaccatttctccaccagagtggtccgatatccaacccctaaacgcaaccaatgggttaccaatcgaggacttttgtaaatacaaatacatcatctacaccgaaggcgtgacgtattctggtcgatttcagtttcacaatctctgcgcctccattatacttacgcctccaatcgcatggatgcagcacctctcacacctcgtaaagcccctattctcctacacaatatcgccttcatccccggacatcccatcgcctgtgcaccggcggtctctcctctcctctcttttccctagttcccagtctgccgactcaaccccgtcccgtggtcttccacgaacacccatcaatctcggatcctccgaaaaaccacttcccctagccccatatcctgcgccatgggttcagaccgcatggccagttgagcacactacaagcgacgcaaacatggtattcgttgcaccagactggagtgatctctcatccactatatcctggcttgagtcgcaccctaaaattgcagaatcgattgctcggcgccaacgcgatttgttccacggcggtggatatatgagccaggctgctgagatgtgttactggcgcggattgatcagtggctggagtaaagttgtgagggtcgaagacggtgagtttgatgatctcggaggaggtgccttgggaagagttcagtttaagggagattcataa

SEQ ID NO: 17693 - protein, 528 aa, Muscodor strobelii
  misc_feature: SGI Peptide ID NO. 565915
  misc_feature (14)..(505): NCBI GI: 171677945 Blast Desc: protein product [Podospora anserina] gi|170937041|emb|CAP61700.1| protein product [Podospora anserina]
  misc_feature (68)..(515): NCBI GI: 29150125 Blast Desc: [Neurospora crassa]
  misc_feature (10)..(516): NCBI GI: 116201527 Blast Desc: CHGG_08648 [Chaetomium globosum CBS 148.51] gi|88177166|gb|EAQ84634.1| CHGG_08648 [Chaetomium globosum CBS 148.51]
  misc_feature (97)..(515): NCBI GI: 164426694 Blast Desc: NCU11268 [Neurospora crassa OR74A] gi|157071438|gb|EAA28391.2| conserved [Neurospora crassa OR74A]
  misc_feature (79)..(516): NCBI GI: 159125788 Blast Desc: conserved [Aspergillus fumigatus A1163]
  misc_feature (79)..(516): NCBI GI: 119499505 Blast Desc: NFIA_041910 [Neosartorya fischeri NRRL 181] gi|119414674|gb|EAW24613.1| [Neosartorya fischeri NRRL 181]
  misc_feature (79)..(516): NCBI GI: 70985550 Blast Desc: conserved [Aspergillus fumigatus Af293] gi|66845909|gb|EAL86243.1| conserved [Aspergillus fumigatus Af293]
  misc_feature (76)..(505): NCBI GI: 154293302 Blast Desc: BC1G_14446 [Botryotinia fuckeliana B05.10] gi|150845591|gb|EDN20784.1| BC1G_14446 [Botryotinia fuckeliana B05.10]
  misc_feature (84)..(507): NCBI GI: 39971479 Blast Desc: MGG_07055 [Magnaporthe grisea 70-15] gi|145019515|gb|EDK03743.1| MGG_07055 [Magnaporthe grisea 70-15]
  misc_feature (249)..(516): NCBI GI: 156061171 Blast Desc: SS1G_02728 [Sclerotinia sclerotiorum 1980] gi|154700132|gb|EDN99870.1| SS1G_02728 [Sclerotinia sclerotiorum 1980]
MGSPHLQHYPRSARQTARLRQILVVSVICLAIYCFLLVPEESLDSSRSDNPELYQSRPARQRESEKGGNDGHLLPSELLGNPFLSEDQCRESFPGLLKEIDYEVAKGPFKLERSPSHLGPLIARVRDGHLYILSAARRVDLSRDMLAHRSATLHQIANALVTWPHPSALSSSDSPYSHIPNTTFAFSHHDDPTPNTFSYSRPADRSLRTDPSTHSQFRYFPIPHFSFYSWGLPTLSSMRSASSLITKLETEISFSQKIPKAIWRGTTWFNSPRAGRLRQNLVVAFGSHSTSKEPTISPPEWSDIQPLNATNGLPIEDFCKYKYIIYTEGVTYSGRFQFHNLCASIILTPPIAWMQHLSHLVKPLFSYTISPSSPDIPSPVHRRSLLSSLFPSSQSADSTPSRGLPRTPINLGSSEKPLPLAPYPAPWVQTAWPVEHTTSDANMVFVAPDWSDLSSTISWLESHPKIAESIARRQRDLFHGGGYMSQAAEMCYWRGLISGWSKVVRVEDGEFDDLGGGALGRVQFKGDS

SEQ ID NO: 17694 - DNA, 908 bp, Muscodor strobelii
  misc_feature: SGI EST ID NO. CUFF.41604.0
  misc_feature: Variant of the nucleotide sequence at SEQ ID NO 17692
tcggaccgctgattgcacgggtccgagacggccatttatatatactttcggcagcccgccgagtagacttaagtagagacatgctggcccaccgctctgcaaccctacatcaaatcgctaatgcgctcgtgacctggccgcacccgtccgcgttatcctcctcggattcaccctattcgcacatcccaaacacaacattcgccttcagccatcacgatgatcccactcctaacacattctcgtactctcggcctgcagatcgttctctgcgtactgatccttcgactcactctcaattccgatactttcctatcccgcatttctcattctactcctggggccttccaactctgtcttctatgcggtcagcatcttctttgattacaaagctggaaaccgaaatctccttctcccagaagataccaaaggcaatctggcgcggaacgacatggttcaacagcccgcgcgctggccgtttacgacagaatcttgtcgtcgcctttggatctcacagcacctccaaagagcctaccatttctccaccagagtggtccgatatccaacccctaaacgcaaccaatgggttaccaatcgaggacttttgtaaatacaaatacatcatctacaccgaaggcgtgacgtattctggtcgatttcagtttcacaatctctgcgcctccattatacttacgcctccaatcgcatggatgcagcacctctcacacctcgtaaagcccctattctcctacacaatatcgccttcatccccggacatcccatcgcctgtgcaccggcggtctctcctctcctctcttttccctagttcccagtctgccgactcaaccccgtcccgtggtcttccacgaacacccatcaatctcggatcctccgaaaaaccacttccccta

SEQ ID NO: 17695 - DNA, 1029 bp, Muscodor strobelii
  misc_feature: SGI cDNA ID NO. 565916
  misc_feature: Elevated expression when VOC is produced
  misc_feature: Encodes the peptide sequence at SEQ ID NO 17696
atgccgaccgacacagaaccgccaattgactacacgaacgatggccctggtttgatcgccgggctgggcgtcctggcctttttcagcacggtcgtcgtaggtctgcggctctggtccaggcgactaatcaaaactaaatgggcactcgatgactaccttgccgtcgcggctctagttgccacacatatctactatgcctcctcagttctaagcattgtcattgggggaattggacgggactaccgtctcgtagcggcagagggaccgggtcaaatcgaggctctcttcaagacactattgggcgcggaggtgttatacggcctctgctcgcctctgatcaaacttgctgttctcgcgctcctctggcgtatctttccgacgccgacgatgaggatcggatgcatcgtcctgagcacgctgtcaatcctctggttcatttccattgaaatcgtgaacttcttgcaatgcatccctcttcgggcattctggcaagtggagttacaggcattaccaaccaccaagtgtttaaactttttagtttacttcctcgggaactctatcgccaacactttcatcgacttcgccactcttgtcttaccaataagagagatcgtcaagcttcaaatgtcgttaagccggaagattggactttgcggtgttttcctcttcggaggcataacgcttggctcgagtctagcccgcacgattagtctgggaatcctcatcaatgaaggggcgaccaacttcaccaagcaattcgaactagctggcgcagcatccgttatcgagatctatgctggcgttatagcatcgtgtctccccttaatgtcgcccgtgtatcacaaactgcgacatggtatcgtaaccacgaccaggactgcgaccccaacacctattggtggccagaggtcgaactcagcgaatgtgtataaagactcttcacattttgagagactacgtgatgacgactcccacgagatgtcctcctacgaccgaattcgcaatacaagcgacaaacctctggtgtga

SEQ ID NO: 17696 - protein, 342 aa, Muscodor strobelii
  misc_feature: SGI Peptide ID NO. 565916
  misc_feature (24)..(329): NCBI GI: 46102717 Blast Desc: FG00057.1 [Gibberella zeae PH-1]
  misc_feature (28)..(341): NCBI GI: 256720355 Blast Desc: NECHADRAFT_56055 [Nectria haematococca mpVI 77-13-4]
  misc_feature (28)..(331): NCBI GI: 46137139 Blast Desc: FG10085.1 [Gibberella zeae PH-1]
  misc_feature (7)..(326): NCBI GI: 256720423 Blast Desc: NECHADRAFT_98298 [Nectria haematococca mpVI 77-13-4]
  misc_feature (3)..(332): NCBI GI: 169774227 Blast Desc: [Aspergillus oryzae RIB40] gi|83769444|dbj|BAE59579.1| protein product [Aspergillus oryzae]
  misc_feature (99)..(326): NCBI GI: 46114988 Blast Desc: FG03336.1 [Gibberella zeae PH-1]
  misc_feature (1)..(281): NCBI GI: 115388719 Blast Desc: [Aspergillus terreus NIH2624] gi|114195949|gb|EAU37649.1| [Aspergillus terreus NIH2624]
  misc_feature (29)..(325): NCBI GI: 46122689 Blast Desc: FG05722.1 [Gibberella zeae PH-1]
  misc_feature (1)..(329): NCBI GI: 121712439 Blast Desc: integral membrane protein, [Aspergillus clavatus NRRL 1] gi|119401983|gb|EAW12405.1| integral membrane protein, [Aspergillus clavatus NRRL 1]
  misc_feature (50)..(304): NCBI GI: 121712242 Blast Desc: conserved [Aspergillus clavatus NRRL 1] gi|119401888|gb|EAW12310.1| conserved [Aspergillus clavatus NRRL 1]
  misc_feature: Useful for introducing or modulating the production of volatile compounds
MPTDTEPPIDYTNDGPGLIAGLGVLAFFSTVVVGLRLWSRRLIKTKWALDDYLAVAALVATHIYYASSVLSIVIGGIGRDYRLVAAEGPGQIEALFKTLLGAEVLYGLCSPLIKLAVLALLWRIFPTPTMRIGCIVLSTLSILWFISIEIVNFLQCIPLRAFWQVELQALPTTKCLNFLVYFLGNSIANTFIDFATLVLPIREIVKLQMSLSRKIGLCGVFLFGGITLGSSLARTISLGILINEGATNFTKQFELAGAASVIEIYAGVIASCLPLMSPVYHKLRHGIVTTTRTATPTPIGGQRSNSANVYKDSSHFERLRDDDSHEMSSYDRIRNTSDKPLV

SEQ ID NO: 17697 - DNA, 2125 bp, Muscodor strobelii
  misc_feature: SGI EST ID NO. CUFF.41683.0
  misc_feature: Variant of the nucleotide sequence at SEQ ID NO 17695
taattagcatgcgcctcagctgacccagccataataggacataacagtgtccactgagcctgttccgtaccaaaaatggttccttaactgtacgtaatcgacgatgctcaactctccgtttttccaacgtcttatgtgatagtaataggtcatgtaaagagcgctagaaagcgatttaagatattcttgccaatgattacgacctttcttgatattgggttgcaagctgacaaacatgacatgccctcgtctctgatccagaaccgcgtctcctctcacgtctctacttcatcatcaggctccggtctaaagagagagcgagagtatcaatgccgaccgacacagaaccgccaattgactacacgaacgatggccctggtttgatcgccgggctgggcgtcctggcctttttcagcacggtcgtcgtaggtctgcggctctggtccaggcgactaatcaaaactaaatgggcactcgatgactaccttgccgtcgcggctctagttgccacacatatctactatgcctcctcagttctaagcattgtcattgggggaattggacgggactaccgtctcgtagcggcagagggaccgggtcaaatcgaggctctcttcaagacactattgggcgcggaggtgttatacggcctctgctcgcctctgatcaaacttgctgttctcgcgctcctctggcgtatctttccgacgccgacgatgaggatcggatgcatcgtcctgagcacgctgtcaatcctctggttcatttccattgaaatcgtgaacttcttgcaatgcatccctcttcgggcattctggcaagtggagttacaggcattaccaaccaccaagtgtttaaactttttagtttacttcctcgggaactctatcgccaacactttcatcgacttcgccactcttgtcttaccaataagagagatcgtcaagcttcaaatgtcgttaagccggaagattggactttgcggtgttttcctcttcggaggcataacgcttggctcgagtctagcccgcacgattagtctgggaatcctcatcaatgaaggggcgaccaacttcaccaagcaattcgaactagctggcgcagcatccgttatcgagatctatgctggcgttatagcatcgtgtctccccttaatgtcgcccgtgtatcacaaactgcgacatggtatcgtaaccacgaccaggactgcgaccccaacacctattggtggccagaggtcgaactcagcgaatgtgtataaagactcttcacattttgagagactacgtgatgacgactcccacgagatgtcctcctacgaccgaattcgcaatacaagcgacaaacctctggtgtgataatggctgcctgcctctgtcggatcgcatactattcgaccactcaggcccgcactcaaactacacaagcgcaatcgctcactcctatgcttggtcacagatatcaaaagcagtaacgagcgaggatctccatctccgctgatgttctcgatttgtctcgagagaatgtgcattaccgagagagcaggatgccgggtactataaaatgacagcatcccgcagccataccaatatccaggaacaaattaccgagaagcgattccgccggcgattttcctcctgccatcaaacctcatgcatgctctccatacaacaaagtcccgtcgataaccacgggctgatgacatcgctcgtcccagcgcgaaaggtttcacctcctagagatttaaagtggtgagaacaatcgcttcgatgccagaagacggtgacaggcattgtatctatcaggtgatactttgtattgagaggagacttccaagtcatttcaaagagatagggaagggactgttcagttaaaaatgggatagaggggaatcttcacgtgttctaagatggcatcgctcataaacgcatcgactcttcgaagatgggaagtcttcattatgttgatagtacatgcaaaatgcgagaaatatcacagtttggattctcttccggaatctgggtggcaatttcgactcgctgcattttagcgcaactcggccacccttgatgcgtcaaattttcatgatgttcgatatctattctctagagtcgaattctacagc

SEQ ID NO: 17698 - DNA, 507 bp, Muscodor strobelii
  misc_feature: SGI cDNA ID NO. 565917
  misc_feature: Elevated expression when VOC is produced
  misc_feature: Encodes the peptide sequence at SEQ ID NO 17699
atggggcttggcattgccgagctgggcgatgaagacaggcagagttttgttatcgtcgtcagcgatggtaccattgagggcttcgaaaaggaggccccgaacgcagatggctggcgttcgatgaggcataaacgtcccaagacacgggatgatgcctgccctaaaactcacgatttcgaggaattagtcacaagtgcggttttaagttataaaaccagtatgcgccctcccacgatcgcttctggtcttcaaacgagagaagaatatcgcatatacatctttactggcaattatgatctacttgctttacaggtgcggacagccgggccattcgtgaaggagtacaagggcacccttcttgtcgaagggacgacctttctcagtcgggatccatctactgtcgcggataaggaagaaaagaacaaggagaattgcttagagcaggaagagaaggagaaggagatcctgggcaagatgatcagacagactaggctgatttcgggttga

SEQ ID NO: 17699 - protein, 168 aa, Muscodor strobelii
  misc_feature: SGI Peptide ID NO. 565917
  misc_feature: Useful for introducing or modulating the production of volatile compounds
MGLGIAELGDEDRQSFVIVVSDGTIEGFEKEAPNADGWRSMRHKRPKTRDDACPKTHDFEELVTSAVLSYKTSMRPPTIASGLQTREEYRIYIFTGNYDLLALQVRTAGPFVKEYKGTLLVEGTTFLSRDPSTVADKEEKNKENCLEQEEKEKEILGKMIRQTRLISG

SEQ ID NO: 17700 - DNA, 2040 bp, Muscodor strobelii
  misc_feature: SGI cDNA ID NO. 565918
  misc_feature: Reduced expression when VOC is produced
  misc_feature: Encodes the peptide sequence at SEQ ID NO 17701
atgtcgggcctcatgagcaagcgccagcaggctcgcaacgagcgcgctttgcaagacctggtgcagaccattccgggcaatagtacttgtgccgattgtggcgccagaaacccagcttgggcatcatggagtttggggatctttctctgcatgcgatgcgctgccatccatcggaagctggggacgcacatctccaaggtcaagtcgctgagcatggacagctggaccaacgaccaggttgatagcatgaggaaaataggcaatgccgtctccaacaaaaagtacaacccgcagagcaagcggccacccgttcccgtcgacgccgacgaagccgactccgccatggagcgattcattcgatccaagtacacacagcccgaacctcgaagtcctaccacgaacggcgccaggagacacaacaccggaagctcagacgaaggaacaccgccgcccctcccgcccaagacggggggtcggttcttcaagtcagcgactctgccgttccgatctaagaaagaaacgcggagtcctcgcgaaagctcctttccccagtccgatgtatcaccgagattgaataggtcctcgaacgtgtttggagctagtgttcacaatgacggccctgaagataccgcgcggaagctgacacagctgcgcgatatgggattcaccgacgacaagcgcaatgccatggtcttgaagggtgttaatggcaacctggaaaagacggtggaggctctaattcggctgggcgaagggaacgggagtatctcgccggtcgttacgacatcgcgagatcccttttcatcaaggtcactcaccccgaaaccgacgaaatcccccatgaatgggctatcactagcgtcgaaaccgagtccaccgcttcctgttcagtctccatcgacatcgtctaataacgatccttgggaaatacagcccgcgccaccacagtcatcacagtccaccgggacactgcaaaataagaaccctttttataatactaatactaccaatcctttcggtatacccaaccagcaaaatgatttcgcgctcaaccagtctctacaaaatctttctttaacacagtcccagccgcaacagcagctcttccccaatcatactggaggagcacccatgtcgcagcccatggcacagcagttgtatcagcaatcacagactccgcctgtaccacaaatgccaagcttcgcatccatgacgttcaacaataatcagacgtatcctcaacccgttcaacccgttcagcagtcgccacagcacaaccacaacccttttctccaggctccagccacaccacaacagcccttgtcacttaatacgggcatgtatcaacctcaaggcgcgtacggaagtaatcccttcacgaagtcgccaaccaggcttggatccccaatgctcaaccagatcccagagcaagtccagcagaatgtgtatagctcgccccagtcgcagttcagtagtaaccctttcatgtcacaaccagcaacgcagtcacctctgtctgctccgcccctatctgctcaaccacagcaacagcaatggtatcagagtccacagcctgctcagatgtctcagcctgcccagcagcagcaagagtggtatcaaacgcagcaaccagcccaacttccgcagcagagctatcagccccagcgacaagactcggcgtccattatggcgctatacaactatccgcatctcgctcccgcccgtacaggaatgcagactccggagcaaggcaatatgaatgcattcaccgcgaatcaggcccctgcgcaagcgcaagtccccacaccgatacaccaaagtccatcgggcgctacgaagaacccatttttgaataatacagcgtctcaaccaacttccccgtttggagcagcgactcaacaagcttcgccatttggaacagcgaacccggggtcgagtgccaggagtcgcgagagcatgatgctgggcatggagatggcgtggaataatggacggcatagtcctgatgcttttgcgagcttgagtgcgaggagtggatga

SEQ ID NO: 17701 - protein, 679 aa, Muscodor strobelii
  misc_feature: SGI Peptide ID NO. 565918
  misc_feature (15)..(131): Pfam Id: PF01412 Pfam Desc: GTPase activating protein for Arf
  misc_feature (15)..(123): Pfam Id: PF01412 Pfam Desc: GTPase activating protein for Arf
  misc_feature (1)..(679): NCBI GI: 46136933 Blast Desc: FG09982.1 [Gibberella zeae PH-1]
  misc_feature (1)..(677): NCBI GI: 116180098 Blast Desc: CHGG_00677 [Chaetomium globosum CBS 148.51] gi|88184974|gb|EAQ92442.1| CHGG_00677 [Chaetomium globosum CBS 148.51]
  misc_feature (1)..(483): NCBI GI: 85100911 Blast Desc: NCU01150 [Neurospora crassa OR74A] gi|18376265|emb|CAD21379.1| conserved [Neurospora crassa] gi|28922594|gb|EAA31821.1| [Neurospora crassa OR74A]
  misc_feature (1)..(677): NCBI GI: 171692007 Blast Desc: protein product [Podospora anserina] gi|170945952|emb|CAP72753.1| protein product [Podospora anserina]
  misc_feature (1)..(679): NCBI GI: 256731802 Blast Desc: NECHADRAFT_100612 [Nectria haematococca mpVI 77-13-4]
  misc_feature (1)..(519): NCBI GI: 156055682 Blast Desc: SS1G_05193 [Sclerotinia sclerotiorum 1980] gi|154702977|gb|EDO02716.1| SS1G_05193 [Sclerotinia sclerotiorum 1980]
  misc_feature (1)..(678): NCBI GI: 39971855 Blast Desc: MGG_07243 [Magnaporthe grisea 70-15] gi|145019742|gb|EDK03970.1| MGG_07243 [Magnaporthe grisea 70-15]
  misc_feature (1)..(679): NCBI GI: 258577115 Blast Desc: [Uncinocarpus reesii 1704] gi|237903005|gb|EEP77406.1| [Uncinocarpus reesii 1704]
  misc_feature (1)..(395): NCBI GI: 119178213 Blast Desc: CIMG_07964 [Coccidioides immitis RS]
  misc_feature (1)..(395): NCBI GI: 240104791 Blast Desc: ArfGAP family protein [Coccidioides posadasii C735 delta SOWgp]
  misc_feature: Useful for introducing or modulating the production of volatile compounds
MSGLMSKRQQARNERALQDLVQTIPGNSTCADCGARNPAWASWSLGIFLCMRCAAIHRKLGTHISKVKSLSMDSWTNDQVDSMRKIGNAVSNKKYNPQSKRPPVPVDADEADSAMERFIRSKYTQPEPRSPTTNGARRHNTGSSDEGTPPPLPPKTGGRFFKSATLPFRSKKETRSPRESSFPQSDVSPRLNRSSNVFGASVHNDGPEDTARKLTQLRDMGFTDDKRNAMVLKGVNGNLEKTVEALIRLGEGNGSISPVVTTSRDPFSSRSLTPKPTKSPMNGLSLASKPSPPLPVQSPSTSSNNDPWEIQPAPPQSSQSTGTLQNKNPFYNTNTTNPFGIPNQQNDFALNQSLQNLSLTQSQPQQQLFPNHTGGAPMSQPMAQQLYQQSQTPPVPQMPSFASMTFNNNQTYPQPVQPVQQSPQHNHNPFLQAPATPQQPLSLNTGMYQPQGAYGSNPFTKSPTRLGSPMLNQIPEQVQQNVYSSPQSQFSSNPFMSQPATQSPLSAPPLSAQPQQQQWYQSPQPAQMSQPAQQQQEWYQTQQPAQLPQQSYQPQRQDSASIMALYNYPHLAPARTGMQTPEQGNMNAFTANQAPAQAQVPTPIHQSPSGATKNPFLNNTASQPTSPFGAATQQASPFGTANPGSSARSRESMMLGMEMAWNNGRHSPDAFASLSARSG

SEQ ID NO: 17702 - DNA, 3179 bp, Muscodor strobelii
  misc_feature: SGI EST ID NO. CUFF.41654.0
  misc_feature: Variant of the nucleotide sequence at SEQ ID NO 17700
ccagaaacccaagctaagaataacccctcaagccagcacatggcatgctcgaatgtcttttctagaagcacgggtggtacgtcaaagtgactgtatcattgcgcgtcgcactctctcatcattacttgggaatctctgttggtatcttcgagacgtggtataagtaaattggaataagttgattgagttttggcaggccgcatcaggtgtgtttcagctgcgattcgagtttctttgagctggggagagaaaaaccaattcatcgtcatctgcattcaattccccaaccgggttttgctgccccggtcgtattcccatttgtcgtcctgaatttattcgagctgcgactcgccctcgcacacgtacacaggtcgcgcagcatcgaaggctggtgctacagcaaagcaacatcgatcccgacccgagtcagttgggtctactctgtccaactcactcttctccaaccagcaactgctatttggtattcagccatctactaaacgaattatctggctatcgatcccaccaccactcgacgtacgacgctgctgacacgacaaccccctggctggattggattggattggacgatcaagccctggtcaataacccgccctccattattcaacgcccgccctccaacctgagcctcactgtccgcttgcgcaaccaaaagttgttccacccggtttttgtgtctttggtcgacgttactccgatcctaccaccaccacactaccgcaccacatcagccgccgaacgcctctcttcttggcggtagcgcgcattgcctaccctccgaataaggacgcgcatgctcacattttctctcttgcacacgaaccagacatgtcgggcctcatgagcaagcgccagcaggctcgcaacgagcgcgctttgcaagacctggtgcagaccattccgggcaatagtacttgtgccgattgtggcgccagaaacccagcttgggcatcatggagtttggggatctttctctgcatgcgatgcgctgccatccatcggaagctggggacgcacatctccaaggtcaagtcgctgagcatggacagctggaccaacgaccaggttgatagcatgaggaaaataggcaatgccgtctccaacaaaaagtacaacccgcagagcaagcggccacccgttcccgtcgacgccgacgaagccgactccgccatggagcgattcattcgatccaagtacacacagcccgaacctcgaagtcctaccacgaacggcgccaggagacacaacaccggaagctcagacgaaggaacaccgccgcccctcccgcccaagacggggggtcggttcttcaagtcagcgactctgccgttccgatctaagaaagaaacgcggagtcctcgcgaaagctcctttccccagtccgatgtatcaccgagattgaataggtcctcgaacgtgtttggagctagtgttcacaatgacggccctgaagataccgcgcggaagctgacacagctgcgcgatatgggattcaccgacgacaagcgcaatgccatggtcttgaagggtgttaatggcaacctggaaaagacggtggaggctctaattcggctgggcgaagggaacgggagtatctcgccggtcgttacgacatcgcgagatcccttttcatcaaggtcactcaccccgaaaccgacgaaatcccccatgaatgggctatcactagcgtcgaaaccgagtccaccgcttcctgttcagtctccatcgacatcgtctaataacgatccttgggaaatacagcccgcgccaccacagtcatcacagtccaccgggacactgcaaaataagaaccctttttataatactaatactaccaatcctttcggtatacccaaccagcaaaatgatttcgcgctcaaccagtctctacaaaatctttctttaacacagtcccagccgcaacagcagctcttccccaatcatactggaggagcacccatgtcgcagcccatggcacagcagttgtatcagcaatcacagactccgcctgtaccacaaatgccaagcttcgcatccatgacgttcaacaataatcagacgtatcctcaacccgttcaacccgttcagcagtcgccacagcacaaccacaacccttttctccaggctccagccacaccacaacagcccttgtcacttaatacgggcatgtatcaacctcaaggcgcgtacggaagtaatcccttcacgaagtcgccaaccaggcttggatccccaatgctcaaccagatcccagagcaagtccagcagaatgtgtatagctcgccccagtcgcagttcagtagtaaccctttcatgtcacaaccagcaacgcagtcacctctgtctgctccgcccctatctgctcaaccacagcaacagcaatggtatcagagtccacagcctgctcagatgtctcagcctgcccagcagcagcaagagtggtatcaaacgcagcaaccagcccaacttccgcagcagagctatcagccccagcgacaagactcggcgtccattatggcgctatacaactatccgcatctcgctcccgcccgtacaggaatgcagactccggagcaaggcaatatgaatgcattcaccgcgaatcaggcccctgcgcaagcgcaagtccccacaccgatacaccaaagtccatcgggcgctacgaagaacccatttttgaataatacagcgtctcaaccaacttccccgtttggagcagcgactcaacaagcttcgccatttggaacagcgaacccggggtcgagtgccaggagtcgcgagagcatgatgctgggcatggagatggcgtggaataatggacggcatagtcctgatgcttttgcgagcttgagtgcgaggagtggatgatgggttcaagtataataggctcaagggttttggtggcgtgatatagttgggatgtgatgtacacaaacttcgcagacttcgcggccatgtgtagtgtgcagtgtatataatggagcgatgttgatcgtaggagatcatctgtatagatatgaagctgaagcatttgccatgagtatatggtgtaatattgagttttttttgggatttcgacaaaaaaatatagaggggaaagtttgttgatttgcctggttttgtttgtgtgtttgttgataccggagaatatatacatg

SEQ ID NO: 17703 - DNA, 1317 bp, Muscodor strobelii
  misc_feature: SGI cDNA ID NO. 565919
  misc_feature: Encodes the peptide sequence at SEQ ID NO 17704
atgaagctgttcacctccctattcattgtcctcaatactttacctatcgtgacgatggcgaatcccaacaatctgggactggaatatgaagcaacattcacagacgacatcacacccttcagcatcaacgtccacgaggacttcctaaacctcaccgcactcaaagtctcacttacacgcttcgtcgacgaggtaccgctgcccgatttctccgaaggcgtaccaacccggatcgagaaatccatcgcctcatactggacatcgacctacgactggcgtcaagtcgaagcatcaatcaactcaaatctcacccaattcaccaccatcgtcaatccctccgcctcaccagcaaactacacaactcccgtcccactgcacttcgtacaccaccgctcaccccgctcagacgccatccccttgctcttcgtccacggctggccaggctcattcctagaagtcgagcccatcatctctgcactcacaaacccacccaatgcctccttaccggcattccacgtcgtggccccctccatcccaggctacggcttcagcccatccccacgagtcccaggatttgggtaccgagccgcaggcgcgacattccacgccctcatgctgaaactggggtacgacaaatacgtgttccaaggcggagacgcaggggatctcataaatcggtacgcggctcacgatttcccgtcctcgatcgtttccggactctccaatttctgggtgataccacccacggcctcagatcgagagcggtaccgccttaatgaaacaacccctgatgaaaactatgtcatcgcgcatttagacggattttacgccactagttgggcgtacgcgcaaatccaacagactcgcccattgaagctggctggcgggatgacggacagccccatgggattggcgatgtggatatacgacagtgtcgccggcgggaacccgaataatgatctttggacgtatgacaggattattacttggactatgatgcattggattaatgggccttatggtgcttttagtctgtacaggaatggtgcgaaggtcgacggtgcgattgacaccaacgggattcatttactgccctatgtctcgcagcccgtggctatctcgcagtttccgggggatttgtggtataggacgccgttggagtgggcgttgagaggggggaacgtcaaggttaataggcttcatgataaggggggtcattttgcgagtctcgatgctacggagctgttgcttgatgatatttggagtttctttggggatggggaggtgtcgaatactaaagtttttagggatgtttga

SEQ ID NO: 17704 - protein, 438 aa, Muscodor strobelii
  misc_feature: SGI Peptide ID NO. 565919
  misc_feature (38)..(157): Pfam Id: PF06441 Pfam Desc: Epoxide hydrolase N terminus
  misc_feature (171)..(236): Pfam Id: PF00561 Pfam Desc: alpha/beta hydrolase fold
  misc_feature (125)..(157): Pfam Id: PF06441 Pfam Desc: Epoxide hydrolase N terminus
  misc_feature (38)..(101): Pfam Id: PF06441 Pfam Desc: Epoxide hydrolase N terminus
  misc_feature (39)..(429): NCBI GI: 256723473 Blast Desc: NECHADRAFT_5165 [Nectria haematococca mpVI 77-13-4]
  misc_feature (16)..(435): NCBI GI: 256735680 Blast Desc: NECHADRAFT_75778 [Nectria haematococca mpVI 77-13-4]
  misc_feature (156)..(437): NCBI GI: 156062760 Blast Desc: SS1G_01496 [Sclerotinia sclerotiorum 1980] gi|154696832|gb|EDN96570.1| SS1G_01496 [Sclerotinia sclerotiorum 1980]
  misc_feature (36)..(424): NCBI GI: 145251818 Blast Desc: An16g01090 [Aspergillus niger] gi|134082961|emb|CAK97704.1| protein product [Aspergillus niger]
  misc_feature (36)..(425): NCBI GI: 116203331 Blast Desc: CHGG_09550 [Chaetomium globosum CBS 148.51] gi|88178068|gb|EAQ85536.1| CHGG_09550 [Chaetomium globosum CBS 148.51]
  misc_feature (33)..(434): NCBI GI: 46109710 Blast Desc: FG01737.1 [Gibberella zeae PH-1]
  misc_feature (38)..(432): NCBI GI: 67538184 Blast Desc: AN5262.2 [Aspergillus nidulans FGSC A4] gi|40743022|gb|EAA62212.1| AN5262.2 [Aspergillus nidulans FGSC A4] gi|259485309|tpe|CBF82221.1| TPA: Epoxide hydrolase nidulans
  misc_feature (38)..(424): NCBI GI: 169771791 Blast Desc: [Aspergillus oryzae RIB40] gi|83768224|dbj|BAE58363.1| protein product [Aspergillus oryzae]
  misc_feature (37)..(427): NCBI GI: 261354772 Blast Desc: epoxide hydrolase [Verticillium albo-atrum VaMs.102]
  misc_feature (44)..(432): NCBI GI: 115390549 Blast Desc: ATEG_03601 [Aspergillus terreus NIH2624] gi|114193703|gb|EAU35403.1| ATEG_03601 [Aspergillus terreus NIH2624]
  misc_feature (35)..(425): SWISSPROT Homolog: EC 3.3.2.9 Microsomal epoxide hydrolase
MKLFTSLFIVLNTLPIVTMANPNNLGLEYEATFTDDITPFSINVHEDFLNLTALKVSLTRFVDEVPLPDFSEGVPTRIEKSIASYWTSTYDWRQVEASINSNLTQFTTIVNPSASPANYTTPVPLHFVHHRSPRSDAIPLLFVHGWPGSFLEVEPIISALTNPPNASLPAFHVVAPSIPGYGFSPSPRVPGFGYRAAGATFHALMLKLGYDKYVFQGGDAGDLINRYAAHDFPSSIVSGLSNFWVIPPTASDRERYRLNETTPDENYVIAHLDGFYATSWAYAQIQQTRPLKLAGGMTDSPMGLAMWIYDSVAGGNPNNDLWTYDRIITWTMMHWINGPYGAFSLYRNGAKVDGAIDTNGIHLLPYVSQPVAISQFPGDLWYRTPLEWALRGGNVKVNRLHDKGGHFASLDATELLLDDIWSFFGDGEVSNTKVFRDV

SEQ ID NO: 17705 - DNA, 1701 bp, Muscodor strobelii
  misc_feature: SGI EST ID NO. CUFF.41617.0
  misc_feature: Variant of the nucleotide sequence at SEQ ID NO 17703
caacgattgattggccggacgtatctactcgttttcccgtctgtatatataaggtacctaaatggagttgagttcgcaacctagaggaggtctgctcttacaccaccccttatgacaacttattcaaaagacaagatgaagctgttcacctccctattcattgtcctcaatactttacctatcgtgacgatggcgaatcccaacaatctgggactggaatatgaagcaacattcacagacgacatcacacccttcagcatcaacgtccacgaggacttcctaaacctcaccgcactcaaagtctcacttacacgcttcgtcgacgaggtaccgctgcccgatttctccgaaggcgtaccaacccggatcgagaaatccatcgcctcatactggacatcgacctacgactggcgtcaagtcgaagcatcaatcaactcaaatctcacccaattcaccaccatcgtcaatccctccgcctcaccagcaaactacacaactcccgtcccactgcacttcgtacaccaccgctcaccccgctcagacgccatccccttgctcttcgtccacggctggccaggctcattcctagaagtcgagcccatcatctctgcactcacaaacccacccaatgcctccttaccggcattccacgtcgtggccccctccatcccaggctacggcttcagcccatccccacgagtcccaggatttgggtaccgagccgcaggcgcgacattccacgccctcatgctgaaactggggtacgacaaatacgtgttccaaggcggagacgcaggggatctcataaatcggtacgcggctcacgatttcccgtcctcgatcgtttccggactctccaatttctgggtgataccacccacggcctcagatcgagagcggtaccgccttaatgaaacaacccctgatgaaaactatgtcatcgcgcatttagacggattttacgccactagttgggcgtacgcgcaaatccaacagactcgcccattgaagctggctggcgggatgacggacagccccatgggattggcgatgtggatatacgacagtgtcgccggcgggaacccgaataatgatctttggacgtatgacaggattattacttggactatgatgcattggattaatgggccttatggtgcttttagtctgtacaggaatggtgcgaaggtcgacggtgcgattgacaccaacgggattcatttactgccctatgtctcgcagcccgtggctatctcgcagtttccgggggatttgtggtataggacgccgttggagtgggcgttgagaggggggaacgtcaaggttaataggcttcatgataaggggggtcattttgcgagtctcgatgctacggagctgttgcttgatgatatttggagtttctttggggatggggaggtgtcgaatactaaagtttttagggatgtttgatagctaaagcagacggggtttgggtgttgcgccatgtttgcggtcttggtcttacaagactggattcttgatgatttgtattgctgtcgaacccctatcaagtgcatgcgtcctagcacgaggatgcaaggggtttatggacggtagtatttcaggcgtgcctcatcttagaccacgagctatcgtgcatgcgatacaaactagttgagtatattaatagatttgtccattgtagaaggttgatctggg

SEQ ID NO: 17706 - DNA, 903 bp, Muscodor strobelii
  misc_feature: SGI cDNA ID NO. 565920
  misc_feature: Encodes the peptide sequence at SEQ ID NO 17707
atgtctatcgccaagtatgaagacagtggtccggttgacctcagtcctgcattggatgcgaacaaattgacaggaaaatcagtcatcatcactggcggagcaaaaggcctaggtctagcgtatgcaaaagccttttttgcagcgggcgcgttcgtgacaattggtgatcttgacgaagtctcggggaacgcggttgaagcagagcatgcgttaaacctaaaattcgtcaaatgcgatgtgtgtgactgggatagtcaagttgcgcttttcgaggcggcgatcacagcatcgccatggaaggctatcgacattgtcgtcacgaacgctggagtctttggtgacgatgatgttgcaagtctgcaagatccatctggtccgccccaaaagccagatctacggatcctcgaaacgaatctaatcggctcagtgtacacagctaagctagctatgcattatttccgaaggcaagacgccaacaacccattctgcgatagatgtcttatcatcaaaggcagtctctccgcttatctagaccagccaggtgtcgtgcagtacaacgtgtcgaaattcggtacccgtggactgtttcgcacacttcggcggacgagctggagggaggggattcgtgtaaattttgtcgctccttggtatgtccgtacggcgctactctctcacgtatccgagtatctcgattcgcaaggcgtcaaatgggcatctgtcgaagattgcacagaggtggtcttgaagatcgcttcgaatcggacgatgaatggccgagcaattgcagttgcgcctcgagagcaggtgcctgaagggtactgggatcttgcgctcgatgattacaagaacggcgaggttattaaggagttccaggacatagtgattgcgacaagtggcacttga

SEQ ID NO: 17707 - protein, 300 aa, Muscodor strobelii
  misc_feature: SGI Peptide ID NO. 565920
  misc_feature (26)..(204): Pfam Id: PF00106 Pfam Desc: short chain dehydrogenase
  misc_feature (26)..(120): Pfam Id: PF00106 Pfam Desc: short chain dehydrogenase
  misc_feature (1)..(293): NCBI GI: 240273855 Blast Desc: conserved [Ajellomyces capsulatus H143]
  misc_feature (33)..(293): NCBI GI: 225555400 Blast Desc: conserved [Ajellomyces capsulatus G186AR]
  misc_feature (1)..(283): NCBI GI: 46140069 Blast Desc: FG11549.1 [Gibberella zeae PH-1]
  misc_feature (1)..(281): NCBI GI: 261360912 Blast Desc: AdhA [Verticillium albo-atrum VaMs.102]
  misc_feature (3)..(292): NCBI GI: 119482187 Blast Desc: short chain dehydrogenase/reductase family oxidoreductase, [Neosartorya fischeri NRRL 181] gi|119409276|gb|EAW19225.1| short chain dehydrogenase/reductase
  misc_feature (2)..(285): NCBI GI: 259489793 Blast Desc: TPA: short chain dehydrogenase/reductase, (AFU_orthologue; AFUA_2G16570) [Aspergillus nidulans FGSC A4]
  misc_feature (1)..(283): NCBI GI: 256722354 Blast Desc: [Nectria haematococca mpVI 77-13-4]
  misc_feature (1)..(285): NCBI GI: 39975591 Blast Desc: MGG_00058 [Magnaporthe grisea 70-15] gi|145019109|gb|EDK03388.1| MGG_00058 [Magnaporthe grisea 70-15]
  misc_feature (6)..(292): NCBI GI: 169782317 Blast Desc: [Aspergillus oryzae RIB40] gi|83774364|dbj|BAE64488.1| protein product [Aspergillus oryzae]
  misc_feature (6)..(291): NCBI GI: 154304720 Blast Desc: BC1G_08099 [Botryotinia fuckeliana B05.10] gi|150853999|gb|EDN29191.1| BC1G_08099 [Botryotinia fuckeliana B05.10]
MSIAKYEDSGPVDLSPALDANKLTGKSVIITGGAKGLGLAYAKAFFAAGAFVTIGDLDEVSGNAVEAEHALNLKFVKCDVCDWDSQVALFEAAITASPWKAIDIVVTNAGVFGDDDVASLQDPSGPPQKPDLRILETNLIGSVYTAKLAMHYFRRQDANNPFCDRCLIIKGSLSAYLDQPGVVQYNVSKFGTRGLFRTLRRTSWREGIRVNFVAPWYVRTALLSHVSEYLDSQGVKWASVEDCTEVVLKIASNRTMNGRAIAVAPREQVPEGYWDLALDDYKNGEVIKEFQDIVIATSGT

SEQ ID NO: 17708 - DNA, 1840 bp, Muscodor strobelii
  misc_feature: SGI EST ID NO. CUFF.41620.0
  misc_feature: Variant of the nucleotide sequence at SEQ ID NO 17706
ccaatgtgggggtctaggcacctcattcacgatcgaagggagtgcgtcgggggccgaactctaagggcctccacttttttctaatattctgttgtgcgtatatgccgttgcctcatgattccgggttgaagtagatcacagctggatgaccatgcagtgcttcccaagacctgtagtatttggcggggaacggactccgattcgatttgtctccaattccacagtcttttcagcttctcgaattctacggcccgccctatcagagcttccgctctagcctctttatactgtccaagatatcacttgacagctgaaaatgatggctgcagataggaatcgatatagatataaaagctgggttcctgtgtcgctcctttgatctatcatcgaaccctcatgactctctcatagatgctcaacagatctgttatatattcaataattcaagtattctcagttgtgcatgtctgtttttaaactgcaggctgactaggctaactctcactgaacctatctaatgtctatcgccaagtatgaagacagtggtccggttgacctcagtcctgcattggatgcgaacaaattgacaggaaaatcagtcatcatcactggcggagcaaaaggcctaggtctagcgtatgcaaaagccttttttgcagcgggcgcgttcgtgacaattggtgatcttgacgaagtctcggggaacgcggttgaagcagagcatgcgttaaacctaaaattcgtcaaatgcgatgtgtgtgactgggatagtcaagttgcgcttttcgaggcggcgatcacagcatcgccatggaaggctatcgacattgtcgtcacgaacgctggagtctttggtgacgatgatgttgcaagtctgcaagatccatctggtccgccccaaaagccagatctacggatcctcgaaacgaatctaatcggctcagtgtacacagctaagctagctatgcattatttccgaaggcaagacgccaacaacccattctgcgatagatgtcttatcatcaaaggcagtctctccgcttatctagaccagccaggtgtcgtgcagtacaacgtgtcgaaattcggtacccgtggactgtttcgcacacttcggcggacgagctggagggaggggattcgtgtaaattttgtcgctccttggtatgtccgtacggcgctactctctcacgtatccgagtatctcgattcgcaaggcgtcaaatgggcatctgtcgaagattgcacagaggtggtcttgaagatcgcttcgaatcggacgatgaatggccgagcaattgcagttgcgcctcgagagcaggtgcctgaagggtactgggatcttgcgctcgatgattacaagaacggcgaggttattaaggagttccaggacatagtgattgcgacaagtggcacttgaatcgagccacgtgtcgaaaattacacgtacttcaattcgagatgaattagtgaccaagagagaaaaaaaaggacttagcctttttttcgaactatggtattcgaacaggatacttcaaagatacattctagtaatgaaatatgccttcaatcataccaataggttaaacccactacgggtgatgaatggccatgttatttggattgataaggtcgtgcggtttctggagtgttgttgtgggaaactgggaggttactgtggtagaccccacgtcggtttcaaaattgccatgcgacttgaaaactacggcgacgacaccaaccccatatgacagaatgacatcagacgtcaattacaatgcgaaaatctgatgtgctatgtcgttggcgtgcgaccaccaacgtgctcaacgcgtcagaa

SEQ ID NO: 17709 - DNA, 2433 bp, Muscodor strobelii
  misc_feature: SGI cDNA ID NO. 565921
  misc_feature: Encodes the peptide sequence at SEQ ID NO 17710
atgccatcgaaaaaggatagcaaacgaccgagtcgcatagccgagagcttttctgggctgcatctaaaaacattcaaataccaaagtctgcgcaagccgacaaacatcagagtcattcgcatcttaccagacgacggctcaggtcttctaaagtgcagtctagaggaagtagatctggaccagaatccgggatacaatgcgctatcttacagctggaattacgacagcgatgtgttctggcgctacttgaagcaaggccagaaatggattccaggcagcgccggcaagcgctggattgtcgtcaacggcgcgcggttctcgatcctattgaatttatataatgctttgatcaactttcgtgaggacaatgaactgagttaccggggtattaagagcagtgctctgcctctttgggttgatgcattgtgcattaaccaggaagataaggcagaacgcgtgagtcaggtcaacatgatgcagcgcatatatcgaggcgccgatactgttgccgtgtggctaggcatgtcgacatacggcagtaagcgcgggcttgagttcatcgagagtctacctgatttcagccccgacgatatgcctgtctctcctagagcgagtcctgtaccgttacgagctggaccgtacagacctgatttggtgtactgggcaacttatacagcagtcaatacgttcttctctcggttgtggttccataggacgtgggtacttcaggagttcgtgctagcccagaggatcgagttctggctgggtcatcatctcatcaaggaacagacgttcacgaatggatggcgctggatgaacgctgcgacgccggtcatgctctcagttcacgagattgccgatagagtcagcaatgcatcggctgctctgtattggcgcacgaggtttcaagcaggtcaacagctgctcgaggctcgagcaagagcacaaaaggggattctgatgtctctacctgaggctctaaacctagcgcgcagttgtttagtcagcaaacctcaagacaagatcttcggcgtgctttcgctagttgatcaaaatgctgagccattgcctcccgtcgattatgacgctaatatcctcgatgtatacctcgactgtgcggcactgctgctgaatggaaagacgggaatttcgatattatcaatgatagaccacacaccacaagcaccttggataccgggcgggaagcccgtccctgaaataagtgataaagcgaaggcggaaaaacggttctggcctgcattccatcagcgcgttaagggcctaccgtcatggtgtccggacttcacgcaagtccccaggccggctcccttatcagagctatgcggcacaaatatctttaatgcggctggatacacaaccgcacgcttcaagcttaccaattcaggctcttggcttgaggtagatgcatatcggtttgacacgatcactgacactgctgaggactactctggttttactatggcggcacgcggcctcttgaattgccattttctgagattactcgtcagcttgggcacagtatatgagccgacgggacaaccggcaatcgaggcactctggcgtaccttgatagcagactccaatgacatagtcgagagagactatgcatctccacaaggaagacgtctcgaggcagcgcgagagattttgactgcgctgttcgccactggtgatagggacgaggacatagaaagtgcgataggttacggacaggtgacatcagaaatgaggcgagaagctggtaacgatgtacctgtcgatgacccacaagcaaagatccaacacccagcttcttcagatctcgccgctttgttcggcgaatggctccatcaaatcatcgaggataaaaacgaaattgtcgatcgttcactactatggaagggtatgatactcgtggcattccggcatgagtataagtcagcagaaccggcatacggactttgctacgaggaaataccaaatttctggtcgcaggtggttaatcgatttgacgataatcacacctatcaattccgtcagtggtggcttagggataatatggataaaggtaatgtcctcatgtcgaagaaatggccagatgagtaccaaaatacaaggcctgctgcccttgctgagcgaaagatgcggatatggccgtggacgagggcgtttcagagaaacttcatggataggagattatttaagacaagtaagggctatatcgggactggaccctggaccctgacggagggtgatgttgtgggtgttgtaaaggggtcgaaggttccgtatttgttccgctacctcgggcgttcgacgagtgacaatagtgtttgttggcgtattgtgggcgaggcgtatgttcatgggattatgcatggagaggtattgagtatggaggatgttaagttggagactttccagcttatttga

SEQ ID NO: 17710 - protein, 810 aa, Muscodor strobelii
  misc_feature: SGI Peptide ID NO. 565921
  misc_feature (65)..(244): Pfam Id: PF06985 Pfam Desc: Heterokaryon incompatibility protein (HET)
  misc_feature (135)..(185): Pfam Id: PF06985 Pfam Desc: Heterokaryon incompatibility protein (HET)
  misc_feature (25)..(809): NCBI GI: 171678233 Blast Desc: protein product [Podospora anserina] gi|170937186|emb|CAP61843.1| protein product [Podospora anserina]
  misc_feature (25)..(810): NCBI GI: 116205716 Blast Desc: CHGG_02151 [Chaetomium globosum CBS 148.51] gi|88182748|gb|EAQ90216.1| CHGG_02151 [Chaetomium globosum CBS 148.51]
  misc_feature (25)..(796): NCBI GI: 256731912 Blast Desc: NECHADRAFT_100683 [Nectria haematococca mpVI 77-13-4]
  misc_feature (38)..(534): NCBI GI: 154313282 Blast Desc: BC1G_05338 [Botryotinia fuckeliana B05.10] gi|150849407|gb|EDN24600.1| BC1G_05338 [Botryotinia fuckeliana B05.10]
  misc_feature (25)..(546): NCBI GI: 256721874 Blast Desc: NECHADRAFT_88090 [Nectria haematococca mpVI 77-13-4]
  misc_feature (35)..(400): NCBI GI: 169622599 Blast Desc: SNOG_14524 [Phaeosphaeria nodorum SN15] gi|111056944|gb|EAT78064.1| SNOG_14524 [Phaeosphaeria nodorum SN15]
  misc_feature (23)..(484): NCBI GI: 256723655 Blast Desc: NECHADRAFT_52103 [Nectria haematococca mpVI 77-13-4]
  misc_feature (25)..(795): NCBI GI: 168037338 Blast Desc: [Physcomitrella patens subsp. patens] gi|162677541|gb|EDQ64010.1| [Physcomitrella patens subsp. patens]
  misc_feature (19)..(392): NCBI GI: 256728382 Blast Desc: NECHADRAFT_87764 [Nectria haematococca mpVI 77-13-4]
  misc_feature (99)..(450): NCBI GI: 238492901 Blast Desc: AFLA_042250 [Aspergillus flavus NRRL3357] gi|220696181|gb|EED52523.1| AFLA_042250 [Aspergillus flavus NRRL3357]
MPSKKDSKRPSRIAESFSGLHLKTFKYQSLRKPTNIRVIRILPDDGSGLLKCSLEEVDLDQNPGYNALSYSWNYDSDVFWRYLKQGQKWIPGSAGKRWIVVNGARFSILLNLYNALINFREDNELSYRGIKSSALPLWVDALCINQEDKAERVSQVNMMQRIYRGADTVAVWLGMSTYGSKRGLEFIESLPDFSPDDMPVSPRASPVPLRAGPYRPDLVYWATYTAVNTFFSRLWFHRTWVLQEFVLAQRIEFWLGHHLIKEQTFTNGWRWMNAATPVMLSVHEIADRVSNASAALYWRTRFQAGQQLLEARARAQKGILMSLPEALNLARSCLVSKPQDKIFGVLSLVDQNAEPLPPVDYDANILDVYLDCAALLLNGKTGISILSMIDHTPQAPWIPGGKPVPEISDKAKAEKRFWPAFHQRVKGLPSWCPDFTQVPRPAPLSELCGTNIFNAAGYTTARFKLTNSGSWLEVDAYRFDTITDTAEDYSGFTMAARGLLNCHFLRLLVSLGTVYEPTGQPAIEALWRTLIADSNDIVERDYASPQGRRLEAAREILTALFATGDRDEDIESAIGYGQVTSEMRREAGNDVPVDDPQAKIQHPASSDLAALFGEWLHQIIEDKNEIVDRSLLWKGMILVAFRHEYKSAEPAYGLCYEEIPNFWSQVVNRFDDNHTYQFRQWWLRDNMDKGNVLMSKKWPDEYQNTRPAALAERKMRIWPWTRAFQRNFMDRRLFKTSKGYIGTGPWTLTEGDVVGVVKGSKVPYLFRYLGRSTSDNSVCWRIVGEAYVHGIMHGEVLSMEDVKLETFQLI

SEQ ID NO: 17711 - DNA, 1800 bp, Muscodor strobelii
  misc_feature: SGI cDNA ID NO. 565922
  misc_feature: Encodes the peptide sequence at SEQ ID NO 17712
atggtcatcgcgcaggtaattattcaggacacatggactaacgacgagatcgaacgagagttctactttcacagcagtcattccgacggcgcatgcgggttggagaggccccttcgttcagatccagtccctgatgacattaaagacgacgatgaagacgacgatgaagatgacgacgaagatgaaacgccgtacggggttctctcggcttgggctgatcttcaacttgcccgatcatggatcgaagaatgcagtacacagcatgtcaactgccaacccattattcctaaggcggagctacacccgtcgacaaaatttattgacacaaagctgagacgccttgtagttctaagccaattagatgaggcgcctatcaagtttgtcgctctcagctacgtctggggtgccgcctatcaattgcgaacaaccaatgcaacgatcgggcaatatctggagtttctcccgcaggcagcaagtgaggaatccagcgatgacaggatgccgaatacgattgaagattctatcaaagtgactcttgccttaggctaccgttacctttgggtcgatgctctttgcatcattcaagactcccccgaggatcttgagacccagttggtgcagatgaaccatatatatgggttggccgccgtgaccatcgtggcgcggtcgagtgtgtcttcagacagcgggttgcccggtatctccgtgtctcgcaactggctcaacggtgataatctcacctgtcaactcagtgacgggctcacaattggcccgtgggacgtactagaccgtgattacgagaaatacgaagaaatggacgggattctggcagacacatcctgctatatgtggcgtggctggacattccaggagcaaatcttgtccacgcgcacgcttgaattcaaccgccgacgcttagttttctggtgcgggcgcgaagaacccgccgtggaatgcggcacgtcgcctatatcagagatgagagacgtgcatcattttcgcagatctatcagaaagtatttagagacagacggcttggtccctgtgggagaagaggcatggaaatacatgacccggggtatgctacttagtcgctggaacactatccgtgagaatttcaccacaaggcactttacttacgtaagcgatcgacaaaacgctgtgctcggcactgcttctatgctgaggcacgtcctcggcgatgttgacaacagcggtcacgtccttagccaaataggcagtgagttgctgtggcacagggacttgaatcccggctggaacgttaaccaggcaccagccgtgaaactctcctataaacaagcagatccagggatgtatccatcatggtcgtggctcagcctgtggccactcagctggcccggcgagtacaaaccctttccgggcgtcgtcgttcatctgaaagatgctagcggtggcaatgtactcgagatccagggcctgggtcttgaaatgagcgctgtagacggcgggccagatgacaaagccgacgcagctatcttgtactacgccgatggaagtgattcaaggttcgaggtataccttgatcggtctttggagacaagaaccgtagtcacttgtgccccaattgcttcaacaatccatggtggaacccgcatgtatggatggtgctatggcatgttgttgcttcgcgaaattgacggcgagcgattcaagagagttggagttgcgtttgctcttgagaaggaagactttgctgcagagttcttgaagcgtattcactcgggacaggcccgtcaatgtactatggtatgtgtctga

SEQ ID NO: 17712 - protein, 599 aa, Muscodor strobelii
  misc_feature: SGI Peptide ID NO. 565922
  misc_feature (127)..(291): Pfam Id: PF06985 Pfam Desc: Heterokaryon incompatibility protein (HET)
  misc_feature (127)..(235): Pfam Id: PF06985 Pfam Desc: Heterokaryon incompatibility protein (HET)
  misc_feature (73)..(454): NCBI GI: 256725880 Blast Desc: NECHADRAFT_82031 [Nectria haematococca mpVI 77-13-4]
  misc_feature (50)..(453): NCBI GI: 115389134 Blast Desc: [Aspergillus terreus NIH2624] gi|114194468|gb|EAU36168.1| [Aspergillus terreus NIH2624]
  misc_feature (81)..(503): NCBI GI: 115387687 Blast Desc: [Aspergillus terreus NIH2624] gi|114195433|gb|EAU37133.1| [Aspergillus terreus NIH2624]
  misc_feature (73)..(451): NCBI GI: 39946810 Blast Desc: MGG_08495 [Magnaporthe grisea 70-15] gi|145012335|gb|EDJ96991.1| MGG_08495 [Magnaporthe grisea 70-15]
  misc_feature (66)..(454): NCBI GI: 256722024 Blast Desc: NECHADRAFT_86169 [Nectria haematococca mpVI 77-13-4]
  misc_feature (60)..(451): NCBI GI: 115433588 Blast Desc: [Aspergillus terreus NIH2624] gi|114189783|gb|EAU31483.1| [Aspergillus terreus NIH2624]
  misc_feature (70)..(451): NCBI GI: 168042178 Blast Desc: [Physcomitrella patens subsp. patens] gi|162675105|gb|EDQ61604.1| [Physcomitrella patens subsp. patens]
  misc_feature (68)..(314): NCBI GI: 171688824 Blast Desc: protein product [Podospora anserina] gi|170944374|emb|CAP70484.1| protein product [Podospora anserina]
  misc_feature (73)..(460): NCBI GI: 85083330 Blast Desc: NCU05115 [Neurospora crassa OR74A] gi|28881399|emb|CAD70440.1| related to tol protein [Neurospora crassa] gi|28918186|gb|EAA27865.1| [Neurospora crassa OR74A]
  misc_feature (72)..(451): NCBI GI: 168043854 Blast Desc: [Physcomitrella patens subsp. patens] gi|162674250|gb|EDQ60761.1| [Physcomitrella patens subsp. patens]
MVIAQVIIQDTWTNDEIEREFYFHSSHSDGACGLERPLRSDPVPDDIKDDDEDDDEDDDEDETPYGVLSAWADLQLARSWIEECSTQHVNCQPIIPKAELHPSTKFIDTKLRRLVVLSQLDEAPIKFVALSYVWGAAYQLRTTNATIGQYLEFLPQAASEESSDDRMPNTIEDSIKVTLALGYRYLWVDALCIIQDSPEDLETQLVQMNHIYGLAAVTIVARSSVSSDSGLPGISVSRNWLNGDNLTCQLSDGLTIGPWDVLDRDYEKYEEMDGILADTSCYMWRGWTFQEQILSTRTLEFNRRRLVFWCGREEPAVECGTSPISEMRDVHHFRRSIRKYLETDGLVPVGEEAWKYMTRGMLLSRWNTIRENFTTRHFTYVSDRQNAVLGTASMLRHVLGDVDNSGHVLSQIGSELLWHRDLNPGWNVNQAPAVKLSYKQADPGMYPSWSWLSLWPLSWPGEYKPFPGVVVHLKDASGGNVLEIQGLGLEMSAVDGGPDDKADAAILYYADGSDSRFEVYLDRSLETRTVVTCAPIASTIHGGTRMYGWCYGMLLLREIDGERFKRVGVAFALEKEDFAAEFLKRIHSGQARQCTMVCV

SEQ ID NO: 17713 - DNA, 1087 bp, Muscodor strobelii
  misc_feature: SGI EST ID NO. CUFF.41644.0
  misc_feature: Variant of the nucleotide sequence at SEQ ID NO 17711
ccgacgcttagttttctggtgcgggcgcgaagaacccgccgtggaatgcggcacgtcgcctatatcagagatgagagacgtgcatcattttcgcagatctatcagaaagtatttagagacagacggcttggtccctgtgggagaagaggcatggaaatacatgacccggggtatgctacttagtcgctggaacactatccgtgagaatttcaccacaaggcactttacttacgtaagcgatcgacaaaacgctgtgctcggcactgcttctatgctgaggcacgtcctcggcgatgttgacaacagcggtcacgtccttagccaaataggcagtgagttgctgtggcacagggacttgaatcccggctggaacgttaaccaggcaccagccgtgaaactctcctataaacaagcagatccagggatgtatccatcatggtcgtggctcagcctgtggccactcagctggcccggcgagtacaaaccctttccgggcgtcgtcgttcatctgaaagatgctagcggtggcaatgtactcgagatccagggcctgggtcttgaaatgagcgctgtagacggcgggccagatgacaaagccgacgcagctatcttgtactacgccgatggaagtgattcaaggttcgaggtataccttgatcggtctttggagacaagaaccgtagtcacttgtgccccaattgcttcaacaatccatggtggaacccgcatgtatggatggtgctatggcatgttgttgcttcgcgaaattgacggcgagcgattcaagagagttggagttgcgtttgctcttgagaaggaagactttgctgcagagttcttgaagcgtattcactcgggacaggcccgtcaatgtactatggtatgtgtctgaagagcaatgtatcaccatgctctggggagttgattgtgacacacaatgaaccagttcagctggaacactcagttaaagataggtctatgtatcccgtgtacatggaatatataaggtaagcgggaaataaaatcattggggaatatctgagcagtgtcacttttctgtcaatattccaaaaaaaaagagatgagt

SEQ ID NO: 17714 - DNA, 1524 bp, Muscodor strobelii
  misc_feature: SGI cDNA ID NO. 565923
  misc_feature: Elevated expression when VOC is produced
  misc_feature: Encodes the peptide sequence at SEQ ID NO 17715
atggacgagcaattcgtggggcaagcctaccagcggatcagagatgctgcgtccgtagcacctggcgatcatgcgccgacattgcccggtctaaacagaattttgcatgcaagatcaacactcccagatgcttcgagcaaggattatctcgcgggggtcgggcccaaggccacattcgagcatctcatgaatgacatcgtacctgggctcaatggcgaaaatcgaagtggtcgatattggggttttgtcacagggtctacgctcccaatcgccgaagtagcggacaacatcgtcactgcatatgatcaaaacgtccaagttcatttacctacgcagaccatcgccacggaggttgaggatgcagctttgaagatgatggttcatttactggaccttggcgaactcgacgagtgggagggcaggaccttcacgaccggagccactgcatgcaacatcctcggccttgcctgtggtcgtgaggttgtcgtggcctcaagactaccgaaagaatcgggtgctgtcggcgaacttggactcctgagagcgtgcaccaaggcaggcattgaagaaatccaagtgttgactagtatgggccacagctcgctctccaaggcggcatctgtggttggtctaggtcgaaactctgttaagcttgtgccgtacagcgatgcagagccatggcggttaaatctggacgctgttgaaaaagagctgcaacgtgaaaatgtagcaagtattcttgctatcagcgcgggcgaagtaaacaccggacgttttgccaccaacggcattgaggatatgcaacgccttcgaaacctggccgaccgttacaaagcatggatacatgttgatggagcatttgggatgttcgctcggactttacccaagactgaggaatacgccaccttgcatcaagcaaatgcaggcttggagctcgctgatagcatcacacttgacggacacaagtttctgaacgtcccttatgataacggaatcttcctaactcgcaaatcttcggtactcaacgatgtcttccaaaatcctaatgccgcttatctctcctctggttcaatatcgaaaatacaaagtccactcaatgtcgggcttgagaactcacgacgctttcgtgcccttccggtttacgccgttctgctaagcgagggaaagaaaggcatctcagcaatgatggagaacatggtacaaactgcgcgtgccatcgcgaagacaatcaaggcatctgatgattacattctcctcccaaattcaggcgccgatgcatctagtgtagagaacgatacgcacatcatcgtcctgttccgggccaaagatgatgccctgaacgaagttctagtacagaaaatcaacgaaggtaacaagtggtacgtcggcggtagtagatgggacggaaagccggctgtacgggtcgccgtatcgagctggagagctgatcgtgacgatgccatcaacactgttcgcgagtctcttgctgcgatagcccaggagcacaaacagtcacagacatga

SEQ ID NO: 17715 - protein, 507 aa, Muscodor strobelii
  misc_feature: SGI Peptide ID NO. 565923
  misc_feature (85)..(442): Pfam Id: PF00282 Pfam Desc: Pyridoxal-dependent decarboxylase conserved domain
  misc_feature (11)..(500): NCBI GI: 46137357 Blast Desc: FG10194.1 [Gibberella zeae PH-1]
  misc_feature (14)..(500): NCBI GI: 256732137 Blast Desc: [Nectria haematococca mpVI 77-13-4]
  misc_feature (2)..(507): NCBI GI: 39971851 Blast Desc: MGG_07241 [Magnaporthe grisea 70-15] gi|145019739|gb|EDK03967.1| MGG_07241 [Magnaporthe grisea 70-15]
  misc_feature (6)..(501): NCBI GI: 156055676 Blast Desc: SS1G_05190 [Sclerotinia sclerotiorum 1980] gi|154702974|gb|EDO02713.1| SS1G_05190 [Sclerotinia sclerotiorum 1980]
  misc_feature (52)..(495): NCBI GI: 154297951 Blast Desc: BC1G_12128 [Botryotinia fuckeliana B05.10] gi|150858255|gb|EDN33447.1| BC1G_12128 [Botryotinia fuckeliana B05.10]
  misc_feature (61)..(464): NCBI GI: 164426160 Blast Desc: NCU01147 [Neurospora crassa OR74A] gi|18376268|emb|CAD21382.1| related to L-2, 4-diaminobutyrate decarboxylase [Neurospora crassa] gi|157071221|gb|EAA31818.2|
  misc_feature (34)..(501): NCBI GI: 189200785 Blast Desc: pyridoxal-dependent decarboxylase [Pyrenophora tritici-repentis Pt-1C-BFP] gi|187983828|gb|EDU49316.1| pyridoxal-dependent decarboxylase [Pyrenophora tritici-repentis
  misc_feature (25)..(500): NCBI GI: 169618106 Blast Desc: SNOG_12241 [Phaeosphaeria nodorum SN15] gi|111059533|gb|EAT80653.1| SNOG_12241 [Phaeosphaeria nodorum SN15]
  misc_feature (28)..(500): NCBI GI: 238487576 Blast Desc: tyrosine decarboxylase, [Aspergillus flavus NRRL3357] gi|220699905|gb|EED56244.1| tyrosine decarboxylase, [Aspergillus flavus NRRL3357]
  misc_feature (28)..(500): NCBI GI: 169770069 Blast Desc: [Aspergillus oryzae RIB40] gi|83767363|dbj|BAE57502.1| protein product [Aspergillus oryzae]
  misc_feature (142)..(419): SWISSPROT Homolog: EC 4.1.1.86 Diaminobutyrate decarboxylase
  misc_feature: Useful for introducing or modulating the production of volatile compounds
MDEQFVGQAYQRIRDAASVAPGDHAPTLPGLNRILHARSTLPDASSKDYLAGVGPKATFEHLMNDIVPGLNGENRSGRYWGFVTGSTLPIAEVADNIVTAYDQNVQVHLPTQTIATEVEDAALKMMVHLLDLGELDEWEGRTFTTGATACNILGLACGREVVVASRLPKESGAVGELGLLRACTKAGIEEIQVLTSMGHSSLSKAASVVGLGRNSVKLVPYSDAEPWRLNLDAVEKELQRENVASILAISAGEVNTGRFATNGIEDMQRLRNLADRYKAWIHVDGAFGMFARTLPKTEEYATLHQANAGLELADSITLDGHKFLNVPYDNGIFLTRKSSVLNDVFQNPNAAYLSSGSISKIQSPLNVGLENSRRFRALPVYAVLLSEGKKGISAMMENMVQTARAIAKTIKASDDYILLPNSGADASSVENDTHIIVLFRAKDDALNEVLVQKINEGNKWYVGGSRWDGKPAVRVAVSSWRADRDDAINTVRESLAAIAQEHKQSQT

SEQ ID NO: 17716 - DNA, 1909 bp, Muscodor strobelii
  misc_feature: SGI EST ID NO. CUFF.41650.0
  misc_feature: Variant of the nucleotide sequence at SEQ ID NO 17714
gacgggcaacagaagaactgggacatcgtgaggatattcttgcacgtcatatctgtttctacaccattcgccatcagcgatatagatggaaccatagaaacattgatccccaagtatcaggattttggcgatggacgagcaattcgtggggcaagcctaccagcggatcagagatgctgcgtccgtagcacctggcgatcatgcgccgacattgcccggtctaaacagaattttgcatgcaagatcaacactcccagatgcttcgagcaaggattatctcgcgggggtcgggcccaaggccacattcgagcatctcatgaatgacatcgtacctgggctcaatggcgaaaatcgaagtggtcgatattggggttttgtcacagggtctacgctcccaatcgccgaagtagcggacaacatcgtcactgcatatgatcaaaacgtccaagttcatttacctacgcagaccatcgccacggaggttgaggatgcagctttgaagatgatggttcatttactggaccttggcgaactcgacgagtgggagggcaggaccttcacgaccggagccactgcatgcaacatcctcggccttgcctgtggtcgtgaggttgtcgtggcctcaagactaccgaaagaatcgggtgctgtcggcgaacttggactcctgagagcgtgcaccaaggcaggcattgaagaaatccaagtgttgactagtatgggccacagctcgctctccaaggcggcatctgtggttggtctaggtcgaaactctgttaagcttgtgccgtacagcgatgcagagccatggcggttaaatctggacgctgttgaaaaagagctgcaacgtgaaaatgtagcaagtattcttgctatcagcgcgggcgaagtaaacaccggacgttttgccaccaacggcattgaggatatgcaacgccttcgaaacctggccgaccgttacaaagcatggatacatgttgatggagcatttgggatgttcgctcggactttacccaagactgaggaatacgccaccttgcatcaagcaaatgcaggcttggagctcgctgatagcatcacacttgacggacacaagtttctgaacgtcccttatgataacggaatcttcctaactcgcaaatcttcggtactcaacgatgtcttccaaaatcctaatgccgcttatctctcctctggttcaatatcgaaaatacaaagtccactcaatgtcgggcttgagaactcacgacgctttcgtgcccttccggtttacgccgttctgctaagcgagggaaagaaaggcatctcagcaatgatggagaacatggtacaaactgcgcgtgccatcgcgaagacaatcaaggcatctgatgattacattctcctcccaaattcaggcgccgatgcatctagtgtagagaacgatacgcacatcatcgtcctgttccgggccaaagatgatgccctgaacgaagttctagtacagaaaatcaacgaaggtaacaagtggtacgtcggcggtagtagatgggacggaaagccggctgtacgggtcgccgtatcgagctggagagctgatcgtgacgatgccatcaacactgttcgcgagtctcttgctgcgatagcccaggagcacaaacagtcacagacatgaagttcaccctcgtgcaatcgcttcgggagtggacttcgtacctcatgacactcgtcattaatgacgctaattgctagcgcaggtcatcatgagaagaactatccatccgttcaaatcgtacatagcctgattctatcagagtatgcgagcggcccgtgataatacattaatataaatgatccagcatccatttcctaccattatgtcctccaatccaacctcaatatcaaggttttcaatagctctgctcggggc

SEQ ID NO: 17717 - DNA, 2283 bp, Muscodor strobelii
  misc_feature: SGI cDNA ID NO. 565924
  misc_feature: Encodes the peptide sequence at SEQ ID NO 17718
atggagcctcgaccagcaacaatgaattatcagacaactgtctttcgcgcacagcctacagatggcactcagcggaagatccagaagagaaacagacctcctgtcagttgtctgctatgtagaacgcgcaaggtgaaatgtgaccgacagcagccatgtgagagatgtgtcaagagtggtgaagcaaatttttgtgaatacgctccacgagctgctcgtaagacacgagggactgagactcgcgtgccaagtgagcctcgccaaaagcaggaggtcgcttcacgaccagtgcttcaagttcggttacagaagcttgaggagatggtgaatggccttgtcagcgctggcgcctttgcggagaaccccctcaatacaccttcgagcacaggagatcttcgtactgaggcagagcttcgctccgacttgagctcgcccccaactttgaacgggccgaatttgtctttgaatgctagtacgaggactggggagggcacttacgttggaggcacccattgggcatcgattctcgagagcattcatgatattcaaggcatacttgagcatgaacctgaagtacctctttccccgtcaccaccaacccaaagcaccttctggtccggtggctcacagagccaggatctgatcttcgggtctcaaaacatcatggccacccacgatgaagcggtggcacgactgccgcctcagcaccaaactgatcatcttgtattgctatacttccgacacaggtttgtttcggcaccctatattcacaccacgaaatttcagagggagtacgatagcttctggaaggatccgcattcagtcagcctgctttggattagctgtctcgcgtcaatactagccacggctctttcaatcgctggcaacaaggatgacggaccaaatgtgtctgatgcgcctcgtcccgagcagctatccaccttggcagtagactgtttgatatccggtaactatttatcagctaagccgtactcaatcgaagcccttttgctccatgggttcacggaaatgaaaagaacagagggtttgagtcccgctctttgggctaaatttggcctcactgctcgacttgctcagcggatgggttatcatcgcgatccaaaatatctgtccaatgtgaccccatttgaaggcgagctacggcgtcgggcctggttcttcatcgaagtattcgatgtcattttctcgttctcacagggagtaccgcctatcataagggacgatgaatgtgacactgaatcgcccggcaatctctatgacgcggacttcgacgagaatatgatggtgctgccaccgtcacggccttccactgaaccgacgtcgactctttatctttgcaccaagtccaaactctgtcgaatactccgtcgtatcattcgactaacactgtcgatcaatccccccgcttacgaggagatactcaggctgaacgatgagctgctcgaatatcacaaccaggtaccgccgtcgttgcaaatcaagccgattcggtcgtatagctttaccgatcagactcatgacatcatgaatcgcctaatgctcgaaatgatgttcttgaagagtatttgtgttctgcatcgaccttatctcagccgggaaaaggacaatcctatttgtgatttatccagaactgcatgtcgagaagctgctttgagaattatggatctccatgtcgaatatgaagaggagagtaagcccggcggccgaatgcatgaggataaatacatgctcgcgtctcttaccttgcacgactttttgattgcatccatgatcatatgcctagacttaacagagaaccagcccagcagcgctgccgacaggtcgaggaaactgaaggctttgggagcttcctacaagatctggtcagagagaaagtatagtgacaaagatgcagcacatgcgactagagttgttggcgcaatcttacggaaggtttcgatgcaggatctgccccaaatcaagcctgagccacgaccagatgtgagagatgggtcactcgcaagcctgttgaacaacgatgtccagccaacaccgcctttgccttccgcatttgatcactctcagcttctgtcagccatggatttttcccttgacttcatggatccgactccaatggacagcattttgaaggattcaacgatggtcgactggagcctcatcgatcaagtgttactaggtcggcaagaagactctctacgtcccttcaatgaggttatgggaaaaacagatgcattggaactaggcgcttctgctctcaaataa

SEQ ID NO: 17718 - protein, 760 aa, Muscodor strobelii
  misc_feature: SGI Peptide ID NO. 565924
  misc_feature (35)..(75): Pfam Id: PF00172 Pfam Desc: Fungal Zn(2)-Cys(6) binuclear cluster domain
  misc_feature (329)..(428): Pfam Id: PF04082 Pfam Desc: Fungal specific transcription factor domain
  misc_feature (12)..(652): NCBI GI: 145612107 Blast Desc: MGG_08094 [Magnaporthe grisea 70-15] gi|145019338|gb|EDK03566.1| MGG_08094 [Magnaporthe grisea 70-15]
  misc_feature (8)..(733): NCBI GI: 46137109 Blast Desc: FG10070.1 [Gibberella zeae PH-1]
  misc_feature (30)..(724): NCBI GI: 256731737 Blast Desc: NECHADRAFT_41909 [Nectria haematococca mpVI 77-13-4]
  misc_feature (26)..(672): NCBI GI: 255940662 Blast Desc: Pc16g07770 [Penicillium chrysogenum Wisconsin 54-1255] gi|211585723|emb|CAP93447.1| Pc16g07770 [Penicillium chrysogenum Wisconsin 54-1255]
  misc_feature (21)..(654): NCBI GI: 119484582 Blast Desc: C6 transcription factor, [Neosartorya fischeri NRRL 181] gi|119410226|gb|EAW20173.1| C6 transcription factor, [Neosartorya fischeri NRRL 181]
  misc_feature (25)..(672): NCBI GI: 238845115 Blast Desc: conserved [Microsporum canis CBS 113480]
  misc_feature (26)..(731): NCBI GI: 242815262 Blast Desc: conserved [Talaromyces stipitatus ATCC 10500] gi|218714874|gb|EED14297.1| conserved [Talaromyces stipitatus ATCC 10500]
  misc_feature (21)..(654): NCBI GI: 121719872 Blast Desc: C6 transcription factor, [Aspergillus clavatus NRRL 1] gi|119404846|gb|EAW15208.1| C6 transcription factor, [Aspergillus clavatus NRRL 1]
  misc_feature (18)..(701): NCBI GI: 258575723 Blast Desc: conserved [Uncinocarpus reesii 1704] gi|237902309|gb|EEP76710.1| conserved [Uncinocarpus reesii 1704]
  misc_feature (21)..(654): NCBI GI: 70983604 Blast Desc: C6 transcription factor [Aspergillus fumigatus Af293] gi|66844955|gb|EAL85291.1| C6 transcription factor, [Aspergillus fumigatus Af293]
MEPRPATMNYQTTVFRAQPTDGTQRKIQKRNRPPVSCLLCRTRKVKCDRQQPCERCVKSGEANFCEYAPRAARKTRGTETRVPSEPRQKQEVASRPVLQVRLQKLEEMVNGLVSAGAFAENPLNTPSSTGDLRTEAELRSDLSSPPTLNGPNLSLNASTRTGEGTYVGGTHWASILESIHDIQGILEHEPEVPLSPSPPTQSTFWSGGSQSQDLIFGSQNIMATHDEAVARLPPQHQTDHLVLLYFRHRFVSAPYIHTTKFQREYDSFWKDPHSVSLLWISCLASILATALSIAGNKDDGPNVSDAPRPEQLSTLAVDCLISGNYLSAKPYSIEALLLHGFTEMKRTEGLSPALWAKFGLTARLAQRMGYHRDPKYLSNVTPFEGELRRRAWFFIEVFDVIFSFSQGVPPIIRDDECDTESPGNLYDADFDENMMVLPPSRPSTEPTSTLYLCTKSKLCRILRRIIRLTLSINPPAYEEILRLNDELLEYHNQVPPSLQIKPIRSYSFTDQTHDIMNRLMLEMMFLKSICVLHRPYLSREKDNPICDLSRTACREAALRIMDLHVEYEEESKPGGRMHEDKYMLASLTLHDFLIASMIICLDLTENQPSSAADRSRKLKALGASYKIWSERKYSDKDAAHATRVVGAILRKVSMQDLPQIKPEPRPDVRDGSLASLLNNDVQPTPPLPSAFDHSQLLSAMDFSLDFMDPTPMDSILKDSTMVDWSLIDQVLLGRQEDSLRPFNEVMGKTDALELGASALK

SEQ ID NO: 17719 - DNA, 3754 bp, Muscodor strobelii
  misc_feature: SGI EST ID NO. CUFF.41696.0
  misc_feature: Variant of the nucleotide sequence at SEQ ID NO 17717
gcggattttacccacgggaacacgccaccttgtttccgacgacaccgacaacaccattgcgtctctcttacacagacatcgcatctgcatgtcttcgagggccattgtctgagcaaatgtcggggctggcgagcaacggaaagcatattcgtaccagcacgcactcctcagcgtagtattttctgagacccacctgccactcagaataccgacgcctacctccactcatcttcgccaaattgacagccgctttctcgatcgagtatttccttaattccttgaatctcttccccctactccccgaagagattctctcatagtgtcgttccatttccatcttgcattgaagcgcgggtgtatagtctggtcgcatgctggcgcgcttcaagatctacacagtataaaccataaccccatcgtgcaacgtgggttaaccccgagcgttccgaatcatggagcctcgaccagcaacaatgaattatcagacaactgtctttcgcgcacagcctacagatggcactcagcggaagatccagaagagaaacagacctcctgtcagttgtctgctatgtagaacgcgcaaggtgaaatgtgaccgacagcagccatgtgagagatgtgtcaagagtggtgaagcaaatttttgtgaatacgctccacgagctgctcgtaagacacgagggactgagactcgcgtgccaagtgagcctcgccaaaagcaggaggtcgcttcacgaccagtgcttcaagttcggttacagaagcttgaggagatggtgaatggccttgtcagcgctggcgcctttgcggagaaccccctcaatacaccttcgagcacaggagatcttcgtactgaggcagagcttcgctccgacttgagctcgcccccaactttgaacgggccgaatttgtctttgaatgctagtacgaggactggggagggcacttacgttggaggcacccattgggcatcgattctcgagagcattcatgatattcaaggcatacttgagcatgaacctgaagtacctctttccccgtcaccaccaacccaaagcaccttctggtccggtggctcacagagccaggatctgatcttcgggtctcaaaacatcatggccacccacgatgaagcggtggcacgactgccgcctcagcaccaaactgatcatcttgtattgctatacttccgacacaggtttgtttcggcaccctatattcacaccacgaaatttcagagggagtacgatagcttctggaaggatccgcattcagtcagcctgctttggattagctgtctcgcgtcaatactagccacggctctttcaatcgctggcaacaaggatgacggaccaaatgtgtctgatgcgcctcgtcccgagcagctatccaccttggcagtagactgtttgatatccggtaactatttatcagctaagccgtactcaatcgaagcccttttgctccatgggttcacggaaatgaaaagaacagagggtttgagtcccgctctttgggctaaatttggcctcactgctcgacttgctcagcggatgggttatcatcgcgatccaaaatatctgtccaatgtgaccccatttgaaggcgagctacggcgtcgggcctggttcttcatcgaagtattcgatgtcattttctcgttctcacagggagtaccgcctatcataagggacgatgaatgtgacactgaatcgcccggcaatctctatgacgcggacttcgacgagaatatgatggtgctgccaccgtcacggccttccactgaaccgacgtcgactctttatctttgcaccaagtccaaactctgtcgaatactccgtcgtatcattcgactaacactgtcgatcaatccccccgcttacgaggagatactcaggctgaacgatgagctgctcgaatatcacaaccaggtaccgccgtcgttgcaaatcaagccgattcggtcgtatagctttaccgatcagactcatgacatcatgaatcgcctaatgctcgaaatgatgttcttgaagagtatttgtgttctgcatcgaccttatctcagccgggaaaaggacaatcctatttgtgatttatccagaactgcatgtcgagaagctgctttgagaattatggatctccatgtcgaatatgaagaggagagtaagcccggcggccgaatgcatgaggataaatacatgctcgcgtctcttaccttgcacgactttttgattgcatccatgatcatatgcctagacttaacagagaaccagcccagcagcgctgccgacaggtcgaggaaactgaaggctttgggagcttcctacaagatctggtcagagagaaagtatagtgacaaagatgcagcacatgcgactagagttgttggcgcaatcttacggaaggtttcgatgcaggatctgccccaaatcaagcctgagccacgaccagatgtgagagatgggtcactcgcaagcctgttgaacaacgatgtccagccaacaccgcctttgccttccgcatttgatcactctcagcttctgtcagccatggatttttcccttgacttcatggatccgactccaatggacagcattttgaaggattcaacgatggtcgactggagcctcatcgatcaagtgttactaggtcggcaagaagactctctacgtcctacaactatgtgaccataagtgtaaccttcgcgccgataaccgtagacctaggtcccttcaatgaggttatgggaaaaacagatgcattggaactaggcgcttctgctctcaaataacggtctgagaagagcagctgtgtatcaacttgacgaccaggtgcgagatcattctggtattcatcataccggatattctgcttgacaaattatggcggtagacacagtcagccgccatcaatgcaattatagacgagggagaagtctgcatatgaacatcactcagttgtccggcattccaaactttcatattcggcaagtatccgtccaggttggatgagtacaaatcattgcgtccacgactccagaatcaatgcatcggagtccgacgtccctggcttagccgtttattgcaatagccggattcgcagcgttgtatgtctagactggcggtgacgcgtagaatgggaaatatatgaaggcacctgtcttatcatgtgattgctaacgatgatatctgtttgttctcccggcgatgtggaatttgcctcggtcaggccgtgtagaaagcacgattgtttagattcgacaatatctacagatagtgatgcgttaagcgagttcttttcggccatgacaatggagatgacgttgatcgtgcacaggtgccacacaactactgaatctctctgcatgatacatcctcgggatattgtcctacagacatctttgtatatacgaaccaatatgactaccgtgatcgctacatgacaactagcacacttatcacgatgttcccattatcctaagatgccaagtgaatgagtcggtctacaaaaaggacaaaaccctcaacatggagtgacactgtaattcgcattccgattccaggcactcaaattttgaagtattgacaacggcaggcccccgcaagatgttccaattcgatagagctttccaatgacttggtactctattgtagttcaacatgtttcccccgatgcagcaacacttccacccacccccaaactatgaagtcgacatcggagacatgctgcctgcccaccacttccccaatttttt

SEQ ID NO: 17720 - DNA, 1110 bp, Muscodor strobelii
  misc_feature: SGI cDNA ID NO. 565925
  misc_feature: Encodes the peptide sequence at SEQ ID NO 17721
atgaccggcgcaaaggctcttctcgtccaatccatcaaatcgcccccggatcttgcgatcattgagaaagacatcccagccgccgtccaaggcgcagccgtcgtccgtattcaatgtacaggcataggcccaggccacggctacctgatttcacatgaagttcccggcttttcctttccagtaccatgcgtgtacggaagtagtgccgttgggagaatcgtctcagtcggctcagacgctgtgtcgcttaaagaaggtcaactcgtacttgtcgacaacttcgcagtggctcgtgatgatccaaacgcagagatcatcatgggtttgatggatggcggcagtcccaaatcccagaagcttgctaaagatgcttggagagatggttgctggcagacccatactgttgtgccacttgagaacaccatcgctctcgacgaagacgtgttacttggaaggctcggctatgaaatcgaagatttgactgtactgcagcgcctcgccgttgcctatggcggagtgtcaaacattgatatcaaagctggcgagacggtgatcgtgggaccggcaacaggccagttcagcggcgcagcagtcgaagttgcgtctgcagctggtgcccgggtcattgcacttggtcgaaacaaggccaaacttgcggagctcaaggcaaatatcccgcgagttgagaccgtggttatcacaggagatgtagcagctgatgcagccgctatccaagctttcggcgggctcgcagatgcgttcatcgacttcacacctcatactatcaacactgagccaagccacatcgaaagcgctattatgtctcttcgtaagcgtggccgtgtcgctcttatgggtggcacttccgcaaagatctcgctcccatatatagaattgatcacgaagagtattgagatcaaggcaaaatggatgtacacccgccccgaaatccgaagattggtgaagatggtggagactgggttattgaagatcgggaaggaggccggccatcaagtgcttggacgcttccaacttgaagaatgggaaaaagcctttgaggaagcaccgaagcataccggatggggaacaaacacgattttcacgccttag

SEQ ID NO: 17721 - protein, 369 aa, Muscodor strobelii
  misc_feature: SGI Peptide ID NO. 565925
  misc_feature (30)..(144): Pfam Id: PF08240 Pfam Desc: Alcohol dehydrogenase GroES-like domain
  misc_feature (180)..(326): Pfam Id: PF00107 Pfam Desc: Zinc-binding dehydrogenase
  misc_feature (2)..(369): NCBI GI: 46115822 Blast Desc: FG03753.1 [Gibberella zeae PH-1]
  misc_feature (5)..(369): NCBI GI: 156061299 Blast Desc: SS1G_02792 [Sclerotinia sclerotiorum 1980] gi|154700196|gb|EDN99934.1| SS1G_02792 [Sclerotinia sclerotiorum 1980]
  misc_feature (2)..(369): NCBI GI: 281211102 Blast Desc: isopropanol dehydrogenase [Polysphondylium pallidum PN500]
  misc_feature (25)..(369): NCBI GI: 256728770 Blast Desc: NECHADRAFT_86057 [Nectria haematococca mpVI 77-13-4]
  misc_feature (5)..(369): NCBI GI: 256728292 Blast Desc: NECHADRAFT_54141 [Nectria haematococca mpVI 77-13-4]
  misc_feature (5)..(368): NCBI GI: 39960341 Blast Desc: MGG_09359 [Magnaporthe grisea 70-15] gi|145014309|gb|EDJ98877.1| MGG_09359 [Magnaporthe grisea 70-15]
  misc_feature (5)..(369): NCBI GI: 212544364 Blast Desc: alcohol dehydrogenase, [Penicillium marneffei ATCC 18224] gi|210065305|gb|EEA19399.1| alcohol dehydrogenase, [Penicillium marneffei ATCC 18224]
  misc_feature (26)..(359): NCBI GI: 154319662 Blast Desc: BC1G_02312 [Botryotinia fuckeliana B05.10] gi|150855970|gb|EDN31162.1| BC1G_02312 [Botryotinia fuckeliana B05.10]
  misc_feature (1)..(369): NCBI GI: 242799462 Blast Desc: isopropanol dehydrogenase, [Talaromyces stipitatus ATCC 10500] gi|218716729|gb|EED16150.1| isopropanol dehydrogenase, [Talaromyces stipitatus ATCC 10500]
  misc_feature (18)..(355): NCBI GI: 256726237 Blast Desc: NECHADRAFT_81942 [Nectria haematococca mpVI 77-13-4]
MTGAKALLVQSIKSPPDLAIIEKDIPAAVQGAAVVRIQCTGIGPGHGYLISHEVPGFSFPVPCVYGSSAVGRIVSVGSDAVSLKEGQLVLVDNFAVARDDPNAEIIMGLMDGGSPKSQKLAKDAWRDGCWQTHTVVPLENTIALDEDVLLGRLGYEIEDLTVLQRLAVAYGGVSNIDIKAGETVIVGPATGQFSGAAVEVASAAGARVIALGRNKAKLAELKANIPRVETVVITGDVAADAAAIQAFGGLADAFIDFTPHTINTEPSHIESAIMSLRKRGRVALMGGTSAKISLPYIELITKSIEIKAKWMYTRPEIRRLVKMVETGLLKIGKEAGHQVLGRFQLEEWEKAFEEAPKHTGWGTNTIFTP

SEQ ID NO: 17722 - DNA, 2016 bp, Muscodor strobelii
  misc_feature: SGI cDNA ID NO. 565926
  misc_feature: Encodes the peptide sequence at SEQ ID NO 17723
atgacagccttcacagccttaaatggggctgaacagaagaccgcagaagcctccagcgggagtcctacagagaaacatggtattgcagacgaccggtccatgattcagcctccctcagggcaggaatcaggaattggaaagctatcaatagcgcattctgagcaggcctctggttccaatcctgaacgatctgcatacacgcctactggctataatgaagcgaatcataagcgaaagcgatctgtttcgatagagagaccacatgacgtgacaagtggtcgagatcaggatcaacatcaccgaccagattcacgtgacgcatatgaggcttcgctccgcgagcgagaatatcgacactatggagacgatcggagggaacggactgagaattggtactcgcaacaggctagagaggataggagctcgtacgatgctagggatatagcaggatctgcaccgccgcaaacagatgaagaacttggcgatgctcgcagaagagcgactagccaagctgaatcccgacacgacttctctgccacgagccctgatggtgatgagggttcaatgctttacaatagtgcttactcacccgatcaatcaagagatccggtcatccattcggatccaaagaagcgaaagcgcaacttcagtaacagaacgaaaaccggctgcttaacatgtcgaaagcgtaagaaaaagtgtgacgagacaaagcccgaatgtacaaactgtctacgtgggggtttcatatgttatgggtatcctaaccaacgaggtcatccgaagctggagaacaagcctgccgcagttccgctcgaatctaaagatcccagttacgttccccctggtgcttatgggatgcctcaaccaagtgcctatcctgtggctgtaactgcagctccgcttaagagagattcggtgtcgtcttatcgtggcccctatcttcgccttgagacatcaaatgctcgtcccagtcagtcggacgatgaccgaccgactgcgtcgacaatcccaacggcttcagccgtaagctccattctcagtccggataacaaggcatcggcgttctcggcatactccagtgctgcaaatatgtttccaaccccgatcagcgctattactcccagtatgcagttgaaaacccctaatattgagcggccaagggaattccaaagggttccaccgctgcatgatctcactcgaactgaacctgattccgcccaccctgacagctctcacccaacttcattgccgcagatgaatgtcttagagccaactccacccgctcaaccggcacctgcgcctccttcagctacggatccccaaacggcggcgcaactggctctttcacacccgtcatatcctcctaatcccaatcggactagaacgcagaaggagaacatgctaatgggccgagaattctacccttttgatcaagaattaaccttggaacgtcagagatgtagtgctgcttgttggcggttcaacaactcgacgaaccccaataccggtgtttctgccggtgagcggacacgactttttcgtgagatcttacagcctcgggagcccattaacatgtctcctcagttgatgtcttcaactaccacattgggccgtagtggtggagatgtcatcgtcgaggcaccttttacgtgcgattatggttacaatatcactattggtaataatgtgctaatcggccggaattgcacaatcctcgacccaatggcaatcaatatcggcgataactgcttcattggtcccaatgttacactcctcggggcaacaacttacgttgatcctaaaaagcggaacggtgtcaaaagtccgatgatgggcggcgctatcgtcgttgatgaagatgtttggataggtgccggtgccatcatacagcatggaattcgaattgggaaaggggccactatctctgccggcgcagtagttgtcaaagatgtccctcggttcacaatagtggctggcaaccctgctgaagtgacatctggtgtcaaccattag

SEQ ID NO: 17723 - protein, 671 aa, Muscodor strobelii
  misc_feature: SGI Peptide ID NO. 565926
  misc_feature (222)..(261): Pfam Id: PF00172 Pfam Desc: Fungal Zn(2)-Cys(6) binuclear cluster domain
  misc_feature (557)..(574): Pfam Id: PF00132 Pfam Desc: Bacterial transferase hexapeptide (three repeats)
  misc_feature (1)..(669): NCBI GI: 46137107 Blast Desc: FG10069.1 [Gibberella zeae PH-1]
  misc_feature (62)..(669): NCBI GI: 85086063 Blast Desc: NCU04001 [Neurospora crassa OR74A] gi|28918710|gb|EAA28380.1| conserved [Neurospora crassa OR74A] gi|29150116|emb|CAD79676.1| related to acetyltransferase protein
  misc_feature (1)..(669): NCBI GI: 116201513 Blast Desc: CHGG_08641 [Chaetomium globosum CBS 148.51] gi|88177159|gb|EAQ84627.1| CHGG_08641 [Chaetomium globosum CBS 148.51]
  misc_feature (1)..(665): NCBI GI: 145612105 Blast Desc: MGG_08093 [Magnaporthe grisea 70-15] gi|145019337|gb|EDK03565.1| MGG_08093 [Magnaporthe grisea 70-15]
  misc_feature (29)..(669): NCBI GI: 156059586 Blast Desc: SS1G_03805 [Sclerotinia sclerotiorum 1980] gi|154701592|gb|EDO01331.1| SS1G_03805 [Sclerotinia sclerotiorum 1980]
  misc_feature (1)..(474): NCBI GI: 261355712 Blast Desc: C6 zinc finger domain-containing protein [Verticillium albo-atrum VaMs.102]
  misc_feature (67)..(663): NCBI GI: 255939552 Blast Desc: Pc16g01710 [Penicillium chrysogenum Wisconsin 54-1255] gi|211585168|emb|CAP92841.1| Pc16g01710 [Penicillium chrysogenum Wisconsin 54-1255]
  misc_feature (4)..(663): NCBI GI: 242786201 Blast Desc: acetyltransferase, [Talaromyces stipitatus ATCC 10500] gi|218720905|gb|EED20324.1| acetyltransferase, [Talaromyces stipitatus ATCC 10500]
  misc_feature (211)..(663): NCBI GI: 212543303 Blast Desc: acetyltransferase, [Penicillium marneffei ATCC 18224] gi|210066713|gb|EEA20806.1| acetyltransferase, [Penicillium marneffei ATCC 18224]
  misc_feature (156)..(652): NCBI GI: 239609258 Blast Desc: C6 zinc finger domain-containing protein [Ajellomyces dermatitidis ER-3]
MTAFTALNGAEQKTAEASSGSPTEKHGIADDRSMIQPPSGQESGIGKLSIAHSEQASGSNPERSAYTPTGYNEANHKRKRSVSIERPHDVTSGRDQDQHHRPDSRDAYEASLREREYRHYGDDRRERTENWYSQQAREDRSSYDARDIAGSAPPQTDEELGDARRRATSQAESRHDFSATSPDGDEGSMLYNSAYSPDQSRDPVIHSDPKKRKRNFSNRTKTGCLTCRKRKKKCDETKPECTNCLRGGFICYGYPNQRGHPKLENKPAAVPLESKDPSYVPPGAYGMPQPSAYPVAVTAAPLKRDSVSSYRGPYLRLETSNARPSQSDDDRPTASTIPTASAVSSILSPDNKASAFSAYSSAANMFPTPISAITPSMQLKTPNIERPREFQRVPPLHDLTRTEPDSAHPDSSHPTSLPQMNVLEPTPPAQPAPAPPSATDPQTAAQLALSHPSYPPNPNRTRTQKENMLMGREFYPFDQELTLERQRCSAACWRFNNSTNPNTGVSAGERTRLFREILQPREPINMSPQLMSSTTTLGRSGGDVIVEAPFTCDYGYNITIGNNVLIGRNCTILDPMAINIGDNCFIGPNVTLLGATTYVDPKKRNGVKSPMMGGAIVVDEDVWIGAGAIIQHGIRIGKGATISAGAVVVKDVPRFTIVAGNPAEVTSGVNH

SEQ ID NO: 17724 - DNA, 4420 bp, Muscodor strobelii
  misc_feature: SGI EST ID NO. CUFF.41807.0
  misc_feature: Variant of the nucleotide sequence at SEQ ID NO 17722
ccttgttccacatccgccttctcgagcccttgtcgctttgctcgctccaccctggtgttgtctctccttgagtcctgcaagttacgagtcgtcatcgccaaggtagctggggatgggacctgcttgttgtcattgatggcctgtcgtcagtctatcaagcgtcagacccgtcatctggttgcaagtttcccgcgtgcagactatatctcgcttctcgtcatcgtcttgatattatgagtacccccttgccccctcgccgtcgtaccacccctcccatccaatcccccggcgatactttagcgatttgtacctggctgtcctccttccccaagcgccacgccgcccataattggccatcaaccaagggtttgtcgatctcgtccggtacaaaagtatcgagaccacccgcctaggcacttgttattagtcgctctggtggtgctggtttgggctgtatcgtctggttttattctccatttccatttcgtatctgccaatcttgcttggccctatccggtaacatacccttgcatcggttcccgccctgcatatttgcttgctgttgctggcgaccatcgcatccatacccaactcatccaaggaccttgaccctacgcgggaaaagccctgccttgcttcggggaagccgttcgcttccacaggcgcagcagcgctccattaatcgcgcgtcaaatcccaagcgcggcgtcatctttcttcttgcgacgcggcgagtttgtgaacggatcgtctctacgggatttcacccagccttgcagcgcggagagggtcgacaagcactgcgacgtaatcattcgtctgactgccggtccctcctcgacctgcgtcacaagccggactataactgcggaaaggtgcctgaccggctcactgcctgagttcctggtttgtgtgggctggctcgcttcaatacgactatcccgcagaaccccggtctctcgctcgttaccaaggcaggcgaagtaatcagagttgggacaattgttgggcgccagctgctcgtgcttacaccacaccaaccatacctccaaaccacacaccgcaactagtcgccggtgctgcaccgtacccggctcgctcgctcccgcttcctgataatcacccgtgcatccgccctctacgattttgcgcgcgcacagtcggatttgacctgcagcaaaaccatcgatccgtgcgaccgcattgattctggcccccattttctcatctcaactcacatcgccttgcatactctcacttcacatgagctgcaggcttgtcttttctttcgcacaaccctttagagctgcattctcattttaccgaaaacgcaacgcacggaagtagggttcttcatccaccagcgcgaaggcatttgccacgtagcagattggtctgcttcactcgctcactcgtgctccagcggtgcaacctaattcaccgtaactaaccacagcatcgtgttccggatgtctgtcgaaaagattttcagactcatttactggaaattgactatattttgaaagatactgtgtacagttgaatgtctatgcgcttgaagcaagaactttggcacgaagatacggttggacgaaacatgacagccttcacagccttaaatggggctgaacagaagaccgcagaagcctccagcgggagtcctacagagaaacatggtattgcagacgaccggtccatgattcagcctccctcagggcaggaatcaggaattggaaagctatcaatagcgcattctgagcaggcctctggttccaatcctgaacgatctgcatacacgcctactggctataatgaagcgaatcataagcgaaagcgatctgtttcgatagagagaccacatgacgtgacaagtggtcgagatcaggatcaacatcaccgaccagattcacgtgacgcatatgaggcttcgctccgcgagcgagaatatcgacactatggagacgatcggagggaacggactgagaattggtactcgcaacaggctagagaggataggagctcgtacgatgctagggatatagcaggatctgcaccgccgcaaacagatgaagaacttggcgatgctcgcagaagagcgactagccaagctgaatcccgacacgacttctctgccacgagccctgatggtgatgagggttcaatgctttacaatagtgcttactcacccgatcaatcaagagatccggtcatccattcggatccaaagaagcgaaagcgcaacttcagtaacagaacgaaaaccggctgcttaacatgtcgaaagcgtaagaaaaagtgtgacgagacaaagcccgaatgtacaaactgtctacgtgggggtttcatatgttatgggtatcctaaccaacgaggtcatccgaagctggagaacaagcctgccgcagttccgctcgaatctaaagatcccagttacgttccccctggtgcttatgggatgcctcaaccaagtgcctatcctgtggctgtaactgcagctccgcttaagagagattcggtgtcgtcttatcgtggcccctatcttcgccttgagacatcaaatgctcgtcccagtcagtcggacgatgaccgaccgactgcgtcgacaatcccaacggcttcagccgtaagctccattctcagtccggataacaaggcatcggcgttctcggcatactccagtgctgcaaatatgtttccaaccccgatcagcgctattactcccagtatgcagttgaaaacccctaatattgagcggccaagggaattccaaagggttccaccgctgcatgatctcactcgaactgaacctgattccgcccaccctgacagctctcacccaacttcattgccgcagatgaatgtcttagagccaactccacccgctcaaccggcacctgcgcctccttcagctacggatccccaaacggcggcgcaactggctctttcacacccgtcatatcctcctaatcccaatcggactagaacgcagaaggagaacatgctaatgggccgagaattctacccttttgatcaagaattaaccttggaacgtcagagatgtagtgctgcttgttggcggttcaacaactcgacgaaccccaataccggtgtttctgccggtgagcggacacgactttttcgtgagatcttacagcctcgggagcccattaacatgtctcctcagttgatgtcttcaactaccacattgggccgtagtggtggagatgtcatcgtcgaggcaccttttacgtgcgattatggttacaatatcactattggtaataatgtgctaatcggccggaattgcacaatcctcgacccaatggcaatcaatatcggcgataactgcttcattggtcccaatgttacactcctcggggcaacaacttacgttgatcctaaaaagcggaacggtgtcaaaagtccgatgatgggcggcgctatcgtcgttgatgaagatgtttggataggtgccggtgccatcatacagcatggaattcgaattgggaaaggggccactatctctgccggcgcagtagttgtcaaagatgtccctcggttcacaatagtggctggcaaccctgctgaagtgacatctggtgtcaaccattagaacatcgggaagcgtgcggtgcactgcttgcaaattattccagcttgatgtcacctatgtgacaactaattcctcatgtcctttatgatacccactgtattattaatacccctacgcttgtacaaaaacacagacgacgcgattacctacaccattggcttcatgattggagcatagacgaggcgtttttagcttagaacgagttttttgtcgtggcatgtcctggtgtcgcctctgcgccttgcccatccgcggacctcagggccattagccacactttgggacgtttttgacgatgattgaaagactagatcttcttcatacaattggctggaaaaactggatcttggtatgttatgagaaggatctggctctggaagcagttgtatattgcaagatgtgataacagggatatttggatgcaagggctttgtgatgttggaagctttttggaagcccttctatttgatgtcggtctctcttcgcgtctgggagagcagttcgatatacagatagacggggagataaaaattcgcatacgtggtctttgcatggcggtgcatcacttttgcttgtttagctcggctcactttggcgttgcatatccttacatagccgcactgcataataccaaggatgatggaatggaattttatttgcaagtcactcacacccaatgtaaccatgagaccgcaaaataatcaccacgagaaggtcaagttaacgcctatgtctgttcaatgtttcgtatattcaagcgcaaaggctgtaaattgtccaagaatggaagcccaaaaattgaacttg

SEQ ID NO: 17725 - DNA, 786 bp, Muscodor strobelii
  misc_feature: SGI cDNA ID NO. 565927
  misc_feature: Encodes the peptide sequence at SEQ ID NO 17726
atgaagtattccgttgcgcttctcagcacgctagccaccatggctatagcgacaccaactcggagtgcaagccgcagatccaggctctctgggctcaaatccagccttcgtccaagtaataggacgatgtcaacagaggcagcagaggaatgggtcaacgagagctgggccggcgctgtggtgacgggatctagcttcacgggagtctcagccaccttcactgtgccaacgccgaagaagccgaccgacggcaaccaagcatcggctcctatccatatcgcctccgcttggattggcatggatggatacgactgctctggtggactttggcaggctggagttgatgggaccatcgactcatctggcacgtcgtactatgcctggtatgaatggtaccccgagaacacggtggaagtcaacttaggggacacaaaggctggcgatgttatcagcatccagctcacttcttctccgagcaactacaaatccggcaagatcgtcatgtcgaacaagaccacaggcaagagctacagcgcgacggtgacagactcactcgcactatgtggtaactcgatcgaatggatcgtcgaggaccttgtcgtagacagcaacgatataggccttgcgaacttcggcacagtgaccttcactgatgcaaagggcaccacttcgagcggctccgtcacgcctgcttcagctgagtacttggacatcgcggactccagtaactaccaattgacttcatcttcctccacgtcgaattcagttgtaatcaagtatgtataa

SEQ ID NO: 17726 - protein, 261 aa, Muscodor strobelii
  misc_feature: SGI Peptide ID NO. 565927
  misc_feature (54)..(261): Pfam Id: PF01828 Pfam Desc: Peptidase A4 family
  misc_feature (1)..(261): NCBI GI: 156063840 Blast Desc: SS1G_02038 [Sclerotinia sclerotiorum 1980] gi|154697372|gb|EDN97110.1| SS1G_02038 [Sclerotinia sclerotiorum 1980]
  misc_feature (1)..(261): NCBI GI: 154318802 Blast Desc: BC1G_02790 [Botryotinia fuckeliana B05.10] gi|150857920|gb|EDN33112.1| BC1G_02790 [Botryotinia fuckeliana B05.10]
  misc_feature (11)..(261): NCBI GI: 154321167 Blast Desc: BC1G_01458 [Botryotinia fuckeliana B05.10] gi|150851996|gb|EDN27188.1| BC1G_01458 [Botryotinia fuckeliana B05.10]
  misc_feature (1)..(261): NCBI GI: 238499183 Blast Desc: aspergillopepsin, [Aspergillus flavus NRRL3357] gi|220692579|gb|EED48925.1| aspergillopepsin, [Aspergillus flavus NRRL3357]
  misc_feature (1)..(261): NCBI GI: 255940586 Blast Desc: Pc16g07360 [Penicillium chrysogenum Wisconsin 54-1255] gi|211585685|emb|CAP93406.1| Pc16g07360 [Penicillium chrysogenum Wisconsin 54-1255]
  misc_feature (1)..(261): NCBI GI: 67901056 Blast Desc: AN7515.2 [Aspergillus nidulans FGSC A4] gi|40742905|gb|EAA62095.1| AN7515.2 [Aspergillus nidulans FGSC A4] gi|259483831|tpe|CBF79544.1| TPA: aspergillopepsin, nidulans
  misc_feature (1)..(261): NCBI GI: 255930123 Blast Desc: Pc06g00050 [Penicillium chrysogenum Wisconsin 54-1255] gi|211581234|emb|CAP78998.1| Pc06g00050 [Penicillium chrysogenum Wisconsin 54-1255]
  misc_feature (21)..(261): NCBI GI: 212534108 Blast Desc: aspergillopepsin, [Penicillium marneffei ATCC 18224] gi|210069609|gb|EEA23699.1| aspergillopepsin, [Penicillium marneffei ATCC 18224]
  misc_feature (1)..(259): NCBI GI: 242789335 Blast Desc: aspergillopepsin, [Talaromyces stipitatus ATCC 10500] gi|218717927|gb|EED17347.1| aspergillopepsin, [Talaromyces stipitatus ATCC 10500]
  misc_feature (1)..(260): NCBI GI: 242761411 Blast Desc: aspergillopepsin-2 precursor, [Talaromyces stipitatus ATCC 10500] gi|218723370|gb|EED22787.1| aspergillopepsin-2 precursor, [Talaromyces stipitatus ATCC 10500]
  misc_feature (55)..(238): SWISSPROT Homolog: EC 3.4.23.19 Aspergillopepsin II
MKYSVALLSTLATMAIATPTRSASRRSRLSGLKSSLRPSNRTMSTEAAEEWVNESWAGAVVTGSSFTGVSATFTVPTPKKPTDGNQASAPIHIASAWIGMDGYDCSGGLWQAGVDGTIDSSGTSYYAWYEWYPENTVEVNLGDTKAGDVISIQLTSSPSNYKSGKIVMSNKTTGKSYSATVTDSLALCGNSIEWIVEDLVVDSNDIGLANFGTVTFTDAKGTTSSGSVTPASAEYLDIADSSNYQLTSSSSTSNSVVIKYV

SEQ ID NO: 17727 - DNA, 483 bp, Muscodor strobelii
  misc_feature: SGI cDNA ID NO. 565928
  misc_feature: Encodes the peptide sequence at SEQ ID NO 17728
atgactgaggcatggcagaagatcaacaaggctaagaagatcgccgacaagagtcaagtcaccgatgaaaaatctcttgccgacaacaaggcattcggtgatgctatagatctggtggacagctcccgcatcgacgtgcagagacaatcgcatgttgtgcgcgtgctcgccggtcgcaatggccagtctctgcccaagtggacatttgagaatttccgatccaagatcttccgcctgtcccagaatgccgaaggccagcctcgaggcatgcgtaccctagagggcacgcaccatagcctccgtgattgtgatgagagtgacgagatgaaggactatctgctcgaggactgggcacatgtactagaaatggagagtctctatacttatatgatggagaagcatccgaattctttcccgtatcgcagtgatagaggcgattatgttgtgaagttgatgcgaatcggcgctatttgtcctgcctag

SEQ ID NO: 17728 - protein, 160 aa, Muscodor strobelii
  misc_feature: SGI Peptide ID NO. 565928
MTEAWQKINKAKKIADKSQVTDEKSLADNKAFGDAIDLVDSSRIDVQRQSHVVRVLAGRNGQSLPKWTFENFRSKIFRLSQNAEGQPRGMRTLEGTHHSLRDCDESDEMKDYLLEDWAHVLEMESLYTYMMEKHPNSFPYRSDRGDYVVKLMRIGAICPA

SEQ ID NO: 17729 - DNA, 3299 bp, Muscodor strobelii
  misc_feature: SGI EST ID NO. CUFF.41846.1
  misc_feature: Variant of the nucleotide sequence at SEQ ID NO 17727
caaccgtgaagctcccatcttcaaggtcaaggtcggatcaagttgatcaacaacctcgagctcttccatccacaaccatctcatcctttccctcaccaccaccctctcttcttagttgtacacaccactccgcaagttgatgcggccatcatgatactgccctcgtaggtttgtattgtggtgtccgatccgccttgcctgttcatcctgcacttttgttcgtcgattgtgatagtcggcgcaagcaccacttgactctacgcgctcatcgtccataatcaacactgccgacattgcagtttcctgttcgctgaaattggcccgaccttggaaagcgcgagactccactcgtctgtcattcaatccttgtgcgcgggcgatactgtcaccgcttccatctctccacgtcactgccttcattgcataccccattgaccacccccccacatccaccatgtctctcgacgctcgcgacctcctcgagctacctgccgaggcccagagtggccgtcctaccaagaagcagaagagcgctcccgtcgccaagccgctgaagggcctcgcccgcgaggtccagagcttgggcggcgacaaccccatcgccatcgtgcccgagcccgtcaagatcaagaagcgccgcttcgccagccgcaagcctgccgcccgctggcagcacacgcccttccgcaactcggcccaccccgatccctccttccgcctcaagcactgggtcaaggccaacgacgatgccgccaagcccgcctcgcagccccagcccgatggcctgtcgctcggtgacgataagatggacaccgagggcgacgacgagcccgacgttgaagactccgccttcgccaagttcaacgtcaaggtcgaggtcccccactacaacgacgaccagtacaatgccaatctcgtcagcgacgactggtcccgccacgagactgactacttgatggagctggtggagcagttcgagctgcgctggcccatcatctgggaccgatacgagtacacacccccgggacccgagaatcagagcaatggtgatgcggctagcgccggtacggaccccaacactgccatggtcctgacacccaaggatcgctccatggaagacttgaagaagcgatactacgacgtcgccgccaagatgatgaccgttcagaagcccgtccagtacatgaccaccaccgagttcgccctgcacgagaccatggccaacttcgacccggctgccgagacggagcgcaagaagtttgccaaccaattcatgggccgatctagagaagaggctatggaggaggagcgcctgcttaccgaagtgcgacgcatccagaaatcgcaggccgagttcaatgagcatcgtcgcgagctgtatcgccgtctagactatccttctaccgacaaggatatctcagccttcaaaaccagtgctggtcttagtacgctcctgcagaatctcatggttggcgacaagtccaagaagcgtaagacgctcatggattccaacggcgcaaacacgcccagctccgcccagcccgcctcggcccatcccaactctacccctgtctcagacagccgtcgcggcagcattgccgcttccaatgccggccatcgcgactccatcggtggtggcgctgaacgccctgaccgacctgccaagaagggtgcccaaccggctgagcgcaagaagctcaccgagcaggaggagcagatctacggcgtatcctaccacgaccgtcttccctctggccctgccttccgatacgacaagatcaacaagattttcactacgaagagcaatgctcagcacacgcgcattgccaatactcttaccgagctcgacatcccccagcgtcccaccatgccgacccaagccgtcgtcttggagatggagagactcctcttcagtatcaatatttttctcgacctgaaaaagatcagtgacaagctggatggtgacatcaaggtcgaacagttcaagaagtcggaacgtgaggctgctctgaagcccctccagcccaagtcgagcgataatgcggacaagcccgctgaggctactgcgcagacaggaagctctgagacggctcagaaggagccgaaggatgctgctccagctactggtgtgggccatgataccaccatgactgaagccattgagcttcccagcaaggacgatgatgctggcaaggagacatcaattgctgagggtgtctcgggtggcgagactcagaagtctagtggcactggaacgactgccaatggcggcgagcagtctgcatctggaagtgctggagacaagacaggatctggtgaagagaagcagcagggcactggcagtggccttaagcgtgctgccagtggctctggcgaggctggcgacgatcagaataagcgcccgaagaaatagaaagtctcaggtaacagtcgtccaatcccaaaccatgcagtgctaaaggtggaggtcgagaaattgactgcccgcttaattgaattcaacactcaccgtaagtccatgactgaggcatggcagaagatcaacaaggctaagaagatcgccgacaagagtcaagtcaccgatgaaaaatctcttgccgacaacaaggcattcggtgatgctatagatctggtggacagctcccgcatcgacgtgcagagacaatcgcatgttgtgcgcgtgctcgccggtcgcaatggccagtctctgcccaagtggacatttgagaatttccgatccaagatcttccgcctgtcccagaatgccgaaggccagcctcgaggcatgcgtaccctagagggcacgcaccatagcctccgtgattgtgatgagagtgacgagatgaaggactatctgctcgaggactgggcacatgtactagaaatggagagtctctatacttatatgatggagaagcatccgaattctttcccgtatcgcagtgatagaggcgattatgttgtgaagttgatgcgaatcggcgctatttgtcctgcctagattggttgcagttatcaacgagagatttgtgcgccgaatggcaatggatagtcgttggcgaatcgacagttatagttgtggcacagactcttgcagctggcaatgaaagtcgtgcaccgaatggcgatggatagtcattggcgaattgacgatgatagttgtggtacggactcttgcgcatcgcgttcagatagtgcagccgatgcattaaatcattggttgccagatagcgctcatctttgccgctagcttagtaaatgaacattgtgttctcttatcatgcctttgtgactatttg

SEQ ID NO: 17730 - DNA, 1959 bp, Muscodor strobelii
  misc_feature: SGI cDNA ID NO. 565929
  misc_feature: Reduced expression when VOC is produced
  misc_feature: Encodes the peptide sequence at SEQ ID NO 17731
atgtctctcgacgctcgcgacctcctcgagctacctgccgaggcccagagtggccgtcctaccaagaagcagaagagcgctcccgtcgccaagccgctgaagggcctcgcccgcgaggtccagagcttgggcggcgacaaccccatcgccatcgtgcccgagcccgtcaagatcaagaagcgccgcttcgccagccgcaagcctgccgcccgctggcagcacacgcccttccgcaactcggcccaccccgatccctccttccgcctcaagcactgggtcaaggccaacgacgatgccgccaagcccgcctcgcagccccagcccgatggcctgtcgctcggtgacgataagatggacaccgagggcgacgacgagcccgacgttgaagactccgccttcgccaagttcaacgtcaaggtcgaggtcccccactacaacgacgaccagtacaatgccaatctcgtcagcgacgactggtcccgccacgagactgactacttgatggagctggtggagcagttcgagctgcgctggcccatcatctgggaccgatacgagtacacacccccgggacccgagaatcagagcaatggtgatgcggctagcgccggtacggaccccaacactgccatggtcctgacacccaaggatcgctccatggaagacttgaagaagcgatactacgacgtcgccgccaagatgatgaccgttcagaagcccgtccagtacatgaccaccaccgagttcgccctgcacgagaccatggccaacttcgacccggctgccgagacggagcgcaagaagtttgccaaccaattcatgggccgatctagagaagaggctatggaggaggagcgcctgcttaccgaagtgcgacgcatccagaaatcgcaggccgagttcaatgagcatcgtcgcgagctgtatcgccgtctagactatccttctaccgacaaggatatctcagccttcaaaaccagtgctggtcttagtacgctcctgcagaatctcatggttggcgacaagtccaagaagcgtaagacgctcatggattccaacggcgcaaacacgcccagctccgcccagcccgcctcggcccatcccaactctacccctgtctcagacagccgtcgcggcagcattgccgcttccaatgccggccatcgcgactccatcggtggtggcgctgaacgccctgaccgacctgccaagaagggtgcccaaccggctgagcgcaagaagctcaccgagcaggaggagcagatctacggcgtatcctaccacgaccgtcttccctctggccctgccttccgatacgacaagatcaacaagattttcactacgaagagcaatgctcagcacacgcgcattgccaatactcttaccgagctcgacatcccccagcgtcccaccatgccgacccaagccgtcgtcttggagatggagagactcctcttcagtatcaatatttttctcgacctgaaaaagatcagtgacaagctggatggtgacatcaaggtcgaacagttcaagaagtcggaacgtgaggctgctctgaagcccctccagcccaagtcgagcgataatgcggacaagcccgctgaggctactgcgcagacaggaagctctgagacggctcagaaggagccgaaggatgctgctccagctactggtgtgggccatgataccaccatgactgaagccattgagcttcccagcaaggacgatgatgctggcaaggagacatcaattgctgagggtgtctcgggtggcgagactcagaagtctagtggcactggaacgactgccaatggcggcgagcagtctgcatctggaagtgctggagacaagacaggatctggtgaagagaagcagcagggcactggcagtggccttaagcgtgctgccagtggctctggcgaggctggcgacgatcagaataagcgcccgaagaaatag

SEQ ID NO: 17731 - protein, 652 aa, Muscodor strobelii
  misc_feature: SGI Peptide ID NO. 565929
  misc_feature (2)..(614): NCBI GI: 39945950 Blast Desc: MGG_08095 [Magnaporthe grisea 70-15] gi|145019339|gb|EDK03567.1| MGG_08095 [Magnaporthe grisea 70-15]
  misc_feature (2)..(518): NCBI GI: 171677905 Blast Desc: protein product [Podospora anserina] gi|170937021|emb|CAP61679.1| protein product [Podospora anserina]
  misc_feature (2)..(526): NCBI GI: 256732123 Blast Desc: SWR1-complex protein 4 [Nectria haematococca mpVI 77-13-4]
  misc_feature (2)..(507): NCBI GI: 116201517 Blast Desc: CHGG_08643 [Chaetomium globosum CBS 148.51] gi|88177161|gb|EAQ84629.1| CHGG_08643 [Chaetomium globosum CBS 148.51]
  misc_feature (2)..(521): NCBI GI: 46137105 Blast Desc: FG10068.1 [Gibberella zeae PH-1] gi|84029504|sp|Q4HY90.1|SWC4_GIBZE RecName: Full=SWR1-complex protein 4
  misc_feature (2)..(518): NCBI GI: 156059616 Blast Desc: SS1G_03820 [Sclerotinia sclerotiorum 1980] gi|154701607|gb|EDO01346.1| SS1G_03820 [Sclerotinia sclerotiorum 1980]
  misc_feature (2)..(350): NCBI GI: 164426683 Blast Desc: SWR1-complex protein 4 [Neurospora crassa OR74A] gi|189034065|sp|Q870Q1.2|SWC4_NEUCR RecName: Full=SWR1-complex protein 4 gi|157071433|gb|EAA28381.2| SWR1-complex protein 4
  misc_feature (2)..(350): NCBI GI: 29150117 Blast Desc: conserved [Neurospora crassa]
  misc_feature (113)..(554): NCBI GI: 154292760 Blast Desc: BC1G_14287 [Botryotinia fuckeliana B05.10] gi|150845768|gb|EDN20961.1| BC1G_14287 [Botryotinia fuckeliana B05.10]
  misc_feature (4)..(517): NCBI GI: 212528396 Blast Desc: DNA methyltransferase 1-associated protein DMAP1 [Penicillium marneffei ATCC 18224] gi|210073753|gb|EEA27840.1| DNA methyltransferase 1-associated protein DMAP1 [Penicillium
  misc_feature: Useful for introducing or modulating the production of volatile compounds
MSLDARDLLELPAEAQSGRPTKKQKSAPVAKPLKGLAREVQSLGGDNPIAIVPEPVKIKKRRFASRKPAARWQHTPFRNSAHPDPSFRLKHWVKANDDAAKPASQPQPDGLSLGDDKMDTEGDDEPDVEDSAFAKFNVKVEVPHYNDDQYNANLVSDDWSRHETDYLMELVEQFELRWPIIWDRYEYTPPGPENQSNGDAASAGTDPNTAMVLTPKDRSMEDLKKRYYDVAAKMMTVQKPVQYMTTTEFALHETMANFDPAAETERKKFANQFMGRSREEAMEEERLLTEVRRIQKSQAEFNEHRRELYRRLDYPSTDKDISAFKTSAGLSTLLQNLMVGDKSKKRKTLMDSNGANTPSSAQPASAHPNSTPVSDSRRGSIAASNAGHRDSIGGGAERPDRPAKKGAQPAERKKLTEQEEQIYGVSYHDRLPSGPAFRYDKINKIFTTKSNAQHTRIANTLTELDIPQRPTMPTQAVVLEMERLLFSINIFLDLKKISDKLDGDIKVEQFKKSEREAALKPLQPKSSDNADKPAEATAQTGSSETAQKEPKDAAPATGVGHDTTMTEAIELPSKDDDAGKETSIAEGVSGGETQKSSGTGTTANGGEQSASGSAGDKTGSGEEKQQGTGSGLKRAASGSGEAGDDQNKRPKK

SEQ ID NO: 17732 - DNA, 3299 bp, Muscodor strobelii; identical to SEQ ID NO: 17729
  misc_feature: SGI EST ID NO. CUFF.41846.1
  misc_feature: Variant of the nucleotide sequence at SEQ ID NO 17730

SEQ ID NO: 17733 - DNA, 660 bp, Muscodor strobelii
  misc_feature: SGI cDNA ID NO. 565930
  misc_feature: Reduced expression when VOC is produced
  misc_feature: Encodes the peptide sequence at SEQ ID NO 17734
atgagggcgatactcccgctcctgtcgctgagcagcgttgctcaagcgctctacttcttcatcgacggcacatctcccaagtgcttctacgaagagctgcccaaggacaccatggtggtcggccacttcaccgccgaggagtgggacgacaatacgcggtcgtggtcccagcacgagggcatcaacatctatctctccgtcgacgagctcttcggcgacaaccaccgcgtagtatccaccaagggctcctcgagcggcaagttcaccttcacggcccacgaggcaggcgaccaccagatctgcttcacccccacaagccagggccggtccaccaactggctctccgccctgtcgcccaacggcggcatcaagctcaccctcgacatcgccatcggcgagtccagcgagatccagagcaccgacgccaccaagctgcaggacatctcccagcgcgtcaaggacctcaactcccgcctgcaggacattcgtcgcgagcagatcttccagcgtgaacgggaagcagagttcagagaccagtcagaatccaccaatgcccgcgttgtccgatggatgatcatccagctcgtcgtccttggcgtaacctgcgcatggcaactctcacatctacggtcattcttcatcaagcagaaactcacgtaa

SEQ ID NO: 17734 - protein, 219 aa, Muscodor strobelii
  misc_feature: SGI Peptide ID NO. 565930
  misc_feature (46)..(115): Pfam Id: PF01105 Pfam Desc: emp24/gp25L/p24 family/GOLD
  misc_feature (46)..(106): Pfam Id: PF01105 Pfam Desc: emp24/gp25L/p24 family/GOLD
  misc_feature (1)..(219): NCBI GI: 85086072 Blast Desc: NCU04003 [Neurospora crassa OR74A] gi|28918712|gb|EAA28382.1| NCU04003 [Neurospora crassa OR74A] gi|29150118|emb|CAD79678.1| related to p24 protein, involved in
  misc_feature (1)..(219): NCBI GI: 261351718 Blast Desc: transmembrane emp24 domain-containing protein [Verticillium albo-atrum VaMs.102]
  misc_feature (1)..(219): NCBI GI: 39945952 Blast Desc: conserved [Magnaporthe grisea 70-15] gi|59802948|gb|AAX07678.1| ERP1 protein-like protein [Magnaporthe grisea] gi|145019340|gb|EDK03568.1| conserved [Magnaporthe grisea
  misc_feature (1)..(219): NCBI GI: 116201519 Blast Desc: conserved [Chaetomium globosum CBS 148.51] gi|88177162|gb|EAQ84630.1| conserved [Chaetomium globosum CBS 148.51]
  misc_feature (1)..(219): NCBI GI: 154289018 Blast Desc: ERP1 protein precursor [Botryotinia fuckeliana B05.10] gi|150851752|gb|EDN26945.1| ERP1 protein precursor [Botryotinia fuckeliana B05.10]
  misc_feature (1)..(219): NCBI GI: 46137103 Blast Desc: FG10067.1 [Gibberella zeae PH-1]
  misc_feature (1)..(219): NCBI GI: 156059614 Blast Desc: SS1G_03819 [Sclerotinia sclerotiorum 1980] gi|154701606|gb|EDO01345.1| SS1G_03819 [Sclerotinia sclerotiorum 1980]
  misc_feature (1)..(219): NCBI GI: 171677903 Blast Desc: protein product [Podospora anserina] gi|170937020|emb|CAP61678.1| protein product [Podospora anserina]
  misc_feature (15)..(219): NCBI GI: 256731738 Blast Desc: [Nectria haematococca mpVI 77-13-4]
  misc_feature (3)..(219): NCBI GI: 238838619 Blast Desc: ERP6 [Microsporum canis CBS 113480]
  misc_feature: Useful for introducing or modulating the production of volatile compounds
MRAILPLLSLSSVAQALYFFIDGTSPKCFYEELPKDTMVVGHFTAEEWDDNTRSWSQHEGINIYLSVDELFGDNHRVVSTKGSSSGKFTFTAHEAGDHQICFTPTSQGRSTNWLSALSPNGGIKLTLDIAIGESSEIQSTDATKLQDISQRVKDLNSRLQDIRREQIFQREREAEFRDQSESTNARVVRWMIIQLVVLGVTCAWQLSHLRSFFIKQKLT

SEQ ID NO: 17735 - DNA, 1363 bp, Muscodor strobelii
  misc_feature: SGI EST ID NO. CUFF.41716.0
  misc_feature: Variant of the nucleotide sequence at SEQ ID NO 17733
ctgagacagttgtaggccgatgagggcgggtttcagggagagctgtggcggcagactgtggccctagacgatgtcgcccacccctgtcctgaattcgtacagtggaacgtggcaccttgacgagtggtacaatcgtgagatctgaagtcaacttcatttacacgactacaccggcgcgcaccgtctacgacgtttcaaaccccctattactgccgatataccctcctcgacttcgatctcctcccaagagctcccaattgcgcccacaccggcgtcggggccaccacgatgagggcgatactcccgctcctgtcgctgagcagcgttgctcaagcgctctacttcttcatcgacggcacatctcccaagtgcttctacgaagagctgcccaaggacaccatggtggtcggccacttcaccgccgaggagtgggacgacaatacgcggtcgtggtcccagcacgagggcatcaacatctatctctccgtcgacgagctcttcggcgacaaccaccgcgtagtatccaccaagggctcctcgagcggcaagttcaccttcacggcccacgaggcaggcgaccaccagatctgcttcacccccacaagccagggccggtccaccaactggctctccgccctgtcgcccaacggcggcatcaagctcaccctcgacatcgccatcggcgagtccagcgagatccagagcaccgacgccaccaagctgcaggacatctcccagcgcgtcaaggacctcaactcccgcctgcaggacattcgtcgcgagcagatcttccagcgtgaacgggaagcagagttcagagaccagtcagaatccaccaatgcccgcgttgtccgatggatgatcatccagctcgtcgtccttggcgtaacctgcgcatggcaactctcacatctacggtcattcttcatcaagcagaaactcacgtaaccgagcaatagatatagggagaagggcacagtcaccgctacggccaaatctaattgggtcagacacagcgaggagttggttgagtatggagggcaaaggggtgcggaaaagctgttggagcgctatgtggcattttgatataattgcctctgtaatgatatgcacgacacatcaacaaagagaagatattgagagatcaaatcgaagaaccttgttgaatgtctatctgatttacattactaagttatatgtggcacatataaagacgatatcgtcttcttcgtccacggcttggctcgactttgagatcatataatatttggcaggagaggttctcgtgcttaacatctagcatgagcatgttgactttctctcatggtagtgataacactggatacatgccacagagtaattg

SEQ ID NO: 17736 - DNA, 2304 bp, Muscodor strobelii
  misc_feature: SGI cDNA ID NO. 565931
  misc_feature: Encodes the peptide sequence at SEQ ID NO 17737
atgatctcgtggctgactctcgatcgatcgacacatagtcaacagatggaccgaatgatgaatgacagagcgcgggcaactcaagacaatgctattcaagacttgagcacggatattcgggcttttatggagggatgcagggcctggcagatcgatctcttcgaggagtactatagaaactcaaagtccagctcggtgtccgatgacactgtaattttctccaatgggctgtcttcgtctatcgagaaggagagggaggatcgtttcaagaaactcatattgaggcgtctttccttcaacgagttagctagtcgcgaggacgaggtctgtaccgctcatcgccacaccttcaagtggctcttggacgatggcaaggatgggtcagccgccgaaatgctcgacttcgttccctggcttcgcgccaatgacggaaacaacttatactggatcacgggcaaggcgggatccggaaagtcaacactggccaagttagttcttcaggacccgcgaactgggaactatttaaaagatggtgaatgggttggggggaaagatttgttgattattcccttctttttctggaacccgggatcacacctgcaaaaatcacgggaaggattactgcgtacccttctgtatgagatcttctgcaggcacccagagatgatacccaatgcattcagtcacaggtttcaatcgtattatcccagcagggtgcaagcgatggacgagtggcaatggtcgtggaccgagctgaggcgcgccatccaaacggtgctgggggacgcgtctcggaggtatttcatcctggtcgacgggttggacgagctagaaggaacagaggaaaaagcaaagactaaacagactcaagagaccattgacttgttcatcctactagcgaaattgcctcaagtcaagatatgtgtgtcgagccggccatggctgatcttcgaagatgctttcgaggaaaagccgagtctgactatggagtatctaacacgactagatatcaccgtctacgtaaaagattgcttcgaggggaacaagcatttcgtcaagctcgaaaagcaagatccgacttttgcgtcacaactagttaccaacgttgtcgacaaggccgccggcgtcttcctctgggtcgacctcgtggtaaaatcgctacttacaggtctgtccaactcagacggcatttcagacttgcaagcgcgactcgacgagctcccatccgagttggagttgctgttcgacaggatactggggaaccttgacccgttttaccgcgcgcacgcttcgaaattgttcatgaccgtcgaggcttacatcgacatgatgagcgagccagatgaccggggcacactcccattcacgctgctgaagctattcttcgcggataacgagaatccaatgtcggcgatcgaggcttcgatcggcgcgcttacgcccgaagattcaaatgagaaggaggaggcaatgcgccgaaggttgaacgtccgatgcggcggactgctcgaggcaactgaacctgccgccagcgacagctcagttgcaccccgcgtccgtttcctctcgcgtcgggcgccacagggaagcgtcgtccgctatctgcataggacagccagggactacatccgaggtcgcgacacctggaagaaaatcctggcctcggcagggccttcattcgatccataccgctgtatcgccaattcgctactgattcagctcaagatcacggatctccagactttagacttgagccagtttctcatgaccacgtcaaagtactgttacgcgctgagcttcatcgaatccagcgaggtggcgcacttcacagtcagttacctcgacgagatggaccggacgggaaacgtaattctcaaagaaggtctcgccaaaaacgcgccgttcgctgtcccccagaagcacaacatcaaacggccgaactggatacggttgtacacggcgtatgtcatagtatccctggtagactacgcggtatgcaacccgccagacttcaagacgctcggcgtcgcgtcggcgcgatcttcagcgaaagagcgcacagcgatcgacaagacgttgaccgcctatgcggttgccaagatcggagctatggcgccgctcgaccgcgccgcagcggcttactggctgaacaagtcagagaataaggagatcacgcaagctataaagacggcatgtccgcacgctcttactgccaagcggccgatgacagaagaacaaaagaaggagcacagaggatcgagctggatacggagcttaattgtctctatgaagcgggagaagtaa

SEQ ID NO: 17737 - protein, 767 aa, Muscodor strobelii
  misc_feature: SGI Peptide ID NO. 565931
  misc_feature (77)..(575): NCBI GI: 171682584 Blast Desc: protein product [Podospora anserina] gi|170941251|emb|CAP66901.1| protein product [Podospora anserina]
  misc_feature (42)..(575): NCBI GI: 225684243 Blast Desc: conserved [Paracoccidioides brasiliensis Pb03]
  misc_feature (42)..(575): NCBI GI: 226293863 Blast Desc: conserved [Paracoccidioides brasiliensis Pb18]
  misc_feature (68)..(575): NCBI GI: 261190024 Blast Desc: conserved [Ajellomyces dermatitidis SLH14081] gi|239591250|gb|EEQ73831.1| conserved [Ajellomyces dermatitidis SLH14081]
  misc_feature (72)..(543): NCBI GI: 46116306 Blast Desc: FG03995.1 [Gibberella zeae PH-1]
  misc_feature (93)..(621): NCBI GI: 238501160 Blast Desc: conserved [Aspergillus flavus NRRL3357] gi|220692051|gb|EED48398.1| conserved [Aspergillus flavus NRRL3357]
  misc_feature (77)..(619): NCBI GI: 154293653 Blast Desc: BC1G_14084 [Botryotinia fuckeliana B05.10] gi|150845240|gb|EDN20433.1| BC1G_14084 [Botryotinia fuckeliana B05.10]
  misc_feature (13)..(437): NCBI GI: 154298433 Blast Desc: BC1G_11401 [Botryotinia fuckeliana B05.10] gi|150857997|gb|EDN33189.1| BC1G_11401 [Botryotinia fuckeliana B05.10]
  misc_feature (77)..(575): NCBI GI: 145252046 Blast Desc: An16g02230 [Aspergillus niger] gi|134083079|emb|CAL00447.1| protein product [Aspergillus niger]
  misc_feature (92)..(601): NCBI GI: 256721251 Blast Desc: NECHADRAFT_34792 [Nectria haematococca mpVI 77-13-4]
MISWLTLDRSTHSQQMDRMMNDRARATQDNAIQDLSTDIRAFMEGCRAWQIDLFEEYYRNSKSSSVSDDTVIFSNGLSSSIEKEREDRFKKLILRRLSFNELASREDEVCTAHRHTFKWLLDDGKDGSAAEMLDFVPWLRANDGNNLYWITGKAGSGKSTLAKLVLQDPRTGNYLKDGEWVGGKDLLIIPFFFWNPGSHLQKSREGLLRTLLYEIFCRHPEMIPNAFSHRFQSYYPSRVQAMDEWQWSWTELRRAIQTVLGDASRRYFILVDGLDELEGTEEKAKTKQTQETIDLFILLAKLPQVKICVSSRPWLIFEDAFEEKPSLTMEYLTRLDITVYVKDCFEGNKHFVKLEKQDPTFASQLVTNVVDKAAGVFLWVDLVVKSLLTGLSNSDGISDLQARLDELPSELELLFDRILGNLDPFYRAHASKLFMTVEAYIDMMSEPDDRGTLPFTLLKLFFADNENPMSAIEASIGALTPEDSNEKEEAMRRRLNVRCGGLLEATEPAASDSSVAPRVRFLSRRAPQGSVVRYLHRTARDYIRGRDTWKKILASAGPSFDPYRCIANSLLIQLKITDLQTLDLSQFLMTTSKYCYALSFIESSEVAHFTVSYLDEMDRTGNVILKEGLAKNAPFAVPQKHNIKRPNWIRLYTAYVIVSLVDYAVCNPPDFKTLGVASARSSAKERTAIDKTLTAYAVAKIGAMAPLDRAAAAYWLNKSENKEITQAIKTACPHALTAKRPMTEEQKKEHRGSSWIRSLIVSMKREK

SEQ ID NO: 17738 - DNA, 3532 bp, Muscodor strobelii
  misc_feature: SGI EST ID NO. CUFF.41722.0
  misc_feature: Variant of the nucleotide sequence at SEQ ID NO 17736
tctttcttgcgggactctctgggctttcaggttgggttaggtattcaacttttcgtgcgcggcagcctcaacagtcaattacgatgacaatacgtctatgcccggaaatcgaggccgtgtagggaaacatacatctcgttatggctttgcacttttcatcaaggacagaagatgatgacctgggcgctttggtaggaaattgatggcatcgccacattttgggggccttctccacccgaatgcctgcaggccgcggagggtagtgaggctaggccgttgattacagcatgtagctgacctctttcgattctccaattctcatatgttgctttagtaattctgctgcttgtttaccttcgccaatggatcccgcatcggcctttggcattgcgaccaacgccattgctctagttgacttcgttgggaaactcgtcggcaagggctataagatctatcatgacgccgaagctgcgttcggcgggaccgaatccctgcaagacacggcacggaatctggaggacctgaccaagacagccgaggcaggaccggtcgggaatccgttagccttgcggccgcggacaaattcttggagatcgaaggggctcaagggacagcatgacgctaagtcggcggcagagaagcaattggaaaatctgaaccgggagagtcagcgggctgccgcggacctattgggtgccatcagggagatcatagccatgccgcgcacaacaaggtggcacacgttcgtccaggcgttggcatgcatctggaaagaatctgaaatacgggctttccaagatgagattgatcgcattcgcaagcagctcgacactaccctgttggtgtgtcttcgatggaccgaatgatgaatgacagagcgcgggcaactcaagacaatgctattcaagacttgagcacggatattcgggcttttatggagggatgcagggcctggcagatcgatctcttcgaggagtactatagaaactcaaagtccagctcggtgtccgatgacactgtaattttctccaatgggctgtcttcgtctatcgagaaggagagggaggatcgtttcaagaaactcatattgaggcgtctttccttcaacgagttagctagtcgcgaggacgaggtctgtaccgctcatcgccacaccttcaagtggctcttggacgatggcaaggatgggtcagccgccgaaatgctcgacttcgttccctggcttcgcgccaatgacggaaacaacttatactggatcacgggcaaggcgggatccggaaagtcaacactggccaagttagttcttcaggacccgcgaactgggaactatttaaaagatggtgaatgggttggggggaaagatttgttgattattcccttctttttctggaacccgggatcacacctgcaaaaatcacgggaaggattactgcgtacccttctgtatgagatcttctgcaggcacccagagatgatacccaatgcattcagtcacaggtttcaatcgtattatcccagcagggtgcaagcgatggacgagtggcaatggtcgtggaccgagctgaggcgcgccatccaaacggtgctgggggacgcgtctcggaggtatttcatcctggtcgacgggttggacgagctagaaggaacagaggaaaaagcaaagactaaacagactcaagagaccattgacttgttcatcctactagcgaaattgcctcaagtcaagatatgtgtgtcgagccggccatggctgatcttcgaagatgctttcgaggaaaagccgagtctgactatggagtatctaacacgactagatatcaccgtctacgtaaaagattgcttcgaggggaacaagcatttcgtcaagctcgaaaagcaagatccgacttttgcgtcacaactagttaccaacgttgtcgacaaggccgccggcgtcttcctctgggtcgacctcgtggtaaaatcgctacttacaggtctgtccaactcagacggcatttcagacttgcaagcgcgactcgacgagctcccatccgagttggagttgctgttcgacaggatactggggaaccttgacccgttttaccgcgcgcacgcttcgaaattgttcatgaccgtcgaggcttacatcgacatgatgagcgagccagatgaccggggcacactcccattcacgctgctgaagctattcttcgcggataacgagaatccaatgtcggcgatcgaggcttcgatcggcgcgcttacgcccgaagattcaaatgagaaggaggaggcaatgcgccgaaggttgaacgtccgatgcggcggactgctcgaggcaactgaacctgccgccagcgacagctcagttgcaccccgcgtccgtttcctctcgcgtcgggcgccacagggaagcgtcgtccgctatctgcataggacagccagggactacatccgaggtcgcgacacctggaagaaaatcctggcctcggcagggccttcattcgatccataccgctgtatcgccaattcgctactgattcagctcaagatcacggatctccagactttagacttgagccagtttctcatgaccacgtcaaagtactgttacgcgctgagcttcatcgaatccagcgaggtggcgcacttcacagtcagttacctcgacgagatggaccggacgggaaacgtaattctcaaagaaggtctcgccaaaaacgcgccgttcgctgtcccccagaagcacaacatcaaacggccgaactggatacggttgtacacggcgtatgtcatagtatccctggtagactacgcggtatgcaacccgccagacttcaagacgctcggcgtcgcgtcggcgcgatcttcagcgaaagagcgcacagcgatcgacaagacgttgaccgcctatgcggttgccaagatcggagctatggcgccgctcgaccgcgccgcagcggcttactggctgaacaagtcagagaataaggagatcacgcaagctataaagacggcatgtccgcacgctcttactgccaagcggccgatgacagaagaacaaaagaaggagcacagaggatcgagctggatacggagcttaattgtctctatgaagcgggagaagtaactacagggaggtatatttgacgctatctgcctgaggacactcatcgaaacatcttttggtattgaacgttctttgcgatccagcgattgatacccatccattgacttaaagccattctgaaactcaaccttccgctgcactttgaacgcacaggcattgcaagacctgtctatggccctccgggggacgagcaacacactttagagagtgacatccgaatacgaatgacggaagctatgagatatacccataattatttagttatctactttgataggatagttggagcgagctatcttcttatagcgcctcaaagtcacaaatgggggcttagactgtgtccctctaatttgacagctagacttcaacaccctttctagaaaacgccggaaccggagaaccaattctgcaacataaaac

SEQ ID NO: 17739 - DNA, 471 bp, Muscodor strobelii
  misc_feature: SGI cDNA ID NO. 565932
  misc_feature: Reduced expression when VOC is produced
  misc_feature: Encodes the peptide sequence at SEQ ID NO 17740
atgcacgacggcgtctactacggcgtctactaccccgtgcactactgcctctaccacgccatgcactacggcccaacctactatcccgcaccaccagtgcaccatgagcctcctcaccacgagccgcctcatcatcctcccaaggagatcccccaccacccgcacgcgcctccccagcacaaggagcctgagttccaggtcccggagcaccctcatcctcccgtgcaccaagagcctgagcgtcctcaccctcccgtgcatcaggagcctcctcgtccacctgtgcaccaggagccggagcacccgccggagcagcgcccggagccgaagaagcccgagatccccttccaccctcctgaggctcccaagccgccgcagcacatcccgcacaacgacgctcccggccaaggtctgggagtcggaaagacctttgccgctgctgccggtcttttcgccgctgcactattctaa

SEQ ID NO: 17740 - protein, 156 aa, Muscodor strobelii
  misc_feature: SGI Peptide ID NO. 565932
  misc_feature: Useful for introducing or modulating the production of volatile compounds
MHDGVYYGVYYPVHYCLYHAMHYGPTYYPAPPVHHEPPHHEPPHHPPKEIPHHPHAPPQHKEPEFQVPEHPHPPVHQEPERPHPPVHQEPPRPPVHQEPEHPPEQRPEPKKPEIPFHPPEAPKPPQHIPHNDAPGQGLGVGKTFAAAAGLFAAALF

SEQ ID NO: 17741 - DNA, 2958 bp, Muscodor strobelii
  misc_feature: SGI cDNA ID NO. 565933
  misc_feature: Encodes the peptide sequence at SEQ ID NO 17742
atggctggaatagaacgcttggagatccatagcaagtcctacattgtgcgatgggtcaaagtcgatgaaggccacaccatatcttggagtgtccagcccgatagaaaatctattaacttcggcatcgtcaagcaccctggctccggagccaccaacttccattctgcccacggcgaccccgacctgaccctcgaacagctcgacggctccgaaggcaacgctaagagtagtcgcttcgccaagaaagatgtcggcaatgcgcgcgagcagctcgccagcaaaggcttcatcctgataaactggtacggaaaatgtgaggcagacaaggtgtccatgggcacccacgacgtcaccaaaggccagggcggcatgttcggcctgatcttcgacaacaccttctccaaacagactggcaagaccgcgacctttgtcctcctgacctatccgaccgatgcgcctcccaaaggcgccgattacctacccaacatggtagccaacaccactcagacgagtcttgggaagagcccgcgtatcggggctgcaggcgactcggccgagagtctcaactcgtatcccgagaggcagagacaaacctcgattgctggtcggagtgatccaggaagcgcgagatcttcttaccacacaggcacgctcatgaagaggcgcaggaagaagggccaaggtcatgctcgccgcttcttctcactcgattactcgtcatgcaccttgtcgtactaccacaatcgaaacagctccgccctcagaggtgctatccccctaagtcttgctgccatcaccgccgacgagcggcgacgcgagatcagcatcgattccggtgctgaagtctggcatctccgagcgtcaaatgataaggaattcaaagaatgggcacaagcacttgagcgcgccagcagggtcgcaagagggctagaatcagtcccggaaccaactaggaccaagacagacaggttttctgtcgtcgcgccacaggtttccgaggtcgtgaacagtccgcaggaagcggatcgagactggcagcaagtcgaggccctggtaagccgaatagtaggaactcgcgatgctctccgtcgtctggtcaaggacatggcagcggaaaagcatgcggcgcatcctgtgacctcccacatgtcacctgcgagccacttgacacccgcgagcgcagatatctcggacagtggagatggttatttccctgcatcgcaggagaaacggcccttctggaaacgcaaatcaagcgcgcaactacgaccgcaaagcgtcttagctcccgctgtatcctcgtctttagctgtgcccgctccagcttctgctttagccgccagtgctaatggcgcgcaacgtagctcaagagaggagaaaactacagaggaccattgcgccgcattgctcaacgacttagatctagtggtaaatgagttcacaaatgtactcgcaaacagcaagaggcggcgactaccgttaccaagggcttctacggcgagattgagcatggaatcatcattatctgcagatgagtttttcgacgcagaagtaggggagcccatgagtagttctagcatggtaatgattgatcgccgtgcaagcgatgtggattcacccgagtcagatgctggcgaatctattgacgatgcctcttccatttcttcagtcgagagcgacgcagatctcggcgacagaagcggagcagcagccctctttccatccaaacctaaaagcttacatccgttacctgtcgacatagcagtcgatcggaggaatactgtccccagcgccacaatcccaccacctagccttatcgcatttgtacgtaaaaatgtcggcaaagacctaagtactattagtatgccggtttctgctaacgagcctacgtcaatgcttcagcgagtcgcggaacagttagagtatgcccaacttcttgatcaagcagcgagtcagaatattcctagagatagactgctattcgtcacggcatttgctatctcgtcatttagcgtgaatcgggcgaaagagcgggcgattcggaagccatttaatcccctactaggcgagacttttgaactcctccgtggcgagaacgagacaccaggtgctttccgtctactggtcgagaaagtcacgcacagacctgtcagacttgccatgcaagccgatgccgagaaatggagcttagcgcagagtccagcgccaggccagaagttctggggaaagagcgcggagatcacgacggacggccgagtgcgcgtcgcactgcatttatctgatgggtctgacgagctgtattcttggaacatcggcacgatgttcctgaggaatgtcgttatgggcgagaaatacgtcgagcctgttggtaccatgaccgtgtccaatgaaacgactggcgcaaaagctcagatcgaattcaagactaagggcatgttcggggggaggtgcgaggacgtacatgtcgatgtctatggacctgatggggcgccgacgggcatctgtctacaggggacttggacgaagagtcttcatgttgtcgaggggggcaaatccacagggcaggagatctggaaagtcggcaacctagtgcctaacgctgctaatacatatggtctcacgacttttgctgcgggtctgaatgagattacggaggtggagaagggaagacttccaccgactgacactcgtctgagaccggaccagagactggcggaacagggtaagctagatgatgcggaggagtggaaagtcaagcttgaggaggcgcaacggaggaggaggagggaacttgaggagagcggggaggaatatagaccgaagtggtttactagagtccaggatgcgcctgatggggaagaactttggaagtataagggtgggaaggaggggtattgggaggagaggggacgaggtgggtggaagggcgttgagaggatttttgaggctgatgcttag

SEQ ID NO: 17742 - protein, 985 aa, Muscodor strobelii
  misc_feature: SGI Peptide ID NO. 565933
  misc_feature (21)..(147): Pfam Id: PF01105 Pfam Desc: emp24/gp25L/p24 family/GOLD
  misc_feature (212)..(305): Pfam Id: PF00169 Pfam Desc: PH domain
  misc_feature (566)..(971): Pfam Id: PF01237 Pfam Desc: Oxysterol-binding protein
  misc_feature (566)..(829): Pfam Id: PF01237 Pfam Desc: Oxysterol-binding protein
  misc_feature (856)..(971): Pfam Id: PF01237 Pfam Desc: Oxysterol-binding protein
  misc_feature (1)..(981): NCBI GI: 116179810 Blast Desc: CHGG_00533 [Chaetomium globosum CBS 148.51] gi|88184830|gb|EAQ92298.1| CHGG_00533 [Chaetomium globosum CBS 148.51]
  misc_feature (1)..(981): NCBI GI: 171691777 Blast Desc: protein product [Podospora anserina] gi|170945837|emb|CAP72638.1| protein product [Podospora anserina]
  misc_feature (1)..(982): NCBI GI: 145610925 Blast Desc: MGG_11490 [Magnaporthe grisea 70-15] gi|145018261|gb|EDK02540.1| MGG_11490 [Magnaporthe grisea 70-15]
  misc_feature (1)..(976): NCBI GI: 256732197 Blast Desc: [Nectria haematococca mpVI 77-13-4]
  misc_feature (1)..(981): NCBI GI: 85091338 Blast Desc: NCU04610 [Neurospora crassa OR74A] gi|21622503|emb|CAD37050.1| related to OSBP-related protein 7 [Neurospora crassa] gi|28920241|gb|EAA29617.1| conserved crassa
  misc_feature (1)..(982): NCBI GI: 46136931 Blast Desc: FG09981.1 [Gibberella zeae PH-1]
  misc_feature (1)..(981): NCBI GI: 261352008 Blast Desc: oxysterol-binding protein [Verticillium albo-atrum VaMs.102]
  misc_feature (1)..(982): NCBI GI: 154316779 Blast Desc: BC1G_03807 [Botryotinia fuckeliana B05.10] gi|150845419|gb|EDN20612.1| BC1G_03807 [Botryotinia fuckeliana B05.10]
  misc_feature (1)..(971): NCBI GI: 156043569 Blast Desc: SS1G_10788 [Sclerotinia sclerotiorum 1980] gi|154695175|gb|EDN94913.1| SS1G_10788 [Sclerotinia sclerotiorum 1980]
  misc_feature (1)..(982): NCBI GI: 238506038 Blast Desc: oxysterol binding protein (Osh3), [Aspergillus flavus NRRL3357] gi|220690335|gb|EED46685.1| oxysterol binding protein (Osh3), [Aspergillus flavus NRRL3357]
MAGIERLEIHSKSYIVRWVKVDEGHTISWSVQPDRKSINFGIVKHPGSGATNFHSAHGDPDLTLEQLDGSEGNAKSSRFAKKDVGNAREQLASKGFILINWYGKCEADKVSMGTHDVTKGQGGMFGLIFDNTFSKQTGKTATFVLLTYPTDAPPKGADYLPNMVANTTQTSLGKSPRIGAAGDSAESLNSYPERQRQTSIAGRSDPGSARSSYHTGTLMKRRRKKGQGHARRFFSLDYSSCTLSYYHNRNSSALRGAIPLSLAAITADERRREISIDSGAEVWHLRASNDKEFKEWAQALERASRVARGLESVPEPTRTKTDRFSVVAPQVSEVVNSPQEADRDWQQVEALVSRIVGTRDALRRLVKDMAAEKHAAHPVTSHMSPASHLTPASADISDSGDGYFPASQEKRPFWKRKSSAQLRPQSVLAPAVSSSLAVPAPASALAASANGAQRSSREEKTTEDHCAALLNDLDLVVNEFTNVLANSKRRRLPLPRASTARLSMESSLSADEFFDAEVGEPMSSSSMVMIDRRASDVDSPESDAGESIDDASSISSVESDADLGDRSGAAALFPSKPKSLHPLPVDIAVDRRNTVPSATIPPPSLIAFVRKNVGKDLSTISMPVSANEPTSMLQRVAEQLEYAQLLDQAASQNIPRDRLLFVTAFAISSFSVNRAKERAIRKPFNPLLGETFELLRGENETPGAFRLLVEKVTHRPVRLAMQADAEKWSLAQSPAPGQKFWGKSAEITTDGRVRVALHLSDGSDELYSWNIGTMFLRNVVMGEKYVEPVGTMTVSNETTGAKAQIEFKTKGMFGGRCEDVHVDVYGPDGAPTGICLQGTWTKSLHVVEGGKSTGQEIWKVGNLVPNAANTYGLTTFAAGLNEITEVEKGRLPPTDTRLRPDQRLAEQGKLDDAEEWKVKLEEAQRRRRRELEESGEEYRPKWFTRVQDAPDGEELWKYKGGKEGYWEERGRGGWKGVERIFEADA

SEQ ID NO: 17743 - DNA, 3872 bp, Muscodor strobelii
  misc_feature: SGI EST ID NO. CUFF.41734.0
  misc_feature: Variant of the nucleotide sequence at SEQ ID NO 17741
cgactccatagctgcgcaaaggtgagagagtgcgacggagtgcgggcatcagatcaccatcgccctaaacgggagcctgcttggccctacgagctgcaaatcgcaagctgcacccttcataataatagcaccacatgatcttacgactgtaatacaaactaagtatacacactagaccacacctaatattcctaccgaggcattctcattcttgcattcttacgccgcctaaaaggaaagacatttggtcacgctgctgcccacgcccgtgctttgctagccaaacgtcttttcaagtttgactctctccctaccccaacggtggcccgcccgacacgaacgcgatccgtacacgttgagccccgtcgatccaaagccgcatcatatcgctcgaacctctcgcatcaccaagtgtagcagtgttatgtgttatggtcacacacagccgagcatgcgtttctagacgatcccctctggtttctgtgttcgccattcgttggactcataccctctctacgtcactccaaagctgtccgtacaatggctggaatagaacgcttggagatccatagcaagtcctacattgtgcgatgggtcaaagtcgatgaaggccacaccatatcttggagtgtccagcccgatagaaaatctattaacttcggcatcgtcaagcaccctggctccggagccaccaacttccattctgcccacggcgaccccgacctgaccctcgaacagctcgacggctccgaaggcaacgctaagagtagtcgcttcgccaagaaagatgtcggcaatgcgcgcgagcagctcgccagcaaaggcttcatcctgataaactggtacggaaaatgtgaggcagacaaggtgtccatgggcacccacgacgtcaccaaaggccagggcggcatgttcggcctgatcttcgacaacaccttctccaaacagactggcaagaccgcgacctttgtcctcctgacctatccgaccgatgcgcctcccaaaggcgccgattacctacccaacatggtagccaacaccactcagacgagtcttgggaagagcccgcgtatcggggctgcaggcgactcggccgagagtctcaactcgtatcccgagaggcagagacaaacctcgattgctggtcggagtgatccaggaagcgcgagatcttcttaccacacaggcacgctcatgaagaggcgcaggaagaagggccaaggtcatgctcgccgcttcttctcactcgattactcgtcatgcaccttgtcgtactaccacaatcgaaacagctccgccctcagaggtgctatccccctaagtcttgctgccatcaccgccgacgagcggcgacgcgagatcagcatcgattccggtgctgaagtctggcatctccgagcgtcaaatgataaggaattcaaagaatgggcacaagcacttgagcgcgccagcagggtcgcaagagggctagaatcagtcccggaaccaactaggaccaagacagacaggttttctgtcgtcgcgccacaggtttccgaggtcgtgaacagtccgcaggaagcggatcgagactggcagcaagtcgaggccctggtaagccgaatagtaggaactcgcgatgctctccgtcgtctggtcaaggacatggcagcggaaaagcatgcggcgcatcctgtgacctcccacatgtcacctgcgagccacttgacacccgcgagcgcagatatctcggacagtggagatggttatttccctgcatcgcaggagaaacggcccttctggaaacgcaaatcaagcgcgcaactacgaccgcaaagcgtcttagctcccgctgtatcctcgtctttagctgtgcccgctccagcttctgctttagccgccagtgctaatggcgcgcaacgtagctcaagagaggagaaaactacagaggaccattgcgccgcattgctcaacgacttagatctagtggtaaatgagttcacaaatgtactcgcaaacagcaagaggcggcgactaccgttaccaagggcttctacggcgagattgagcatggaatcatcattatctgcagatgagtttttcgacgcagaagtaggggagcccatgagtagttctagcatggtaatgattgatcgccgtgcaagcgatgtggattcacccgagtcagatgctggcgaatctattgacgatgcctcttccatttcttcagtcgagagcgacgcagatctcggcgacagaagcggagcagcagccctctttccatccaaacctaaaagcttacatccgttacctgtcgacatagcagtcgatcggaggaatactgtccccagcgccacaatcccaccacctagccttatcgcatttgtacgtaaaaatgtcggcaaagacctaagtactattagtatgccggtttctgctaacgagcctacgtcaatgcttcagcgagtcgcggaacagttagagtatgcccaacttcttgatcaagcagcgagtcagaatattcctagagatagactgctattcgtcacggcatttgctatctcgtcatttagcgtgaatcgggcgaaagagcgggcgattcggaagccatttaatcccctactaggcgagacttttgaactcctccgtggcgagaacgagacaccaggtgctttccgtctactggtcgagaaagtcacgcacagacctgtcagacttgccatgcaagccgatgccgagaaatggagcttagcgcagagtccagcgccaggccagaagttctggggaaagagcgcggagatcacgacggacggccgagtgcgcgtcgcactgcatttatctgatgggtctgacgagctgtattcttggaacatcggcacgatgttcctgaggaatgtcgttatgggcgagaaatacgtcgagcctgttggtaccatgaccgtgtccaatgaaacgactggcgcaaaagctcagatcgaattcaagactaagggcatgttcggggggaggtgcgaggacgtacatgtcgatgtctatggacctgatggggcgccgacgggcatctgtctacaggggacttggacgaagagtcttcatgttgtcgaggggggcaaatccacagggcaggagatctggaaagtcggcaacctagtgcctaacgctgctaatacatatggtctcacgacttttgctgcgggtctgaatgagattacggaggtggagaagggaagacttccaccgactgacactcgtctgagaccggaccagagactggcggaacagggtaagctagatgatgcggaggagtggaaagtcaagcttgaggaggcgcaacggaggaggaggagggaacttgaggagagcggggaggaatatagaccgaagtggtttactagagtccaggatgcgcctgatggggaagaactttggaagtataagggtgggaaggaggggtattgggaggagaggggacgaggtgggtggaagggcgttgagaggatttttgaggctgatgcttaggtggttgatgctcttacgaatactggcacgaaggggaatggtgaggggaggaaagggaaaaggaatagggctagggagaggtggaggaaggctgctgcgatggtccgtgggtgatcgcttcgtcttgaccgggcaaatgatgcccgggaagaatgagaagtacgaggagcacgagaagtgcccggtgatgagaacattgaagttaagaaagagaaaaggagttgggcatagagcagagagcagagcgaagcgtttgaatagatggcgatacctttcgttgttgagtaggtcatgaatataccttacctagatccttatctacctatagataccttggattggcttactgcgagttatgaaatcctattctccat

SEQ ID NO: 17744 - DNA, 1965 bp, Muscodor strobelii
  misc_feature: SGI cDNA ID NO. 565934
  misc_feature: Encodes the peptide sequence at SEQ ID NO 17745
atgcatttacacgccctcacgcacatactcaccatcctcacactccctctcctttccctctcatctccatctccaacacttaaccccgactctaccacctcagcagaaacaccagctttcacatacaaccgcacaaccttcctactcaatggctcgccctacataataataggcggacaaatggatccgcagcgcattcctcgagcctactggcgcgatcggctcgcagccgcacgagccatgggtctcaatacaatcttcagctacgtatactggaacctactcgagcccacccagggctcatggaccactcaatctgtaccagagaacgacatcgcgacttatttccagattgcgcaggaggaaggtctgaacatcgttctccgaccaggaccgtacatctgcggtgagagagaatggggtggcttccctgcatggctggctactgtgcccggactagtcgtacgatccggggaagaacagttcatgggctatgcgaagacgtatttgcagaagctcgctgccgaggtcagggagctgcaggttactaggggcggaccgctccttatggttcaagttgagaatgagtatgggagtttcggggaggaccataattacacggccgctttacgggatatacttaaagaggagtttgaagttccgctttataccaacgatgggaccgtggaatggacattatccggtgggtcagttcccggtgtccttgcggaagtcgatggagatccgagatccgggtttgcagcgagggatctatatatcacggacgaaagcaaactaggtcctcttctagatggagaatactacaccaatgcgccggatatctggggttcggctaatacgcaccctgttgtgagcgaagagacgattgcgaggtttcagtccgatttggaatttgtgctggaggcgaataactcgatctcgctttatatgttccacggcggctcgaatttcggattctcgaacggagcgctgtggaagaattatacggtgcctttcacgagcagttatgattatggggcgccgcttgatgagagtggacggacgacgccgttgtatgatgcgctgagacagacgattttgaagtatattccggaggatagtattccggctccgaaggagaatgtgcctttacttgagatatcgaaattcgatgtcacgcctgtgaaggggctttttgataaacttgggagcccggtcaagagcgagacgccggtgacgatggaggaattggatcaggcttatggattcatcttgtacgaacatgtcgccaatgtatcgatgagcgggtatctgcaacctggagaccgagcccgcgaccgcgttattgtgtatgtgaatggtacaaagaaaggagttattgacagcacatacgcttacccggcaaatgtttccgttgagctggaacctggtgataagcttcaacttttcgttgagaatctcggacgggttgactactggtctcgagaatctaatacagccgtagagctcctagatccttataagggcgtacttggaaatgtcacggttggtgaagatgtgctcatcgggtgggatatctacgctttaccgttaaccgagcttcctgatctttcgagtgtctccggtttgtcagaaaattacgagatcacagccaactcatcgccagttctctatagggggaccttcagtttggagggcgatgatgatgtcgatccagcaggacgtgatgcattcttaacagtgtcgaatggcgtcaaaggcaatgtgtgggtgaatgggttcaatcttggtagatactggatagttggtcctcagcagtcgctttatctcccaggcacggttctcaagccgggagctgaaaatgaggtcgtggtgcttgagctggagccaaatgctgatcggttgtctgtatctggttctgctgagaggatctgggcaaattatgatgatcctgattatccatag

SEQ ID NO: 17745 - protein, 654 aa, Muscodor strobelii
  misc_feature: SGI Peptide ID NO. 565934
  misc_feature (46)..(369): Pfam Id: PF01301 Pfam Desc: Glycosyl hydrolases family 35
  misc_feature (40)..(652): NCBI GI: 242815497 Blast Desc: beta-calactosidase, [Talaromyces stipitatus ATCC 10500] gi|218714919|gb|EED14342.1| beta-calactosidase, [Talaromyces stipitatus ATCC 10500]
  misc_feature (6)..(652): NCBI GI: 169604026 Blast Desc: SNOG_05023 [Phaeosphaeria nodorum SN15] gi|111066294|gb|EAT87414.1| SNOG_05023 [Phaeosphaeria nodorum SN15]
  misc_feature (10)..(651): NCBI GI: 187736173 Blast Desc: Beta-galactosidase [Akkermansia muciniphila ATCC BAA-835] gi|187426225|gb|ACD05504.1| Beta-galactosidase [Akkermansia muciniphila ATCC BAA-835]
  misc_feature (29)..(627): NCBI GI: 265767790 Blast Desc: beta-galactosidase [Bacteroides sp. 2_1_16] gi|263252462|gb|EEZ23990.1| beta-galactosidase [Bacteroides sp. 2_1_16]
  misc_feature (29)..(627): NCBI GI: 253567194 Blast Desc: beta-galactosidase [Bacteroides sp. 3_2_5] gi|251944025|gb|EES84544.1| beta-galactosidase [Bacteroides sp. 3_2_5]
  misc_feature (29)..(627): NCBI GI: 60683238 Blast Desc: exported beta-galactosidase [Bacteroides fragilis NCTC 9343] gi|60494672|emb|CAH09473.1| exported beta-galactosidase [Bacteroides fragilis NCTC 9343]
  misc_feature (29)..(627): NCBI GI: 53715303 Blast Desc: beta-galactosidase precursor [Bacteroides fragilis YCH46] gi|52218168|dbj|BAD50761.1| beta-galactosidase precursor [Bacteroides fragilis YCH46]
  misc_feature (26)..(627): NCBI GI: 255011765 Blast Desc: exported beta-galactosidase [Bacteroides fragilis 3_1_12]
  misc_feature (9)..(644): NCBI GI: 260912222 Blast Desc: beta-galactosidase [Prevotella sp. oral taxon 472 str. F0295] gi|260633656|gb|EEX51794.1| beta-galactosidase [Prevotella sp. oral taxon 472 str. F0295]
  misc_feature (29)..(636): NCBI GI: 150008152 Blast Desc: beta-glycosidase [Parabacteroides distasonis ATCC 8503] gi|149936576|gb|ABR43273.1| glycoside hydrolase family 35, candidate beta-glycosidase [Parabacteroides distasonis ATCC 8503]
  misc_feature (38)..(610): SWISSPROT Homolog: EC 3.2.1.23 Beta-galactosidase
MHLHALTHILTILTLPLLSLSSPSPTLNPDSTTSAETPAFTYNRTTFLLNGSPYIIIGGQMDPQRIPRAYWRDRLAAARAMGLNTIFSYVYWNLLEPTQGSWTTQSVPENDIATYFQIAQEEGLNIVLRPGPYICGEREWGGFPAWLATVPGLVVRSGEEQFMGYAKTYLQKLAAEVRELQVTRGGPLLMVQVENEYGSFGEDHNYTAALRDILKEEFEVPLYTNDGTVEWTLSGGSVPGVLAEVDGDPRSGFAARDLYITDESKLGPLLDGEYYTNAPDIWGSANTHPVVSEETIARFQSDLEFVLEANNSISLYMFHGGSNFGFSNGALWKNYTVPFTSSYDYGAPLDESGRTTPLYDALRQTILKYIPEDSIPAPKENVPLLEISKFDVTPVKGLFDKLGSPVKSETPVTMEELDQAYGFILYEHVANVSMSGYLQPGDRARDRVIVYVNGTKKGVIDSTYAYPANVSVELEPGDKLQLFVENLGRVDYWSRESNTAVELLDPYKGVLGNVTVGEDVLIGWDIYALPLTELPDLSSVSGLSENYEITANSSPVLYRGTFSLEGDDDVDPAGRDAFLTVSNGVKGNVWVNGFNLGRYWIVGPQQSLYLPGTVLKPGAENEVVVLELEPNADRLSVSGSAERIWANYDDPDYP

SEQ ID NO: 17746 - DNA, 2190 bp, Muscodor strobelii
  misc_feature: SGI EST ID NO. CUFF.41728.0
  misc_feature: Variant of the nucleotide sequence at SEQ ID NO 17744
acaatcttcagctacgtatactggaacctactcgagcccacccagggctcatggaccactcaatctgtaccagagaacgacatcgcgacttatttccagattgcgcaggaggaaggtctgaacatcgttctccgaccaggaccgtacatctgcggtgagagagaatggggtggcttccctgcatggctggctactgtgcccggactagtcgtacgatccggggaagaacagttcatgggctatgcgaagacgtatttgcagaagctcgctgccgaggtcagggagctgcaggttactaggggcggaccgctccttatggttcaagttgagaatgagtatgggagtttcggggaggaccataattacacggccgctttacgggatatacttaaagaggagtttgaagttccgctttataccaacgatgggaccgtggaatggacattatccggtgggtcagttcccggtgtccttgcggaagtcgatggagatccgagatccgggtttgcagcgagggatctatatatcacggacgaaagcaaactaggtcctcttctagatggagaatactacaccaatgcgccggatatctggggttcggctaatacgcaccctgttgtgagcgaagagacgattgcgaggtttcagtccgatttggaatttgtgctggaggcgaataactcgatctcgctttatatgttccacggcggctcgaatttcggattctcgaacggagcgctgtggaagaattatacggtgcctttcacgagcagttatgattatggggcgccgcttgatgagagtggacggacgacgccgttgtatgatgcgctgagacagacgattttgaagtatattccggaggatagtattccggctccgaaggagaatgtgcctttacttgagatatcgaaattcgatgtcacgcctgtgaaggggctttttgataaacttgggagcccggtcaagagcgagacgccggtgacgatggaggaattggatcaggcttatggattcatcttgtacgaacatgtcgccaatgtatcgatgagcgggtatctgcaacctggagaccgagcccgcgaccgcgttattgtgtatgtgaatggtacaaagaaaggagttattgacagcacatacgcttacccggcaaatgtttccgttgagctggaacctggtgataagcttcaacttttcgttgagaatctcggacgggttgactactggtctcgagaatctaatacagccgtagagctcctagatccttataagggcgtacttggaaatgtcacggttggtgaagatgtgctcatcgggtgggatatctacgctttaccgttaaccgagcttcctgatctttcgagtgtctccggtttgtcagaaaattacgagatcacagccaactcatcgccagttctctatagggggaccttcagtttggagggcgatgatgatgtcgatccagcaggacgtgatgcattcttaacagtgtcgaatggcgtcaaaggcaatgtgtgggtgaatgggttcaatcttggtagatactggatagttggtcctcagcagtcgctttatctcccaggcacggttctcaagccgggagctgaaaatgaggtcgtggtgcttgagctggagccaaatgctgatcggttgtctgtatctggttctgctgagaggatctgggcaaattatgatgatcctgattatccatagtttagactgactataagcggaagtttggctgctcttgtcgggcactacaaaacagcgtcgaagatcaaaatttttcatgaaatgtccaattcgctgctgagtcttttcgttcatgcgtgacgataatgtcacgataactgttgcatgacatctgctagtcaacagtcatgcgaggtgggatgaattgacttacatactaacctgacttagcttagcgttacgaagaagagttcggctcaggttccgactcacgctacccggagattgtagatagtacatgtacttcggtcaagtctagacccgcggggcagtgcaggagaagggtgaaatgagagccgccaagtatcacgcaaacgcgcctgcacatctcaaacacgcagtgtcgcagcgtatgaaatgctgtaacagcagcccctctcctctgattcgttctcttcatcggctgaacgcgttcatgttgcattacacagatatcag

SEQ ID NO: 17747 - DNA, 2283 bp, Muscodor strobelii
  misc_feature: SGI cDNA ID NO. 565935
  misc_feature: Encodes the peptide sequence at SEQ ID NO 17748
atgtggttctctaattcgaggacagcgctcctgctgtccactctgtccgccttcagtgtattgttgcccggcaccgcggccgagcaaatgcttgtgtctacgtctcttaactcgtgtcaagaaggttcacagttctctgccagcttgttcaacgtcgtatacacgcccaaaaatggctccgctacaatcgacatcgtcgcgacctcttccgtcgaaggcttcgtcgagttcgatatcacgcttcttgcctacggatatcagcttaccaggacacaagtcaacccctgcgacatcggactggctggtctatgtcccatgacgtctggcaaactgtcgctcaatttcaatctcaaggatatcggcgaatctgcaaattcacaaattcctggcatcgcatacactttccccgacctcgatgccactgtcaaggtgttcttaaactccacagatacccacgaaagcgttgcctgcgtcgaagcagatatttccaacggcaagactgttgacttgctcgccgtcaaatgggtgcttgcgatcatcgcggggcttgttctctgttcttcggccgttctcaacggacttggacattcgaatgccgccgctcacatcgcttcgggggccctctccctctttggcttcttccaggcccaagccatcattggcatgaccagtgttcaccttcctccaattgtccagtcatggactcaggatttccagtggtcgatgggtatcatcaatgttgattttatgcaggatattttcacctggtaccaacgggccacgggtggcactccgtcaactattttcgattccttgaccacgatatcagtccaagttcagaagcgagggctagcaatgttgccggataccgccgtggatttgtatcggaaatcagcagctcttgttccacgtgctgctaccgcactagcgaaacggggcaacatcaaaaccggaaacggaagctatgttgtctttggtatccagcgtgtcgctttcagggctgacattgagtcgactaacttgtttttgacggctcttgtgttctactcgattctcgtcgtcatcaccatcgctggtgtagcggcattcaaaggcttctgcgaactggcagctaagaggaaatggatcaaacccgaaacatttcttgagtttcgcaatgggtggctcactgttctcaagggtattctgttccgcttgacgctcatcggttatccgcagatgtcgattctgtgcttatgggagttcacgcaaaacgactctcccgctgaactcgttctagctgttttcttcctttttggtatgagcattaccctcgggtgggcagcatacaaggtcgtccgcatcgctcgccgctctgtgacaatgcatcgcaatcctgcgtacattttgttctcagatccccaggccttgaataaatggggatttttgtacattcagtttcgggcttctgcttattacttcgtcattccggttctcggctatacgttgctcaaatccgtcttcatcgctctagctcagagaaatggcacagcccaggtggtcggtttccttctgatcgaagctggtgctctaatcggtgttagcgtgctccggccgtggatggacaagagcaccaattcattcaatatcgctatttgcgtcgtcaattttgtgaacgccatattccttctcatcttctcagatgtcttcgaccaaccacctatcgtaaatggtgtgattgggttggtactgttcttcctgaacgccatcttcgcaacgatcctcttaatcatggtcattgtatcgactggaatggtcttatacagcaagaatcctgatggccgctaccagttcatggcggatgatcgtgcctcttttatgaagtctcaatcccatcttgccggaaccacggagttggaggctcttggggtgactgcacgtggtgataaagctggatacttcaagcccgggttagacttagacgacgataatcagtcaatatcatctgaaacaatgagacgccgaacagactcgtcacatattgaattcccgacgggggctccctacgcagccaataaccaaaagccaaatacccagtcgtcttctttcgtcaatccttcggttccattgtttccctcaagtgggaatagtgcaaacagggcgccgagcccatatggtacgtcgccgtcccagtatggtgcctcatctgctgctgcgttacgggcccagaacgctacgccttcgggattccggggacagaataatgctagcccatggcaacgaggtgccggctatgaccactag

SEQ ID NO: 17748 - protein, 760 aa, Muscodor strobelii
  misc_feature: SGI Peptide ID NO. 565935
  misc_feature (15)..(644): Pfam Id: PF06011 Pfam Desc: Transient receptor potential (TRP) ion channel
  misc_feature (12)..(760): NCBI GI: 46137303 Blast Desc: FG10167.1 [Gibberella zeae PH-1]
  misc_feature (26)..(749): NCBI GI: 116180030 Blast Desc: CHGG_00643 [Chaetomium globosum CBS 148.51] gi|88184940|gb|EAQ92408.1| CHGG_00643 [Chaetomium globosum CBS 148.51]
  misc_feature (30)..(759): NCBI GI: 145612291 Blast Desc: MGG_12322 [Magnaporthe grisea 70-15] gi|145019480|gb|EDK03708.1| MGG_12322 [Magnaporthe grisea 70-15]
  misc_feature (27)..(760): NCBI GI: 164426218 Blast Desc: NCU01036 [Neurospora crassa OR74A] gi|16415970|emb|CAD01103.1| conserved [Neurospora crassa] gi|157071246|gb|EAA32412.2| conserved [Neurospora crassa OR74A]
  misc_feature (27)..(760): NCBI GI: 9945012 Blast Desc: calcium-related spray protein [Neurospora crassa]
  misc_feature (26)..(760): NCBI GI: 256731766 Blast Desc: [Nectria haematococca mpVI 77-13-4]
  misc_feature (27)..(718): NCBI GI: 171691919 Blast Desc: protein product [Podospora anserina] gi|170945908|emb|CAP72709.1| protein product [Podospora anserina]
  misc_feature (27)..(635): NCBI GI: 261351858 Blast Desc: DUF907 domain-containing protein [Verticillium albo-atrum VaMs.102]
  misc_feature (10)..(742): NCBI GI: 116200979 Blast Desc: CHGG_08374 [Chaetomium globosum CBS 148.51] gi|88176892|gb|EAQ84360.1| CHGG_08374 [Chaetomium globosum CBS 148.51]
  misc_feature (15)..(760): NCBI GI: 156044096 Blast Desc: SS1G_10151 [Sclerotinia sclerotiorum 1980] gi|154694540|gb|EDN94278.1| SS1G_10151 [Sclerotinia sclerotiorum 1980]
MWFSNSRTALLLSTLSAFSVLLPGTAAEQMLVSTSLNSCQEGSQFSASLFNVVYTPKNGSATIDIVATSSVEGFVEFDITLLAYGYQLTRTQVNPCDIGLAGLCPMTSGKLSLNFNLKDIGESANSQIPGIAYTFPDLDATVKVFLNSTDTHESVACVEADISNGKTVDLLAVKWVLAIIAGLVLCSSAVLNGLGHSNAAAHIASGALSLFGFFQAQAIIGMTSVHLPPIVQSWTQDFQWSMGIINVDFMQDIFTWYQRATGGTPSTIFDSLTTISVQVQKRGLAMLPDTAVDLYRKSAALVPRAATALAKRGNIKTGNGSYVVFGIQRVAFRADIESTNLFLTALVFYSILVVITIAGVAAFKGFCELAAKRKWIKPETFLEFRNGWLTVLKGILFRLTLIGYPQMSILCLWEFTQNDSPAELVLAVFFLFGMSITLGWAAYKVVRIARRSVTMHRNPAYILFSDPQALNKWGFLYIQFRASAYYFVIPVLGYTLLKSVFIALAQRNGTAQVVGFLLIEAGALIGVSVLRPWMDKSTNSFNIAICVVNFVNAIFLLIFSDVFDQPPIVNGVIGLVLFFLNAIFATILLIMVIVSTGMVLYSKNPDGRYQFMADDRASFMKSQSHLAGTTELEALGVTARGDKAGYFKPGLDLDDDNQSISSETMRRRTDSSHIEFPTGAPYAANNQKPNTQSSSFVNPSVPLFPSSGNSANRAPSPYGTSPSQYGASSAAALRAQNATPSGFRGQNNASPWQRGAGYDH

SEQ ID NO: 17749 - DNA, 3843 bp, Muscodor strobelii
  misc_feature: SGI EST ID NO. CUFF.41814.1
  misc_feature: Variant of the nucleotide sequence at SEQ ID NO 17747
gtcaagctttatacgagcaaaagcttaggtgaaggtgttgtgaggagaggtggattgtacaagtacttgctcacgcgcgtaatgccccgctaagatcggttgcttccattcctgacccatcatcgcatctctgccccgtccttgggccaaaacaggcccctgcaagcactgtcgccagcccctgtcacaaaccagccgatgatccactgggccctgaatatagctgtgtcagcgtattcgaaactcacattcccttcaccttgtcggctgtcgttccaaactcagaacaccgaccatagtcactctctgaaaccttctttccattctttctgtttcccaggccttttgactcttctgttgtgtttactcccactgacacggcatcacgaccaccgtactcccccattctgcgaacggggcatcgtcgtgtctgcagctggtctcatatctgccacttacactgacaccagcttgtcattcgacagatccagaattggacgatcaacccaacgtcaaagctgccaacacattcacactcgttcggcgcgatctagaataccagagctacgaaagctgggtagacttggcgtcttcatcactcacagcaagggcaaagactgggtcaatctgccgtccctatcacgcttgctctccctcgattcatctcaacaacgaacaataatcgtcgcagatttgccgcccttctccgagacaaggcaacaccatctctttgtcaacagcgagtgctcgtctgatccaccaatgtagtagatggtccacgccctttcacacatcttcatcaagagaacgcgccttgttacacaaaggccacttatcagcctctccgtgagaggattcttctatccacctgtgactgctcctagtctccgctgtctctcactcaaaattcgcacaccaccatgtggttctctaattcgaggacagcgctcctgctgtccactctgtccgccttcagtgtattgttgcccggcaccgcggccgagcaaatgcttgtgtctacgtctcttaactcgtgtcaagaaggttcacagttctctgccagcttgttcaacgtcgtatacacgcccaaaaatggctccgctacaatcgacatcgtcgcgacctcttccgtcgaaggcttcgtcgagttcgatatcacgcttcttgcctacggatatcagcttaccaggacacaagtcaacccctgcgacatcggactggctggtctatgtcccatgacgtctggcaaactgtcgctcaatttcaatctcaaggatatcggcgaatctgcaaattcacaaattcctggcatcgcatacactttccccgacctcgatgccactgtcaaggtgttcttaaactccacagatacccacgaaagcgttgcctgcgtcgaagcagatatttccaacggcaagactgttgacttgctcgccgtcaaatgggtgcttgcgatcatcgcggggcttgttctctgttcttcggccgttctcaacggacttggacattcgaatgccgccgctcacatcgcttcgggggccctctccctctttggcttcttccaggcccaagccatcattggcatgaccagtgttcaccttcctccaattgtccagtcatggactcaggatttccagtggtcgatgggtatcatcaatgttgattttatgcaggatattttcacctggtaccaacgggccacgggtggcactccgtcaactattttcgattccttgaccacgatatcagtccaagttcagaagcgagggctagcaatgttgccggataccgccgtggatttgtatcggaaatcagcagctcttgttccacgtgctgctaccgcactagcgaaacggggcaacatcaaaaccggaaacggaagctatgttgtctttggtatccagcgtgtcgctttcagggctgacattgagtcgactaacttgtttttgacggctcttgtgttctactcgattctcgtcgtcatcaccatcgctggtgtagcggcattcaaaggcttctgcgaactggcagctaagaggaaatggatcaaacccgaaacatttcttgagtttcgcaatgggtggctcactgttctcaagggtattctgttccgcttgacgctcatcggttatccgcagatgtcgattctgtgcttatgggagttcacgcaaaacgactctcccgctgaactcgttctagctgttttcttcctttttggtatgagcattaccctcgggtgggcagcatacaaggtcgtccgcatcgctcgccgctctgtgacaatgcatcgcaatcctgcgtacattttgttctcagatccccaggccttgaataaatggggatttttgtacattcagtttcgggcttctgcttattacttcgtcattccggttctcggctatacgttgctcaaatccgtcttcatcgctctagctcagagaaatggcacagcccaggtggtcggtttccttctgatcgaagctggtgctctaatcggtgttagcgtgctccggccgtggatggacaagagcaccaattcattcaatatcgctatttgcgtcgtcaattttgtgaacgccatattccttctcatcttctcagatgtcttcgaccaaccacctatcgtaaatggtgtgattgggttggtactgttcttcctgaacgccatcttcgcaacgatcctcttaatcatggtcattgtatcgactggaatggtcttatacagcaagaatcctgatggccgctaccagttcatggcggatgatcgtgcctcttttatgaagtctcaatcccatcttgccggaaccacggagttggaggctcttggggtgactgcacgtggtgataaagctggatacttcaagcccgggttagacttagacgacgataatcagtcaatatcatctgaaacaatgagacgccgaacagactcgtcacatattgaattcccgacgggggctccctacgcagccaataaccaaaagccaaatacccagtcgtcttctttcgtcaatccttcggttccattgtttccctcaagtgggaatagtgcaaacagggcgccgagcccatatggtacgtcgccgtcccagtatggtgcctcatctgctgctgcgttacgggcccagaacgctacgccttcgggattccggggacagaataatgctagcccatggcaacgaggtgccggctatgaccactagatgggggtcaagtcgcctgaggcaagaggcttcttttagctgctgtgtactggaatgttcatatcgaaatgacatatgaactgacacaaaattgaggatctacgtcccacgttgtggggatggccgtagctatgggattctggattccgataacgagaggattatcgcagccatcactctactggactgcgaaggaaggccatcgtctcatgaattacagtgagcgtccgaatcagtcggtcggcctgtcaaccaccaaaaattagaaggtttccacgatgtagatgggtaaactgcatctggattgcatcacgaggcgttcggaaatcacagtatggatatctgtgtgcattgggctgttagcaataaatttgtgctggattaattccattcaataggcgtatcggaatatccagtgaggactggatcggcagcatctaggttgtgattggcgatagacaattcgcgagaaataacgactcaggacagctgttatagcggcactttctagcaaatgatgaaatgatctgacgtaatgctctcagtgaccaacagttcagcaaggcatcgttaatgttgagcagtcggcagtttgtcaggagtatgcaaagtccacatgcttagaacatgtctcttgaga

SEQ ID NO: 17750 - DNA, 2436 bp, Muscodor strobelii
  misc_feature: SGI cDNA ID NO. 565936
  misc_feature: Encodes the peptide sequence at SEQ ID NO 17751
atggccaccgtcacaacatccacaatcacgccagcacaattggggtttcttgcaatttttaatccttctcttggcgccaccgacgagactatcgacgaccaaatcgtgtattatgcgtctgtcaatacacagtcgcagaagcgacgccatcgctcgcgcggaaagccgactgctgatataagccaggaagagcgaaatgaacggctacggcaaattgggctggcacagggcatggtcgacttcagtcgtggcttcgcaagcggtgagcccgtggacaatattgagacggagaaaacccgcgttgtgctacatgaggttgaacctggatggtggattctagcgtccatcgatttgaccaaaatccccctgccgcccagacttggcccatcaactgctggtaagcaggaggaccagtctgagaacgtggaatactcatcccgggagctgaaaccagcaatgctgttgacgcaggatctcttgcgagcacactctgtgttcctactccatcacgcagcatcactaagtgcgcttttcgttagatcccgacgaacgaattttgtcaaaatgctgagtcggtactgggatctgtggctgtctacctgggatgtcatgcttcacagcaacccagcgaattcggtgttcagcggtatcaagattgcagcgtgtggtgaacttggagttggagttggcgaggaagaccgcgggagcggtgaaagagaagttctcgaaggcttcgttggtagagtcgaggggcttgttgatttaatcgtttcaagattcgaccctccacagcccgaatcagaaactactactaaggaaaatgaatctagtatacctgattccccattatcatggctagggacaggagaagcacctaaggccgaagacggtgcggttttcctgggtgttggagcactgtcaaggaaatcgctacgagatgtcacgtactggatggaagacatttatacctggggtgaaaatgcctatggcgtcaaggaaagtccgacctcgactcgatccacaagaaataggcagagacctatcaaaaagcccaacagcaactccatcaacgctgaaaatgcaccatttcgacaaaccgaaggaaacgccccgacagagtcaaatgggtcagcgcaaactccaggggatgaacaagataatgcggaagagagcggagccaagaaatggatgggttatcttaagatgggatatggaacccactggacattgggaaattcaagcgaaaccacggatgatgtacaagccaattcgagtattcctcaagaggacgagctgaagaaaccagacgctcctctgagccgccccagtgttcagcgtaagaactcggccggacactatctcatcgggcttctgggagatatagaagagcctaacacaagatccgagacgggaagccaagcgtcggacgaagatactgggttggaagagaacagttcgagggtcccacttcgaacacttacggtcgaacttgacaccgaggaatcaactaatctggtacaaatgtacgaactggggagtcgaagcagggaacttctacgcctagattcaaaccagagggatgaaatggatcccaactcacagtttgcaagtcaagatcgcaataagacgcagaacatgcgtgtcgtggtctatgtcaaccagccctttattttcacgtttctgttcaagaacaggacagactcattagagtgggatgtgttataccgatcgttgcaccatcagctctcgccgttaagaaaaccccttatgacttcgacttcatacaggccgaataggttagaaggagagggagaatcgagggttttcgatcttatttgggatccaaagaagctgactgtgaactcttctataccaaacatcccagcaccgtctgaaattgtccaggagaaccaagtatggtccagagctgaggcggttaatacccatactcagatcctagccatgtacaccgcgacgctaagagactacgagatgtgtgaaaggacctgcaagacgaatcgaggctggtgggttgtctggacaagggtcttggaaagaggatcctcgcctccaaccgaaagagcagacacgaccacggacgctgatgcaagcacggaggatggggaccaaggtagtagctcgtcaaggactcccactgcgactacgctagtacatcaagagtctatggaaagcgacggctctaatggaccgcggccggaactgaagcaccaagcgaagacgccgaaggttgacaaagagattttcttgatcagacgggctggggagtatggaaggacgggaggaactgcaggagtgattggagccataggggagagtggaaatggtggctggaccgagggcgcgaggaaccttgcccaaggtattggcgttgatacaaatacgtatattgaaggactgctgagtataggccgttga

SEQ ID NO: 17751 - protein, 811 aa, Muscodor strobelii
  misc_feature: SGI Peptide ID NO. 565936
  misc_feature (9)..(811): NCBI GI: 261351787 Blast Desc: conserved [Verticillium albo-atrum VaMs.102]
  misc_feature (2)..(809): NCBI GI: 46137437 Blast Desc: FG10234.1 [Gibberella zeae PH-1]
  misc_feature (8)..(809): NCBI GI: 256732206 Blast Desc: [Nectria haematococca mpVI 77-13-4]
  misc_feature (1)..(811): NCBI GI: 39951411 Blast Desc: MGG_01348 [Magnaporthe grisea 70-15] gi|145020829|gb|EDK04958.1| MGG_01348 [Magnaporthe grisea 70-15]
  misc_feature (9)..(811): NCBI GI: 156059580 Blast Desc: SS1G_03802 [Sclerotinia sclerotiorum 1980] gi|154701589|gb|EDO01328.1| SS1G_03802 [Sclerotinia sclerotiorum 1980]
  misc_feature (1)..(811): NCBI GI: 116179792 Blast Desc: CHGG_00524 [Chaetomium globosum CBS 148.51] gi|88184821|gb|EAQ92289.1| CHGG_00524 [Chaetomium globosum CBS 148.51]
  misc_feature (13)..(811): NCBI GI: 171691705 Blast Desc: protein product [Podospora anserina] gi|170945801|emb|CAP72601.1| protein product [Podospora anserina]
  misc_feature (9)..(811): NCBI GI: 154292788 Blast Desc: BC1G_14301 [Botryotinia fuckeliana B05.10] gi|150845782|gb|EDN20975.1| BC1G_14301 [Botryotinia fuckeliana B05.10]
  misc_feature (7)..(811): NCBI GI: 239610837 Blast Desc: conserved [Ajellomyces dermatitidis ER-3]
  misc_feature (8)..(811): NCBI GI: 212528364 Blast Desc: conserved [Penicillium marneffei ATCC 18224] gi|210073737|gb|EEA27824.1| conserved [Penicillium marneffei ATCC 18224]
MATVTTSTITPAQLGFLAIFNPSLGATDETIDDQIVYYASVNTQSQKRRHRSRGKPTADISQEERNERLRQIGLAQGMVDFSRGFASGEPVDNIETEKTRVVLHEVEPGWWILASIDLTKIPLPPRLGPSTAGKQEDQSENVEYSSRELKPAMLLTQDLLRAHSVFLLHHAASLSALFVRSRRTNFVKMLSRYWDLWLSTWDVMLHSNPANSVFSGIKIAACGELGVGVGEEDRGSGEREVLEGFVGRVEGLVDLIVSRFDPPQPESETTTKENESSIPDSPLSWLGTGEAPKAEDGAVFLGVGALSRKSLRDVTYWMEDIYTWGENAYGVKESPTSTRSTRNRQRPIKKPNSNSINAENAPFRQTEGNAPTESNGSAQTPGDEQDNAEESGAKKWMGYLKMGYGTHWTLGNSSETTDDVQANSSIPQEDELKKPDAPLSRPSVQRKNSAGHYLIGLLGDIEEPNTRSETGSQASDEDTGLEENSSRVPLRTLTVELDTEESTNLVQMYELGSRSRELLRLDSNQRDEMDPNSQFASQDRNKTQNMRVVVYVNQPFIFTFLFKNRTDSLEWDVLYRSLHHQLSPLRKPLMTSTSYRPNRLEGEGESRVFDLIWDPKKLTVNSSIPNIPAPSEIVQENQVWSRAEAVNTHTQILAMYTATLRDYEMCERTCKTNRGWWVVWTRVLERGSSPPTERADTTTDADASTEDGDQGSSSSRTPTATTLVHQESMESDGSNGPRPELKHQAKTPKVDKEIFLIRRAGEYGRTGGTAGVIGAIGESGNGGWTEGARNLAQGIGVDTNTYIEGLLSIGR

SEQ ID NO: 17752 - DNA, 3100 bp, Muscodor strobelii
  misc_feature: SGI EST ID NO. CUFF.41737.0
  misc_feature: Variant of the nucleotide sequence at SEQ ID NO 17750
gtcgatctcaacttcgcagttgcgaatgcaagaaagcattagagatatccaaacccacctcctcatgtcttcatttcttgcctcattagttaagctcgctgcttcctctttctccttcactagtgtcacacgtgcctggatatatatatcattgtgaggctttgccaagagctgctactgcagatgttcaagaaagaaagaaagctttaagtccagaactgcggacagatttctccgaacatctagaacgcccctttccatgcaccagtatgcgatcgtacaatgatcattcttttctctgagacctaccatatcacattcacctagattacaatacggccctaagcagaacacttaagctgcctcggcgacacgccgccgtttcattcggttctcaataccgcttccacccatgtgtacctcatgattgaagacttgtatcgtagacgtaaacgacactacgagccatggccaccgtcacaacatccacaatcacgccagcacaattggggtttcttgcaatttttaatccttctcttggcgccaccgacgagactatcgacgaccaaatcgtgtattatgcgtctgtcaatacacagtcgcagaagcgacgccatcgctcgcgcggaaagccgactgctgatataagccaggaagagcgaaatgaacggctacggcaaattgggctggcacagggcatggtcgacttcagtcgtggcttcgcaagcggtgagcccgtggacaatattgagacggagaaaacccgcgttgtgctacatgaggttgaacctggatggtggattctagcgtccatcgatttgaccaaaatccccctgccgcccagacttggcccatcaactgctggtaagcaggaggaccagtctgagaacgtggaatactcatcccgggagctgaaaccagcaatgctgttgacgcaggatctcttgcgagcacactctgtgttcctactccatcacgcagcatcactaagtgcgcttttcgttagatcccgacgaacgaattttgtcaaaatgctgagtcggtactgggatctgtggctgtctacctgggatgtcatgcttcacagcaacccagcgaattcggtgttcagcggtatcaagattgcagcgtgtggtgaacttggagttggagttggcgaggaagaccgcgggagcggtgaaagagaagttctcgaaggcttcgttggtagagtcgaggggcttgttgatttaatcgtttcaagattcgaccctccacagcccgaatcagaaactactactaaggaaaatgaatctagtatacctgattccccattatcatggctagggacaggagaagcacctaaggccgaagacggtgcggttttcctgggtgttggagcactgtcaaggaaatcgctacgagatgtcacgtactggatggaagacatttatacctggggtgaaaatgcctatggcgtcaaggaaagtccgacctcgactcgatccacaagaaataggcagagacctatcaaaaagcccaacagcaactccatcaacgctgaaaatgcaccatttcgacaaaccgaaggaaacgccccgacagagtcaaatgggtcagcgcaaactccaggggatgaacaagataatgcggaagagagcggagccaagaaatggatgggttatcttaagatgggatatggaacccactggacattgggaaattcaagcgaaaccacggatgatgtacaagccaattcgagtattcctcaagaggacgagctgaagaaaccagacgctcctctgagccgccccagtgttcagcgtaagaactcggccggacactatctcatcgggcttctgggagatatagaagagcctaacacaagatccgagacgggaagccaagcgtcggacgaagatactgggttggaagagaacagttcgagggtcccacttcgaacacttacggtcgaacttgacaccgaggaatcaactaatctggtacaaatgtacgaactggggagtcgaagcagggaacttctacgcctagattcaaaccagagggatgaaatggatcccaactcacagtttgcaagtcaagatcgcaataagacgcagaacatgcgtgtcgtggtctatgtcaaccagccctttattttcacgtttctgttcaagaacaggacagactcattagagtgggatgtgttataccgatcgttgcaccatcagctctcgccgttaagaaaaccccttatgacttcgacttcatacaggccgaataggttagaaggagagggagaatcgagggttttcgatcttatttgggatccaaagaagctgactgtgaactcttctataccaaacatcccagcaccgtctgaaattgtccaggagaaccaagtatggtccagagctgaggcggttaatacccatactcagatcctagccatgtacaccgcgacgctaagagactacgagatgtgtgaaaggacctgcaagacgaatcgaggctggtgggttgtctggacaagggtcttggaaagaggatcctcgcctccaaccgaaagagcagacacgaccacggacgctgatgcaagcacggaggatggggaccaaggtagtagctcgtcaaggactcccactgcgactacgctagtacatcaagagtctatggaaagcgacggctctaatggaccgcggccggaactgaagcaccaagcgaagacgccgaaggttgacaaagagattttcttgatcagacgggctggggagtatggaaggacgggaggaactgcaggagtgattggagccataggggagagtggaaatggtggctggaccgagggcgcgaggaaccttgcccaaggtattggcgttgatacaaatacgtatattgaaggactgctgagtataggccgttgaaatcatattctgggattccgggcggtgcgctgttggattctgatatgtgacaagtctggcgcggataggagctcttgtacctaggatgcctctacaatgcattgatagacaatagggctactgaatagatcattcctatgagacttcctagcttcagttatcggcatgtgactctccatgtcatgcgttcactttcc

SEQ ID NO: 17753 - DNA, 348 bp, Muscodor strobelii
  misc_feature: SGI cDNA ID NO. 565937
  misc_feature: Encodes the peptide sequence at SEQ ID NO 17754
atgcctttcgcccgaggcattagtctgcacgttaccgtgtacattgcacccgagaacgttgaccgcttcatggccgccttcaagccagtctttgaccgagttgttgccgaacctgagtgcctcttcttcgaaatgtatcagaatccgcaggagcccggtaaactcagctgggttgagaactggtctaaatccccggaatggttgctggagaatcagctgtgcaaggactactacaaaccgtatttcgccatcaccgagcccatgttcctgaagccgagagaatttcaaatcctagaacgcaccggcccggagttcttcatggtcaagccaaagccattccccgagtga

SEQ ID NO: 17754 - protein, 115 aa, Muscodor strobelii
  misc_feature: SGI Peptide ID NO. 565937
  misc_feature (4)..(109): NCBI GI: 242804086 Blast Desc: conserved [Talaromyces stipitatus ATCC 10500] gi|218717650|gb|EED17071.1| conserved [Talaromyces stipitatus ATCC 10500]
  misc_feature (1)..(109): NCBI GI: 256725404 Blast Desc: NECHADRAFT_82990 [Nectria haematococca mpVI 77-13-4]
  misc_feature (4)..(111): NCBI GI: 242821335 Blast Desc: TSTA_000770 [Talaromyces stipitatus ATCC 10500] gi|218712580|gb|EED12005.1| TSTA_000770 [Talaromyces stipitatus ATCC 10500]
  misc_feature (1)..(109): NCBI GI: 119472527 Blast Desc: NFIA_058150 [Neosartorya fischeri NRRL 181] gi|119406514|gb|EAW16465.1| conserved [Neosartorya fischeri NRRL 181]
  misc_feature (4)..(109): NCBI GI: 145237170 Blast Desc: An07g01450 [Aspergillus niger] gi|134075698|emb|CAK96590.1| [Aspergillus niger]
  misc_feature (5)..(111): NCBI GI: 70992501 Blast Desc: AFUA_6G12200 [Aspergillus fumigatus Af293] gi|66848732|gb|EAL89061.1| AFUA_6G12200 [Aspergillus fumigatus Af293] gi|159124670|gb|EDP49788.1| AFUB_078200 [Aspergillus
  misc_feature (7)..(109): NCBI GI: 115433925 Blast Desc: [Aspergillus terreus NIH2624] gi|114189951|gb|EAU31651.1| [Aspergillus terreus NIH2624]
  misc_feature (6)..(114): NCBI GI: 212538943 Blast Desc: conserved [Penicillium marneffei ATCC 18224] gi|210069369|gb|EEA23460.1| conserved [Penicillium marneffei ATCC 18224]
  misc_feature (4)..(102): NCBI GI: 39943428 Blast Desc: [Magnaporthe grisea 70-15] gi|149209345|ref|XP_001522047.1| MGCH7_ch7g164 [Magnaporthe grisea 70-15] gi|86196119|gb|EAQ70757.1| MGCH7_ch7g164 grisea
  misc_feature (6)..(109): NCBI GI: 115437982 Blast Desc: [Aspergillus terreus NIH2624] gi|114188764|gb|EAU30464.1| [Aspergillus terreus NIH2624]
MPFARGISLHVTVYIAPENVDRFMAAFKPVFDRVVAEPECLFFEMYQNPQEPGKLSWVENWSKSPEWLLENQLCKDYYKPYFAITEPMFLKPREFQILERTGPEFFMVKPKPFPE

SEQ ID NO: 17755 - DNA, 1389 bp, Muscodor strobelii
  misc_feature: SGI cDNA ID NO. 565938
  misc_feature: Encodes the peptide sequence at SEQ ID NO 17756
atggaggtcaaagttgttgaggacgcgtatccgagctggggtgacttagcctcaagtgtcgcggacgcccatcttccagtataccatcctgacatcatgccttcgttctcttttgcaggggcagtcttgctgtcgtcggcacttgttctcgcctgcgacaatccggatacggatgcctgtgcggcagcctttgtgaataatcaggccgcagctaagacgttctgtccttctgctgcatcggctccccagccagcctgggcttcggcatgctcttccaaaacggccaaactgacgtcggcatacaacaatggtgacttcgaccacaaaggcgacttcgaccacaaaagcaacgacaactacaggcgcagaaccgcatatgccagcatttcttctgcagtaaagtcttgcacgaacattgtgctgtccaacatttccgcgccaccttccagcaccattgatcttcagtcgttgcagactggagctactgtgacttttgccggaacaaccactttcgggaaaacttcagacgatgactttaatcccatcgtcatcagcggccactctgttacgatcacgggtgctgctggtcatgtcatagatggaaatggcgcagtttattgggacggccagggatccaatggcggcgtggccaagcccgatcacttcatcgtcttgaagaagatgtacaattccaaagtgacgaacttgaatatcaagaactggcctgtacactgtttctcgatcaccggcaacgaagttttgactatcagtggcttgacactagataaccgggatggtaacgccgcaaatagtgcgagcggtggcttgccggcggcccacaacagcgatggtttcgacatctcgagctcagactatgtgacattggacagcatcacggtctataatcaagatgactgcgtagcggtcacgtctggtacacaaatcactgtcaataacatgtactgctctggcgggcatggcctaagcatcgggtcgattggtggaaagtcaaacaacaccgtcaacggcgtgactttttcgaactcgatcatcactgactccgagaatggtgcacgtatcaagaccaactcggacacaacgggtacagttgagaatgttacgtaccaaaatatcactctcagtggcatctccgactacggcatagatgtccagcaagactacttgaacggtggtccgacaggcgacccaaccaacggcgttgcgatttcgaatatcaaattcatcgatgtgacggggactgttgagagcgatgcttacaattactacatcctttgtggtagcggtagctgttcgagctttacgttctcaggggttgatgtcaccggtggcaaggacagttgcaactatccgtctactgggtgcccatag

SEQ ID NO: 17756 - protein, 462 aa, Muscodor strobelii
  misc_feature: SGI Peptide ID NO. 565938
  misc_feature (136)..(461): Pfam Id: PF00295 Pfam Desc: Glycosyl hydrolases family 28
  misc_feature (79)..(462): NCBI GI: 149133228 Blast Desc: polygalacturonase 3 [Botryotinia fuckeliana] gi|149133230|gb|ABR20975.1| polygalacturonase 3 [Botryotinia fuckeliana] gi|149133232|gb|ABR20976.1| polygalacturonase 3 3
  misc_feature (79)..(462): NCBI GI: 195540354 Blast Desc: endopolygalacturonase 3 [Botrytis fabae]
  misc_feature (79)..(462): NCBI GI: 195540312 Blast Desc: endopolygalacturonase 3 [Botryotinia fuckeliana] gi|209408375|emb|CAM91242.2| endopolygalacturonase 3 [Botryotinia fuckeliana] gi|209408402|emb|CAM91234.2| endopolygalacturonase 3
  misc_feature (79)..(462): NCBI GI: 45330844 Blast Desc: endopolygalacturonase 3 [Botryotinia fuckeliana] gi|56236518|gb|AAV84615.1| endopolygalacturonase 3 [Botryotinia fuckeliana] gi|149133180|gb|ABR20950.1| polygalacturonase 3 3 3 3
  misc_feature (124)..(462): NCBI GI: 238482209 Blast Desc: polygalacturonase precursor, [Aspergillus flavus NRRL3357] gi|220700393|gb|EED56731.1| polygalacturonase precursor, [Aspergillus flavus NRRL3357]
  misc_feature (79)..(462): NCBI GI: 209408404 Blast Desc: endopolygalacturonase 3 [Botryotinia fuckeliana] gi|209408406|emb|CAM91236.2| endopolygalacturonase 3 [Botryotinia fuckeliana]
  misc_feature (124)..(462): NCBI GI: 169765634 Blast Desc: [Aspergillus oryzae RIB40] gi|83765143|dbj|BAE55286.1| protein product [Aspergillus oryzae]
  misc_feature (79)..(462): NCBI GI: 209408373 Blast Desc: endopolygalacturonase 3 [Botryotinia fuckeliana] gi|209408377|emb|CAM91243.2| endopolygalacturonase 3 [Botryotinia fuckeliana] gi|209408379|emb|CAM91244.2| endopolygalacturonase 3
  misc_feature (124)..(462): NCBI GI: 149133248 Blast Desc: polygalacturonase 3 [Botryotinia calthae]
  misc_feature (124)..(462): NCBI GI: 145241992 Blast Desc: endo-polygalacturonase D pgaD-Aspergillus niger gi|6967121|emb|CAB72931.1| endo-polygalacturonase D [Aspergillus niger] gi|134078185|emb|CAK40265.1| endo-polygalacturonase D
  misc_feature (124)..(462): SWISSPROT Homolog: EC 3.2.1.15 Polygalacturonase
MEVKVVEDAYPSWGDLASSVADAHLPVYHPDIMPSFSFAGAVLLSSALVLACDNPDTDACAAAFVNNQAAAKTFCPSAASAPQPAWASACSSKTAKLTSAYNNGDFDHKGDFDHKSNDNYRRRTAYASISSAVKSCTNIVLSNISAPPSSTIDLQSLQTGATVTFAGTTTFGKTSDDDFNPIVISGHSVTITGAAGHVIDGNGAVYWDGQGSNGGVAKPDHFIVLKKMYNSKVTNLNIKNWPVHCFSITGNEVLTISGLTLDNRDGNAANSASGGLPAAHNSDGFDISSSDYVTLDSITVYNQDDCVAVTSGTQITVNNMYCSGGHGLSIGSIGGKSNNTVNGVTFSNSIITDSENGARIKTNSDTTGTVENVTYQNITLSGISDYGIDVQQDYLNGGPTGDPTNGVAISNIKFIDVTGTVESDAYNYYILCGSGSCSSFTFSGVDVTGGKDSCNYPSTGCP

SEQ ID NO: 17757 - DNA, 496 bp, Muscodor strobelii
  misc_feature: SGI EST ID NO. CUFF.41771.0
  misc_feature: Variant of the nucleotide sequence at SEQ ID NO 17755
cgtcagtggatccctattcgtggatctccgacccctgacctcatttcgaccctcgtcgagaccctgaagtgagtgaacaccgaggacatggaggtcaaagttgttgaggacgcgtatccgagctggggtgacttgggcagtcttgctgtcgtcggcacttgttctcgcctgcgacaatccggatacggatgcctgtgcggcagcctttgtgaataatcaggccgcagctaagacgttctgtccttctgctgcatcggctccccagccagcctgggcttcggcatgctcttccaaaacggccaaactgacgtcggcatgtgcgtgttttgtgactgccacggcgacagccaccaccaccaaagcaacgacggtatggaccacgtgaacggtttacaatgtccatctgctaacaacgagtgcaagacaacaatggtgacttcgaccacaaaggcgacttcgaccacaaaagcaacgacaactacaggcgcaggtagcg

SEQ ID NO: 17758 - DNA, 882 bp, Muscodor strobelii
  misc_feature: SGI cDNA ID NO. 565939
  misc_feature: Reduced expression when VOC is produced
  misc_feature: Encodes the peptide sequence at SEQ ID NO 17759
atgatggaactcatgcgcttcgcatccccatcttgggacaaccaccctaaggacgagaccacagatatcatgacaatgttgagttcgattcaggaggatatgaacaacatccaaatccgcgaggcaaaactcaaaaacgagaagccaagaaaacaccgcgctttcacaacactcaactatcaaatccctccatcaccaggagcacagctcaacagccccttaccaagcccattggactcaaccaaagactcatacttccactccaaaccaacaatcaaccatctgccaccaatccagagtataaaacaaaccactcttcgaacaccactcccctcaccacagcgttcctactccctgatagactacgagccaatcccctggacacaccaacccggagcatctctcacactcccgaacctaccgccagaactccactacgccgtcttcgacttcctggacccaatagacagcgtctgtctggccctaaccagcaaacacttctacctcatccaccgacgcatgcacggttccgtatccctctccgcacgacgtcaggggcccaacgacatggaatgggtatggcgaaacgccggtccatttatgctcaccccaaacagcgtcgggaagcagaattcactcgcgctattatcacctcggggccaagtatactgcaggaaatgcaggacagagagatgcgaactgcataaacatatccaagaatggatggctagggcaggggatgtggaatattgcgttatgacgcagaagttcgggccaccggcggagaagggcgcgaatgagtattgttataggagttcgcctcgacatccgcatcggtgtggacggcatacgaagaatcagcgggctgtgaggttgacgtag

SEQ ID NO: 17759 - protein, 293 aa, Muscodor strobelii
  misc_feature: SGI Peptide ID NO. 565939
  misc_feature (135)..(168): Pfam Id: PF00646 Pfam Desc: F-box domain
  misc_feature (116)..(284): NCBI GI: 261351938 Blast Desc: conserved [Verticillium albo-atrum VaMs.102]
  misc_feature (53)..(283): NCBI GI: 46136869 Blast Desc: FG09950.1 [Gibberella zeae PH-1]
  misc_feature (97)..(283): NCBI GI: 39973699 Blast Desc: MGG_01004 [Magnaporthe grisea 70-15] gi|145018039|gb|EDK02318.1| MGG_01004 [Magnaporthe grisea 70-15]
  misc_feature (25)..(292): NCBI GI: 85080499 Blast Desc: NCU03881 [Neurospora crassa OR74A] gi|28917622|gb|EAA27318.1| NCU03881 [Neurospora crassa OR74A]
  misc_feature (45)..(274): NCBI GI: 116201573 Blast Desc: CHGG_08671 [Chaetomium globosum CBS 148.51] gi|88177189|gb|EAQ84657.1| CHGG_08671 [Chaetomium globosum CBS 148.51]
  misc_feature (116)..(283): NCBI GI: 171677963 Blast Desc: protein product [Podospora anserina] gi|170937050|emb|CAP61709.1| protein product [Podospora anserina]
  misc_feature (116)..(291): NCBI GI: 256732102 Blast Desc: [Nectria haematococca mpVI 77-13-4]
  misc_feature (135)..(292): NCBI GI: 156059382 Blast Desc: SS1G_03703 [Sclerotinia sclerotiorum 1980] gi|154701490|gb|EDO01229.1| SS1G_03703 [Sclerotinia sclerotiorum 1980]
  misc_feature (107)..(191): NCBI GI: 256721059 Blast Desc: NECHADRAFT_55441 [Nectria haematococca mpVI 77-13-4]
  misc_feature (129)..(178): NCBI GI: 154310280 Blast Desc: [Botryotinia fuckeliana B05.10] gi|150851621|gb|EDN26814.1| [Botryotinia fuckeliana B05.10]
  misc_feature: Useful for introducing or modulating the production of volatile compounds
MMELMRFASPSWDNHPKDETTDIMTMLSSIQEDMNNIQIREAKLKNEKPRKHRAFTTLNYQIPPSPGAQLNSPLPSPLDSTKDSYFHSKPTINHLPPIQSIKQTTLRTPLPSPQRSYSLIDYEPIPWTHQPGASLTLPNLPPELHYAVFDFLDPIDSVCLALTSKHFYLIHRRMHGSVSLSARRQGPNDMEWVWRNAGPFMLTPNSVGKQNSLALLSPRGQVYCRKCRTERCELHKHIQEWMARAGDVEYCVMTQKFGPPAEKGANEYCYRSSPRHPHRCGRHTKNQRAVRLT

SEQ ID NO: 17760 - DNA, 1380 bp, Muscodor strobelii
  misc_feature: SGI cDNA ID NO. 565940
  misc_feature: Reduced expression when VOC is produced
  misc_feature: Encodes the peptide sequence at SEQ ID NO 17761
atgtcatcgccatcgagctcgtctcaggccggcaagcggaaacgcccgaccaccgccaattctgccatcatggacgaaaaccccctcttacagccctcctcacgggatgcctctggagaagagggcgacacgactgccccagagtcaggcaagttgacacatcgcaagtcggatggcacggcgggctccaacccagccaagcgccagcgagccaactcggaccgcaattctgctcatgagaacccggaacagatcattgatcctggcgagcctagcgacacaaccgaagctagcatcgacatcgccgaccgtgttggcaggaagagccggaagccgccaacgtttaaggaacccatctctcagaatgaccagaagcagatgcctccgccgcccaccggcagacttgtgcaccctgttggctaccagacgaacccacccccagagggtcgcactatcaggatctatgccgacggtgtttttgatcttttccatcttggacacatgcgccaattggagcaagccaaaaaggcattcgatgacgtctacttgctggtcggtgtcacaggcgacgaggagacacattctcgcaagggcctaacagtcttatccggtgcggagcgtgccgagactgtcagacactgcaaatgggtggatgaagtcattgagaactgcccttggatcgtgactcccgagttcctcgagaagcaccagatcgactatgtcgcccatgacgatatcccctacggagctgccgagggtgacgacatctatgctccaatcaagaaggagggcaaattcttggtgacacagcgaactgagggtgtcagcacgaccggtatcatcacgaagattgtgcgcgactacgagaagtacattgcacgacagttcaagcgaggtgcttcgcgccaggagctcaatgtcagctggctgaagaagaacgagatggacttgaagcgtcatgtccaagaccttcgcgataacatccgctcgaactggaccacgaccggccaggagttgagccgagagttgcgacagtactggcctgctagtcgaccccagagtcctgcccccggcggtcgattcattctgcccaccacgcctggcaccacttccaacggcgatattaatctgcgcgaggctgctgctatggcgtctgcggctaagtcccctaccacgccaggtgcagagagacagcctccgaacgactttatgacgggttatacgttgggattaataggtggtgtcagatcttggatgacgaagaacagacgcaacgtccgtgacacgcaagagagtcgcccagccagtgacgacgagtcagacgagagtgacagcagacacgaccgtgggcgtcctgttgcgccggtgtcggccagctag

SEQ ID NO: 17761 - protein, 459 aa, Muscodor strobelii
  misc_feature: SGI Peptide ID NO. 565940
  misc_feature (155)..(283): Pfam Id: PF01467 Pfam Desc: Cytidylyltransferase
  misc_feature (1)..(459): NCBI GI: 261351909 Blast Desc: choline-phosphate cytidylyltransferase [Verticillium albo-atrum VaMs.102]
  misc_feature (12)..(444): NCBI GI: 256732040 Blast Desc: [Nectria haematococca mpVI 77-13-4]
  misc_feature (5)..(446): NCBI GI: 85080495 Blast Desc: NCU03880 [Neurospora crassa OR74A] gi|28917621|gb|EAA27317.1| conserved [Neurospora crassa OR74A]
  misc_feature (30)..(445): NCBI GI: 46136979 Blast Desc: FG10005.1 [Gibberella zeae PH-1]
  misc_feature (3)..(428): NCBI GI: 145610657 Blast Desc: MGG_01003 [Magnaporthe grisea 70-15] gi|145018040|gb|EDK02319.1| MGG_01003 [Magnaporthe grisea 70-15]
  misc_feature (12)..(442): NCBI GI: 154289333 Blast Desc: phosphorylcholine transferase [Botryotinia fuckeliana B05.10] gi|150849886|gb|EDN25079.1| phosphorylcholine transferase [Botryotinia fuckeliana B05.10]
  misc_feature (1)..(439): NCBI GI: 70995060 Blast Desc: cholinephosphate cytidylyltransferase [Aspergillus fumigatus Af293] gi|66849931|gb|EAL90258.1| cholinephosphate cytidylyltransferase [Aspergillus fumigatus Af293] [Aspergillus
  misc_feature (1)..(439): NCBI GI: 119496123 Blast Desc: cholinephosphate cytidylyltransferase [Neosartorya fischeri NRRL 181] gi|119412997|gb|EAW22938.1| cholinephosphate cytidylyltransferase [Neosartorya fischeri NRRL 181]
  misc_feature (1)..(442): NCBI GI: 240109967 Blast Desc: Cholinephosphate cytidylyltransferase , [Coccidioides posadasii C735 delta SOWgp]
  misc_feature (1)..(442): NCBI GI: 119184742 Blast Desc: CIMG_07137 [Coccidioides immitis RS]
  misc_feature (138)..(359): SWISSPROT Homolog: EC 2.7.7.15 Choline-phosphate cytidylyltransferase
  misc_feature: Useful for introducing or modulating the production of volatile compounds
MSSPSSSSQAGKRKRPTTANSAIMDENPLLQPSSRDASGEEGDTTAPESGKLTHRKSDGTAGSNPAKRQRANSDRNSAHENPEQIIDPGEPSDTTEASIDIADRVGRKSRKPPTFKEPISQNDQKQMPPPPTGRLVHPVGYQTNPPPEGRTIRIYADGVFDLFHLGHMRQLEQAKKAFDDVYLLVGVTGDEETHSRKGLTVLSGAERAETVRHCKWVDEVIENCPWIVTPEFLEKHQIDYVAHDDIPYGAAEGDDIYAPIKKEGKFLVTQRTEGVSTTGIITKIVRDYEKYIARQFKRGASRQELNVSWLKKNEMDLKRHVQDLRDNIRSNWTTTGQELSRELRQYWPASRPQSPAPGGRFILPTTPGTTSNGDINLREAAAMASAAKSPTTPGAERQPPNDFMTGYTLGLIGGVRSWMTKNRRNVRDTQESRPASDDESDESDSRHDRGRPVAPVSAS

SEQ ID NO: 17762 - DNA, 3756 bp, Muscodor strobelii
  misc_feature: SGI EST ID NO. CUFF.41964.0
  misc_feature: Variant of the nucleotide sequence at SEQ ID NO 17760
cccgactggtcaatcaaggcagcataattgtaacagtgttacatactactgacgcaagctgcattcgctacatgacagcagtgaccgatctgactgtaagctaacaatctcactattatggtgagattccaagctgtaattaccactatccacagcgaccacccctttcaaggtcaagttgccgaccctccgcctgatacccctgcaagacgggaccatcgaacattctaaaacaagcagggaaccattgaaacccagaaagccaccatttcttgtagttgcttaaactctcacaagacgtgacgtgacgtgtcttcgtccgcgcctgcctcgtttctcattcctgctttgcgactactcaatgctcagtcgcgcctgattgcctggatgctcgattacatgtgattgcctgttccacgtcccacatcccacctacctcatcactcggcgaatcttggaagcagcctgccctctttgttggtcccaccgccgcctacatctccatcatgtcatcgccatcgagctcgtctcaggccggcaagcggaaacgcccgaccaccgccaattctgccatcatggacgaaaaccccctcttacagccctcctcacgggatgcctctggagaagagggcgacacgactgccccagagtcaggcaagttgacacatcgcaagtcggatggcacggcgggctccaacccagccaagcgccagcgagccaactcggaccgcaattctgctcatgagaacccggaacagatcattgatcctggcgagcctagcgacacaaccgaagctagcatcgacatcgccgaccgtgttggcaggaagagccggaagccgccaacgtttaaggaacccatctctcagaatgaccagaagcagatgcctccgccgcccaccggcagacttgtgcaccctgttggctaccagacgaacccacccccagagggtcgcactatcaggatctatgccgacggtgtttttgatcttttccatcttggacacatgcgccaattggagcaagccaaaaaggcattcgatgacgtctacttgctggtcggtgtcacaggcgacgaggagacacattctcgcaagggcctaacagtcttatccggtgcggagcgtgccgagactgtcagacactgcaaatgggtggatgaagtcattgagaactgcccttggatcgtgactcccgagttcctcgagaagcaccagatcgactatgtcgcccatgacgatatcccctacggagctgccgagggtgacgacatctatgctccaatcaagaaggagggcaaattcttggtgacacagcgaactgagggtgtcagcacgaccggtatcatcacgaagattgtgcgcgactacgagaagtacattgcacgacagttcaagcgaggtgcttcgcgccaggagctcaatgtcagctggctgaagaagaacgagatggacttgaagcgtcatgtccaagaccttcgcgataacatccgctcgaactggaccacgaccggccaggagttgagccgagagttgcgacagtactggcctgctagtcgaccccagagtcctgcccccggcggtcgattcattctgcccaccacgcctggcaccacttccaacggcgatattaatctgcgcgaggctgctgctatggcgtctgcggctaagtcccctaccacgccaggtgcagagagacagcctccgaacgactttatgacgggttatacgttgggattaataggtggtgtcagatcttgggtatgctatggcgtttcttctcttttgttctctacgtaattatgtctctgggctgcaactgacatgtatactctacagatgacgaagaacagacgcaacgtccgtgacacgcaagagagtcgcccagccagtgacgacgagtcagacgagagtgacagcagacacgaccgtgggcgtcctgttgcgccggtgtcggccagctaggtgctgagcccgctggcgcatctgaatcgcccgggtaaccggtacttgacgcctgtcggcgatggtccggccttcagctcgggcgattgtgcggatgatgagaggatggataatggccgtgggtttggtgaggaggatggagagattacttcgcctgcctccaatcgttaaggagagcatagaatggtgaaacgcggtttttctacgttgatggctggtgatacataaaaggtccaggcctactgagtctggagtattggttgaggcgttccctgggcggtctcgtatgttgcccgcagatggttaaatgcgtggcctctgtatgccagatcatgtgaggctttggactttaagaggcttgatcagagatctttgcgaaggagaagccacgggtactcagaggtactgcacgaaggtacccagtaatcacatacgagattgatattaaatgatccctcaggtttgatggtgacacttgtgatcttgactgtgaacgccttgttgccatatttgggagtacagtatagagacggtatgggtcaaacatgaatgcaggggagtgttgtggcatgcacgtcataatcccagcttgatgcactgcgcggctgcatgcagcttcaccgcattgaacttgggatttggtaatggaaaatagaaagggataagtgcgaatctctcttctaaatatgatttggtatcctagaatgcaaacgccaatgcaagatccttgaagtttcccatgcgctcttctatccggctgcccgtcacccaaatgctatcactatgcaacctccatcccttgattcaacgcctctctatataccgccatatatcgatattcttcgcttcccaacatgaaatgtccttgtttcgggaacagttgactgactaagtcatctccgttatatttctcgacttaacaatggccttccgcggtctgaatcctcgctcatatcctacgtcaacctcacagcccgctgattcttcgtatgccgtccacaccgatgcggatgtcgaggcgaactcctataacaatactcattcgcgcccttctccgccggtggcccgaacttctgcgtcataacgcaatattccacatcccctgccctagccatccattcttggatatgtttatgcagttcgcatctctctgtcctgcatttcctgcagtatacttggccccgaggtgataatagcgcgagtgaattctgcttcccgacgctgtttggggtgagcataaatggaccggcgtttcgccatacccattccatgtcgttgggcccctgacgtcgtgcggagagggatacggaaccgtgcatgcgtcggtggatgaggtagaagtgtttgctggttagggccagacagacgctgtctattgggtccaggaagtcgaagacggcgtagtggagttctggcggtaggttcgggagtgtgagagatgctccgggttggtgtgtccaggggattggctcgtagtctatcagggagtaggaacgctgtggtgaggggagtggtgttcgaagagtggtttgttttatactctggattggtggcagatggttgattgttggtttggagtggaagtatgagtctttggttgagtccaatgggcttggtaaggggctgttgagctgtgctcctggtgatggagggatttgatagttgagtgttgtgaaagcgcggtgttttcttggcttctcgtttttgagttttgcctcgcggatttggatgttgttcatatcctcctgaatcgaactcaacattgtcatgatatctgtggtctcgtccttag

SEQ ID NO: 17763 - DNA, 495 bp, Muscodor strobelii
  misc_feature: SGI cDNA ID NO. 565941
  misc_feature: Encodes the peptide sequence at SEQ ID NO 17764
atggcctcgactccaaacacgcccatcaactctacccgcctcaggcagattgccatggacgcttgccaagtggcgatcggtagtgctgagtactatgagcattccaaggtcgaaggctggaattccaccattatcaactcgatcctcagagccgtcatttcagagtctacacccaccggatcgcaggcgcccacattcaaatatgtcgtcaacagcaccatcgtccagcacctagtgccgacctcggccctgaacaagcccaagggaggcagtgagatcaaggctgaggagccgcgcatcagcaccagcagtgacggaaccgcatctaccgctaccgccgttgacggcaagcctcacgttggccgacgcggaatgcactccgccacccaggctttctggaacgagaagactgacggcatgtggagcttcaagtacgatggcggcgagggtaagggactcgacgttgtcattagtgtcatctggattggaatataa

SEQ ID NO: 17764 - protein, 164 aa, Muscodor strobelii
  misc_feature: SGI Peptide ID NO. 565941
  misc_feature (11)..(164): Pfam Id: PF03645 Pfam Desc: Tctex-1 family
  misc_feature (8)..(164): NCBI GI: 46136871 Blast Desc: FG09951.1 [Gibberella zeae PH-1]
  misc_feature (5)..(164): NCBI GI: 261351937 Blast Desc: conserved [Verticillium albo-atrum VaMs.102]
  misc_feature (8)..(164): NCBI GI: 156059378 Blast Desc: SS1G_03701 [Sclerotinia sclerotiorum 1980] gi|154701488|gb|EDO01227.1| SS1G_03701 [Sclerotinia sclerotiorum 1980]
  misc_feature (8)..(164): NCBI GI: 154289347 Blast Desc: BC1G_16110 [Botryotinia fuckeliana B05.10] gi|150849881|gb|EDN25074.1| BC1G_16110 [Botryotinia fuckeliana B05.10]
  misc_feature (1)..(164): NCBI GI: 39973697 Blast Desc: MGG_01005 [Magnaporthe grisea 70-15] gi|145018038|gb|EDK02317.1| MGG_01005 [Magnaporthe grisea 70-15]
  misc_feature (19)..(164): NCBI GI: 154310282 Blast Desc: BC1G_07061 [Botryotinia fuckeliana B05.10] gi|150851622|gb|EDN26815.1| BC1G_07061 [Botryotinia fuckeliana B05.10]
  misc_feature (7)..(164): NCBI GI: 171677965 Blast Desc: protein product [Podospora anserina] gi|170937051|emb|CAP61710.1| protein product [Podospora anserina]
  misc_feature (22)..(164): NCBI GI: 85080503 Blast Desc: NCU03882 [Neurospora crassa OR74A] gi|28917623|gb|EAA27319.1| [Neurospora crassa OR74A]
  misc_feature (2)..(164): NCBI GI: 145239171 Blast Desc: An08g01140 [Aspergillus niger] gi|134076736|emb|CAK39795.1| protein product [Aspergillus niger]
  misc_feature (3)..(164): NCBI GI: 259488335 Blast Desc: TPA: dynein light chain (Eurofung) [Aspergillus nidulans FGSC A4]
MASTPNTPINSTRLRQIAMDACQVAIGSAEYYEHSKVEGWNSTIINSILRAVISESTPTGSQAPTFKYVVNSTIVQHLVPTSALNKPKGGSEIKAEEPRISTSSDGTASTATAVDGKPHVGRRGMHSATQAFWNEKTDGMWSFKYDGGEGKGLDVVISVIWIGI

SEQ ID NO: 17765 - DNA, 2042 bp, Muscodor strobelii
  misc_feature: SGI EST ID NO. CUFF.41955.0
  misc_feature: Variant of the nucleotide sequence at SEQ ID NO 17763
atcggaagtacctgggtaccgaagacagagttggagttccacgagaggaagctacccacgtgcccaaggagggcgctatggttggctgggcaaggaaagtctatcgctttttgggcagactcacgtgcccagctgctcgaagctgcccctcgccttctagtatcgggtacttacaacccaaaccctggtcgatctggactctctctggtggctgggccgacgctggggctgaagtggtcgcgaacgaaacccaattgcatggccaagccgcgccatgcagcaccccaagccatcagccactgccaacacttgcgtttgtcactggcgagagctgccaatggctgccagagagtcgggtagcacgagtttctctgtgaagtcattgtctgattcgctggacggcggagatgatcccggcgcagaacccgcccccaactctcgcagcagcatttccgaccaaattgtgaattttatgggcagtgatgagaaggctgaacagcgcgaggctgccgcgaccactgctccgtggattttccctctgtaaccccctcccggcgcgcagagacgaacaacaagttggatagaaatcagcacgtgacgacccttcattgttcttgaatctcatcgactgcaattcctacaactacatcaactttgccttctcttctcaacgacgccgaccctgccgtttggcgattgaactcagtattcccctcaccccgacagcaaacaccccacgacctcgctcgccgaaaccgcaccactttgcaatctcaccataaaatccttcaatatggcctcgactccaaacacgcccatcaactctacccgcctcaggcagattgccatggacgtacgttctgtctgcatgtcggcgcaaagccctgccttgcgcgacggttcccatcgccctgaataccaccgctaaatcaacgtctctgaatcataggcttgccaagtggcgatcggtagtgctgagtactatgagcattccaaggtcgaaggctggaattccaccattatcaactcgatcctcagagccgtcatttcagagtctacacccaccggatcgcaggcgcccacattcaaatatgtcgtcaacagcaccatcgtccagcacctagtgccgacctcggccctgaacaagcccaagggaggcagtgagatcaaggctgaggagccgcgcatcagcaccagcagtgacggaaccgcatctaccgctaccgccgttgacggcaagcctcacgttggccgacgcggaatgcactccgccacccaggctttctggaacgagaagactgacggcatgtggagcttcaagtacgatggcggcgagggtaagggactcgacgttgtcattagtgtcatctggattggaatataaacgcccaatcgcttctgcgtaaatgcaaaagccctgcccgcgatgaccacaccaccgctactacacgccagccacataacaacaacctctgaaccttcgcttgcgaaacatcaccgcgcagtcagagacagaggcgacgaaggaggacacgaagcatggtctgaaaaggccaagctcgcttcaggatatgatgggaattcgaaggagaggggaaagaaggtaattgtaccatacgtctcaaccacgtcgtacttactcttttggttaaggctagggtatcgtacatgttttgtgtctcaacccacgttgtactctatctcactaccactcccgttactactgctctaattgtacagaatccgggtcgcttgggaacggaaaaaggaagccatttcgtgcgagagaagaatacttgatatacccctgatttctcgttgttttctgtttcagtgtgaatatgagattgataatggtacattagtatgagagagaaagcatctatcacattgaaaactcctgtccaacaaatgcgagggtctgtggccattggagcatagctagtgtcaaacctgaggagctttattccagtatgaactgttatgttatggctcatgcaataaactgtgatattatgcaaaaatgagtgatagcattctct

SEQ ID NO: 17766 - DNA, 408 bp, Muscodor strobelii
  misc_feature: SGI cDNA ID NO. 565942
  misc_feature: Encodes the peptide sequence at SEQ ID NO 17767
atgtcaagccaaccactcctccagaccgctccaggcaagcggatagcactgcccacccgagtcgagcccaaggtcttcttcgcaaacgagcgcacattcctgtcatggctcaacttcaccgtcatcctcggagctctcgccataggcatgcttaactttggcgaccggcccgccttcatctccgccttcctcttcaccggtgtggccatgctcactatgatatacgccctcttcacgtatcattggcgagctaaatccataagagttaagggccaagctggattcgatgatcgcttcggccccacagtccttgccatcatccttctgctcgccgtcattgtcaactttgttttacgcatcagctatgcaggtgccgacagtggcaagcacggaggcaagaaacactaa

SEQ ID NO: 17767 - protein, 135 aa, Muscodor strobelii
  misc_feature: SGI Peptide ID NO. 565942
  misc_feature (1)..(132): NCBI GI: 261351936 Blast Desc: vacuolar transporter chaperone 1 [Verticillium albo-atrum VaMs.102]
  misc_feature (1)..(126): NCBI GI: 116201569 Blast Desc: conserved [Chaetomium globosum CBS 148.51] gi|88177187|gb|EAQ84655.1| conserved [Chaetomium globosum CBS 148.51]
  misc_feature (1)..(129): NCBI GI: 171677967 Blast Desc: protein product [Podospora anserina] gi|170937052|emb|CAP61711.1| protein product [Podospora anserina]
  misc_feature (1)..(133): NCBI GI: 256731722 Blast Desc: [Nectria haematococca mpVI 77-13-4]
  misc_feature (1)..(121): NCBI GI: 46136873 Blast Desc: FG09952.1 [Gibberella zeae PH-1]
  misc_feature (1)..(122): NCBI GI: 154289345 Blast Desc: negative regulator of cdc42p [Botryotinia fuckeliana B05.10] gi|150849880|gb|EDN25073.1| negative regulator of cdc42p [Botryotinia fuckeliana B05.10]
  misc_feature (1)..(122): NCBI GI: 39973695 Blast Desc: conserved [Magnaporthe grisea 70-15] gi|145018037|gb|EDK02316.1| conserved [Magnaporthe grisea 70-15]
  misc_feature (1)..(122): NCBI GI: 85080508 Blast Desc: vacuolar transporter chaperone 1 [Neurospora crassa OR74A] gi|28917624|gb|EAA27320.1| vacuolar transporter chaperone 1 [Neurospora crassa OR74A]
  misc_feature (1)..(126): NCBI GI: 238846046 Blast Desc: vacuolar transporter chaperone 1 [Microsporum canis CBS 113480]
  misc_feature (1)..(130): NCBI GI: 189196712 Blast Desc: vacuolar transporter chaperone 1 [Pyrenophora tritici-repentis Pt-1C-BFP] gi|187980573|gb|EDU47199.1| vacuolar transporter chaperone 1 [Pyrenophora tritici-repentis Pt-1C-BFP]
MSSQPLLQTAPGKRIALPTRVEPKVFFANERTFLSWLNFTVILGALAIGMLNFGDRPAFISAFLFTGVAMLTMIYALFTYHWRAKSIRVKGQAGFDDRFGPTVLAIILLLAVIVNFVLRISYAGADSGKHGGKKH

SEQ ID NO: 17768 - DNA, 2575 bp, Muscodor strobelii
  misc_feature: SGI EST ID NO. CUFF.42113.0
  misc_feature: Variant of the nucleotide sequence at SEQ ID NO 17766
tttttttggtgtgcaacggtttgcaataggtgtattgtatcgattaagagtttatttacaggccaattggatctgctcggctgttctggacctcaatcgcaactagaagaagcttgttgacggaggaaccaagggagtcgtgggagctgcatcgcgctttttacccgcatcgcctgacgtactaagccatccatcatgtcaagccaaccactcctccagaccgctccaggcaagcggatagcactgcccacccgagtcgagcccaaggtcttcttcgcaaacgagcgcacattcctgtcatggctcaacttcaccgtcatcctcggagctctcgccataggcatgcttaactttggcgaccggcccgccttcatctccgccttcctcttcaccggtgtggccatgctcactatgatatacgccctcttcacgtatcattggcgagctaaatccataagagttaagggccaagctggattcgatgatcgcttcggccccacagtccttgccatcatccttctgctcgccgtcattgtcaactttgttttacgcatcagctatgcaggtgccgacagtggcaagcacggaggcaagaaacactaagcatatggttgtctccgagaggaatcaaaagcgatggaagtaaatcgacgtttgacgtgtacaaaactggcgggcaaaggatagcccccatagcgttccaccgacgaggcgagaaacaaaattccggaggcagcgctctgattggggtgtcatttcgggtatgcacgtggaccacgttcgtgatgacgataattcgatgctcagtccatgaatgaggaattccggtcttgcatactaggtgtatgatacataggatagcattgtccagcatacgcaacaagcgaaaatgtattattggtgtttggaagacttttgtgaacctccatcgtgtgaacgtgtgctcgtggtatcggtcgaggcaattcgttctctaccgatacggggcggtgtcgcggccgaacgcggaaaaccacatgctctcaggtggtgaaaacgcgaagagagcagggcggtttcatgagttccatttcgtcctccaagatgttcggatggtagagttgattaggcgatgggcaatggtcatggctttcctttctcctctgcagtcatgtttgtctgttcgccgtaccgcttcctcagctcatcgaccggagtcctcgagaggaataagttcatgatcggtatgctgcgcacctttggctggccatggattgctcgcttgaacggggtcttcatgagctcgaaatcatcctcgtcgcccatgtcgtcgtcttcatcctgattgcgtccaccaagtaccgtgtcttcgatgatggtttcttccggaatgcggggcttcagctgtttctcttctccgagaccaatgtattgataccagcgtccatctgcggatacctcgtcctttttggtctcggggttgctctttgcttcttcttctattttcctcttcacgatctctgcaatagatacgagcttccctgcaaagggggctttcgcacgaagaatggtaaccttgttcctcggtgtggttgcggtgccgtcctcgactactcctcccggcacagctagttcgagatgattgtatgcggctctgaccctttgctggattttcgaggatgagatgacggattggagttgaacgtcgtatcgtgattcaattgtatcgaatagctttgcgttatcgtcggaggtcagacttagtctttcgttgagcctttgtcgcttcgtgcctggcgccgcgtctgtagtgctgctcgtgtcggcgcgcttgcgctttggcagattagtctcggtcgtcatgatgcccgaagatgcgtggcgcgccaggccattgtcgagatgagctggtccctgtgaggcgagggacggctggtgaacgcggctggtagatgcgattgttcatgaatgctcggtgggatgacggagacagcgtcaatgggatttgggtcaaaattctggagacctggcttatcgatagtagaccccgtccaactggaaaatcaagggaccttccacttcgtcagggattcctcccctgctttgccaacggcaagaacgtcccgagcatgcgcaattcggaatctggaaccttgaaggcgcaattgttccatctcgagatcgcgaacatttgcacaaggaccaaatgcgctaatacagtagtttgcccccaaagcatggcgtgggtacgagaactattgaagctacaattactagctgtccgtgcttgttgtagctatcaagcttcatcaaagagctgtgcggaaacttcaagctcttaaaagctctatcacgtcattctaagtcattcgattcatgcagacagcaccactccagtctctatcatatagaccgctctcgttatgcagtcatcacgttcacattctccagtgtttcgcgaggtacgcacttgacagtggatgcattggatctagtagtatcatgcactccaactttcccgattgcttattatggctttcccattcacatgaaacagagggatgcgcaaaagaagcgttgagattcgcgatcacag

SEQ ID NO: 17769 - DNA, 261 bp, Muscodor strobelii
  misc_feature: SGI cDNA ID NO. 565943
  misc_feature: Reduced expression when VOC is produced
  misc_feature: Encodes the peptide sequence at SEQ ID NO 17770
atgcttaactttggcgaccggcccgccttcatctccgccttcctcttcaccggtgtggccatgctcactatgatatacgccctcttcacgtatcattggcgagctaaatccataagagttaagggccaagctggattcgatgatcgcttcggccccacagtccttgccatcatccttctgctcgccgtcattgtcaactttgttttacgcatcagctatgcaggtgccgacagtggcaagcacggaggcaagaaacactaa

SEQ ID NO: 17770 - protein, 86 aa, Muscodor strobelii
  misc_feature: SGI Peptide ID NO. 565943
  misc_feature (1)..(83): NCBI GI: 261351936 Blast Desc: vacuolar transporter chaperone 1 [Verticillium albo-atrum VaMs.102]
  misc_feature (1)..(77): NCBI GI: 116201569 Blast Desc: conserved [Chaetomium globosum CBS 148.51] gi|88177187|gb|EAQ84655.1| conserved [Chaetomium globosum CBS 148.51]
  misc_feature (1)..(80): NCBI GI: 171677967 Blast Desc: protein product [Podospora anserina] gi|170937052|emb|CAP61711.1| protein product [Podospora anserina]
  misc_feature (1)..(84): NCBI GI: 256731722 Blast Desc: [Nectria haematococca mpVI 77-13-4]
  misc_feature (1)..(72): NCBI GI: 46136873 Blast Desc: FG09952.1 [Gibberella zeae PH-1]
  misc_feature (1)..(73): NCBI GI: 154310284 Blast Desc: BC1G_07062 [Botryotinia fuckeliana B05.10] gi|150851623|gb|EDN26816.1| BC1G_07062 [Botryotinia fuckeliana B05.10]
  misc_feature (1)..(73): NCBI GI: 154289345 Blast Desc: negative regulator of cdc42p [Botryotinia fuckeliana B05.10] gi|150849880|gb|EDN25073.1| negative regulator of cdc42p [Botryotinia fuckeliana B05.10]
  misc_feature (1)..(73): NCBI GI: 39973695 Blast Desc: conserved [Magnaporthe grisea 70-15] gi|145018037|gb|EDK02316.1| conserved [Magnaporthe grisea 70-15]
  misc_feature (1)..(73): NCBI GI: 85080508 Blast Desc: vacuolar transporter chaperone 1 [Neurospora crassa OR74A] gi|28917624|gb|EAA27320.1| vacuolar transporter chaperone 1 [Neurospora crassa OR74A]
  misc_feature (1)..(77): NCBI GI: 238846046 Blast Desc: vacuolar transporter chaperone 1 [Microsporum canis CBS 113480]
  misc_feature: Useful for introducing or modulating the production of volatile compounds
MLNFGDRPAFISAFLFTGVAMLTMIYALFTYHWRAKSIRVKGQAGFDDRFGPTVLAIILLLAVIVNFVLRISYAGADSGKHGGKKH

SEQ ID NO: 17771 - DNA, 2575 bp, Muscodor strobelii; identical to SEQ ID NO: 17768
  misc_feature: SGI EST ID NO. CUFF.42113.0
  misc_feature: Variant of the nucleotide sequence at SEQ ID NO 17769

SEQ ID NO: 17772 - DNA, 720 bp, Muscodor strobelii
  misc_feature: SGI cDNA ID NO. 565944
  misc_feature: Reduced expression when VOC is produced
  misc_feature: Encodes the peptide sequence at SEQ ID NO 17773
atgacgaccgagactaatctgccaaagcgcaagcgcgccgacacgagcagcactacagacgcggcgccaggcacgaagcgacaaaggctcaacgaaagactaagtctgacctccgacgataacgcaaagctattcgatacaattgaatcacgatacgacgttcaactccaatccgtcatctcatcctcgaaaatccagcaaagggtcagagccgcatacaatcatctcgaactagctgtgccgggaggagtagtcgaggacggcaccgcaaccacaccgaggaacaaggttaccattcttcgtgcgaaagccccctttgcagggaagctcgtatctattgcagagatcgtgaagaggaaaatagaagaagaagcaaagagcaaccccgagaccaaaaaggacgaggtatccgcagatggacgctggtatcaatacattggtctcggagaagagaaacagctgaagccccgcattccggaagaaaccatcatcgaagacacggtacttggtggacgcaatcaggatgaagacgacgacatgggcgacgaggatgatttcgagctcatgaagaccccgttcaagcgagcaatccatggccagccaaaggtgcgcagcataccgatcatgaacttattcctctcgaggactccggtcgatgagctgaggaagcggtacggcgaacagacaaacatgactgcagaggagaaaggaaagccatga

SEQ ID NO: 17773 - protein, 239 aa, Muscodor strobelii
  misc_feature: SGI Peptide ID NO. 565944
  misc_feature (16)..(233): NCBI GI: 39973693 Blast Desc: MGG_01007 [Magnaporthe grisea 70-15] gi|145018036|gb|EDK02315.1| MGG_01007 [Magnaporthe grisea 70-15]
  misc_feature (38)..(231): NCBI GI: 261351935 Blast Desc: conserved [Verticillium albo-atrum VaMs.102]
  misc_feature (31)..(226): NCBI GI: 46136875 Blast Desc: FG09953.1 [Gibberella zeae PH-1]
  misc_feature (10)..(237): NCBI GI: 256732104 Blast Desc: NECHADRAFT_100526 [Nectria haematococca mpVI 77-13-4]
  misc_feature (44)..(221): NCBI GI: 116201567 Blast Desc: CHGG_08668 [Chaetomium globosum CBS 148.51] gi|88177186|gb|EAQ84654.1| CHGG_08668 [Chaetomium globosum CBS 148.51]
  misc_feature (44)..(230): NCBI GI: 171677969 Blast Desc: protein product [Podospora anserina] gi|170937053|emb|CAP61712.1| protein product [Podospora anserina]
  misc_feature: Useful for introducing or modulating the production of volatile compounds
MTTETNLPKRKRADTSSTTDAAPGTKRQRLNERLSLTSDDNAKLFDTIESRYDVQLQSVISSSKIQQRVRAAYNHLELAVPGGVVEDGTATTPRNKVTILRAKAPFAGKLVSIAEIVKRKIEEEAKSNPETKKDEVSADGRWYQYIGLGEEKQLKPRIPEETIIEDTVLGGRNQDEDDDMGDEDDFELMKTPFKRAIHGQPKVRSIPIMNLFLSRTPVDELRKRYGEQTNMTAEEKGKP

SEQ ID NO: 17774 - DNA, 2649 bp, Muscodor strobelii
  misc_feature: SGI EST ID NO. CUFF.42113.1
  misc_feature: Variant of the nucleotide sequence at SEQ ID NO 17772
ctgtgatcgcgaatctcaacgcttcttttgcgcatccctctgtttcatgtgaatgggaaagccataataagcaatcgggaaagttggagtgcatgatactactagatccaatgcatccactgtcaagtgcgtacctcgcgaaacactggagaatgtgaacgtgatgactgcataacgagagcggtctatatgatagagactggagtggtgctgtctgcatgaatcgaatgacttagaatgacgtgatagagcttttaagagcttgaagtttccgcacagctctttgatgaagcttgatagctacaacaagcacggacagctagtaattgtagcttcaatagttctcgtacccacgccatgctttgggggcaaactactgtattagcgcatttggtccttgtgcaaatgttcgcgatctcgagatggaacaattgcgccttcaaggttccagattccgaattgcgcatgctcgggacgttcttgccgttggcaaagcaggggaggaatccctgacgaagtggaaggtcccttgattttccagttggacggggtctactatcgataagccaggtctccagaattttgacccaaatcccattgacgctgtctccgtcatcccaccgagcattcatgaacaatcgcatctaccagccgcgttcaccagccgtccctcgcctcacagggaccagctcatctcgacaatggcctggcgcgccacgcatcttcgggcatcatgacgaccgagactaatctgccaaagcgcaagcgcgccgacacgagcagcactacagacgcggcgccaggcacgaagcgacaaaggctcaacgaaagactaagtctgacctccgacgataacgcaaagctattcgatacaattgaatcacgatacgacgttcaactccaatccgtcatctcatcctcgaaaatccagcaaagggtcagagccgcatacaatcatctcgaactagctgtgccgggaggagtagtcgaggacggcaccgcaaccacaccgaggaacaaggttaccattcttcgtgcgaaagccccctttgcagggaagctcgtatctattgcagagatcgtgaagaggaaaatagaagaagaagcaaagagcaaccccgagaccaaaaaggacgaggtatccgcagatggacgctggtatcaatacattggtctcggagaagagaaacagctgaagccccgcattccggaagaaaccatcatcgaagacacggtacttggtggacgcaatcaggatgaagacgacgacatgggcgacgaggatgatttcgagctcatgaagaccccgttcaagcgagcaatccatggccagccaaaggtgcgcagcataccgatcatgaacttattcctctcgaggactccggtcgatgagctgaggaagcggtacggcgaacagacaaacatgactgcagaggagaaaggaaagccatgaccattgcccatcgcctaatcaactctaccatccgaacatcttggaggacgaaatggaactcatgaaaccgccctgctctcttcgcgttttcaccacctgagagcatgtggttttccgcgttcggccgcgacaccgccccgtatcggtagagaacgaattgcctcgaccgataccacgagcacacgttcacacgatggaggttcacaaaagtcttccaaacaccaataatacattttcgcttgttgcgtatgctggacaatgctatcctatgtatcatacacctagtatgcaagaccggaattcctcattcatggactgagcatcgaattatcgtcatcacgaacgtggtccacgtgcatacccgaaatgacaccccaatcagagcgctgcctccggaattttgtttctcgcctcgtcggtggaacgctatgggggctatcctttgcccgccagttttgtacacgtcaaacgtcgatttacttccatcgcttttgattcctctcggagacaaccatatgcttagtgtttcttgcctccgtgcttgccactgtcggcacctgcatagctgatgcgtaaaacaaagttgacaatgacggcgagcagaaggatgatggcaaggactgtggggccgaagcgatcatcgaatccagcttggcccttaactcttatggatttagctcgccaatgatacgtgaagagggcgtatatcatagtgagcatggccacaccggtgaagaggaaggcggagatgaaggcgggccggtcgccaaagttaagcatgcctatggcgagagctccgaggatgacggtgaagttgagccatgacaggaatgtgcgctcgtttgcgaagaagaccttgggctcgactcgggtgggcagtgctatccgcttgcctgcaggtcgcgcaaaccttgtcagtataataacaaaacggcttctcgatcgggtacgctgtgaggttaccgacctggagcggtctggaggagtggttggcttgacatgatggatggcttagtacgtcaggcgatgcgggtaaaaagcgcgatgcagctcccacgactcccttggttcctccgtcaacaagcttcttctagttgcgattgaggtccagaacagccgagcagatccaattggcctgtaaataaactcttaatcgatacaatacacctattgcaaaccgttgcacaccaaaaaaa

SEQ ID NO: 17775 - DNA, 1965 bp, Muscodor strobelii
  misc_feature: SGI cDNA ID NO. 565945
  misc_feature: Encodes the peptide sequence at SEQ ID NO 17776
atgctcaactttcggttctggaactcggatcaaaggggaagcgagaagttacaagcaccggactatcctatgcttgatttcaccaaacctgctcaaccttggttaccaacagatattaacatcaacgccccagcatcagtatctcccaagcggcagagggagagtaacgcagcgatagcgtcacaaagtgatgctgacgcgcccgtgtcaaaacggcagcggatagccaatgatcatcgcagtaatgaaaatgcggatcctcgacaggaggaagtcccttcgactcaggtgattaactcggactcttctgaggcgagcacacctgctgtcgacttggagcgtgcgacagaaatcatagaggaacagcttggcatggaaattttgctgaagcacgacgagctccgattaatcaaccaagaacttgcaaaatgtcaagttgcattggaacagttacgccgctgtcacctgatgccctatccagtcaacatccctaccccagaacagatgttgagaattagtggtggatcaggtccctcattacaaccaaaggcaggcgataaactgcctcagtgggcaccgccatttggtgtcactgaaggcccatacgcacgacattatgccaagtggctgataccagatcctaagtttgatggtatttacccccaggtgtctgtccaagccacgagatctgcagtcgaaggcagatcaacgagacatagttttgccgagctaagtacgccacaaggaaagggcagaccgtccaggagcactgctggtcaaaagctgcaagcactttcgagcggctatcctccccctaaggacaagaatggtccttgcacgttgaagcgctcagatggacagacagtgaaattagtgtgtatcgactgcaacagagagaatttttcgagcacgcaaggattcatcaatcactgtcgcattgcgcacaagagggacttcaagagtcacgaagaggccgctgttcattgtggacaccccattaaggtgccagagcctgttcatgctggtatcgtagaagagaagcccgtggttccacccgctcttccttcaggcctggtgcatcctttcactcgtgaaaacgcaatgtcagaatctgaggcgtgtttttctgttgtacgtcgtattcaggaatcgattgcgttgtatcgcaaggggcactcgaaaggggctctaccaggaccttcctcagttgcgtcgcagtcgacaaaggttcccatggttcccaagagcaacccaggctttacaccttcagctgcatctccccatctttctcggctactgcaaactaagggcataggtgttgatctcagtgcgttggttgaggatgctaagagcaagatagatgacgaaccactctctgagacggatgatgaatcgggagatcaagactcgccgattccatctgtcggcagttgtatgggcaaacctgtcccgacgcatatggtatcaacaggcatgcgcgttccctcgagaggtgttatggccccagctacctccacacagcgcccactgagtagcaaaggtgcacttgcacgtcctacgcaccttgtgaccccacttgctaccccgactccatctgtgcaacatatagtttctcctgactccggaatgagcatggatgaggatatgttagacgtcacagagctaagccctcatactgcagttagcaacaacgctccatctcttgttagtgacgacggcgagtatgacgactcagccgattctgattcggcgtccgaaatggacgatagcatcggtgcgtctctctctgacgtagatgagattgacattgatgacgagcatgcgggtgcacgatcgttgcgacataacgtaaggctcgctcagggtgacagcaagcatgtgaatttcgtgagccgcgtgaaggaaaacccatctcctgcgaaacaaggtcgtgacagaacgctgaagatcgatactcttcattaa

SEQ ID NO: 17776 - protein, 654 aa, Muscodor strobelii
  misc_feature: SGI Peptide ID NO. 565945
  misc_feature (4)..(650): NCBI GI: 256731723 Blast Desc: NECHADRAFT_69377 [Nectria haematococca mpVI 77-13-4]
  misc_feature (4)..(648): NCBI GI: 46136877 Blast Desc: FG09954.1 [Gibberella zeae PH-1]
  misc_feature (4)..(631): NCBI GI: 171677971 Blast Desc: protein product [Podospora anserina] gi|170937054|emb|CAP61713.1| protein product [Podospora anserina]
  misc_feature (4)..(646): NCBI GI: 164426590 Blast Desc: NCU03885 [Neurospora crassa OR74A] gi|157071398|gb|EAA27322.2| [Neurospora crassa OR74A]
  misc_feature (1)..(630): NCBI GI: 116201565 Blast Desc: CHGG_08667 [Chaetomium globosum CBS 148.51] gi|88177185|gb|EAQ84653.1| CHGG_08667 [Chaetomium globosum CBS 148.51]
  misc_feature (4)..(646): NCBI GI: 39973691 Blast Desc: MGG_01008 [Magnaporthe grisea 70-15] gi|145018035|gb|EDK02314.1| MGG_01008 [Magnaporthe grisea 70-15]
  misc_feature (110)..(646): NCBI GI: 154310290 Blast Desc: BC1G_07065 [Botryotinia fuckeliana B05.10] gi|150851626|gb|EDN26819.1| BC1G_07065 [Botryotinia fuckeliana B05.10]
  misc_feature (110)..(638): NCBI GI: 156059370 Blast Desc: SS1G_03697 [Sclerotinia sclerotiorum 1980] gi|154701484|gb|EDO01223.1| SS1G_03697 [Sclerotinia sclerotiorum 1980]
  misc_feature (110)..(610): NCBI GI: 70995108 Blast Desc: conserved [Aspergillus fumigatus Af293] gi|66849955|gb|EAL90282.1| conserved [Aspergillus fumigatus Af293]
  misc_feature (110)..(610): NCBI GI: 159131076 Blast Desc: conserved [Aspergillus fumigatus A1163]
MLNFRFWNSDQRGSEKLQAPDYPMLDFTKPAQPWLPTDININAPASVSPKRQRESNAAIASQSDADAPVSKRQRIANDHRSNENADPRQEEVPSTQVINSDSSEASTPAVDLERATEIIEEQLGMEILLKHDELRLINQELAKCQVALEQLRRCHLMPYPVNIPTPEQMLRISGGSGPSLQPKAGDKLPQWAPPFGVTEGPYARHYAKWLIPDPKFDGIYPQVSVQATRSAVEGRSTRHSFAELSTPQGKGRPSRSTAGQKLQALSSGYPPPKDKNGPCTLKRSDGQTVKLVCIDCNRENFSSTQGFINHCRIAHKRDFKSHEEAAVHCGHPIKVPEPVHAGIVEEKPVVPPALPSGLVHPFTRENAMSESEACFSVVRRIQESIALYRKGHSKGALPGPSSVASQSTKVPMVPKSNPGFTPSAASPHLSRLLQTKGIGVDLSALVEDAKSKIDDEPLSETDDESGDQDSPIPSVGSCMGKPVPTHMVSTGMRVPSRGVMAPATSTQRPLSSKGALARPTHLVTPLATPTPSVQHIVSPDSGMSMDEDMLDVTELSPHTAVSNNAPSLVSDDGEYDDSADSDSASEMDDSIGASLSDVDEIDIDDEHAGARSLRHNVRLAQGDSKHVNFVSRVKENPSPAKQGRDRTLKIDTLH

SEQ ID NO: 17777 - DNA, 4373 bp, Muscodor strobelii
  misc_feature: SGI EST ID NO. CUFF.42125.0
  misc_feature: Variant of the nucleotide sequence at SEQ ID NO 17775
gcccaggtatcgattgattagcgggtagtacattttagctgatctcccagcttgctcgagcaagaaacacgacccaaacttgtaattatgccccataccggattgcatcccccgtagctagttccctgtacgaggtctagaagactgcgtgcgccccctgctcaggtcttggcctctgcgttgcctcttatcaggatgtcagagcgctgggtgaaaaacaaaacagatctttaatgaggtagtcgagcaatcgcctcgcccacactcgggagagattggaagcaggtagagctgtttcaaaggagggcacacattgcacacattgcatgttgtatgcgagaccaccagcgaaggagccactcctggcacttctgaggttgcctgcaccctccatgattggcctgtcagggcaattttagcagcatgtgctagcctctgccagagtcccggcaccaccgtaagccccagttttgcccccctaacgcatttccctatcgcccccgaacctgccatcctcgcattcccttccacgtcgcaacaacagtcgcgccagaggtaggcaggaataaccttcccataccactcaacatttacaacaacagaactgactgcatgaacacgactcattcgccctttctctcattatcttgtacgcccattatacgcccattatactaccctctttctaataatacgtgcctaattgtcttgaccgcacggctgtcttgtctgtatattgtattatctcacctgcagctttctttgcgcattcctttgctgccgcgtcccaacttctttctcttccgaagttgcctctttctcccgtcgatctcacactcgtcactcgtctgcgcgaccgccgacagtgtcactgatcgtctagtcctgactgcttttgcccgtattttttacggtcgcggccgtccccaaagggatttcttcccccaaaaatatacactgttttaatctctgcggtgttccgtctttccgtgtattgactgattgatcgtccctgttttgctcacgctgaggactgtctttccaaccttcttgtcgccggtcgcaacccaaatcaatcttgctcactttactcggtcaacacgtctcccttcacttgtcgtcgaccttctgtactattacatacgacattttgtctaccgcgtgataatcatttgctattttttgcgctcgcaatagcatagccttcccgtgcatcgcctagtcatcttcccggccgacctggtgcatcccatcgtcgccgctcttgccaggtgccacagctaacttttggcccttctggtgcctcgtcgcgcgcacccttctgcatattccctttgcccccaaaggtgtgtgccttgtccttgttctgggactgactcacattgagttttggctggctttgacaaattgacggtggccacatcagccgaatccgctttacgattcgcccctattttccctgccttacagcaggctggcacaccacttgcgacgctctcaccggcaaccttgagacccattgcgcaagcagtgtcatttcattgggtgcatcggtatatgtgcacctgtggcagagtggtcttccctcgtcccatctcctgccaagctaggactatttcccggctgcctcctgtgattctctgtcgacagcacccgatcctccgatcgcatgcttgcctatgtgcagcacgagaatccactagagccacccagtcctcccgttacgtcagccttggccgaacctgccctttggcgtcacacatctgacactggtctccgcccccctttcccagcgactgcatcctgcagctagtgtccccagcctacatccaggctcccatctcagcaatcgcgctttctcacctcggcgctttgttgttgatcttctagactgcgttgcgcataatttcccaaagaacgtgaaaagtcttcgggtatgctcaactttcggttctggaactcggatcaaaggggaagcgagaagttacaagcaccggactatcctatgcttgatttcaccaaacctgctcaaccttggttaccaacagatattaacatcaacgccccagcatcagtatctcccaagcggcagagggagagtaacgcagcgatagcgtcacaaagtgatgctgacgcgcccgtgtcaaaacggcagcggatagccaatgatcatcgcagtaatgaaaatgcggatcctcgacaggaggaagtcccttcgactcaggtgattaactcggactcttctgaggcgagcacacctgctgtcgacttggagcgtgcgacagaaatcatagaggaacagcttggcatggaaattttgctgaagcacgacgagctccgattaatcaaccaagaacttgcaaaatgtcaagttgcattggaacagttacgccgctgtcacctgatgccctatccagtcaacatccctaccccagaacagatgttgagaattagtggtggatcaggtccctcattacaaccaaaggcaggcgataaactgcctcagtgggcaccgccatttggtgtcactgaaggcccatacgcacgacattatgccaagtggctgataccagatcctaagtttgatggtatttacccccaggtgtctgtccaagccacgagatctgcagtcgaaggcagatcaacgagacatagttttgccgagctaagtacgccacaaggaaagggcagaccgtccaggagcactgctggtcaaaagctgcaagcactttcgagcggctatcctccccctaaggacaagaatggtccttgcacgttgaagcgctcagatggacagacagtgaaattagtgtgtatcgactgcaacagagagaatttttcgagcacgcaaggattcatcaatcactgtcgcattgcgcacaagagggacttcaagagtcacgaagaggccgctgttcattgtggacaccccattaaggtgccagagcctgttcatgctggtatcgtagaagagaagcccgtggttccacccgctcttccttcaggcctggtgcatcctttcactcgtgaaaacgcaatgtcagaatctgaggcgtgtttttctgttgtacgtcgtattcaggaatcgattgcgttgtatcgcaaggggcactcgaaaggggctctaccaggaccttcctcagttgcgtcgcagtcgacaaaggttcccatggttcccaagagcaacccaggctttacaccttcagctgcatctccccatctttctcggctactgcaaactaagggcataggtgttgatctcagtgcgttggttgaggatgctaagagcaagatagatgacgaaccactctctgagacggatgatgaatcgggagatcaagactcgccgattccatctgtcggcagttgtatgggcaaacctgtcccgacgcatatggtatcaacaggcatgcgcgttccctcgagaggtgttatggccccagctacctccacacagcgcccactgagtagcaaaggtgcacttgcacgtcctacgcaccttgtgaccccacttgctaccccgactccatctgtgcaacatatagtttctcctgactccggaatgagcatggatgaggatatgttagacgtcacagagctaagccctcatactgcagttagcaacaacgctccatctcttgttagtgacgacggcgagtatgacgactcagccgattctgattcggcgtccgaaatggacgatagcatcggtgcgtctctctctgacgtagatgagattgacattgatgacgagcatgcgggtgcacgatcgttgcgacataacgtaaggctcgctcagggtgacagcaagcatgtgaatttcgtgagccgcgtgaaggaaaacccatctcctgcgaaacaaggtcgtgacagaacgctgaagatcgatactcttcattaaaccgctactctgcattgagcagcgaatgatcttacgatttacctgctatttttcggacaaagccccaatctgtcaagagtttgaggttgccctcgagttggactaggctttgattgtttttggaaccatgaccatattattttacccctctactctcttgtattacacatcattacctgcgctgtgggctggtcgatgccgatttttatcttcacttctacgaatggtccgcccgacgagtttgacagcatcaccagactatatgcgcattagagggcgcggatgcagaaggaggctcggcattgtagactttattagaatgggaaatcgggaggcgccggtctagaaaagagggatttgagatacccggtgcctaccttcgcttgtacagaataggagaacggacatgtgcactggctgaataggctggtgttacattataatacacatacgctatttggcgaaacttgag

SEQ ID NO: 17778 - DNA, 2430 bp, Muscodor strobelii
  misc_feature: SGI cDNA ID NO. 565946
  misc_feature: Encodes the peptide sequence at SEQ ID NO 17779
atgacggccagtcgctctgacgccggctcatcagcccaacctaatctacgggtcactatcattgctgctgatggcttatacaaacgagatgtattccgacttcccgacccctttgcggtggccaccatgaatggtgaacagacaaagactacccaagtctccaaacgaacactcaacccctactggaacgagagcttcgacttccgggcgaccgaggacggcatcctggcagtgcaggtgttcgatcagaagaagttcaagaagaaggatcaaggtttcttgggcgttattaacattagaatcggcgatgctattgagttggccgacggagctgacgattctatgctcacccgtgacctcaagaagtcgacggacaaccttgtcgtccacggcaagctcatcatcaacttatccaccaacctatcaactcccactcgcccccaggccccgccctcggcgagctccagtcgaccatcgctggcgccccaaggctctacgatgagcgccagctcggaacggcccacgtcgtcgacgtctggtcccaacggtgtcggtaatcagttgaccctgcctatccgcagcaacggcaccaacggcgcgccgcaaactaacgggaatacctcgtcctcgcaaggtcggtcagcaaatcaacttagtccgtttgaagatgctcagggccgactgcctgcaggttgggaacgtcgtgaggataaccttggcagaacatactatgttgaccataacactcgcaccacgagctggaatcgaccggtcgcccccgctggctcgggagaggttcgtgaagagagagcggcggccactcaggtcgagcgacagagacatcagaaccggacccttcccgaggaccgcactggtgcaaactcaccgtcgctccagtccgcacagccggctgccaccccgcagagcggcaccggctcgagcactatgatgcacactggtgccaccagccccggcacaggcgagctacctccaggatgggagcagcggtggacacccgagggacgcccctatttcgtcgatcataacacgcgaacgacgacctgggtggacccccgccgccagcagtacattcgcatgtatggaggccagaataatgccaacgggactatccagcagcaacccgtctcccagctgggccctcttccaagtggctgggagatgcgtctcaccaacacagctcgtgtgtacttcgtagaccacaacactaagacgaccacttgggacgatcccaggttgccctcttctctagaccaaaatgtgccccagtacaagagagactttcgacggaaactgatctacttccgatcgcaacctgcgatgcgcattctctcaggtcaatgccacatcaaggtccgacgatctcacatattcgaagactcattcgccgagatatcacggcaatcggcgactgatctcaagaagcgtttgatgatcaagttcgacggcgaagacggtttagattatggtggtctgtcccgagagttcttcttcttgctctcccatgaaatgttcaaccccttttactgtctattcgagtactcagcgcatgacaactacaccctacagatcaacccccactccggtatcaaccccgagcatcttaactacttcaaattcataggtcgcgttgtcggtcttgctattttccacagacgatttttggatgcttttttcattggagctctgtacaagatggtgctaggcaaggctgtacaacttgctgacatggaaggtgtcgatgccgacttccaccgaagtctgcagtggatgctggataacgatatttccggcggcattctcgagcagaccttctcgaccgaggatgagcgctttggcgttatgaccgtcgaggatctcatccccaacggacgcaacatcgacgtgaccaacgagaacaagaaggagtacgttgatttgatggtcaaatggaggatcgagaagcgcattgctgagcagttcgaggcattcaaggccgggttccacgagctcatcccgcaagaccttatcaacgtcttcgatgagcgcgaattggagctcctgattggtggtattgccgagatcgatgtggatgactggaagaagcacaccgattaccgaggatacaccgaaaacgacgaggtcgtgcagttcttctggcagacgatacgtacgtgggacggagaacagaagagcagattgctgcaattcgctactggtacatccagaatccccgtcaacggtttcaaggatctccagggaagtgatgggccaagaagattcacgatcgaaaaggccggtgatattggcaatttgcccaaagcgcatacttgtttcaaccgtttagatctgccgccttacaagtcactggagcagctgcaacaaaagatgaccattgctgtcgaagaaaccatgggctttggccaagagtaa

SEQ ID NO: 17779 - protein, 809 aa, Muscodor strobelii
  misc_feature: SGI Peptide ID NO. 565946
  misc_feature (16)..(98): Pfam Id: PF00168 Pfam Desc: C2 domain
  misc_feature (504)..(809): Pfam Id: PF00632 Pfam Desc: HECT-domain (ubiquitin-transferase)
  misc_feature (329)..(358): Pfam Id: PF00397 Pfam Desc: WW domain
  misc_feature (388)..(417): Pfam Id: PF00397 Pfam Desc: WW domain
  misc_feature (228)..(257): Pfam Id: PF00397 Pfam Desc: WW domain
  misc_feature (1)..(809): NCBI GI: 145612617 Blast Desc: conserved [Magnaporthe grisea 70-15] gi|145019755|gb|EDK03983.1| conserved [Magnaporthe grisea 70-15]
  misc_feature (4)..(809): NCBI GI: 256732043 Blast Desc: [Nectria haematococca mpVI 77-13-4]
  misc_feature (18)..(809): NCBI GI: 46137513 Blast Desc: FG10272.1 [Gibberella zeae PH-1]
  misc_feature (1)..(809): NCBI GI: 11272426 Blast Desc: FG10272.1 [Gibberella zeae PH-1]
  misc_feature (34)..(809): NCBI GI: 171677923 Blast Desc: protein product [Podospora anserina] gi|170937030|emb|CAP61688.1| protein product [Podospora anserina]
  misc_feature (1)..(809): NCBI GI: 40882335 Blast Desc: ubiquitin-protein ligase [Neurospora crassa]
  misc_feature (1)..(809): NCBI GI: 164426635 Blast Desc: ubiquitin ligase (Nedd4/Rsp5p) [Neurospora crassa OR74A] gi|157071416|gb|EAA28350.2| ubiquitin ligase (Nedd4/Rsp5p) [Neurospora crassa OR74A]
  misc_feature (1)..(809): NCBI GI: 116201545 Blast Desc: conserved [Chaetomium globosum CBS 148.51] gi|88177175|gb|EAQ84643.1| conserved [Chaetomium globosum CBS 148.51]
  misc_feature (4)..(809): NCBI GI: 156059392 Blast Desc: conserved [Sclerotinia sclerotiorum 1980] gi|154701495|gb|EDO01234.1| conserved [Sclerotinia sclerotiorum 1980]
  misc_feature (55)..(809): NCBI GI: 261351929 Blast Desc: E3 ubiquitin-protein ligase pub1 [Verticillium albo-atrum VaMs.102]
MTASRSDAGSSAQPNLRVTIIAADGLYKRDVFRLPDPFAVATMNGEQTKTTQVSKRTLNPYWNESFDFRATEDGILAVQVFDQKKFKKKDQGFLGVINIRIGDAIELADGADDSMLTRDLKKSTDNLVVHGKLIINLSTNLSTPTRPQAPPSASSSRPSLAPQGSTMSASSERPTSSTSGPNGVGNQLTLPIRSNGTNGAPQTNGNTSSSQGRSANQLSPFEDAQGRLPAGWERREDNLGRTYYVDHNTRTTSWNRPVAPAGSGEVREERAAATQVERQRHQNRTLPEDRTGANSPSLQSAQPAATPQSGTGSSTMMHTGATSPGTGELPPGWEQRWTPEGRPYFVDHNTRTTTWVDPRRQQYIRMYGGQNNANGTIQQQPVSQLGPLPSGWEMRLTNTARVYFVDHNTKTTTWDDPRLPSSLDQNVPQYKRDFRRKLIYFRSQPAMRILSGQCHIKVRRSHIFEDSFAEISRQSATDLKKRLMIKFDGEDGLDYGGLSREFFFLLSHEMFNPFYCLFEYSAHDNYTLQINPHSGINPEHLNYFKFIGRVVGLAIFHRRFLDAFFIGALYKMVLGKAVQLADMEGVDADFHRSLQWMLDNDISGGILEQTFSTEDERFGVMTVEDLIPNGRNIDVTNENKKEYVDLMVKWRIEKRIAEQFEAFKAGFHELIPQDLINVFDERELELLIGGIAEIDVDDWKKHTDYRGYTENDEVVQFFWQTIRTWDGEQKSRLLQFATGTSRIPVNGFKDLQGSDGPRRFTIEKAGDIGNLPKAHTCFNRLDLPPYKSLEQLQQKMTIAVEETMGFGQE

SEQ ID NO: 17780 - DNA, 3532 bp, Muscodor strobelii
  misc_feature: SGI EST ID NO. CUFF.42406.0
  misc_feature: Variant of the nucleotide sequence at SEQ ID NO 17778
ccgtcccgccgtcagtaaacccagctagtaagagtcaactagaaacaagcaacagcagtgactgtcgccgccatccactccatcgccacgcctcttccttctttttcttccctttccctttgaccttcaattcctcttaccagcgagccagccatcgtgtcgtgggggaccagcggcgaccgagtccgtcctcagcatcatcattgttattgccggcccctccccctccccgccgacgcccttgagaccatcaaccagcccctctccgctcacgtccaccacgcccaccacgcccacttgacctgtcaccgtcaccatcaccgtctcccgtcgcccggcccagcgacggcatcacgcgaacggcgacaacaacggagagcccccgatgccctgaagtcccggccgcatcccacacccacacccggtcctctgcatctagtgcttccgctgcactcaatcggcatccctatcgctgcctccgctgtcatcgtcaacaacatccgtcatgacggccagtcgctctgacgccggctcatcagcccaacctaatctacgggtcactatcattgctgctgatggcttatacaaacgagatgtattccgacttcccgacccctttgcggtggccaccatgaatggtgaacagacaaagactacccaagtctccaaacgaacactcaacccctactggaacgagagcttcgacttccgggcgaccgaggacggcatcctggcagtgcaggtgttcgatcagaagaagttcaagaagaaggatcaaggtttcttgggcgttattaacattagaatcggcgatgctattgagttggccgacggagctgacggtaaggctggccccctcgctaggcatgtcttagccgcctcggccgatcagtcacaactgacagggcataccccccctccagattctatgctcacccgtgacctcaagaagtcgacggacaaccttgtcgtccacggcaagctcatcatcaacttatccaccaacctatcaactcccactcgcccccaggccccgccctcggcgagctccagtcgaccatcgctggcgccccaaggctctacgatgagcgccagctcggaacggcccacgtcgtcgacgtctggtcccaacggtgtcggtaatcagttgaccctgcctatccgcagcaacggcaccaacggcgcgccgcaaactaacgggaatacctcgtcctcgcaaggtcggtcagcaaatcaacttagtccgtttgaagatgctcagggccgactgcctgcaggttgggaacgtcgtgaggataaccttggcagaacatactatgttgaccataacactcgcaccacgagctggaatcgaccggtcgcccccgctggctcgggagaggttcgtgaagagagagcggcggccactcaggtcgagcgacagagacatcagaaccggacccttcccgaggaccgcactggtgcaaactcaccgtcgctccagtccgcacagccggctgccaccccgcagagcggcaccggctcgagcactatgatgcacactggtgccaccagccccggcacaggcgagctacctccaggatgggagcagcggtggacacccgagggacgcccctatttcgtcgatcataacacgcgaacgacgacctgggtggacccccgccgccagcagtacattcgcatgtatggaggccagaataatgccaacgggactatccagcagcaacccgtctcccagctgggccctcttccaagtggctgggagatgcgtctcaccaacacagctcgtgtgtacttcgtagaccacaacactaagacgaccacttgggacgatcccaggttgccctcttctctagaccaaaatgtgccccagtacaagagagactttcgacggaaactgatctacttccgatcgcaacctgcgatgcgcattctctcaggtcaatgccacatcaaggtccgacgatctcacatattcgaagactcattcgccgagatatcacggcaatcggcgactgatctcaagaagcgtttgatgatcaagttcgacggcgaagacggtttagattatggtggtctgtcccgagagttcttcttcttgctctcccatgaaatgttcaaccccttttactgtctattcgagtactcagcgcatgacaactacaccctacagatcaacccccactccggtatcaaccccgagcatcttaactacttcaaattcataggtcgcgttgtcggtcttgctattttccacagacgatttttggatgcttttttcattggagctctgtacaagatggtgctaggcaaggctgtacaacttgctgacatggaaggtgtcgatgccgacttccaccgaagtctgcagtggatgctggataacgatatttccggcggcattctcgagcagaccttctcgaccgaggatgagcgctttggcgttatgaccgtcgaggatctcatccccaacggacgcaacatcgacgtgaccaacgagaacaagaaggagtacgttgatttgatggtcaaatggaggatcgagaagcgcattgctgagcagttcgaggcattcaaggccgggttccacgagctcatcccgcaagaccttatcaacgtcttcgatgagcgcgaattggagctcctgattggtggtattgccgagatcgatgtggatgactggaagaagcacaccgattaccgaggatacaccgaaaacgacgaggtcgtgcagttcttctggcagacgatacgtacgtgggacggagaacagaagagcagattgctgcaattcgctactggtacatccagaatccccgtcaacggtttcaaggatctccagggaagtgatgggccaagaagattcacgatcgaaaaggccggtgatattggcaatttgcccaaagcgcatacttgtttcaaccgtttagatctgccgccttacaagtcactggagcagctgcaacaaaagatgaccattgctgtcgaagaaaccatgggctttggccaagagtaaaagctctaatttttggttgcttctcttatgctatttcttacgtgctgtgggtggactagctggcttgaaagaaatatttttgccgtactgttgtatatagaccagcaaggcaaatcacgtggaagaccacccacgcggtggcgccatgccaacggcgagactcacctcgaacagtatgatattacgttgctacaacgaccacagcagatggaggtcagtcattcgtttttgggcgctcacatcagacagaacccatgcaatgagactctcacttggtagcgagagattacaagtgagagttcatgttgaagaggtcattaggccaatgctaggatatggacctgtacgtatgtggaagatgcgggagaagatgtagtgtaatgatggagtgaatggaccaatggggcgatcggagtggaataaagtgaatgaagaacacgcggtagcctagttattctctacttacatactacaccatcggcgttatttgcttgattggaactgttgatcttgatc

SEQ ID NO: 17781 - DNA, 576 bp, Muscodor strobelii
  misc_feature: SGI cDNA ID NO. 565947
  misc_feature: Reduced expression when VOC is produced
  misc_feature: Encodes the peptide sequence at SEQ ID NO 17782
atgtcggacaccgtcaagcctgaggagatccctcacgaggaacccgttgttggagaggagggcaatgacgaggaagagatctcaaacatgaagcgccgtgtcgctgagatggaacaggaggctgccaaactgcgtgagatgcacgccgctctggaagagaagaaccaggacaccacggatgcccccgccgatgttgacagccgcagcatctttgtcggcaatgttgactattccgtctcccccgaagagatccaggcccacttccagagctgcggctccattaaccgcgtcaccatcctcctcgataaattcaccggcaatccgaaaggttacgcctacgttgagttcacagagcccagcctcgtggcccaagctcttgtcctcaacgacagcgttctcaagggccgcaatatcaaggtcacgccaaagcgaaccaatatccccggcatgagccgtggtcgggggcgcggtcgtggtggccgcggcttcttcggtggtagaggcgggtatatcccaagaggaggataccggggcggcaacagaggacgtggccgtggaggctactctccttactag

SEQ ID NO: 17782 - protein, 191 aa, Muscodor strobelii
  misc_feature: SGI Peptide ID NO. 565947
  misc_feature (70)..(140): Pfam Id: PF00076 Pfam Desc: RNA recognition motif. (a.k.a. RRM, RBD, or RNP domain)
  misc_feature (1)..(148): NCBI GI: 261351930 Blast Desc: polyadenylate-binding protein [Verticillium albo-atrum VaMs.102]
  misc_feature (21)..(151): NCBI GI: 11359595 Blast Desc: polyadenylate-binding protein [Verticillium albo-atrum VaMs.102]
  misc_feature (8)..(150): NCBI GI: 116201543 Blast Desc: CHGG_08656 [Chaetomium globosum CBS 148.51] gi|88177174|gb|EAQ84642.1| CHGG_08656 [Chaetomium globosum CBS 148.51]
  misc_feature (25)..(151): NCBI GI: 164426633 Blast Desc: polyadenylate-binding protein 2 [Neurospora crassa OR74A] gi|157071415|gb|EAA28349.2| polyadenylate-binding protein 2 [Neurospora crassa OR74A]
  misc_feature (19)..(150): NCBI GI: 154310272 Blast Desc: BC1G_07056 [Botryotinia fuckeliana B05.10] gi|150851617|gb|EDN26810.1| BC1G_07056 [Botryotinia fuckeliana B05.10]
  misc_feature (13)..(151): NCBI GI: 145612615 Blast Desc: RNP domain protein [Magnaporthe grisea 70-15] gi|145019753|gb|EDK03981.1| RNP domain protein [Magnaporthe grisea 70-15]
  misc_feature (26)..(151): NCBI GI: 256731664 Blast Desc: NECHADRAFT_40692 [Nectria haematococca mpVI 77-13-4]
  misc_feature (5)..(151): NCBI GI: 145239151 Blast Desc: An08g01040 [Aspergillus niger] gi|134076726|emb|CAK39785.1| protein product [Aspergillus niger]
  misc_feature (12)..(151): NCBI GI: 261205936 Blast Desc: RNP domain-containing protein [Ajellomyces dermatitidis SLH14081] gi|239592764|gb|EEQ75345.1| RNP domain-containing protein [Ajellomyces dermatitidis SLH14081] RNP
  misc_feature (21)..(151): NCBI GI: 258568696 Blast Desc: polyadenylate-binding protein 2 [Uncinocarpus reesii 1704] gi|237906538|gb|EEP80939.1| polyadenylate-binding protein 2 [Uncinocarpus reesii 1704]
  misc_feature: Useful for introducing or modulating the production of volatile compounds
MSDTVKPEEIPHEEPVVGEEGNDEEEISNMKRRVAEMEQEAAKLREMHAALEEKNQDTTDAPADVDSRSIFVGNVDYSVSPEEIQAHFQSCGSINRVTILLDKFTGNPKGYAYVEFTEPSLVAQALVLNDSVLKGRNIKVTPKRTNIPGMSRGRGRGRGGRGFFGGRGGYIPRGGYRGGNRGRGRGGYSPY

SEQ ID NO: 17783 - DNA, 2020 bp, Muscodor strobelii
  misc_feature: SGI EST ID NO. CUFF.41958.1
  misc_feature: Variant of the nucleotide sequence at SEQ ID NO 17781
gttcgaggctgccgcaacaaactccctttctaagcacatcctcacctccagcccactctgtgcccaaggctatccggccaagcgtgaatgatcgcacgccgcaccgaagcacctgatccccttcttactccgatctccctactatcgtgcttaaggctgcgtgtcgcgccaaccatttctgtaccctccaccagcctgacccgtcgcctgtcccgcatcgccatatcccctttgtccaccagtaattccaatattgaataatacatcaagtcacattgaattgtctttactaatcaagatgtcggacaccgtcaagcctgaggagatccctcacgaggaacccgttgttggagaggagggcaatgacgaggaagagatctcaaacatgaagcgccgtgtcgctgagatggaacaggaggctgccaaactgcgtgagatgcacgccgctctggaagagaagaaccaggacaccacggatgcccccgccgatgttgacagccgcagcatctttgtcggcaatgttgactattccgtctcccccgaagagatccaggcccacttccagagctgcggctccattaaccgcgtcaccatcctcctcgataaattcaccggcaatccgaaaggttacgcctacgttgagttcacagagcccagcctcgtggcccaagctcttgtcctcaacgacagcgttctcaagggccgcaatatcaaggtcacgccaaagcgaaccaatatccccggcatgagccgtggtcgggggcgcggtcgtggtggccgcggcttcttcggtggtagaggcgggtatatcccaagaggaggataccggggcggcaacagaggacgtggccgtggaggctactctccttactagttggtcttgtctccgcaacaggtctatgggagctgatgtttatcgcgcccctgtatcctgtgtggtatcaagcctcatcacctctttctgctgccgaaactcgatgttgacggacacaagccttggacgactcagtcggcggctattaaccttcacagtactgtcaccgacacgtcatcggaatcacgattcatcatgcgttataacatcatagcaggaaaaaccataagtataggaagcattggttggaaaatggcgtatgattgtattctacagcaaatcctcgtgtccccggacaaaccgccgttgcagctcgcccgttgagtcagcaccaattcttgacgcgaatggaaatctaggacgcttcatacggcggcaggatggaaatgtgtcgtgggagcttcgtgatcatctcgtccctcactctacacaaatcaaacacactggcgtggtccgcacgactgaagacggaagaagatttacaagagagcgagagtaaaataggaggagtaaaataataaaaatatggttcctaggcggtccttgtaactcttcagctctgcggccgatcaagcgaaatcacggtgtcaagactttgacgatctcgacatgaccctacctagtagatgaggcatggaatcagccaatatagctaccacaaggtgcttgaaaagaagctgtacatgacacgtggtagacaggagtatagtacgttggtgcaaagagtcagttgaagagcccaatagaaggggcaggttgaactgaagagctgagtttggtatgaaagaattatcagtccaacatgccctgcgggcttcaagttgccatgcttgcaaactcggtcatgaatagcttcaacatacataggtatgtatcttcacgttttggcttagggtgaggcttgggtatctcgcaacctacatgagacatcgacaccaatccaagttaaatatattaggatagtttactcagcaatgggcaccgagagccaatcaatttagatatgtcacagaggaattctcgatgaagacttagggctattcctgaccgaatacacatgctcagaatccgacacctacatgattcatgcctgcaggacttgtaagcggcatctcggcacctgtccgatctctgagattacctacc

SEQ ID NO: 17784 - DNA, 2217 bp, Muscodor strobelii
  misc_feature: SGI cDNA ID NO. 565948
  misc_feature: Encodes the peptide sequence at SEQ ID NO 17785
atggcgacagtacaacaaattgcccaggttcctataccagtccatctgtctggtacgaacggatctttgaccccagatatcgaaatggacactggcgggatcacttcatcgctcaatacagatggacttacaaagaccagcggtctgcgtcggggcgacactcgaaccgctgtcatcatttacggaccaggccaggaaaaaattgtgtcgatcttcgccgatgttttgggaaagccgtctcagttggccgatgggtttcaaggtgtcataacgacagaacaagatctagtcttgggtgtatctgctgagagcgcaaagatcaccatagcgacgcgagatcgaaatgctatggttgctatccatgctcacaatgtcgagcttgggatgcctcctgattcgcatctatcttctcactgcgattatgagttcttatatacggagacaccgtatctgcgtcgggatctagcgcgatttatttcgtttacattagggcagatcaatcaccacgaggccttgatggcaaaaccacggacatatttcatatcaacgacatttccagacgttcgtgccgcgttacccaatattgaggtcctgactgttggctgcgatgctgtcgaattacgtgtggatcttctgagggaatcaattggcaatggtcaatttgccgagataccgagtttgagttatgttggagaacagatcatgctcataaggcaaaggacggagcttccgattatttacacaacacgatgtacccgagaaaacggacgcttcccaatggatgatcctaatctcttctacgaatatctgtatcgcgccatacaatggggaattgagtacattgacgttgaggtttggttaccagagaacattcgccaaaagttattcgaaaagcgtggcaacagtcatataatgtccgcgttccatgactttacaggcacatttaaatggccatcgccatatgcgcagtctatttttgtcgagtcgtgcaaatatgcccacatcgtcaagatgatagccatcatcaacgagtcgaacgataattttgagttagagtatttccgttccaaggttcgaagcgaatatcccgactcgcctccgttctctggacttaacatgggcgaaactggtcaaatctcccgaactttcaacaaagttttcactcccatcactcatccgctgttacctatcattgctgcacctggacaaatgagtgcggctgagattaacgctgccttagcctcattggggcaacttcctaggaaaattatttacggaattagcaccccatcctctcgaatcgaactaccccatgctccgttttatgagaagtgcttcaacgagctaggactaccacaccagtttgctattgttcagaggcagccaagaggaccacgaagcgtagaggcatggtgcaaccagagatcattcggaggggcgtatttaagcccacctgtctcctttacaagtctaatgcatggtagctccttttttgcaaagttgaacaatggaacaggacctgtcctcactgaagcagctcgtataatcggcatggtagacaccatcgttgttcatcaaggaccaaattccacgccgggatctgagtcttcctccgcgccatcgagtcccaagcctcggacagattctccttttacctctggacttaatggcgttcatggtctaccgtcgtcatcgaccctcactttcgataacgcgagctggcgcggcatattgagcacgcttacgcgtgacctcgcaccctcagcatactttgggagggcagcagttgtactggcagccaattccgacgatgctgcctcagccatacacccccaaactcgagcccatggcttagacatcgagccctttgtgagcctcgacagcctccagagagcagcaaggacattggacgccgataccaacccatttgtgatcatttccgcgcttggacccgagaagtctggtatcgtcaatcttttgatacggtactttggaggtgctaggggctcctcgtcgcagatccgcaaagtgtttcttgatctcgtcgacggaccaagaaagggtgacccccgtatcatcgctgaacagagcggtttcgctgtgtatggcgtagctgatgcgacggccttcaccaccgtcgaaactttcagactgcttgtcggacagaacgtgccttacagttttgtgcgactaacgagcggcaaggggatgttctga

SEQ ID NO: 17785 - protein, 738 aa, Muscodor strobelii
  misc_feature: SGI Peptide ID NO. 565948
  misc_feature (179)..(412): Pfam Id: PF01487 Pfam Desc: Type I 3-dehydroquinase
  misc_feature (1)..(738): NCBI GI: 171693769 Blast Desc: protein product [Podospora anserina] gi|170946833|emb|CAP73637.1| protein product [Podospora anserina]
  misc_feature (41)..(735): NCBI GI: 145612631 Blast Desc: MGG_12392 [Magnaporthe grisea 70-15] gi|145019765|gb|EDK03993.1| MGG_12392 [Magnaporthe grisea 70-15]
  misc_feature (1)..(731): NCBI GI: 85101083 Blast Desc: NCU04298 [Neurospora crassa OR74A] gi|28922626|gb|EAA31852.1| NCU04298 [Neurospora crassa OR74A] gi|28950159|emb|CAD71027.1| related to part of PENTAFUNCTIONAL
  misc_feature (1)..(734): NCBI GI: 46137031 Blast Desc: FG10031.1 [Gibberella zeae PH-1]
  misc_feature (51)..(734): NCBI GI: 256731649 Blast Desc: [Nectria haematococca mpVI 77-13-4]
  misc_feature (39)..(738): NCBI GI: 154304387 Blast Desc: BC1G_09069 [Botryotinia fuckeliana B05.10] gi|150854049|gb|EDN29241.1| BC1G_09069 [Botryotinia fuckeliana B05.10]
  misc_feature (55)..(735): NCBI GI: 119501236 Blast Desc: pentafunctional AROM polypeptide, [Neosartorya fischeri NRRL 181] gi|119415540|gb|EAW25478.1| pentafunctional AROM polypeptide, [Neosartorya fischeri NRRL 181]
  misc_feature (58)..(738): NCBI GI: 255949750 Blast Desc: Pc22g17290 [Penicillium chrysogenum Wisconsin 54-1255] gi|211592659|emb|CAP99017.1| Pc22g17290 [Penicillium chrysogenum Wisconsin 54-1255]
  misc_feature (55)..(735): NCBI GI: 70994804 Blast Desc: pentafunctional AROM polypeptide [Aspergillus fumigatus Af293] gi|66849813|gb|EAL90141.1| pentafunctional AROM polypeptide, [Aspergillus fumigatus Af293] pentafunctional AROM
  misc_feature (54)..(734): NCBI GI: 67528304 Blast Desc: AN4350.2 [Aspergillus nidulans FGSC A4] gi|40741321|gb|EAA60511.1| AN4350.2 [Aspergillus nidulans FGSC A4]
  misc_feature (151)..(523): SWISSPROT Homolog: EC 4.2.1.10 3-dehydroquinate dehydratase
  misc_feature (151)..(523): SWISSPROT Homolog: EC 4.2.3.4 3-dehydroquinate synthase
  misc_feature (151)..(523): SWISSPROT Homolog: EC 2.5.1.19 3-phosphoshikimate 1-carboxyvinyltransferase
  misc_feature (151)..(523): SWISSPROT Homolog: EC 2.7.1.71 Shikimate kinase
  misc_feature (151)..(523): SWISSPROT Homolog: EC 1.1.1.25 Shikimate dehydrogenase
MATVQQIAQVPIPVHLSGTNGSLTPDIEMDTGGITSSLNTDGLTKTSGLRRGDTRTAVIIYGPGQEKIVSIFADVLGKPSQLADGFQGVITTEQDLVLGVSAESAKITIATRDRNAMVAIHAHNVELGMPPDSHLSSHCDYEFLYTETPYLRRDLARFISFTLGQINHHEALMAKPRTYFISTTFPDVRAALPNIEVLTVGCDAVELRVDLLRESIGNGQFAEIPSLSYVGEQIMLIRQRTELPIIYTTRCTRENGRFPMDDPNLFYEYLYRAIQWGIEYIDVEVWLPENIRQKLFEKRGNSHIMSAFHDFTGTFKWPSPYAQSIFVESCKYAHIVKMIAIINESNDNFELEYFRSKVRSEYPDSPPFSGLNMGETGQISRTFNKVFTPITHPLLPIIAAPGQMSAAEINAALASLGQLPRKIIYGISTPSSRIELPHAPFYEKCFNELGLPHQFAIVQRQPRGPRSVEAWCNQRSFGGAYLSPPVSFTSLMHGSSFFAKLNNGTGPVLTEAARIIGMVDTIVVHQGPNSTPGSESSSAPSSPKPRTDSPFTSGLNGVHGLPSSSTLTFDNASWRGILSTLTRDLAPSAYFGRAAVVLAANSDDAASAIHPQTRAHGLDIEPFVSLDSLQRAARTLDADTNPFVIISALGPEKSGIVNLLIRYFGGARGSSSQIRKVFLDLVDGPRKGDPRIIAEQSGFAVYGVADATAFTTVETFRLLVGQNVPYSFVRLTSGKGMF

SEQ ID NO: 17786 - DNA, 2622 bp, Muscodor strobelii
  misc_feature: SGI cDNA ID NO. 565949
  misc_feature: Encodes the peptide sequence at SEQ ID NO 17787
atgagtttgacccatcccgctaccgtccatccactcgccatgtcacggcctcaagttggcattgaacgtctgccaactcgtcgcatgagcaacgagccgagggagtcgatgaactgcaagtcctgtcggaagcgcaagatcaaatgcaacaggttgcgtccgtcttgcgaggcatgtcaagttttccaatgcccttgtgtctatgatgctgtacccaaaaagcgtgggccaaagacagacgtgctcgaagctttgctcaagcgcgtggatggcctagaagctcagctcaaggagaagaagacatccgatgcatcgccgactggggagcagccatcgcctacagctgtgattgatgataccgacgacaataccgaagtgccgtcttcagataaaacagcacaggctcccacagtagaacctgagcccaaacctaaacgtgtcgctctcgaaatcccaaaggggaatgatgctggctctggcaacgtgctgttctctcccgtaggaaccaacgaaatgtctcctgaaatccagatggaagctcttctcgatacctacttcagccgatttcacgcaaagccctatcatattctcgacgaatcattagttcggcagcggctacaactcaatcagttgcccatgtccttgctgcacgctatctacgccgttgctgctagatacacacctcacccaactgggtatcaatctgctgtgagactgagcgaggaatttgcggcaaggtcgaggaaagacatcgatattgatgaaccttcttttgacacccttcaaactcttcttcttctggtaattgcatatatagcagcaggcaagggaaagaaggcctacatgcttctgacaaatgcgatcggcatggcaatggccctagagctgcaccgcgaagtggattcgcacgcacccatcgctgccgtggaacgcgagatgagaagaagattattctggtcgtgttatctgctggatcgatttatggcttgcggctcgaaacggccatgtcttgctgccgacaagacgattttcttaaaactaccgtgctggtctccaacacccggcagcctggcgattgaaggcgaatttttccagagtggcataaacatccattcgctccagggaagcgtcaagaaattccaaggcggcagtggcatgctcattgacattactcgcattttaggcgttactaatcgttatcttgcagctggtggtgtcaaaggagattcccatttcccatggcatacactttcgagtctgtccaaaatacggcaggatttagatatttgggcatccggtaccgacgacgtcttctcaagcctggatgctttattcggtcacccagaatcgacagtattagttctgagcaaacttatttatcacttgatacattgtctgatatatcgccctttcctccctatcgatcttgccgagcttgccgtaacgggtcagcatcaatcctggcagatagaagccacgaacatgtgctttatgcacgccaatgcaattactgaactggtggaactgggcaaacaaacagcgtctacggaatggccagcgtttgttggatactgtatctgcacagctggtacagtccatattcatggggcgcattacaacagaacgggaggaagaggaggaaatatgggggccattgccgcatcggcagacttcctgtcacgcgagatgcagcaactgagcgagctccgatatgcatgggcgagcgtgcagcatcagcgagagactttgcagaatgtgtacaacgcccatgcggaattggttaagagcttggcaaataatgcaatgcgttactcgcctgcgttcaacacagagaacttctttgggcgatacgctcacctgagagcaccaaatggcgagccgttcacgttcgacgcggcgaatttgagtctgaaggacattgtaaacgattttaccgcggacacatacacaggtcatgatctctacgcaccgcgcacggcgagcgcgcccgaacggccaactcttaagaggaagtttacgaatgggcttggccctaagcgtgcggatgtgcctggtatgggactcttgagccccggcatgggaagccatatgtccaatggccttcctactcctggcatacagtcacgcccgctatctttcccaacaaagatgcacagtcaaacatctgtgccgtcacaatcggactcccaaacaggagccatcaaacaagattcgattgcagattctgttgcggcggcagggttctcgatgacgccgccacagcaactccaacatattccgagcttctcaacaaattctttcgcaccgcatcacaatttcgttactccagtacataacgccgaggacggcgccgagcaaggaatctcttcgtatgatcccatgtttggaacaatgccgaccaacgcattttcctccccagccccatggcaaggagataatgacaagaaggaaccggccgaagacgcaagtccagaagcattgagccatgaagtaaatacacccgggggtgcttcagatgacaaagacccatttctaagtctattggagcagcttgcagaaaatgaacaagcccttgggcagggcaacgagctcgactgttttcttgctggtgcacaaggttga

SEQ ID NO: 17787 - protein, 873 aa, Muscodor strobelii
  misc_feature: SGI Peptide ID NO. 565949
  misc_feature (39)..(75): Pfam Id: PF00172 Pfam Desc: Fungal Zn(2)-Cys(6) binuclear cluster domain
  misc_feature (257)..(354): Pfam Id: PF04082 Pfam Desc: Fungal specific transcription factor domain
  misc_feature (257)..(337): Pfam Id: PF04082 Pfam Desc: Fungal specific transcription factor domain
  misc_feature (9)..(871): NCBI GI: 171693767 Blast Desc: protein product [Podospora anserina] gi|170946832|emb|CAP73636.1| protein product [Podospora anserina]
  misc_feature (1)..(870): NCBI GI: 256731650 Blast Desc: [Nectria haematococca mpVI 77-13-4]
  misc_feature (1)..(871): NCBI GI: 46137029 Blast Desc: FG10030.1 [Gibberella zeae PH-1]
  misc_feature (13)..(863): NCBI GI: 261351921 Blast Desc: conserved [Verticillium albo-atrum VaMs.102]
  misc_feature (224)..(871): NCBI GI: 116197751 Blast Desc: CHGG_07031 [Chaetomium globosum CBS 148.51] gi|88178310|gb|EAQ85778.1| CHGG_07031 [Chaetomium globosum CBS 148.51]
  misc_feature (14)..(870): NCBI GI: 255949746 Blast Desc: Pc22g17270 [Penicillium chrysogenum Wisconsin 54-1255] gi|211592657|emb|CAP99015.1| Pc22g17270 [Penicillium chrysogenum Wisconsin 54-1255]
  misc_feature (233)..(858): NCBI GI: 85101072 Blast Desc: NCU04295 [Neurospora crassa OR74A] gi|16944595|emb|CAD11370.1| conserved [Neurospora crassa] gi|28922623|gb|EAA31849.1| conserved [Neurospora crassa OR74A]
  misc_feature (282)..(872): NCBI GI: 145612627 Blast Desc: MGG_12390 [Magnaporthe grisea 70-15] gi|145019763|gb|EDK03991.1| MGG_12390 [Magnaporthe grisea 70-15]
  misc_feature (14)..(873): NCBI GI: 189196324 Blast Desc: conserved [Pyrenophora tritici-repentis Pt-1C-BFP] gi|187980379|gb|EDU47005.1| conserved [Pyrenophora tritici-repentis Pt-1C-BFP]
  misc_feature (14)..(643): NCBI GI: 242766019 Blast Desc: fungal specific transcription factor, [Talaromyces stipitatus ATCC 10500] gi|218724286|gb|EED23703.1| fungal specific transcription factor, [Talaromyces stipitatus ATCC
MSLTHPATVHPLAMSRPQVGIERLPTRRMSNEPRESMNCKSCRKRKIKCNRLRPSCEACQVFQCPCVYDAVPKKRGPKTDVLEALLKRVDGLEAQLKEKKTSDASPTGEQPSPTAVIDDTDDNTEVPSSDKTAQAPTVEPEPKPKRVALEIPKGNDAGSGNVLFSPVGTNEMSPEIQMEALLDTYFSRFHAKPYHILDESLVRQRLQLNQLPMSLLHAIYAVAARYTPHPTGYQSAVRLSEEFAARSRKDIDIDEPSFDTLQTLLLLVIAYIAAGKGKKAYMLLTNAIGMAMALELHREVDSHAPIAAVEREMRRRLFWSCYLLDRFMACGSKRPCLAADKTIFLKLPCWSPTPGSLAIEGEFFQSGINIHSLQGSVKKFQGGSGMLIDITRILGVTNRYLAAGGVKGDSHFPWHTLSSLSKIRQDLDIWASGTDDVFSSLDALFGHPESTVLVLSKLIYHLIHCLIYRPFLPIDLAELAVTGQHQSWQIEATNMCFMHANAITELVELGKQTASTEWPAFVGYCICTAGTVHIHGAHYNRTGGRGGNMGAIAASADFLSREMQQLSELRYAWASVQHQRETLQNVYNAHAELVKSLANNAMRYSPAFNTENFFGRYAHLRAPNGEPFTFDAANLSLKDIVNDFTADTYTGHDLYAPRTASAPERPTLKRKFTNGLGPKRADVPGMGLLSPGMGSHMSNGLPTPGIQSRPLSFPTKMHSQTSVPSQSDSQTGAIKQDSIADSVAAAGFSMTPPQQLQHIPSFSTNSFAPHHNFVTPVHNAEDGAEQGISSYDPMFGTMPTNAFSSPAPWQGDNDKKEPAEDASPEALSHEVNTPGGASDDKDPFLSLLEQLAENEQALGQGNELDCFLAGAQG

SEQ ID NO: 17788 - DNA, 3787 bp, Muscodor strobelii
  misc_feature: SGI EST ID NO. CUFF.41872.0
  misc_feature: Variant of the nucleotide sequence at SEQ ID NO 17786
taacaaggagatctgagctgtaataagccagcacctgatccagtaccgaaggactcccggcatcactacctaaggtaattgagagtctgaaagtaaccgcacacacgatactctcaagcctgctcgtctgcgaatggtcatcgcttctggtattattcggtaaacaggcctaccgacgatacagtcaaaagatttgagagggaaagagacaacaattgatcaatcaagactggtagagtgccaccgaagatgagctaagggctaccacctacacgagcgattgctttgtgccttctgtatgagccggctcttagcctgaacgccgtatgggtagggtggcctcaaaaagacaaaaagacgggaagaacagtacgaacgcaagatcggactcttcgaaacgacttctaaagcttccaaggaatcgatggcaatgagtttgacccatcccgctaccgtccatccactcgccatgtcacggcctcaagttggcattgaacgtctgccaactcgtcgcatgagcaacgagccgagggagtcgatgaactgcaagtcctgtcggaagcgcaagatcaaatgcaacaggttgcgtccgtcttgcgaggcatgtcaagttttccaatgcccttgtgtctatgatgctgtacccaaaaagcgtgggccaaagacagacgtgctcgaagctttgctcaagcgcgtggatggcctagaagctcagctcaaggagaagaagacatccgatgcatcgccgactggggagcagccatcgcctacagctgtgattgatgataccgacgacaataccgaagtgccgtcttcagataaaacagcacaggctcccacagtagaacctgagcccaaacctaaacgtgtcgctctcgaaatcccaaaggggaatgatgctggctctggcaacgtgctgttctctcccgtaggaaccaacgaaatgtctcctgaaatccagatggaagctcttctcgatacctacttcagccgatttcacgcaaagccctatcatattctcgacgaatcattagttcggcagcggctacaactcaatcagttgcccatgtccttgctgcacgctatctacgccgttgctgctagatacacacctcacccaactgggtatcaatctgctgtgagactgagcgaggaatttgcggcaaggtcgaggaaagacatcgatattgatgaaccttcttttgacacccttcaaactcttcttcttctggtaattgcatatatagcagcaggcaagggaaagaaggcctacatgcttctgacaaatgcgatcggcatggcaatggccctagagctgcaccgcgaagtggattcgcacgcacccatcgctgccgtggaacgcgagatgagaagaagattattctggtcgtgttatctgctggatcgatttatggcttgcggctcgaaacggccatgtcttgctgccgacaagacgattttcttaaaactaccgtgctggtctccaacacccggcagcctggcgattgaaggcgaatttttccagagtggcataaacatccattcgctccagggaagcgtcaagaaattccaaggcggcagtggcatgctcattgacattactcgcattttaggcgttactaatcgttatcttgcagctggtggtgtcaaaggagattcccatttcccatggcatacactttcgagtctgtccaaaatacggcaggatttagatatttgggcatccggtaccgacgacgtcttctcaagcctggatgctttattcggtcacccagaatcgacagtattagttctgagcaaacttatttatcacttgatacattgtctgatatatcgccctttcctccctatcgatcttgccgagcttgccgtaacgggtcagcatcaatcctggcagatagaagccacgaacatgtgctttatgcacgccaatgcaattactgaactggtggaactgggcaaacaaacagcgtctacggaatggccagcgtttgttggatactgtatctgcacagctggtacagtccatattcatggggcgcattacaacagaacgggaggaagaggaggaaatatgggggccattgccgcatcggcagacttcctgtcacgcgagatgcagcaactgagcgagctccgatatgcatgggcgagcgtgcagcatcagcgagagactttgcagaatgtgtacaacgcccatgcggaattggttaagagcttggcaaataatgcaatgcgttactcgcctgcgttcaacacagagaacttctttgggcgatacgctcacctgagagcaccaaatggcgagccgttcacgttcgacgcggcgaatttgagtctgaaggacattgtaaacgattttaccgcggacacatacacaggtcatgatctctacgcaccgcgcacggcgagcgcgcccgaacggccaactcttaagaggaagtttacgaatgggcttggccctaagcgtgcggatgtgcctggtatgggactcttgagccccggcatgggaagccatatgtccaatggccttcctactcctggcatacagtcacgcccgctatctttcccaacaaagatgcacagtcaaacatctgtgccgtcacaatcggactcccaaacaggagccatcaaacaagattcgattgcagattctgttgcggcggcagggttctcgatgacgccgccacagcaactccaacatattccgagcttctcaacaaattctttcgcaccgcatcacaatttcgttactccagtacataacgccgaggacggcgccgagcaaggaatctcttcgtatgatcccatgtttggaacaatgccgaccaacgcattttcctccccagccccatggcaaggagataatgacaagaaggaaccggccgaagacgcaagtccagaagcattgagccatgaagtaaatacacccgggggtgcttcagatgacaaagacccatttctaagtctattggagcagcttgcagaaaatgaacaagcccttgggcagggcaacgagctcgactgttttcttgctggtgcacaaggttgagacatcagcgtccatctattgtacattattggccatacatcatgaaaattcgatacgactgcatgaattacattgttctgaactctgacttgagttcagctgtatattacttcattgccggcatggtgatatacgcgacgaacattttgacaaaatcatgagttatgggtcgtttactacctacgcaaggtgtagcaatactacgcagctgcactttcatgtgtgcgaaatgcatcttcgaaattgtcgccgtcgacatgatgggaaacgcaaatgggggccatggtatgaagacagctcgttgctaggttgactgacctcagatgcgcagctactgcctagtcatgcgccttgctctacttggtatctgtaagttttggagaggaggtcatatgacgcgaaaacaacggtggctgtgattcatcgcttccccactgcggagagctgtcggtaatgcggtccggatatcgcaaaaccatccgaattggtggcttctgcaaggcacctgaacctctccctccgggcttggcattagcgaatgtcgtgtctcatacactccctcacacctctcagtgagacacaggagtgcgcttcaatagctgtaataagacgttataaccaaagccaaagactgtcagtcagtcggcttgagtcaatcatatagaggacctcagttactcaatctatcacgtgaatagaaatgaatcacgaagaatattgatcgtgaaacgtgtg

SEQ ID NO: 17789 - DNA, 1779 bp, Muscodor strobelii
  misc_feature: SGI cDNA ID NO. 565950
  misc_feature: Encodes the peptide sequence at SEQ ID NO 17790
atggacgcacctcactcaacgccaacatcggcgaactcaaatactcatggaggatctggagcattcgcagcggcgatgctgaaacggcaacaggtcaatattgagattttatcgtactacgccgcctctctggttgctctcatggcgatcttcatcttgggacactggatacgtcacttcgcaagtcgaggaaaatctcagtctacgatattatatcctgtcataggtgtaacaaggatattcagaagggtctttctcaggaaactccccggcttcacctcgatcgggcatgcttcggttgtgtcggtctatgtggcattcaatgcactctttagtttctatcgtgtcgacttcagcaagacttcaaatgttgcctcgcgcttcggatggatggcggcagccaatatggtactagtagtatttcttgctttgaagaatacaccgctagctctcttcacgacctactcctacgagcgactcaataagctccatcagattgctggctacaccacactgttatacactatcatgcacggatctatatacgcgagctacttcattaaggccggcaagatagagattctccgagaagatattgtcacggctggcatcattctcgggtttgcggtgttcttcacgagcctggcagggggtatcctccgacattttaattacgagctcttctatatcgtccacttggttctgttcggggtcattgtcgttgccttaggcttgcaccgacccagcttcgacgaggacaagattctggttgctaccgtatttctcgcctctctctggtttgctgatcgtttattccggtttgctcgattgacatacaacggagtaaacaataaagcgacagtgttccctttgccggatggcgcaacgcgaatagtattccaaaagccgcttcaccgtgcaagacccggaaagcattgctatgtctggctaccgcatatacgaaagttccaaacgcatccgttcactattgtgtcaagtgagcctttagagcttgtgatcaattcattttccggcttcacgaaggatttacacaaatacgcgcaagacaacccaggcacaagcctaaccgcatcgcttgaaggtccatatggaaccttgcctgacccgatgaactacgataaagtcattttattagctggcggttccggtgctacctttacatttggtattgcagcagacatggtcgagagaatgactcaggactctgaaaagcaaatcgatttcatatgggctacaaggggacatgataatatcgcctggtttgctcagcatttgaacaacctaatgctgcatgaacactcacccagaatctctctcaaacttcatctcacaaggcttccctcaacaggaccaataatggcgccgccaccaccacactccgtttctcaatcctctagaacttcaacagaaattgcgtcgatgtcgccgagtgatgagagacatgttatcagcacacaaacatcatcatcgacgctacgcgataaagacatggagaaagccggcattcaccaggtcttaagcgggatagaggagatcccgaaagcaatagattattcacacttgcctgttacatacggtcgacccgatgtagaggcaatgattagggagaccatagcatccgcaacgaaagaacagaggatattgattgcggcgtgtgggccagctggtctcatcaaagcggttcggaatacagcagcgggctgtatcagcgtgggcgggcctgcgattgagctgcactgcgaagagtttggttggtga

SEQ ID NO: 17790 - protein, 592 aa, Muscodor strobelii
  misc_feature: SGI Peptide ID NO. 565950
  misc_feature (128)..(243): Pfam Id: PF01794 Pfam Desc: Ferric reductase like transmembrane component
  misc_feature (279)..(374): Pfam Id: PF08022 Pfam Desc: FAD-binding domain
  misc_feature (379)..(573): Pfam Id: PF08030 Pfam Desc: Ferric reductase NAD binding domain
  misc_feature (379)..(428): Pfam Id: PF08030 Pfam Desc: Ferric reductase NAD binding domain
  misc_feature (532)..(573): Pfam Id: PF08030 Pfam Desc: Ferric reductase NAD binding domain
  misc_feature (10)..(592): NCBI GI: 116201597 Blast Desc: CHGG_08683 [Chaetomium globosum CBS 148.51] gi|88177201|gb|EAQ84669.1| CHGG_08683 [Chaetomium globosum CBS 148.51]
  misc_feature (10)..(592): NCBI GI: 145616729 Blast Desc: MGG_01018 [Magnaporthe grisea 70-15] gi|145023169|gb|EDK06703.1| MGG_01018 [Magnaporthe grisea 70-15]
  misc_feature (15)..(592): NCBI GI: 171677989 Blast Desc: protein product [Podospora anserina] gi|170937063|emb|CAP61722.1| protein product [Podospora anserina]
  misc_feature (21)..(592): NCBI GI: 256732030 Blast Desc: NECHADRAFT_41555 [Nectria haematococca mpVI 77-13-4]
  misc_feature (21)..(592): NCBI GI: 46137023 Blast Desc: FG10027.1 [Gibberella zeae PH-1]
  misc_feature (24)..(592): NCBI GI: 256720215 Blast Desc: NECHADRAFT_89269 [Nectria haematococca mpVI 77-13-4]
  misc_feature (37)..(592): NCBI GI: 255954183 Blast Desc: Pc21g08040 [Penicillium chrysogenum Wisconsin 54-1255] gi|211589555|emb|CAP95701.1| Pc21g08040 [Penicillium chrysogenum Wisconsin 54-1255]
  misc_feature (202)..(592): NCBI GI: 85080443 Blast Desc: NCU03868 [Neurospora crassa OR74A] gi|28917609|gb|EAA27305.1| [Neurospora crassa OR74A]
  misc_feature (29)..(591): NCBI GI: 256720556 Blast Desc: NECHADRAFT_82244 [Nectria haematococca mpVI 77-13-4]
  misc_feature (48)..(592): NCBI GI: 261355752 Blast Desc: metalloreductase [Verticillium albo-atrum VaMs.102]
  misc_feature (100)..(592): SWISSPROT Homolog: EC 1.16.1.7 Ferric-chelate reductase
MDAPHSTPTSANSNTHGGSGAFAAAMLKRQQVNIEILSYYAASLVALMAIFILGHWIRHFASRGKSQSTILYPVIGVTRIFRRVFLRKLPGFTSIGHASVVSVYVAFNALFSFYRVDFSKTSNVASRFGWMAAANMVLVVFLALKNTPLALFTTYSYERLNKLHQIAGYTTLLYTIMHGSIYASYFIKAGKIEILREDIVTAGIILGFAVFFTSLAGGILRHFNYELFYIVHLVLFGVIVVALGLHRPSFDEDKILVATVFLASLWFADRLFRFARLTYNGVNNKATVFPLPDGATRIVFQKPLHRARPGKHCYVWLPHIRKFQTHPFTIVSSEPLELVINSFSGFTKDLHKYAQDNPGTSLTASLEGPYGTLPDPMNYDKVILLAGGSGATFTFGIAADMVERMTQDSEKQIDFIWATRGHDNIAWFAQHLNNLMLHEHSPRISLKLHLTRLPSTGPIMAPPPPHSVSQSSRTSTEIASMSPSDERHVISTQTSSSTLRDKDMEKAGIHQVLSGIEEIPKAIDYSHLPVTYGRPDVEAMIRETIASATKEQRILIAACGPAGLIKAVRNTAAGCISVGGPAIELHCEEFGW

SEQ ID NO: 17791 - DNA, 1078 bp, Muscodor strobelii
  misc_feature: SGI EST ID NO. CUFF.41864.0
  misc_feature: Variant of the nucleotide sequence at SEQ ID NO 17789
agccgcttcaccgtgcaagacccggaaagcattgctatgtctggctaccgcatatacgaaagttccaaacgcatccgttcactattgtgtcaagtgagcctttagagcttgtgatcaattcattttccggcttcacgaaggatttacacaaatacgcgcaagacaacccaggcacaagcctaaccgcatcgcttgaaggtccatatggaaccttgcctgacccgatgaactacgataaagtcattttattagctggcggttccggtgctacctttacatttggtattgcagcagacatggtcgagagaatgactcaggactctgaaaagcaaatcgatttcatatgggctacaaggggacatgataatatcgcctggtttgctcagcatttgaacaacctaatgctgcatgaacactcacccagaatctctctcaaacttcatctcacaaggcttccctcaacaggaccaataatggcgccgccaccaccacactccgtttctcaatcctctagaacttcaacagaaattgcgtcgatgtcgccgagtgatgagagacatgttatcagcacacaaacatcatcatcgacgctacgcgataaagacatggagaaagccggcattcaccaggtcttaagcgggatagaggagatcccgaaagcaatagattattcacacttgcctgttacatacggtcgacccgatgtagaggcaatgattagggagaccatagcatccgcaacgaaagaacagaggatattgattgcggcgtgtgggccagctggtctcatcaaagcggttcggaatacagcagcgggctgtatcagcgtgggcgggcctgcgattgagctgcactgcgaagagtttggttggtgaacagatatgatatggataggagtaataccaatgtatggtgaccgaaagtgtgttttgcccttctagttacgacgcaatgagataccaatgaaatcatgggcattgagctcggtgccaatcacaatgttgacacaacgcctaagcgtttgaacaagatttcttgccgctcgcagctatgaaaagtagcaagttagcttattttc

SEQ ID NO: 17792 - DNA, 825 bp, Muscodor strobelii
  misc_feature: SGI cDNA ID NO. 565951
  misc_feature: Encodes the peptide sequence at SEQ ID NO 17793
atggcggcgaccaacaatgaacaaggcttcgaagctggtgagacacatcgaagcgtttcaagttttgttactagttggctggaccaggttccccatgcgccacctagcttaaatctgagccgaccaagaacaacaagtgactcgagcaagaagtccgaaatattggtgtcgaggcctgaatatcgaagtgagaatcttgccgacaatggaatccactctcgactggatcatgaggaattagacacctccctccagactacgctcaagaaagtgcacgcgaaacgtacctccccagaccctgataatgagacattgaaaaaagagatgtaccgtctccatgaaatacagcatgatggagccccggaatccgtggtcgaggcctggttcaaaactcacgtctttcccagcgaggatacaatggtggaacagggcctaatggtaactagcaacgccaaatttttaccacaaaatgttcttggtgggcagagtgcgccacacagagtctctggcccagtgcctgatctagcatacggctatagaagcatacgaggtaacttctcgctatcacagcaggctgctggacggaagttggatcctcctctcggtcagccagctatggctggttatctacttagcttccctttcttctgtattgagttcaaaaaaaccggctacgtcaatggcaatctgttggttgcgacgaaccagtgtttggggggctctgcgacatgcctcgaaatggtcgataggctgaacaaactacttaaagaaactcccaaggcaaagactctcgacaatatgtcttttagtattgctatggactag

SEQ ID NO: 17793 - protein, 274 aa, Muscodor strobelii
  misc_feature: SGI Peptide ID NO. 565951
  misc_feature (55)..(273): NCBI GI: 256734173 Blast Desc: NECHADRAFT_35677 [Nectria haematococca mpVI 77-13-4]
  misc_feature (12)..(274): NCBI GI: 240273760 Blast Desc: conserved [Ajellomyces capsulatus H143]
  misc_feature (18)..(274): NCBI GI: 225555495 Blast Desc: conserved [Ajellomyces capsulatus G186AR]
  misc_feature (42)..(274): NCBI GI: 46121211 Blast Desc: FG04984.1 [Gibberella zeae PH-1]
  misc_feature (214)..(274): NCBI GI: 156056767 Blast Desc: SS1G_04114 [Sclerotinia sclerotiorum 1980] gi|154701900|gb|EDO01639.1| SS1G_04114 [Sclerotinia sclerotiorum 1980]
  misc_feature (142)..(274): NCBI GI: 256732244 Blast Desc: NECHADRAFT_80649 [Nectria haematococca mpVI 77-13-4]
  misc_feature (112)..(274): NCBI GI: 256732243 Blast Desc: NECHADRAFT_80648 [Nectria haematococca mpVI 77-13-4]
  misc_feature (43)..(273): NCBI GI: 238840854 Blast Desc: [Microsporum canis CBS 113480]
  misc_feature (30)..(191): NCBI GI: 256727920 Blast Desc: NECHADRAFT_83535 [Nectria haematococca mpVI 77-13-4]
MAATNNEQGFEAGETHRSVSSFVTSWLDQVPHAPPSLNLSRPRTTSDSSKKSEILVSRPEYRSENLADNGIHSRLDHEELDTSLQTTLKKVHAKRTSPDPDNETLKKEMYRLHEIQHDGAPESVVEAWFKTHVFPSEDTMVEQGLMVTSNAKFLPQNVLGGQSAPHRVSGPVPDLAYGYRSIRGNFSLSQQAAGRKLDPPLGQPAMAGYLLSFPFFCIEFKKTGYVNGNLLVATNQCLGGSATCLEMVDRLNKLLKETPKAKTLDNMSFSIAMD

SEQ ID NO: 17794 - DNA, 2351 bp, Muscodor strobelii
  misc_feature: SGI EST ID NO. CUFF.41903.1
  misc_feature: Variant of the nucleotide sequence at SEQ ID NO 17792
tatatgcgcgcgcgcgcgacctccaacatggaactcattcaatgtgccttctaaaaatacagttattcgtcttatcacagactggtgagacttgcaagaacttgtctagagaggctaggtcgttatttaagaaaggcaggctatggaccgaatctcgagaaaattacggatgcaccacttggccgtcacgctaaatttgtttattatctcgtctgatgagcgatgatttatttaagggatcaagtatttgaaccagtagtcagttgattattcgggattttaggagactctccatgcgaaccatagtcgagaagattatgtgctccgctagacgcctggctatccatggtcgcgaccgagtttttagccccgcgcacatctagccctacaatctttcgaacatcacaaccaacatcatcaccaacaacgcataccacctttcatcgactggccacagcacaaagttgcacccgctaccatgcgaatgaccgcgcgcatacgactgaggcggcccgagcatgaaaccacagttggttcattgtctcacggcatatcatcctcaccccaaaataggtccttcaaattctacggcgacagtataagatggcggcgaccaacaatgaacaaggcttcgaagctggtgagacacatcgaagcgtttcaagttttgttactagttggctggaccaggttccccatgcgccacctagcttaaatctgagccgaccaagaacaacaagtgactcgagcaagaagtccgaaatattggtgtcgaggcctgaatatcgaagtgagaatcttgccgacaatggaatccactctcgactggatcatgaggaattagacacctccctccagactacgctcaagaaagtgcacgcgaaacgtacctccccagaccctgataatgagacattgaaaaaagagatgtaccgtctccatgaaatacagcatgatggagccccggaatccgtggtcgaggcctggttcaaaactcacgtctttcccagcgaggatacaatggtggaacagggcctaatggtaactagcaacgccaaatttttaccacaaaatgttcttggtgggcagagtgcgccacacagagtctctggcccagtgcctgatctagcatacggctatagaagcatacgaggtaacttctcgctatcacagcaggctgctggacggaagttggatcctcctctcggtcagccagctatggctggttatctacttagcttccctttcttctgtattgagttcaaaaaaaccggctacgtcaatggcaatctgttggttgcgacgaaccagtgtttggggggctctgcgacatgcctcgaaatggtcgataggctgaacaaactacttaaagaaactcccaaggcaaagactctcgacaatatgtcttttagtattgctatggactagaatattgcaaatttgcatatctcgtggaaacccgatagacttagtttctatatgcaacggaccaatacctacgctctcggagatcctgaccactatctaaaatttcgtcggcacgtaaagaatatcattgattggggcaagaacgaacgacttagggcgatacagaatgctctcgacagtattctagaggcagacaggagagtgatagcagaacaatcgaaacaaagagacccgcccacaacatctcctcattcggatattcataacgctaaacaacctcgatatggtccatcgtccagttcctcgcggagcggcacttcggcgcaacgttaccgcggaacggccaacctcagaaacccgccagtaaaaaccacagcttcgaccaaccaaccgaaaaatatgctcaacagttctggtcataaagcttcaagtgcaggctctggcaaagccttcagccatgttggcagctcttctgataagagttgccagtctcgtgaaaatcgctctcatgatccataccgggctcgtgatcacgacaaccatactccggtgcgccgccggaccgacagcccgccacgagatcaacgtggagtccagcagagagatgatacgagggttccaactccggtcccagttgtcgttccggctccaactccacagggccagagcagtttcaaacggaagatggggcgacaatagattctctcaagcttatttagctcatgattttctatatttttgtatattgtctttgtagataccctgaaaaaatccgtcagcccattttatatagtgcactcgtattccacatcaaatttgaacgagcatatcaatcttggcatagagcgccaataagttatgaagagaaggcgcatagaccttcgagtcaaagttcgaataaccatctcacaatattcgaagat

SEQ ID NO: 17795 - DNA, 594 bp, Muscodor strobelii
  misc_feature: SGI cDNA ID NO. 565952
  misc_feature: Encodes the peptide sequence at SEQ ID NO 17796
atggaccagcaagctaccggcaagatcgtaatcctcaacggctttcctggtacaggaaaattcactatcctcaaagcactcaaagcacatttcccagacaccgagatctgcattattgacaatcaccttctcattgacccagcttccgctctattcaacgacaggggacccgagcaccattacttacgcaagaagatccgcgatgctgtctttccttctatcgcaaaagtggccatgtccgggcgcactgtgctgatgacagcctgtctggccgaaacggctgctgacattgcggtgttcgcagagcatgttgatatagttcgcgacactagtgttcctctctattggatcacgctttcgtgtgacaaacatatactggaaacaagagcgactagtcaagaacgtcttgagggtgttaagaccaagctaacggacttggacactctacgcagaatggtcgacgaactcaagatggttcacccagggcatcatcctgacctcttggatggggtgcagttgagatacagatccataagcgtcagtgggacaccggaggaagcggctgcgatgatccttgatgccatcagcggatga

SEQ ID NO: 17796 - protein, 197 aa, Muscodor strobelii
  misc_feature: SGI Peptide ID NO. 565952
  misc_feature (2)..(195): NCBI GI: 46126015 Blast Desc: FG07385.1 [Gibberella zeae PH-1]
  misc_feature (7)..(197): NCBI GI: 256732534 Blast Desc: NECHADRAFT_78819 [Nectria haematococca mpVI 77-13-4]
  misc_feature (3)..(195): NCBI GI: 256728840 Blast Desc: NECHADRAFT_79879 [Nectria haematococca mpVI 77-13-4]
  misc_feature (7)..(175): NCBI GI: 169612199 Blast Desc: SNOG_09218 [Phaeosphaeria nodorum SN15] gi|111062290|gb|EAT83410.1| SNOG_09218 [Phaeosphaeria nodorum SN15]
  misc_feature (1)..(192): NCBI GI: 218682935 Blast Desc: RetlC8_29561 [Rhizobium etli CIAT 894]
  misc_feature (1)..(192): NCBI GI: 86356528 Blast Desc: RHE_CH00882 [Rhizobium etli CFN 42] gi|86280630|gb|ABC89693.1| conserved protein [Rhizobium etli CFN 42]
  misc_feature (1)..(159): NCBI GI: 218674029 Blast Desc: RetlG_22092 [Rhizobium etli GR56]
  misc_feature (1)..(192): NCBI GI: 190890593 Blast Desc: RHECIAT_CH0000972 [Rhizobium etli CIAT 652] gi|190695872|gb|ACE89957.1| conserved protein [Rhizobium etli CIAT 652]
  misc_feature (9)..(155): NCBI GI: 256722431 Blast Desc: NECHADRAFT_34920 [Nectria haematococca mpVI 77-13-4]
  misc_feature (9)..(125): NCBI GI: 256722483 Blast Desc: NECHADRAFT_29433 [Nectria haematococca mpVI 77-13-4]
MDQQATGKIVILNGFPGTGKFTILKALKAHFPDTEICIIDNHLLIDPASALFNDRGPEHHYLRKKIRDAVFPSIAKVAMSGRTVLMTACLAETAADIAVFAEHVDIVRDTSVPLYWITLSCDKHILETRATSQERLEGVKTKLTDLDTLRRMVDELKMVHPGHHPDLLDGVQLRYRSISVSGTPEEAAAMILDAISG

SEQ ID NO: 17797 - DNA, 184 bp, Muscodor strobelii
  misc_feature: SGI EST ID NO. CUFF.41896.0
  misc_feature: Variant of the nucleotide sequence at SEQ ID NO 17795
cagcaagctaccggcaagatcgtaatcctcaacggctttcctggtacaggaaaattcactatcctcaaagcactcaaagcacatttcccagacaccgagatctgcattattgacaatcaccttctcattgacccagcttccgctctattcaacgacaggggacccgagcaccattacttacgca

SEQ ID NO: 17798 - DNA, 891 bp, Muscodor strobelii
  misc_feature: SGI cDNA ID NO. 565953
  misc_feature: Encodes the peptide sequence at SEQ ID NO 17799
atgtcgttcctgctcttcacgttcattctcactagcaccgtgcacgctcttcgcgtgctctccattgcctcggagccaggtgccgccacggattcgtatcaaggcgatttccagtcgtcgcgtgttgaccagattcgcgtaggctttccgaggaatctggaacccgaaaatggcattgcacagatcacaagccgctgggaggatgcgtatttgtacaccatgccgcccgctcacgggtatccaaacgggtacggtacaatgaactacgggtatcgagtcgcgtttgaagatctgttgcccagccagcgtttctatgtcgagagcgtgacatggagtaccagccaactggatctgcccaaaggaagcaacttcaatgagctgatatccaaggtggacttcgcggtgtacagccagaggaatgagaattggtggtggaaagcggggacgccatcgattatagataggaacgggacactgctggtcgatatgaacatcgataccgggctcggcgtaaacgaaagctattcgggtaagtttgtcttaacggcaaaaaacccaaatccggttcgctcctggtgcttcgatagctacgtagataatcgaatcaacatgggaatttatatgggcggaaggacggagaaggggggcagcagcgcttccgaagggctcctttttatattgacacaatactcggcagatgggtggaatatggacctgaacctggtttgggaaaaatgcacctggactaaccagacaaattgggcaacctcgaacattccggctgttttcaagacgtggaaagacacgcatgaggaagaattactgaccccgagtgttgcagtgggagacttgttcgtatcgcaggtcagcaaaccaaactatgagggttaa

SEQ ID NO: 17799 - protein, 296 aa, Muscodor strobelii
  misc_feature: SGI Peptide ID NO. 565953
MSFLLFTFILTSTVHALRVLSIASEPGAATDSYQGDFQSSRVDQIRVGFPRNLEPENGIAQITSRWEDAYLYTMPPAHGYPNGYGTMNYGYRVAFEDLLPSQRFYVESVTWSTSQLDLPKGSNFNELISKVDFAVYSQRNENWWWKAGTPSIIDRNGTLLVDMNIDTGLGVNESYSGKFVLTAKNPNPVRSWCFDSYVDNRINMGIYMGGRTEKGGSSASEGLLFILTQYSADGWNMDLNLVWEKCTWTNQTNWATSNIPAVFKTWKDTHEEELLTPSVAVGDLFVSQVSKPNYEG

SEQ ID NO: 17800 - DNA, 2086 bp, Muscodor strobelii
  misc_feature: SGI EST ID NO. CUFF.41900.0
  misc_feature: Variant of the nucleotide sequence at SEQ ID NO 17798
gtgccatcttccgcaatgctaagagcctttatcgccttcatgctacttagtggacggactgcgcgtatttatcaccgatcttgcgacccttttctcctcttactctaaggcaaaagactcagataaatactcgcttgcgtacttagcgaggcgcatactgcgttggtcaaacccctcaacatgttctttgaggcaacggccacgtccatctgggccgatcaccatgatttacccggttgtattcggacactggttgcatggaacattcaattcctatcgggaaatatgacaagcagttgccaatatcgagtgcatattcccgacgggttgaggagctccaatcttctgaaaagcagcagacaacttccataaatcaccgtcaaagctacgacaagcattgaatcaaccaagtctgccgaaatgtcgttcctgctcttcacgttcattctcactagcaccgtgcacgctcttcgcgtgctctccattgcctcggagccaggtgccgccacggattcgtatcaaggcgatttccagtcgtcgcgtgttgaccagattcgcgtaggctttccgaggaatctggaacccgaaaatggcattgcacagatcacaagccgctgggaggatgcgtatttgtacaccatgccgcccgctcacgggtatccaaacgggtacggtacaatgaactacgggtatcgagtcgcgtttgaagatctgttgcccagccagcgtttctatgtcgagagcgtgacatggagtaccagccaactggatctgcccaaaggaagcaacttcaatgagctgatatccaaggtggacttcgcggtgtacagccagaggaatgagaattggtggtggaaagcggggacgccatcgattatagataggaacgggacactgctggtcgatatgaacatcgataccgggctcggcgtaaacgaaagctattcgggtaagtttgtcttaacggcaaaaaacccaaatccggttcgctcctggtgcttcgatagctacgtagataatcgaatcaacatgggaatttatatgggcggaaggacggagaaggggggcagcagcgcttatgggtggaatatggacctgaacctggtttgggaaaaatgcacctggactaaccagacaaattgggcaacctcgaacattccggcttgggagacttgttcgtatcgcaggtcagcaaaccaaactatgagggttaagcagctctattgaaaaggtcgcaacacgattccgttttctccccttttctgtcatatcggacagtaaaattgaatatgtctcagtgatatggaagcgatgttgattgcggcttcttactttcttgaaatttcgtttaagtgagaggcgattttgtctacacaagctgccgttatggcatgttagcaaagaggcaattccatcactgaagacatatggaatactggatatctgctattcgatggtggtaatgatcactacgacttttttcgtctgtcgatgcacttaattttttcttggggtccacatcggatatgtgtccgctcaattgtcgaaggcatacggggataggcaaatgtctaaggaatcccagtgatgtcagtaagaggccacgatccttatgtttgcaagttgcgacatatcaaaaagcacgatatgaaggacgcgacttgttgaaagcaaggagttttcttggtctactcagggtacagaccggacgaggagtttgtgaatcgaggtgatctcctaatgcacggccgaatgttgacttccagatttaccagtccccggcagtggaaactagtgtagctgtgtcagatttattattctcgatatgcacattatgtgaaattcttcaatgcatagttccaatctcattagcccaccaatattttttcagcatcgataatggccgttatgttagacccagtccggatggagatgacacagtattgtaccacgtcaaagacctgggactaatacgcttttcaggtagagtctatttctcaaacactgaggaagggaaactatctgtattatcttgcataattgttaccagggaaaatagagcatgaactgcataggtacgctagca

SEQ ID NO: 17801 - DNA, 1482 bp, Muscodor strobelii
  misc_feature: SGI cDNA ID NO. 565954
  misc_feature: Reduced expression when VOC is produced
  misc_feature: Encodes the peptide sequence at SEQ ID NO 17802
atgacgctatcatacgctatattctcgtgggacatgctgttcactgtagccgtgatgctgctcacggtgcaggttgggagcatgatctactacacccagcttcatggcctacgccatgttcccggcccctggttgctctcatcgagctctgcgtggatccgttggcaaaggtggaatggccgtctctcgctggaagccgacaagttgctcaccacttacggaccagtcgtccgcattagtccgaacatggtcctcgtaaatgactacgaagctgttgaaagaaattttatcagaaaagacttcgacacagcccccacgtcaatccgagccttacgtgtcggcggccacgactggacagttacatatccgcagcaccccatcgctcgacaacggcgtcatccggtcatgatcgcaacgacgaccaaatgcatgaaattctggcatgaagattttctcaacaacatcctcgatatggtctccgcaatccggaagtcttgtggtcttaactcggaagacgctgttcgccacttgcggatttgtacacttaggaactccgaggttgtgctaggcggcgccggtacgaaattggagtccgctgacttcccagatgtagttggccaatacaacttcttggtggtctggcgattatgtttgccaccctggctatatggatggctaaaatatagtccattcacacacgcgagttacagaatcaagtcaagcgacaggttgtatgatgttggggcagagctttgccggcaagccgaggccaacactggttccgaaatccaaagcgacattccaagtgtctatagactattcacggataagcaagcaacatatcctacacaagcttggtcacggtcagaactcagtgccgaaatggctggccaaatactggctgcgacagagaccacatcatccgctctcactttcatcctttacgaactcgcgaaaaaccagcctcttttagacgaagtctatgatgaagttcgaacagctgccttggatgcaaatctggacacattgaaacttttagagtcgtgtatcaaggaaggtttgcgtttccgtcctccggtcgccttgactggcagccgcttaatccctaggggaggaatcgacttgcttggctaccatctgcccgctggcacagtgataacgacccaatctctttcaatgagtagacaacgtcccgacctgttcccagattatgacacctttaatcctaagagatggcttgtcgaagctcattcggctgaaagacgccgcttgtgggttccgtttggtgttggtgcccggcgatgtccggggggtaatatggcaatgtatcagatgcggttgatccttgcgattctcatccaagagtttgagattcaagttgccccagaaacaaccccggagacgatggaaccatttgaggcgaatggataccgctcaagacatgataggtgcgaccttattttcgcgccgaggcatagctaa

SEQ ID NO: 17802 - protein, 493 aa, Muscodor strobelii
  misc_feature: SGI Peptide ID NO. 565954
  misc_feature (40)..(488): Pfam Id: PF00067 Pfam Desc: Cytochrome P450
  misc_feature (290)..(471): Pfam Id: PF00067 Pfam Desc: Cytochrome P450
  misc_feature (18)..(491): NCBI GI: 189203551 Blast Desc: benzoate 4-monooxygenase cytochrome P450 [Pyrenophora tritici-repentis Pt-1C-BFP] gi|187985210|gb|EDU50698.1| benzoate 4-monooxygenase cytochrome P450 [Pyrenophora tritici-repentis
  misc_feature (66)..(491): NCBI GI: 169603197 Blast Desc: SNOG_04607 [Phaeosphaeria nodorum SN15] gi|160706345|gb|EAT88367.2| SNOG_04607 [Phaeosphaeria nodorum SN15]
  misc_feature (37)..(491): NCBI GI: 39976579 Blast Desc: [Magnaporthe grisea 70-15] gi|145011979|gb|EDJ96635.1| [Magnaporthe grisea 70-15]
  misc_feature (100)..(277): NCBI GI: 238610443 Blast Desc: MPER_01802 [Moniliophthora perniciosa FA553] gi|215472792|gb|EEB98653.1| MPER_01802 [Moniliophthora perniciosa FA553]
  misc_feature (8)..(492): NCBI GI: 170090332 Blast Desc: [Laccaria bicolor S238N-H82] gi|164647881|gb|EDR12124.1| [Laccaria bicolor S238N-H82]
  misc_feature (37)..(488): NCBI GI: 225682186 Blast Desc: cytochrome P450 monooxygenase [Paracoccidioides brasiliensis Pb03]
  misc_feature (16)..(490): NCBI GI: 225556076 Blast Desc: conserved [Ajellomyces capsulatus G186AR]
  misc_feature (22)..(460): NCBI GI: 239614878 Blast Desc: pisatin demethylase [Ajellomyces dermatitidis ER-3]
  misc_feature (29)..(492): NCBI GI: 169865157 Blast Desc: CC1G_07897 [Coprinopsis cinerea okayama7#130] gi|116499720|gb|EAU82615.1| CC1G_07897 [Coprinopsis cinerea okayama7#130]
  misc_feature (26)..(488): NCBI GI: 255941020 Blast Desc: Pc16g09680 [Penicillium chrysogenum Wisconsin 54-1255] gi|211585902|emb|CAP93638.1| Pc16g09680 [Penicillium chrysogenum Wisconsin 54-1255]
  misc_feature: Useful for introducing or modulating the production of volatile compounds
MTLSYAIFSWDMLFTVAVMLLTVQVGSMIYYTQLHGLRHVPGPWLLSSSSAWIRWQRWNGRLSLEADKLLTTYGPVVRISPNMVLVNDYEAVERNFIRKDFDTAPTSIRALRVGGHDWTVTYPQHPIARQRRHPVMIATTTKCMKFWHEDFLNNILDMVSAIRKSCGLNSEDAVRHLRICTLRNSEVVLGGAGTKLESADFPDVVGQYNFLVVWRLCLPPWLYGWLKYSPFTHASYRIKSSDRLYDVGAELCRQAEANTGSEIQSDIPSVYRLFTDKQATYPTQAWSRSELSAEMAGQILAATETTSSALTFILYELAKNQPLLDEVYDEVRTAALDANLDTLKLLESCIKEGLRFRPPVALTGSRLIPRGGIDLLGYHLPAGTVITTQSLSMSRQRPDLFPDYDTFNPKRWLVEAHSAERRRLWVPFGVGARRCPGGNMAMYQMRLILAILIQEFEIQVAPETTPETMEPFEANGYRSRHDRCDLIFAPRHS

SEQ ID NO: 17803 - DNA, 2059 bp, Muscodor strobelii
  misc_feature: SGI EST ID NO. CUFF.41918.0
  misc_feature: Variant of the nucleotide sequence at SEQ ID NO 17801
ggtggcaagatcgggcactgcgcttatctcggaatgagtggcccatacaaccctggtacctaacaccttagcatagtattccaggacggggacaactgcctcctttgtacgagaatattacgctcctttccatgtctcgtcgcagaacaagatactcttagtggtgagatagtgtatcagaaaggtagaaaagcagtgcgcatccacgactgcctcgtggatgcgcactgcttttcttcacaattcttgttttctcaaacgaccagacgtcttttatctgctattatatagcgaccccaatatgacgctatcatacgctatattctcgtgggacatgctgttcactgtagccgtgatgctgctcacggtgcaggttgggagcatgatctactacacccagcttcatggcctacgccatgttcccggcccctggttgctctcatcgagctctgcgtggatccgttggcaaaggtggaatggccgtctctcgctggaagccgacaagttgctcaccacttacggaccagtcgtccgcattagtccgaacatggtcctcgtaaatgactacgaagctgttgaaagaaattttatcagaaaagacttcgacacagcccccacgtcaatccgagccttacgtgtcggcggccacgactggacagttacatatccgcagcaccccatcgctcgacaacggcgtcatccggtcatgatcgcaacgacgaccaaatgcatgaaattctggcatgaagattttctcaacaacatcctcgatatggtctccgcaatccggaagtcttgtggtcttaactcggaagacgctgttcgccacttgcggatttgtacacttaggaactccgaggttgtgctaggcggcgccggtacgaaattggagtccgctgacttcccagatgtagttggccaatacaacttcttggtggtctggcgattatgtttgccaccctggctatatggatggctaaaatatagtccattcacacacgcgagttacagaatcaagtcaagcgacaggttgtatgatgttggggcagagctttgccggcaagccgaggccaacactggttccgaaatccaaagcgacattccaagtgtctatagactattcacggataagcaagcaacatatcctacacaagcttggtcacggtcagaactcagtgccgaaatggctggccaaatactggctgcgacagagaccacatcatccgctctcactttcatcctttacgaactcgcgaaaaaccagcctcttttagacgaagtctatgatgaagttcgaacagctgccttggatgcaaatctggacacattgaaacttttagagtcgtgtatcaaggaaggtttgcgtttccgtcctccggtcgccttgactggcagccgcttaatccctaggggaggaatcgacttgcttggctaccatctgcccgctggcacagtgataacgacccaatctctttcaatgagtagacaacgtcccgacctgttcccagattatgacacctttaatcctaagagatggcttgtcgaagctcattcggctgaaagacgccgcttgtgggttccgtttggtgttggtgcccggcgatgtccggggggtaatatggcaatgtatcagatgcggttgatccttgcgattctcatccaagagtttgagattcaagttgccccagaaacaaccccggagacgatggaaccatttgaggcgaatggataccgctcaagacatgataggtgcgaccttattttcgcgccgaggcatagctaagtagcaaagtcgttctgtccaaagtaacttttcggggctctcaagtactgtaactgtcgagaccgaacggaatttcgtagtagctccttagctactacgctatatgttgcgaatctgctggcacagccacgtgacataagcactaggaacactcattcaagtgaagatactgctcgcgtaatattccttcacatagaacacgatttaatatatacgcacttactgctttaccgtacagctatacacataggctcaaagctaataaaaagtttcgag

SEQ ID NO: 17804 - DNA, 1755 bp, Muscodor strobelii
  misc_feature: SGI cDNA ID NO. 565955
  misc_feature: Encodes the peptide sequence at SEQ ID NO 17805
atgtcttcttcagacgaaggtaagcatcctgaatttggatttgccctaccacctccggaattcaactctgcggagcaaaagcaagaatttgaagaatggtttcgagatcgcaaagggttcggtgtcttatcgtctacaggtgtaccagagcaatcgattgaagatgaaattgctcgtaaaatcacggatctagaaaaggcaagaggtacctcggtatctgaaggcgagcgtgagagaattgcaacaaaaacgaggaggctccgcgagggtggctggctcgaaggaataaagaaggtccttgttggtgagaaaacagtcccaattgagtattttaaccgccttgtagccgagcacgagggcaccatcccgtatgttgtagaaaaacttaaccaagctgacctcagaatcgcgggaaaagacagcgaaatcgacgacctcaagaagcagctcaagaatcaatatccggatgatgctgacgacgagaacactaagaatctgcaggacaagctcaaaaaatgccatgaggatgttcgtaatcttgaagaggaaatccaaagtcttgagactcagaaaaaaaccacggaagcgcaagagaagcccgatgatgcagctcttaaggaatgtaacgaccgtgttcaggagctccaaaaacgacttgatgcggcgaatgaagatcttgacgatacgaaaacgcaggtagaatccagagaggctgctctaaaaagagtgcgacaaacggcttctgaccactacaatgacaatcagaaactacaagacgacttacagaagtctcgagaaagagaaaacaaattgaaagacgatttccgagatttagaacaacaactaaatgcctgtgaaaccgcaaacgcaaaactacagaaagctgccgaagtccaaggcatgaatgaagagtcagcagagcttcgcaatcatatttcgcaacttcaggccgacaacaataaactcaggattgagaatgacgctttgaaaaaggctactgcgggagacaacaatatcgttacgtttggcaagcaaatttcagacctgaacgccgagaaggaaagactcgcagcaagagttgccgagctcgagtcaaagccagatcagcaactacatgcgcagccagacgagagcaacctcgcacagttccagcaagaaatcgtcgacctgcgacaacagcgagataactttagggagaaatgggcccgaaacatgatcgaggggaaggataatcttagagatttttataatgccgtcgaagcaagactacaagactgtaacgacctgagcctccgcgtcgggacactgagtgatgcgctgggtatcaagccggggcccaacccagtgcaaacagttgacaacatcattaaagacatcaaggagatgcctaaagatggtaatgcaatgcaaatcgaactcatgactcttcgaaatgcaaataatatagcgcaactcgatattcagatgtcgcggaacgagcttgctgctgagaaaattgccaagaccgacgatgagatcaaactacagctgggagttgtcgaggaagtggaggtcgaaaaacgcgtgactgctcgtactcaacattatcgcgaatttcgatctcagctgctagcacacatctttgactgtagaaatgctgtcatgaacatggctgtaaatcatcctgacgcggcgccagcgctgaatgaactcattcacacttatctcgatccgacggctcttccggcgccaagattacggccagatagaaattaa

SEQ ID NO: 17805 - protein, 584 aa, Muscodor strobelii
  misc_feature: SGI Peptide ID NO. 565955
  misc_feature (101)..(579): NCBI GI: 261361195 Blast Desc: DNA double-strand break repair rad50 ATPase [Verticillium albo-atrum VaMs.102]
  misc_feature (169)..(363): NCBI GI: 257389041 Blast Desc: chromosome segregation protein SMC [Halomicrobium mukohataei DSM 12286] gi|257171348|gb|ACV49107.1| chromosome segregation protein SMC [Halomicrobium mukohataei DSM 12286]
MSSSDEGKHPEFGFALPPPEFNSAEQKQEFEEWFRDRKGFGVLSSTGVPEQSIEDEIARKITDLEKARGTSVSEGERERIATKTRRLREGGWLEGIKKVLVGEKTVPIEYFNRLVAEHEGTIPYVVEKLNQADLRIAGKDSEIDDLKKQLKNQYPDDADDENTKNLQDKLKKCHEDVRNLEEEIQSLETQKKTTEAQEKPDDAALKECNDRVQELQKRLDAANEDLDDTKTQVESREAALKRVRQTASDHYNDNQKLQDDLQKSRERENKLKDDFRDLEQQLNACETANAKLQKAAEVQGMNEESAELRNHISQLQADNNKLRIENDALKKATAGDNNIVTFGKQISDLNAEKERLAARVAELESKPDQQLHAQPDESNLAQFQQEIVDLRQQRDNFREKWARNMIEGKDNLRDFYNAVEARLQDCNDLSLRVGTLSDALGIKPGPNPVQTVDNIIKDIKEMPKDGNAMQIELMTLRNANNIAQLDIQMSRNELAAEKIAKTDDEIKLQLGVVEEVEVEKRVTARTQHYREFRSQLLAHIFDCRNAVMNMAVNHPDAAPALNELIHTYLDPTALPAPRLRPDRN

SEQ ID NO: 17806 - DNA, 460 bp, Muscodor strobelii
  misc_feature: SGI EST ID NO. CUFF.41909.0
  misc_feature: Variant of the nucleotide sequence at SEQ ID NO 17804
gcaaatttcagacctgaacgccgagaaggaaagactcgcagcaagagttgccgagctcgagtcaaagccagatcagcaactacatgcgcagccagacgagagcaacctcgcacagttccagcaagaaatcgtcgacctgcgacaacagcgagataactttagggagaaatgggcccgaaacatgatcgaggggaaggataatcttagagatttttataatgccgtcgaagcaagactacaagactgtaacgacctgagcctccgcgtcgggacactgagtgatgcgctgggtatcaagccggggcccaacccagtgcaaacagttgacaacatcattaaagacatcaaggagatgcctaaagatggtaatgcaatgcaaatcgaactcatgactcttcgaaatgcaaataatatagcgcaactcgatattcagatgtcgcggaacgagcttgctgctgag

SEQ ID NO: 17807 - DNA, 1023 bp, Muscodor strobelii
  misc_feature: SGI cDNA ID NO. 565956
  misc_feature: Elevated expression when VOC is produced
  misc_feature: Encodes the peptide sequence at SEQ ID NO 17808
atggctcttgctaatggctcacgtatattccttgactataagccgacattaggcggaaatgcagcgtttctcgctttgtttgccattctcattcctattgcacttactctaggcttcagatacagcagtttgggattcggcacagccattgcaaccggcctcgctttagaagttgtgggctacatcggaagacttctattacacaacaatccaaacaataggagcgccttcatcgttttcttaatcggaacgattcttggcccaacatgtatttgcgctgcagttttcctaacaatgccgcgcattgtcgcagtatacggggaagaatatcgctcatggagacctaactggtatttgtacctcttttcggccctattcgggatatctttcgtgttagaattggctggcagtattatctccacgattcacgacgaggatgatcagatcaacactggcattcaagtatctgttgccgggctcgctattcagctggcaacgcttgtgatcttcatcgttcatggcgtgtgcttctcaatcgcgctccgaacaagaaagcatggtctcgatcccaagttcgcttcaatttacaacagtaaactgtactcgatcacaatttccttgtttgtgatctcgattatcacaattatcattcgcactgcttatcgactcgtggatatcgcacaaggatttgcgagttcagctgcacagaatgaaaagctattcttggtcctagacggatttctcatgctatttgcgatcgtccttctcctcgtcggattcccagctcgagctttaggacaggcatgggttcaaacctcaccacgaagattgtcgcaaaaaccgcctcgaccaattcgaccagcacctccatctctcctatcgtccgctcgtccaagtcctaccttcaaccgaatgagcatgaagtcttccgtgagtaatagctccccgaggaaagcgagttatccgccgcctccaccgccaccaccacagcggggtatggtcgacagcgatgctctttggtag

SEQ ID NO: 17808 - protein, 340 aa, Muscodor strobelii
  misc_feature: SGI Peptide ID NO. 565956
  misc_feature (210)..(263): Pfam Id: PF04479 Pfam Desc: RTA1 like protein
  misc_feature (7)..(328): NCBI GI: 46137013 Blast Desc: FG10022.1 [Gibberella zeae PH-1]
  misc_feature (7)..(286): NCBI GI: 255940496 Blast Desc: Pc16g06830 [Penicillium chrysogenum Wisconsin 54-1255] gi|211585640|emb|CAP93353.1| Pc16g06830 [Penicillium chrysogenum Wisconsin 54-1255]
  misc_feature (20)..(312): NCBI GI: 261355747 Blast Desc: conserved [Verticillium albo-atrum VaMs.102]
  misc_feature (10)..(267): NCBI GI: 67524387 Blast Desc: AN2651.2 [Aspergillus nidulans FGSC A4] gi|40743869|gb|EAA63053.1| AN2651.2 [Aspergillus nidulans FGSC A4] gi|259486439|tpe|CBF84276.1| TPA: conserved [Aspergillus FGSC
  misc_feature (10)..(295): NCBI GI: 169775895 Blast Desc: [Aspergillus oryzae RIB40] gi|83771149|dbj|BAE61281.1| protein product [Aspergillus oryzae]
  misc_feature (10)..(295): NCBI GI: 238502545 Blast Desc: RTA1 domain protein, [Aspergillus flavus NRRL3357] gi|220691316|gb|EED47664.1| RTA1 domain protein, [Aspergillus flavus NRRL3357]
  misc_feature (10)..(291): NCBI GI: 256732034 Blast Desc: NECHADRAFT_60964 [Nectria haematococca mpVI 77-13-4]
  misc_feature (10)..(296): NCBI GI: 256721553 Blast Desc: NECHADRAFT_78514 [Nectria haematococca mpVI 77-13-4]
  misc_feature (1)..(279): NCBI GI: 70985426 Blast Desc: RTA1 domain protein [Aspergillus fumigatus Af293] gi|66845847|gb|EAL86181.1| RTA1 domain protein, [Aspergillus fumigatus Af293] gi|159125853|gb|EDP50969.1| RTA1 domain protein,
  misc_feature (1)..(279): NCBI GI: 119499309 Blast Desc: RTA1 domain protein, [Neosartorya fischeri NRRL 181] gi|119414576|gb|EAW24515.1| RTA1 domain protein, [Neosartorya fischeri NRRL 181]
  misc_feature: Useful for introducing or modulating the production of volatile compounds
MALANGSRIFLDYKPTLGGNAAFLALFAILIPIALTLGFRYSSLGFGTAIATGLALEVVGYIGRLLLHNNPNNRSAFIVFLIGTILGPTCICAAVFLTMPRIVAVYGEEYRSWRPNWYLYLFSALFGISFVLELAGSIISTIHDEDDQINTGIQVSVAGLAIQLATLVIFIVHGVCFSIALRTRKHGLDPKFASIYNSKLYSITISLFVISIITIIIRTAYRLVDIAQGFASSAAQNEKLFLVLDGFLMLFAIVLLLVGFPARALGQAWVQTSPRRLSQKPPRPIRPAPPSLLSSARPSPTFNRMSMKSSVSNSSPRKASYPPPPPPPPQRGMVDSDALW

SEQ ID NO: 17809 - DNA, 1789 bp, Muscodor strobelii
  misc_feature: SGI EST ID NO. CUFF.41931.0
  misc_feature: Variant of the nucleotide sequence at SEQ ID NO 17807
tttataccttcctttctcaagcgcctagcactactcttcccaaacggctgggacagatgactgttttgtagctcgccgttcgtgtagtataactaccgtggagagccggttgacgccaccgccagccttgcctgatatttagactttccccttagcgcatctacagtcttgactcaactagctcagaggcatgatagtcaggcaaaatggctcttgctaatggctcacgtatattccttgactataagccgacattaggcggaaatgcagcgtttctcgctttgtttgccattctcattcctattgcacttactctaggcttcagatacagcagtttgggattcggcacagccattgcaaccggcctcgctttagaagttgtgggctacatcggaagacttctattacacaacaatccaaacaataggagcgccttcatcgttttcttaatcggaacgattcttggcccaacatgtatttgcgctgcagttttcctaacaatgccgcgcattgtcgcagtatacggggaagaatatcgctcatggagacctaactggtatttgtacctcttttcggccctattcgggatatctttcgtgttagaattggctggcagtattatctccacgattcacgacgaggatgatcagatcaacactggcattcaagtatctgttgccgggctcgctattcagctggcaacgcttgtgatcttcatcgttcatggcgtgtgcttctcaatcgcgctccgaacaagaaagcatggtctcgatcccaagttcgcttcaatttacaacagtaaactgtactcgatcacaatttccttgtttgtgatctcgattatcacaattatcattcgcactgcttatcgactcgtggatatcgcacaaggatttgcgagttcagctgcacagaatgaaaagctattcttggtcctagacggatttctcatgctatttgcgatcgtccttctcctcgtcggattcccagctcgagctttaggacaggcatgggttcaaacctcaccacgaagattgtcgcaaaaaccgcctcgaccaattcgaccagcacctccatctctcctatcgtccgctcgtccaagtcctaccttcaaccgaatgagcatgaagtcttccgtgagtaatagctccccgaggaaagcgagttatccgccgcctccaccgccaccaccacagcggggtatggtcgacagcgatgctctttggtaggggttcgtcgaccgcacaatggattcttgtcaaaactttgcaaacctagaaaggaaacaggggtcattatatggaaatcaacataacattgacgtcttctttacaaatgaagaatgtttagtgaatctcggcgttcacactgggagagtacggttcagtctctatgatgtggtttacgggctcatgtataccctaaaagggtctaccacgcgaaattggtttatgtatttatgcgatgaagtgaagcgagggatctggatttctgtcatcccgacgagactggcgtttacagattattgtcattcattataccacattgaatatctaccttgaggctgagatctggatattcagcatcataggagaaggccttgcatcactcaactaaacgctaaagattatactctctatagatagttacatgctacgtgaaccattttgtcgagaaaggaccagtttaaaatctataaaattcccacatatgcagacttcgcgtggaagtcgagatcaggtagtcacgacatttctggcttggatacatcatgtacctctaaatgtaa

SEQ ID NO: 17810 - DNA, 987 bp, Muscodor strobelii
  misc_feature: SGI cDNA ID NO. 565957
  misc_feature: Encodes the peptide sequence at SEQ ID NO 17811
atgaatgtgctgcgccctcgctacgcacactctctccgcagccttggtcacagtgccatccgagtatgttcgtcaagatggtatgcctccactggcgactccaacgagacagagaaagaggatcccaggttgaagcaccttggtagaaggattaatgatgattataagcaggtcagggatcactattccacgcctagataccccatcgtcttggcgcatgggttgctgggatttgctgagcttcatctggtaccaggctggttgccagcaattcattactggcgtggtattactgacgcgctggaagccaacggcatcaaggtgatcacgactgccgttcctccatcagcaagcatcgaacatcgcgccgaagcgctcgcgcgtgggattgctgatgcggctggtggcgagaatattgtcgcacactccatgggtggccttgatgccagatacatgatatcacatcttcgccctacgaacgtcaaagtacggtctcttgtcacagttgctactcctcatcatggaagctctttcgccgacttccttatccatgagattggaccggaacgtttacccagcatttacaagtttataaaaggcgtcggcatgcaaacagaggcttttgagcaactcacatcgttttacatggatgagaagttcaatccgcacacgaccgacgatccagatgttcgctacttctcctatggagcaatgatggagcggcccccattgtttagcccctttcgacaatcccacgctattatgtctcgcgtcgagggaccaaatgacggacttgtcagcgtggcatctgctcaatggggttcgtacaagggcacgctagtcggcgtgagccatctagatttaatcaattggacaaatcgcttgagatggatgatacgaggtcttgcttttggtcaccacccagcatttaatgctatcgctttctacctcgacatcgccgacatgctagctaaagaaggctattag

SEQ ID NO: 17811 - protein, 328 aa, Muscodor strobelii
  misc_feature: SGI Peptide ID NO. 565957
  misc_feature (139)..(176): Pfam Id: PF07819 Pfam Desc: PGAP1-like protein
  misc_feature (41)..(328): NCBI GI: 46137009 Blast Desc: FG10020.1 [Gibberella zeae PH-1]
  misc_feature (40)..(327): NCBI GI: 171677995 Blast Desc: protein product [Podospora anserina] gi|170937066|emb|CAP61725.1| protein product [Podospora anserina]
  misc_feature (40)..(328): NCBI GI: 256731654 Blast Desc: [Nectria haematococca mpVI 77-13-4]
  misc_feature (24)..(300): NCBI GI: 164426571 Blast Desc: NCU03862 [Neurospora crassa OR74A] gi|157071391|gb|EAA26619.2| conserved [Neurospora crassa OR74A]
  misc_feature (37)..(327): NCBI GI: 121709203 Blast Desc: triacylglycerol lipase, [Aspergillus clavatus NRRL 1] gi|119400489|gb|EAW10914.1| triacylglycerol lipase, [Aspergillus clavatus NRRL 1]
  misc_feature (18)..(321): NCBI GI: 67904238 Blast Desc: AN9106.2 [Aspergillus nidulans FGSC A4] gi|40742749|gb|EAA61939.1| AN9106.2 [Aspergillus nidulans FGSC A4] gi|259485481|tpe|CBF82539.1| TPA: triacylglycerol lipase, A4]
  misc_feature (22)..(323): NCBI GI: 255954979 Blast Desc: Pc21g12110 [Penicillium chrysogenum Wisconsin 54-1255] gi|211589953|emb|CAP96108.1| Pc21g12110 [Penicillium chrysogenum Wisconsin 54-1255]
  misc_feature (36)..(327): NCBI GI: 238498888 Blast Desc: conserved [Aspergillus flavus NRRL3357] gi|220693953|gb|EED50298.1| conserved [Aspergillus flavus NRRL3357]
  misc_feature (18)..(327): NCBI GI: 110628935 Blast Desc: triacylglycerol lipase [Magnaporthe grisea]
  misc_feature (18)..(327): NCBI GI: 242824657 Blast Desc: triacylglycerol lipase, [Talaromyces stipitatus ATCC 10500] gi|218713223|gb|EED12648.1| triacylglycerol lipase, [Talaromyces stipitatus ATCC 10500]
  misc_feature (54)..(328): SWISSPROT Homolog: EC 3.1.1.3 Triacylglycerol lipase
MNVLRPRYAHSLRSLGHSAIRVCSSRWYASTGDSNETEKEDPRLKHLGRRINDDYKQVRDHYSTPRYPIVLAHGLLGFAELHLVPGWLPAIHYWRGITDALEANGIKVITTAVPPSASIEHRAEALARGIADAAGGENIVAHSMGGLDARYMISHLRPTNVKVRSLVTVATPHHGSSFADFLIHEIGPERLPSIYKFIKGVGMQTEAFEQLTSFYMDEKFNPHTTDDPDVRYFSYGAMMERPPLFSPFRQSHAIMSRVEGPNDGLVSVASAQWGSYKGTLVGVSHLDLINWTNRLRWMIRGLAFGHHPAFNAIAFYLDIADMLAKEGY

SEQ ID NO: 17812 - DNA, 1191 bp, Muscodor strobelii
  misc_feature: SGI EST ID NO. CUFF.41927.0
  misc_feature: Variant of the nucleotide sequence at SEQ ID NO 17810
ccagattgtcgcacactccatgggtggccttgatgccagatacatgatatcacatcttcgccctacgaacgtcaaagtacggtctcttgtcacagttgctactcctcatcatggaagctctttcgccgacttccttatccatgagattggaccggaacgtttacccagcatttacaagtttataaaaggcgtcggcatgcaaacagaggcttttgagcaactcacatcgttttacatggatgagaagttcaatccgcacacgaccgacgatccagatgttcgctacttctcctatggagcaatgatggagcggcccccattgtttagcccctttcgacaatcccacgctattatgtctcgcgtcgagggaccaaatgacggacttgtcagcgtggcatctgctcaatggggttcgtacaagggcacgctagtcggcgtgagccatctagatttaatcaattggacaaatcgcttgagatggatgatacgaggtcttgcttttggtcaccacccagcatttaatgctatcgctttctacctcgacatcgccgacatgctagctaaagaaggctattagaatacataaacggagtaccactctgatctgcgcctcgatctccagagccttaataagttaattcatgaagagacgttcaagtacatcttcaataaaacatcaaccacacttaggtcaagacgctcatcgctctaagacccactcagactcagctaagcccgggtcgaaaccctacaataatctttcaatagaacttgggaccatactcaataacagtcatgtctctctctctcgaaacagacgactataggaaagcgttttcccgtcgctggaatctctagtgtttcggcgagtcttcgcagctttccgactttcaactccgacatctgcgacaacacgcacatgttgatatcatagagtcacattcgtctcagctttaattaccaactgtcctgccacgtaagatgtgtcgctcaatacagcctacgaagtcgattctggccctgactcgcgcccatattgcctaaaaatactagcatactaatacacttaagtcgttgcacagtgtggcggactgattgtgtctctacgacctgatatctgtatatttgtgtagattaatgtagatattagatattattagacgatgaataaaatagtgcttatcaccggag

SEQ ID NO: 17813 - DNA, 579 bp, Muscodor strobelii
  misc_feature: SGI cDNA ID NO. 565958
  misc_feature: Encodes the peptide sequence at SEQ ID NO 17814
atggtcgaatacatcgcgacagcccctgatcttagccacccggccgacacaacatcacgcggtcgccgcgacacggtggcaagtgatacgagcggcacgagtggcggaccacgtccggatgtctcctcggacgttgcaaccggtggtagccaagcacaaacgctgtggatattgattttcaaaggccatcctcgcgatatccagagcacgcgggttacagaactttatgtatcttttaacgagtccgaaagcgtcaatgtgacattttcgctccgtggacactacccgtcctttagggtacgcgaagtctggaacgggccatcgccacgcctcagacgaaatttctataggcgactggctgtgtcaacgataacaagcacgggaaccgcgttggacatgcgcgttagagatgttgtatcgggtacgccggcgaataactcggaacctgatttgacaagccagagttgggtgggagatatgatcaccgtgttacaagaagcgaatctcatcacggacgaagaaggcgacaatgctttgaatggaatggtaaattatatctcgcaggcaccatggcagtaa

SEQ ID NO: 17814 - protein, 192 aa, Muscodor strobelii
  misc_feature: SGI Peptide ID NO. 565958
  misc_feature (55)..(189): NCBI GI: 240275671 Blast Desc: conserved [Ajellomyces capsulatus H143]
  misc_feature (56)..(189): NCBI GI: 115390841 Blast Desc: [Aspergillus terreus NIH2624] gi|114193849|gb|EAU35549.1| [Aspergillus terreus NIH2624]
  misc_feature (55)..(189): NCBI GI: 225679672 Blast Desc: conserved [Paracoccidioides brasiliensis Pb03] gi|226291409|gb|EEH46837.1| conserved [Paracoccidioides brasiliensis Pb18]
  misc_feature (55)..(189): NCBI GI: 226285930 Blast Desc: conserved [Paracoccidioides brasiliensis Pb01]
  misc_feature (55)..(189): NCBI GI: 145255604 Blast Desc: An18g05660 [Aspergillus niger] gi|134084608|emb|CAK97484.1| [Aspergillus niger]
MVEYIATAPDLSHPADTTSRGRRDTVASDTSGTSGGPRPDVSSDVATGGSQAQTLWILIFKGHPRDIQSTRVTELYVSFNESESVNVTFSLRGHYPSFRVREVWNGPSPRLRRNFYRRLAVSTITSTGTALDMRVRDVVSGTPANNSEPDLTSQSWVGDMITVLQEANLITDEEGDNALNGMVNYISQAPWQ

SEQ ID NO: 17815 - DNA, 3790 bp, Muscodor strobelii
  misc_feature: SGI EST ID NO. CUFF.42005.1
  misc_feature: Variant of the nucleotide sequence at SEQ ID NO 17813
cagacagcaaggcacagtttgagacaagcgatggatagcatgacaacggtagtatcaatgaagtatactaagtgaacgtaatggtcgcttttactcattagatcaaggcgacgatgattctacacggggcaagtgtctcgccccaagcaatgtgacgaaaacgccaacaaggccatccaagtttggagtccgaaacagttagtagcttagataggtgtgatcactgtaactaatatgataagacctatacctgtatgctatcggtaggctttaagtcttcgagacgagggtaagtgaatgagtggcctacgaatcaaatgtacctcggcatgtgctcaggtctgtcagaaattttaagagctgcgtctagcttaataggttgactgtgatatatcgttgttctggtacctgggtaggattattggcatagactagcgaagcaaatgcgaaaaagcctcgtgattatgagcgaaaggacacatcaacatgcttgagattgatctagaatgtgtacgcagtctctagtggtcccgagagctagagtttcaaagcaagacactcgacaaatacccatccttttcccatatcacctaacgtcccagtaccatgaacagcaatccggccaagccagccaatgcatcacttcaggacaacccatagatacgtagaagacaaattagcagtcaagcagtccgctccgtacgaacggccacgtttcatcgaattccgatgatcggctgggtttccgcctgaacaaggcgggatcttcgaactctcctccagatctacaagacttgccgggatttcggaatggagcccaaagccaagctttggacattccacgatctctggagatctcgcacggagcgatgatctgacttcgggatgcactcactcccaaaggacgcgcccagcaaaagaacacggcgagtgtagagtacgtacacggagagtgctggcgagaagctttcatgtcggaggatggtcctctagtcacgacgtgaagcattgctcttggcgttcccgctccgcgacggaacgagatacgccaaggttcgtcgcgaggacgaagatcatggttctcgggctgcaatgcgtcgtccaaacccatgggttctccaaaattatgctatcctgataacttttacgtgcctgcaaggtcctcaatgtcatctataataactattttccatgtcttaacaactggattcactgcgtgagtcattagacgcgcctagtaccgtggtaacaacgatgccttatcacttaaaaggcatcaaccaaaccacaacaatgcattatcacagcagatcatcgaaccattatcccctaacccaacgtgaagccctacatctgctcgccctatttactatgggtgcggcagatgtgccctataagccgcagggttactcgcaagcacactacttcgtattctatatatgatctgccgttttactcaccctttcgcgttctgcaacatgcgcccgataactaaagcattcgcgtagcaacaaataaaagtttcagatcttggagaaatttgatcgaactagttatcttgatacattattcttacttaatctatctgtcagatcatccttctggagatcatttcctatctgaaccctgatttccatcgaactcgtacgatatggtattcacactcgtccgaaaccagatatcgataggcgcggacgcgaatctcctcacagcatttggagttcgagctaaatgcacataatacgaaaatttattcctaattcctcaccaggcagcggagtagcctcaccactaatctcgatccacgctgggatcaccattcttcggcgcggtctagaacgatccaaaaagtggcagtctgcatggtcccatgcgcgtcttcaatgcaatgttgatcaaaaggggacatctcccctcaaagattcccaaactcgataggtatttgtaccacgatgcagggtttggctgtttgtctcttatttccgcgctcactcgatccatactgttcagataatagtctcaaatctcgccccagtaccatatacttcgtgtcggcccaaacggctgccaatgaagtaccgctgtgagatatatcataaaatactctcatgcagaagccctgattcgcacaaattgtcgagctgttgtagatcgtagaaagttatagaagaacctgcattgtgccgcgctcggctgccaaggacctccctaccttacctatgcactgctctgccgcgttgaagaacgtggcctggtctgatcagcatggcacacacactcacttatcgccacagtacagtaccctttttgctgttgtttggtttgcgctgaatcatcacgcagcgataacttatgaaagaggtggtttgtgcaagggccgggtttactagaacttccgcctcgattttcagcctactactctgtttggtgtgaggtgagcagcctcgggatatgttagttgttatccgaatttgcgctgataggcgcagaagaagcacacctcgagataatttgcctctcgccctggcttcgagaggcaatacttaagcgtcaatggtcgaatacatcgcgacagcccctgatcttagccacccggccgacacaacatcacgcggtcgccgcgacacggtggcaagtgatacgagcggcacgagtggcggaccacgtccggatgtctcctcggacgttgcaaccggtggtagccaagcacaaacgctgtggatattgattttcaaaggccatcctcgcgatatccagagcacgcgggttacagaactttatgtatcttttaacgagtccgaaagcgtcaatgtgacattttcgctccgtggacactacccgtcctttagggtacgcgaagtctggaacgggccatcgccacgcctcagacgaaatttctataggcgactggctgtgtcaacgataacaagcacgggaaccgcgttggacatgcgcgttagagatgttgtatcgggtacgccggcgaataactcggaacctgatttgacaagccagagttgggtgggagatatgatcaccgtgttacaagaagcgaatctcatcacggacgaagaaggcgacaatgctttgaatggaatggtaaattatatctcgcaggcaccatggcagtaagtgaagtcttggaagttacaatcgcaggatcgccgcgagggagcgccagctttttgatgagtcgataacggagttgagtcaggcgaggattgattgtacctggtagacgttggcgctctcggccatgtgatatattcaaccgatcaagagcacggcagttggaacatgaaacgtgaaacggtagcggcagtcgctgacacagcgacatccgagccgaagatctgcggattgacatactctgatgcaaggatataatggtgataatagggtgggaattaatagagaaaaattatggagagcatccatagatggaaggacaagaaaaagattcctacagaatggggccttgagcgatgagaatggttcgcaaagataccatagataggacgatcgtaatagtaatgctttgagaggaggacaatatgcgatgtttcagatttgatgcacagaacgagacgccgttgtaccgcaaccataccagagctcccaactgcaacactcaatagctgaggtcaacgaccacaataatcatggatacaaataaacagtgagtgcgatgacctcattcgatagaataatgcgactgaggattggatggggctggcgagctgagatcatatgtcataatgcttgtccgagatggaatgcctagcatttt

SEQ ID NO: 17816 - DNA, 1836 bp, Muscodor strobelii
  misc_feature: SGI cDNA ID NO. 565959
  misc_feature: Reduced expression when VOC is produced
  misc_feature: Encodes the peptide sequence at SEQ ID NO 17817
atggctcctctatcgcgatggggttctgtcctcggtgccctcgcctcgacagtggtctttgccaacgccgacaagagcgcaggcgactactatgtccactctctgcccggtgcgccggcgggcgacaatatcaagatgcatgccggacatattgaagtcacccccgaacacgacggcaatcttttcttttggcacttccagaacaagcacattgctaaaaagcagcgtactattatatggcttaacggaggccccggctgcagttccgaggatggtgccttgatggagattggcccctaccgtctcaaggacgagaacaccctcgaatacaacccgggcacttggaacgagttcgctaatctgatgttcgtcgacaatcccgtcggcaccggtttcagctatgtcgacaccaatagctatgtgcacgagctcgacgagatggctaaccagttcgtcactttcctcgagaagtggtacactctgttccctgagtacgaacacgatgacatttatattgcgggcgagtcctttgcaggtcagcacattccttatattgcccaggccatcctcaagcgcaacaaagagacatccaaggacccatggaacataaaaggactcctgattggtaatggatggatctcaccaaacgaccaatatcccgcctatctctctttcgcctacgagaaaggcatcgttaagaagggctctgagaccggtaccaagctcgaggaacagctcaaggcttgccgcgccgagatgaaggagcccaagggcagccaggtggacaaccgggtttgcgaacagattctgaatgacatgctccggatgacgcagactaaggagaacggcgaaaccaagtgtgtcaatatgtacgacgttcgcttgaccgacacctaccccagctgcggcatgaactggccccccgatttgaaatacgtcacaccctatcttcgcaagtccgaggttacttccgcgctacatctcaacacgaacaagaacacgggctggacggaatgcaacggcgctgttggaaacgctttcagcaccaagaactcccagccctctattaagctgctgcctgaaatcctcaaggaagtccccattctgttgttctctggaggcgaggatcttatctgcaaccatatcggtacggagtccctgattagcaatcttgaatggaacggcggaaaaggtttcgagacgtctcctggcaattgggcacctcgccgcgactggacagttgatggtgaggctgctggtttctggcagggagcacgtaacttgacttatgtctacttcaacgagtcttcgcacatggttcccttcgattaccctcggcggtcgcgcgacatgttggatagatttactggtgtcgatattacctctattggcggagttccccttgagagtaaactcgacggcgagaaactccccgatacgacagttggtggtgcaaccaaccacacgacgacgacggaggaagaccaggctgagaaagataaggagatcaatgaagcgaaatgggctgcctaccaaagatctggtgaagttgtccttacgattgttgccattggggctgccatctggggattcattatctatcgatcgaggaagcgaactgcgggttacaccggtcttccgctcgtttccgagaacggaaacccgttacagacattcagggatagtcgacagaggacgagagatgtggaggctggagacttcgatgagaggcagttagatgacttacacgtcacttcgccgacagacggggagaggtattccgttggcgaggatagcgatgatgaaagtatagctggaagggggaagaagcagtga

SEQ ID NO: 17817 - protein, 611 aa, Muscodor strobelii
  misc_feature: SGI Peptide ID NO. 565959
  misc_feature (36)..(458): Pfam Id: PF00450 Pfam Desc: Serine carboxypeptidase
  misc_feature (2)..(607): NCBI GI: 156043101 Blast Desc: SS1G_10553 [Sclerotinia sclerotiorum 1980] gi|154694941|gb|EDN94679.1| SS1G_10553 [Sclerotinia sclerotiorum 1980]
  misc_feature (1)..(609): NCBI GI: 164426395 Blast Desc: NCU04316 [Neurospora crassa OR74A] gi|157071319|gb|EAA31726.2| NCU04316 [Neurospora crassa OR74A]
  misc_feature (1)..(609): NCBI GI: 28950176 Blast Desc: related to KEX1 protein precursor [Neurospora crassa]
  misc_feature (28)..(611): NCBI GI: 39974157 Blast Desc: MGG_00775 [Magnaporthe grisea 70-15] gi|145018289|gb|EDK02568.1| MGG_00775 [Magnaporthe grisea 70-15]
  misc_feature (10)..(596): NCBI GI: 116197763 Blast Desc: CHGG_07037 [Chaetomium globosum CBS 148.51] gi|88178316|gb|EAQ85784.1| CHGG_07037 [Chaetomium globosum CBS 148.51]
  misc_feature (6)..(588): NCBI GI: 256731776 Blast Desc: NECHADRAFT_69476 [Nectria haematococca mpVI 77-13-4]
  misc_feature (50)..(611): NCBI GI: 171693775 Blast Desc: protein product [Podospora anserina] gi|170946836|emb|CAP73640.1| protein product [Podospora anserina]
  misc_feature (26)..(587): NCBI GI: 46137259 Blast Desc: FG10145.1 [Gibberella zeae PH-1]
  misc_feature (1)..(611): NCBI GI: 261351972 Blast Desc: carboxypeptidase KEX1 [Verticillium albo-atrum VaMs.102]
  misc_feature (46)..(611): NCBI GI: 154300944 Blast Desc: BC1G_10610 [Botryotinia fuckeliana B05.10] gi|150856358|gb|EDN31550.1| BC1G_10610 [Botryotinia fuckeliana B05.10]
  misc_feature (30)..(467): SWISSPROT Homolog: EC 3.4.16.6 Carboxypeptidase D
  misc_feature: Useful for introducing or modulating the production of volatile compounds
MAPLSRWGSVLGALASTVVFANADKSAGDYYVHSLPGAPAGDNIKMHAGHIEVTPEHDGNLFFWHFQNKHIAKKQRTIIWLNGGPGCSSEDGALMEIGPYRLKDENTLEYNPGTWNEFANLMFVDNPVGTGFSYVDTNSYVHELDEMANQFVTFLEKWYTLFPEYEHDDIYIAGESFAGQHIPYIAQAILKRNKETSKDPWNIKGLLIGNGWISPNDQYPAYLSFAYEKGIVKKGSETGTKLEEQLKACRAEMKEPKGSQVDNRVCEQILNDMLRMTQTKENGETKCVNMYDVRLTDTYPSCGMNWPPDLKYVTPYLRKSEVTSALHLNTNKNTGWTECNGAVGNAFSTKNSQPSIKLLPEILKEVPILLFSGGEDLICNHIGTESLISNLEWNGGKGFETSPGNWAPRRDWTVDGEAAGFWQGARNLTYVYFNESSHMVPFDYPRRSRDMLDRFTGVDITSIGGVPLESKLDGEKLPDTTVGGATNHTTTTEEDQAEKDKEINEAKWAAYQRSGEVVLTIVAIGAAIWGFIIYRSRKRTAGYTGLPLVSENGNPLQTFRDSRQRTRDVEAGDFDERQLDDLHVTSPTDGERYSVGEDSDDESIAGRGKKQ

SEQ ID NO: 17818 - DNA, 2475 bp, Muscodor strobelii
  misc_feature: SGI EST ID NO. CUFF.41933.0
  misc_feature: Variant of the nucleotide sequence at SEQ ID NO 17816
gctgcgactcgtacgcaagaccccagctgcactgcaaggagatcggcaggagaaacggccaggtgaagcgacaagagacgggagtggccacctcacttctttcaccctccaacgattctccatcatcagtttttgtttttatttccaacagtttcatttcccttcatccactcatttcttacgactaattacttgaacattgagaagcactcctaatagcttacctcggataaggacgaccaaaagtttaagcaacatcgatgggcagatagacaggaagccggtttcaactccattcacccggtcgaccgagacggcattcgcttgcgaacgcgccaacactcacccgatagactgccatcatggctcctctatcgcgatggggttctgtcctcggtgccctcgcctcgacagtggtctttgccaacgccgacaagagcgcaggcgactactatgtccactctctgcccggtgcgccggcgggcgacaatatcaagatgcatgccggacatattgaagtcacccccgaacacgacggcaatcttttcttttggcacttccagaacaagcacattgctaaaaagcagcgtactattatatggcttaacggaggccccggctgcagttccgaggatggtgccttgatggagattggcccctaccgtctcaaggacgagaacaccctcgaatacaacccgggcacttggaacgagttcgctaatctgatgttcgtcgacaatcccgtcggcaccggtttcagctatgtcgacaccaatagctatgtgcacgagctcgacgagatggctaaccagttcgtcactttcctcgagaagtggtacactctgttccctgagtacgaacacgatgacatttatattgcgggcgagtcctttgcaggtcagcacattccttatattgcccaggccatcctcaagcgcaacaaagagacatccaaggacccatggaacataaaaggactcctgattggtaatggatggatctcaccaaacgaccaatatcccgcctatctctctttcgcctacgagaaaggcatcgttaagaagggctctgagaccggtaccaagctcgaggaacagctcaaggcttgccgcgccgagatgaaggagcccaagggcagccaggtggacaaccgggtttgcgaacagattctgaatgacatgctccggatgacgcagactaaggagaacggcgaaaccaagtgtgtcaatatgtacgacgttcgcttgaccgacacctaccccagctgcggcatgaactggccccccgatttgaaatacgtcacaccctatcttcgcaagtccgaggttacttccgcgctacatctcaacacgaacaagaacacgggctggacggaatgcaacggcgctgttggaaacgctttcagcaccaagaactcccagccctctattaagctgctgcctgaaatcctcaaggaagtccccattctgttgttctctggaggcgaggatcttatctgcaaccatatcggtacggagtccctgattagcaatcttgaatggaacggcggaaaaggtttcgagacgtctcctggcaattgggcacctcgccgcgactggacagttgatggtgaggctgctggtttctggcagggagcacgtaacttgacttatgtctacttcaacgagtcttcgcacatggttcccttcgattaccctcggcggtcgcgcgacatgttggatagatttactggtgtcgatattacctctattggcggagttccccttgagagtaaactcgacggcgagaaactccccgatacgacagttggtggtgcaaccaaccacacgacgacgacggaggaagaccaggctgagaaagataaggagatcaatgaagcgaaatgggctgcctaccaaagatctggtgaagttgtccttacgattgttgccattggggctgccatctggggattcattatctatcgatcgaggaagcgaactgcgggttacaccggtcttccgctcgtttccgagaacggaaacccgttacagacattcagggatagtcgacagaggacgagagatgtggaggctggagacttcgatgagaggcagttagatgacttacacgtcacttcgccgacagacggggagaggtattccgttggcgaggatagcgatgatgaaagtatagctggaagggggaagaagcagtgagcaagctgcggcctcacccagatgctaggattagtgtcagtagagcgacaaggtttgctaaagaaggacaagtgagaggtggccattgtgtaaaatttgggaatggaaatggcgtctgtttagcggctatcaatgagagcatgaaactgagatccttgggtttcagatgttcgaatgagagcctaattgtatctacactatctacggagtttttctttaaaccaggttctttctgtatacatcactatagagtatgtgtgtttcgaggcgtccgtcg

SEQ ID NO: 17819 - DNA, 3807 bp, Muscodor strobelii
  misc_feature: SGI cDNA ID NO. 565960
  misc_feature: Encodes the peptide sequence at SEQ ID NO 17820
atggcaccgacgggcggaaccccgggcgccgggcgagggcagagcactgctgtgcccagtacggcggcgttcaacttcgcagatcggtcggttgcggcgtccaactcgacgctcaatgcgtggatgggcggccgtcgtcgaccgacatggctcgccaatgcaaagcctgtccagcccacgcctcgtcccatagcaccaccaccagcgcagtcgccggtgcagtcaccgcaaccgcaaccacaatcaccaggcttgccggcgtcattggacttgccccggcctaagtcatcgtcgatcgtctccgtccgatcaccattatcatctcaccttcaaccgcagcaagcaccgcaagcccagcttccagcacctgagcaggccccccaccagcctcaggatcctcctccgcttcagccccagctcgaacccggtcctcgagaatctcatccaaagtctcaatctcgatcaccaacaacaacggccgctccccaaccagctccactggccataccacagacaatctctgtctcgcttccggtggccgcacctatctcgactgcaacgactgcctcgccgtcgtggccatcctctgttctgtcagcaccgcgcctctcagctatttcagccgagaccgttcccccgtctcccgctccgagcgacgaaccaagtccatgcgcctcggcgccgcacgacagtcccggcgccagccaccaacggccgctcgaggctcgcgaaggccttcccaccgtgaatgctcgttttgtctttgacgaacatgcgagcgtcccgccgatgcagccgtggcagaaccaagtctcaggccctccaccacagccccaagctcggcctgtcaccgtcccgtcgtcgtcagcagccaacatggttctgaacacaccgcccactccgtccgccgggacatttcgcgacgcgagtgccccgtcacagggctctgcggatgtacctcaaatcgtaccgaacaagaagaggcgtgttacacagagacctgccatcgactttctcaatttcattgaggcgccagccaagttcaagcagttcatagagcaggtggggggcgaggatggcctcgacgactcgtgcgcccgaccaagggtcatgctcctgagaaacgccctcaaggagggcgatatcttctttgtcgcattgcaccagctcttctgcgcatggacgctgaaccaggcggacgtgcatcggctttgcaacgagagaaatatggccgacacctcgtggctggacacgtcgctggggctcttagggtcgatcattaagagtaattcgatgctcaagccagacatgttgcattggttcgccaatttccccattcctcttgcccacatgcgcagccaagagctctacaacgccgtgctagaccaggtcatcatgttcctgttccgtatgtcgagccaatggcaactggtgaactcgaggcacgtgcagctaggctatcctctgctgatggtcgagcttctcaataatttcatgctctactcgccgtgtcttcagatgattgtgttccgggcgtcgagaaggtctatcggcatgcaggatcagcctttcggcttgcagatggacgagatcttcaagaacgatcagaacaatcaccggaaccaaaatgacgggactttctctgtgcagttcgagaagaatgcatacgacagatacaacggcagcttggtagaagcgtacaagcggattgtggctcaggcgagtcaaccccaacggtctccctccgttcctggcagcgttccttccccgagcaatggccacttcatcccttcggcatcatcgactccccgcactccaggcttcccatcacctgtcaacaatcatgcccaaatgcaaatgaacactctggcaccgcgatctgtacttccgtcgacaagctccgggccaccgaactcgacaactgccccgaatgccatgtactcgccgcaattcggcatcacgaccactccgatcgctccaggccatactccgccaaacacaatgcctcctttccagcctccgaatcctaacaaccagccggctcagttcggcggaccagagtttcagacgccagcgcatgctgctcagcaccttcaacacgaacagcaacgccaaatgcatcttcaaaggcaacagcaacagatgcacatggcccaacaacagtatcaccagcagcaacggcatcttcagcagcaactccagcagcaacagcagagccaaagtcagcaacaacttcaacaattgcagcaacaactacgccggcagtcacagcagaattttcagcaggtcatgtcgagtaacgtgcacccaagacctccaagagcaacacccatccatggacagcagcccttgcctcgccaagcagcaatggctacacagatgccaccccggccaccgagtaggattttgcactcagtcccctctgcctctacaaccgcttctgcaagtcctcagccggttccagccaatcttcacttgcaattgcctcctcagatgcctttcgtaatgcctagtggtcaacccatctctccagggtttgctcctccagcaggattcaaaccaccaaacgggcaagcggcgggccagctaatcccacccccaggttttagaatcaatcttcaagaccatcctcacacccagtatgagaagaggtcagttcacagctctctccaccaggcccatcttcggagccccaagagaatgcccatgtttttacccaaaaggggacctcctgagaggtattaccaggccatcaagaagcttgtttgcggaccagtccaaatctcgcctcagaatgggttgtacgagattcgatttgatatttcggtcgacgattttaagcacttgtctttcgatacatcaggtccggattccactgctctggccaatcgtttcttgaatgaatcgactcgtgttcgtgtgcggtgctgcaacagccgtgctactgaaaacttccctgagcatctctgggtgacttcggagacagtttggccagaacatgttttcccgacactcaatgggaaagtcctaggtatcaggcgcaaacagcaccattccaaggatcttccggtcgaagtatcgcaatatgttgtcgccggggagaaccaacttaagattgcagtaccagctcaagtcatccggcagaatcagaccccatacattgctgtggagattgttgaaatcttgagccattcatccattctccgaatggtgctaacatctgcaacgaggcccgcagatgacactcggcaggttattcggactcgcttgactggcagctcacttgcacaaggcggggacgaaggcgatgagcttgaaatgtctactgacggactatcaattgaccttgccgatcctttcaccaagaccatcttcaacataccagtccgtggaaaggcctgtacccatttggagtgtttcgatctcgagaattggctcaatacgcggactggtaaaaagtcttgcgaatgcaggaacagctccacttgtccgtgtccgaaggagccgtcgttcgtggataaatggaagtgtccaatatgcgacggtgatgcacgaccgtacagtctgctcgccgacgattacctagctaatgttcgacaagatttagagcagaagaatctccttcgcactaaatctatcaccgcttatgcggacggatcctggaaacccaacgagactgaagatgatagtgacttcgacagtgacgacggaggaacgccagcaggaaccaatcctcggaactcaaagcaaccctcaaagcaaccttcaaagccacctgtggaagtcattgaacttgatgatgactag

SEQ ID NO: 17820 - protein, 1268 aa, Muscodor strobelii
  misc_feature: SGI Peptide ID NO. 565960
  misc_feature (1114)..(1183): Pfam Id: PF02891 Pfam Desc: MIZ/SP-RING zinc finger
  misc_feature (1127)..(1146): Pfam Id: PF02891 Pfam Desc: MIZ/SP-RING zinc finger
  misc_feature (912)..(1266): NCBI GI: 261355744 Blast Desc: conserved [Verticillium albo-atrum VaMs.102]
  misc_feature (863)..(1268): NCBI GI: 156065905 Blast Desc: SS1G_00963 [Sclerotinia sclerotiorum 1980] gi|154691822|gb|EDN91560.1| SS1G_00963 [Sclerotinia sclerotiorum 1980]
  misc_feature (863)..(1268): NCBI GI: 85089646 Blast Desc: NCU09846 [Neurospora crassa OR74A] gi|28919356|gb|EAA28808.1| [Neurospora crassa OR74A]
  misc_feature (866)..(1268): NCBI GI: 46136999 Blast Desc: FG10015.1 [Gibberella zeae PH-1]
  misc_feature (863)..(1222): NCBI GI: 39975209 Blast Desc: MGG_00249 [Magnaporthe grisea 70-15] gi|145018885|gb|EDK03164.1| MGG_00249 [Magnaporthe grisea 70-15]
  misc_feature (859)..(1237): NCBI GI: 121710460 Blast Desc: MIZ zinc finger domain protein [Aspergillus clavatus NRRL 1] gi|119400996|gb|EAW11420.1| MIZ zinc finger domain protein [Aspergillus clavatus NRRL 1]
  misc_feature (889)..(1236): NCBI GI: 159128882 Blast Desc: MIZ zinc finger domain protein [Aspergillus fumigatus A1163]
  misc_feature (889)..(1236): NCBI GI: 70989241 Blast Desc: MIZ zinc finger domain protein [Aspergillus fumigatus Af293] gi|66847101|gb|EAL87432.1| MIZ zinc finger domain protein [Aspergillus fumigatus Af293]
  misc_feature (889)..(1236): NCBI GI: 119498283 Blast Desc: MIZ zinc finger protein [Neosartorya fischeri NRRL 181] gi|119414063|gb|EAW24002.1| MIZ zinc finger protein [Neosartorya fischeri NRRL 181]
  misc_feature (367)..(1266): NCBI GI: 119188971 Blast Desc: CIMG_04533 [Coccidioides immitis RS]
MAPTGGTPGAGRGQSTAVPSTAAFNFADRSVAASNSTLNAWMGGRRRPTWLANAKPVQPTPRPIAPPPAQSPVQSPQPQPQSPGLPASLDLPRPKSSSIVSVRSPLSSHLQPQQAPQAQLPAPEQAPHQPQDPPPLQPQLEPGPRESHPKSQSRSPTTTAAPQPAPLAIPQTISVSLPVAAPISTATTASPSWPSSVLSAPRLSAISAETVPPSPAPSDEPSPCASAPHDSPGASHQRPLEAREGLPTVNARFVFDEHASVPPMQPWQNQVSGPPPQPQARPVTVPSSSAANMVLNTPPTPSAGTFRDASAPSQGSADVPQIVPNKKRRVTQRPAIDFLNFIEAPAKFKQFIEQVGGEDGLDDSCARPRVMLLRNALKEGDIFFVALHQLFCAWTLNQADVHRLCNERNMADTSWLDTSLGLLGSIIKSNSMLKPDMLHWFANFPIPLAHMRSQELYNAVLDQVIMFLFRMSSQWQLVNSRHVQLGYPLLMVELLNNFMLYSPCLQMIVFRASRRSIGMQDQPFGLQMDEIFKNDQNNHRNQNDGTFSVQFEKNAYDRYNGSLVEAYKRIVAQASQPQRSPSVPGSVPSPSNGHFIPSASSTPRTPGFPSPVNNHAQMQMNTLAPRSVLPSTSSGPPNSTTAPNAMYSPQFGITTTPIAPGHTPPNTMPPFQPPNPNNQPAQFGGPEFQTPAHAAQHLQHEQQRQMHLQRQQQQMHMAQQQYHQQQRHLQQQLQQQQQSQSQQQLQQLQQQLRRQSQQNFQQVMSSNVHPRPPRATPIHGQQPLPRQAAMATQMPPRPPSRILHSVPSASTTASASPQPVPANLHLQLPPQMPFVMPSGQPISPGFAPPAGFKPPNGQAAGQLIPPPGFRINLQDHPHTQYEKRSVHSSLHQAHLRSPKRMPMFLPKRGPPERYYQAIKKLVCGPVQISPQNGLYEIRFDISVDDFKHLSFDTSGPDSTALANRFLNESTRVRVRCCNSRATENFPEHLWVTSETVWPEHVFPTLNGKVLGIRRKQHHSKDLPVEVSQYVVAGENQLKIAVPAQVIRQNQTPYIAVEIVEILSHSSILRMVLTSATRPADDTRQVIRTRLTGSSLAQGGDEGDELEMSTDGLSIDLADPFTKTIFNIPVRGKACTHLECFDLENWLNTRTGKKSCECRNSSTCPCPKEPSFVDKWKCPICDGDARPYSLLADDYLANVRQDLEQKNLLRTKSITAYADGSWKPNETEDDSDFDSDDGGTPAGTNPRNSKQPSKQPSKPPVEVIELDDD

SEQ ID NO: 17821 - DNA, 4838 bp, Muscodor strobelii
  misc_feature: SGI EST ID NO. CUFF.41997.0
  misc_feature: Variant of the nucleotide sequence at SEQ ID NO 17819
tgttgggggatgtcgcgggggctaatcatactattgccttagatagacgcggttaagatccatctcgcattctcttagatcttgagtctggagtttgaaatcttagatcccccgggcccctacatacatacccgtccatacacttccaggtagcctcgtcgacatcccaccaagacggggtgccaggtgcctcttcccaactctcagatccacgatcctctgtagcctcacggctgtcgacctcatatggcaccgacgggcggaaccccgggcgccgggcgagggcagagcactgctgtgcccagtacggcggcgttcaacttcgcagatcggtcggttgcggcgtccaactcgacgctcaatgcgtggatgggcggccgtcgtcgaccgacatggctcgccaatgcaaagcctgtccagcccacgcctcgtcccatagcaccaccaccagcgcagtcgccggtgcagtcaccgcaaccgcaaccacaatcaccaggcttgccggcgtcattggacttgccccggcctaagtcatcgtcgatcgtctccgtccgatcaccattatcatctcaccttcaaccgcagcaagcaccgcaagcccagcttccagcacctgagcaggccccccaccagcctcaggatcctcctccgcttcagccccagctcgaacccggtcctcgagaatctcatccaaagtctcaatctcgatcaccaacaacaacggccgctccccaaccagctccactggccataccacagacaatctctgtctcgcttccggtggccgcacctatctcgactgcaacgactgcctcgccgtcgtggccatcctctgttctgtcagcaccgcgcctctcagctatttcagccgagaccgttcccccgtctcccgctccgagcgacgaaccaagtccatgcgcctcggcgccgcacgacagtcccggcgccagccaccaacggccgctcgaggctcgcgaaggccttcccaccgtgaatgctcgttttgtctttgacgaacatgcgagcgtcccgccgatgcagccgtggcagaaccaagtctcaggccctccaccacagccccaagctcggcctgtcaccgtcccgtcgtcgtcagcagccaacatggttctgaacacaccgcccactccgtccgccgggacatttcgcgacgcgagtgccccgtcacagggctctgcggatgtacctcaaatcgtaccgaacaagaagaggcgtgttacacagagacctgccatcgactttctcaatttcattgaggcgccagccaagttcaagcagttcatagagcaggtggggggcgaggatggcctcgacgactcgtgcgcccgaccaagggtcatgctcctgagaaacgccctcaaggagggcgatatcttctttgtcgcattgcaccagctcttctgcgcatggacgctgaaccaggcggacgtgcatcggctttgcaacgagagaaatatggccgacacctcgtggctggacacgtcgctggggctcttagggtcgatcattaagagtaattcgatgctcaagccagacatgttgcattggttcgccaatttccccattcctcttgcccacatgcgcagccaagagctctacaacgccgtgctagaccaggtcatcatgttcctgttccgtatgtcgagccaatggcaactggtgaactcgaggcacgtgcagctaggctatcctctgctgatggtcgagcttctcaataatttcatgctctactcgccgtgtcttcagatgattgtgttccgggcgtcgagaaggtctatcggcatgcaggatcagcctttcggcttgcagatggacgagatcttcaagaacgatcagaacaatcaccggaaccaaaatgacgggactttctctgtgcagttcgagaagaatgcatacgacagatacaacggcagcttggtagaagcgtacaagcggattgtggctcaggcgagtcaaccccaacggtctccctccgttcctggcagcgttccttccccgagcaatggccacttcatcccttcggcatcatcgactccccgcactccaggcttcccatcacctgtcaacaatcatgcccaaatgcaaatgaacactctggcaccgcgatctgtacttccgtcgacaagctccgggccaccgaactcgacaactgccccgaatgccatgtactcgccgcaattcggcatcacgaccactccgatcgctccaggccatactccgccaaacacaatgcctcctttccagcctccgaatcctaacaaccagccggctcagttcggcggaccagagtttcagacgccagcgcatgctgctcagcaccttcaacacgaacagcaacgccaaatgcatcttcaaaggcaacagcaacagatgcacatggcccaacaacagtatcaccagcagcaacggcatcttcagcagcaactccagcagcaacagcagagccaaagtcagcaacaacttcaacaattgcagcaacaactacgccggcagtcacagcagaattttcagcaggtcatgtcgagtaacgtgcacccaagacctccaagagcaacacccatccatggacagcagcccttgcctcgccaagcagcaatggctacacagatgccaccccggccaccgagtaggattttgcactcagtcccctctgcctctacaaccgcttctgcaagtcctcagccggttccagccaatcttcacttgcaattgcctcctcagatgcctttcgtaatgcctagtggtcaacccatctctccagggtttgctcctccagcaggattcaaaccaccaaacgggcaagcggcgggccagctaatcccacccccaggttttagaatcaatcttcaagaccatcctcacacccagtatgagaagaggtcagttcacagctctctccaccaggcccatcttcggagccccaagagaatgcccatgtttttacccaaaaggggacctcctgagaggtattaccaggccatcaagaagcttgtttgcggaccagtccaaatctcgcctcagaatgggttgtacgagattcgatttgatatttcggtcgacgattttaagcacttgtctttcgatacatcaggtccggattccactgctctggccaatcgtttcttgaatgaatcgactcgtgttcgtgtgcggtgctgcaacagccgtgctactgaaaacttccctgagcatctctgggtgacttcggagacagtttggccagaacatgttttcccgacactcaatgggaaagtcctaggtatcaggcgcaaacagcaccattccaaggatcttccggtcgaagtatcgcaatatgttgtcgccggggagaaccaacttaagattgcagtaccagctcaagtcatccggcagaatcagaccccatacattgctgtggagattgttgaaatcttgagccattcatccattctccgaatggtgctaacatctgcaacgaggcccgcagatgacactcggcaggttattcggactcgcttgactggcagctcacttgcacaaggcggggacgaaggcgatgagcttgaaatgtctactgacggactatcaattgaccttgccgatcctttcaccaagaccatcttcaacataccagtccgtggaaaggcctgtacccatttggagtgtttcgatctcgagaattggctcaatacgcggactggtaaaaagtcttgcgaatgcaggaacagctccacttgtccgtgtccgaaggagccgtcgttcgtggataaatggaagtgtccaatatgcgacggtgatgcacgaccgtacagtctgctcgccgacgattacctagctaatgttcgacaagatttagagcagaagaatctccttcgcactaaatctatcaccgcttatgcggacggatcctggaaacccaacgagactgaagatgatagtgacttcgacagtgacgacggaggaacgccagcaggaaccaatcctcggaactcaaagcaaccctcaaagcaaccttcaaagccacctgtggaagtcattgaacttgatgatgactagacgccattctccaattcgctacagacttgcattactgcaattaccaacagtcaaaaacgcttgctaagaacatctaaagttcaacctattcactgaactattcaatggactcgaatatttcctattatttctaatgatcattacacgagctcggtgagctctactactcttatcatggtagagagcagaagaacatgtttcgacagaactattcacgggactttgctttcaaatggagcaacggtgtttacggacgatcatctttcacatgagacagcagttcgcgactataccccgctgtttccacgcgtttgatttgcgcgttgcttttgctttccttctctttgcttcagggaaagcgtggagttcggatggaagatcgacctcggatgaaaatcgagttgcgattgattgctttcacatgggacggcatggatggcgattcgggttggcattcggcacggcgttacgtgtctattcggtggctatgcctatggggggttaagggcttctaaggatagcttcttcatggtgcaataaaattgttgtgatactgtacttacatgtgttaatcgagtgcaaatgattaagagccggattgtgcatagtgtattaagaggttgagatttaggcagctgtcacggatgaattgggtcgtgataggtatacttgatatggcagaatgcggcgaattaataaggctgccatagataattgctgaagttcttagtggatcacctggtaatctaatcatgggctatcgtgttgttatacagttgttctcg

SEQ ID NO: 17822 - DNA, 2907 bp, Muscodor strobelii
  misc_feature: SGI cDNA ID NO. 565961
  misc_feature: Reduced expression when VOC is produced
  misc_feature: Encodes the peptide sequence at SEQ ID NO 17823
atggcattgagaccgcccactgacgttcgccccgatgcgggtgacatcctcgtcgtcatacacgactttcaggcaaggagctccgacgaattaagcttggcaaagggcgaccgtgttgaattgatagagcgagacgacgaatttggcgacggttggtttttggggcgtcacatggtaaatgggaacaatggcttgtttcccgaagtctataccaggccagcacccaagggccctactgttgctgcactcaagcccgcaaacaacgcgatccagactccgcctctcagcaatccccaacccatcgagccagtcaagcatatagcctcgatgcctatgcaatcaccagcacctatcccgagcaccactccgcctgctcccgtattcgatcagcccagtccacctgtcactctccccctaggctccgcaaaacctgacattagatctgtctcggctccgacggcacctctgaccagcaagtattccgctcccagcgagggcgtctcacgacaagacagccaagtactccacgatactctgacggtcattgacgagcacatcaccgatctgcactcgacgccatccaatggccacctccaccatggtaacgactcgggcagtgagtatagttcgcagatgcaagatcgactttcgtatatccagggcgaagagaccgatgaggaagaggaggccccgcatagccgctctgaggtggagggttggagcgctgacgatgttgccgaatatctcttcactatgggtgtagagaagaagcactgtgaagtgttccgagaccaggagattgcgggtgaagtgcttctaggcatggaccagtcgtcactgtttctcaaggctttcgatcttggatctgttggaaggcgcttgaagacctggcaaaagatcaagaacctgcaagatgaggtcaatggcggtgggctcgctgccagacgccagacgtatggcagtgatgcgggatcggaagattcgagagtcaccggaagacgcagaagtcgaacgaacactctaacaaactcacaaaaattatctcctatcgaggaccgtccatcttcggtgcaggctaagcgcctgtctcagacccccagaatggatcccatgatgtcaatgggtcctgtgtcaccggcgaaactcactgagaacagggcaaatcatcagaagcgaccatccgcagcttctgttcgtgagctccatcattcacgccgccattcatccacagattatcgaatgccaggtgctgctcctccgtccgctaccggcgggaccccaaagcttgccaattctggtacctttccgcagacagagggatcgcacaagaaacaggcctcttttgaccgaaactggacaatgggtgcattgggcggtcagagtcccggtcgacctttatcttccgctggtctgcacgacatgtctaatggatccgaccttaatctcactcaagactcctcgggcgacctagatcgtggctatttctcaggaaccgaaatcgatgggcgaagacgcaacgtgcttaagaagcgcgacagcattgcttcccagaataacccggcaagctacgcagagcagcaacgagtgcgtagcgcaactgctttgtctcgacgatctcgctttggaagcgtagattcgacgagagacacgaccccaccatcggccgcccaggtgtactacggtataagtggcgatcatcgtaagaacgcgtcgaccacgaccacggagtcataccgaccgccgcctcccgctaaggatggaccgtcgccgactgtgaccaaactggacgagaacgctgggcccgctaaccaacagggtggttggctgtccaactcaaacagcaggttggctgcattcggtggactgagggctatatccgatgctgtagtcaacagtgatcgctccaaattcggtgcgcccaccgtcgcgtcagctaaggattcgccattgcaatcacctgttagaaccagttctggcacaccttcagcggggcccagcttcgacatggaatcgccagacgcaagaagcccacattctgcaactacgatggatagccgtaagcccgtgaagaagacaaagaaggaaaccagtgcatatctgcgtggtctccagaaagtccctccgcgagaggcgatccaaggtgctgactacagtggctggatgaagaagaaaaattcacatctcatgacaacctggaagccccgactcttcgttctgaagggccgccgattgtcttactactattccgaagatgataccgaagagaagggtttgatcgatatttctttccatcgggttctacctgccgacaatgaacgacttacgggactacatgcgacattgacgggtgcgagtaacagcccgatgacgcctgcagacagcagtctccagactctggctgagagcgacgccgcggctggagctgctatcgagaagggagcggatgccatgttcatcttcaagctcgtgcctcctcgagctggactctctaaggctgtcaatttcaccaagccgactgtacactactttgccgtgcccaaccttcagcagggccgtgcttggatggcagcattgatgaaggcgactatcgaccgcgacgacagccaaccgatgacttcaacatatcagcagaagaccatctctcttgctaaggccagacagatgcgccaccgcccacctgctctcatgaacctcgatgagaaggttgaagaagtcccgagccctgttgacgaggagaacaaaggcggcctgggcatctcgttcaatgaggttgacagtgcagtgtctggtctcgacaaaccaggtggccaacgcgtcgaaagtgcaaaagtcccgaaatcaatgttctctggcgagaacgatgataatgacttcagaagctttgagccatcaccgcagagtgcctga

SEQ ID NO: 17823 - protein, 968 aa, Muscodor strobelii
  misc_feature: SGI Peptide ID NO. 565961
  misc_feature (715)..(863): Pfam Id: PF00169 Pfam Desc: PH domain
  misc_feature (237)..(306): Pfam Id: PF07647 Pfam Desc: SAM domain (Sterile alpha motif)
  misc_feature (15)..(74): Pfam Id: PF00018 Pfam Desc: SH3 domain
  misc_feature (16)..(74): Pfam Id: PF07653 Pfam Desc: Variant SH3 domain
  misc_feature (1)..(944): NCBI GI: 256732035 Blast Desc: NECHADRAFT_41472 [Nectria haematococca mpVI 77-13-4]
  misc_feature (22)..(954): NCBI GI: 171692047 Blast Desc: protein product [Podospora anserina] gi|170945972|emb|CAP72773.1| protein product [Podospora anserina]
  misc_feature (6)..(940): NCBI GI: 18307433 Blast Desc: related to budding protein BOI2 [Neurospora crassa]
  misc_feature (10)..(954): NCBI GI: 116180182 Blast Desc: CHGG_00719 [Chaetomium globosum CBS 148.51] gi|88185016|gb|EAQ92484.1| CHGG_00719 [Chaetomium globosum CBS 148.51]
  misc_feature (1)..(943): NCBI GI: 46137001 Blast Desc: FG10016.1 [Gibberella zeae PH-1]
  misc_feature (8)..(943): NCBI GI: 39971989 Blast Desc: MGG_07310 [Magnaporthe grisea 70-15] gi|145019817|gb|EDK04045.1| MGG_07310 [Magnaporthe grisea 70-15]
  misc_feature (1)..(968): NCBI GI: 261355742 Blast Desc: conserved [Verticillium albo-atrum VaMs.102]
  misc_feature (6)..(940): NCBI GI: 164424765 Blast Desc: NCU06648 [Neurospora crassa OR74A] gi|157070650|gb|EAA31645.2| conserved [Neurospora crassa OR74A]
  misc_feature (202)..(963): NCBI GI: 156065903 Blast Desc: SS1G_00962 [Sclerotinia sclerotiorum 1980] gi|154691821|gb|EDN91559.1| SS1G_00962 [Sclerotinia sclerotiorum 1980]
  misc_feature (1)..(932): NCBI GI: 189197655 Blast Desc: polarized growth protein Boi2 [Pyrenophora tritici-repentis Pt-1C-BFP] gi|187981113|gb|EDU47739.1| polarized growth protein Boi2 [Pyrenophora tritici-repentis Pt-1C-BFP]
  misc_feature: Useful for introducing or modulating the production of volatile compounds
MALRPPTDVRPDAGDILVVIHDFQARSSDELSLAKGDRVELIERDDEFGDGWFLGRHMVNGNNGLFPEVYTRPAPKGPTVAALKPANNAIQTPPLSNPQPIEPVKHIASMPMQSPAPIPSTTPPAPVFDQPSPPVTLPLGSAKPDIRSVSAPTAPLTSKYSAPSEGVSRQDSQVLHDTLTVIDEHITDLHSTPSNGHLHHGNDSGSEYSSQMQDRLSYIQGEETDEEEEAPHSRSEVEGWSADDVAEYLFTMGVEKKHCEVFRDQEIAGEVLLGMDQSSLFLKAFDLGSVGRRLKTWQKIKNLQDEVNGGGLAARRQTYGSDAGSEDSRVTGRRRSRTNTLTNSQKLSPIEDRPSSVQAKRLSQTPRMDPMMSMGPVSPAKLTENRANHQKRPSAASVRELHHSRRHSSTDYRMPGAAPPSATGGTPKLANSGTFPQTEGSHKKQASFDRNWTMGALGGQSPGRPLSSAGLHDMSNGSDLNLTQDSSGDLDRGYFSGTEIDGRRRNVLKKRDSIASQNNPASYAEQQRVRSATALSRRSRFGSVDSTRDTTPPSAAQVYYGISGDHRKNASTTTTESYRPPPPAKDGPSPTVTKLDENAGPANQQGGWLSNSNSRLAAFGGLRAISDAVVNSDRSKFGAPTVASAKDSPLQSPVRTSSGTPSAGPSFDMESPDARSPHSATTMDSRKPVKKTKKETSAYLRGLQKVPPREAIQGADYSGWMKKKNSHLMTTWKPRLFVLKGRRLSYYYSEDDTEEKGLIDISFHRVLPADNERLTGLHATLTGASNSPMTPADSSLQTLAESDAAAGAAIEKGADAMFIFKLVPPRAGLSKAVNFTKPTVHYFAVPNLQQGRAWMAALMKATIDRDDSQPMTSTYQQKTISLAKARQMRHRPPALMNLDEKVEEVPSPVDEENKGGLGISFNEVDSAVSGLDKPGGQRVESAKVPKSMFSGENDDNDFRSFEPSPQSA

SEQ ID NO: 17824 - DNA, 4238 bp, Muscodor strobelii
  misc_feature: SGI EST ID NO. CUFF.42332.0
  misc_feature: Variant of the nucleotide sequence at SEQ ID NO 17822
ggcgtgtcgcagtgtgaactctactcccatatctgctgtggtagtcttggactagtaataaaaatagccgcagtctattgttttgagctgattccgcccaaaggcagacgacaggatcacaacgcacgcacataacggccataacggccaacggaaggctcactttggagacggcagtcaccatcgctactgcctcagcgagcagcatctacacctgcactgcttaaggtcaggaaggcacagtcgccgtaggtagtgcacactgcagtgcacccaacgccgacggactgccagtgcaactctctctcgttctgtggtcgacaacctctctttggacccacgactgtctcccaccttgcaacgtcggcgagaacacaacatcaccaactccttactctcaacctctgccgacaccttcctattgtccctgttactccctattgtatacgctcgctatatacccattctagcatacttcaattccgttccgcgccgactgttatgcctactgtatgcattgccgtcgcttaacaaacaggtcccttcgtagttgcccaacctgttgataccccattctcccgtccgaggcaccgcaccacggcgaccggcccctgctccctgcccctaccttcatcgccgacacctgctcttccctacatctcgtccgttttgacccgtccactacactatctcctgtcgccgtggcactacttgccgcctggcttcgcttgcaagatggcattgagaccgcccactgacgttcgccccgatgcgggtgacatcctcgtcgtcatacacgactttcaggcaaggagctccgacgaattaagcttggcaaagggcgaccgtgttgaattgatagagcgagacgacgaatttggcgacggttggtttttggggcgtcacatggtaaatgggaacaatggcttgtttcccgaagtctataccaggccagcacccaagggccctactgttgctgcactcaagcccgcaaacaacgcgatccagactccgcctctcagcaatccccaacccatcgagccagtcaagcatatagcctcgatgcctatgcaatcaccagcacctatcccgagcaccactccgcctgctcccgtattcgatcagcccagtccacctgtcactctccccctaggctccgcaaaacctgacattagatctgtctcggctccgacggcacctctgaccagcaagtattccgctcccagcgagggcgtctcacgacaagacagccaagtactccacgatactctgacggtcattgacgagcacatcaccgatctgcactcgacgccatccaatggccacctccaccatggtaacgactcgggcagtgagtatagttcgcagatgcaagatcgactttcgtatatccagggcgaagagaccgatgaggaagaggaggccccgcatagccgctctgaggtggagggttggagcgctgacgatgttgccgaatatctcttcactatgggtgtagagaagaagcactgtgaagtgttccgagaccaggagattgcgggtgaagtgcttctaggcatggaccagtcgtcactgtttctcaaggctttcgatcttggatctgttggaaggcgcttgaagacctggcaaaagatcaagaacctgcaagatgaggtcaatggcggtgggctcgctgccagacgccagacgtatggcagtgatgcgggatcggaagattcgagagtcaccggaagacgcagaagtcgaacgaacactctaacaaactcacaaaaattatctcctatcgaggaccgtccatcttcggtgcaggctaagcgcctgtctcagacccccagaatggatcccatgatgtcaatgggtcctgtgtcaccggcgaaactcactgagaacagggcaaatcatcagaagcgaccatccgcagcttctgttcgtgagctccatcattcacgccgccattcatccacagattatcgaatgccaggtgctgctcctccgtccgctaccggcgggaccccaaagcttgccaattctggtacctttccgcagacagagggatcgcacaagaaacaggcctcttttgaccgaaactggacaatgggtgcattgggcggtcagagtcccggtcgacctttatcttccgctggtctgcacgacatgtctaatggatccgaccttaatctcactcaagactcctcgggcgacctagatcgtggctatttctcaggaaccgaaatcgatgggcgaagacgcaacgtgcttaagaagcgcgacagcattgcttcccagaataacccggcaagctacgcagagcagcaacgagtgcgtagcgcaactgctttgtctcgacgatctcgctttggaagcgtagattcgacgagagacacgaccccaccatcggccgcccaggtgtactacggtataagtggcgatcatcgtaagaacgcgtcgaccacgaccacggagtcataccgaccgccgcctcccgctaaggatggaccgtcgccgactgtgaccaaactggacgagaacgctgggcccgctaaccaacagggtggttggctgtccaactcaaacagcaggttggctgcattcggtggactgagggctatatccgatgctgtagtcaacagtgatcgctccaaattcggtgcgcccaccgtcgcgtcagctaaggattcgccattgcaatcacctgttagaaccagttctggcacaccttcagcggggcccagcttcgacatggaatcgccagacgcaagaagcccacattctgcaactacgatggatagccgtaagcccgtgaagaagacaaagaaggaaaccagtgcatatctgcgtggtctccagaaagtccctccgcgagaggcgatccaaggtgctgactacagtggctggatgaagaagaaaaattcacatctcatgacaacctggaagccccgactcttcgttctgaagggccgccgattgtcttactactattccgaagatgataccgaagagaagggtttgatcgatatttctttccatcgggttctacctgccgacaatgaacgacttacgggactacatgcgacattgacgggtgcgagtaacagcccgatgacgcctgcagacagcagtctccagactctggctgagagcgacgccgcggctggagctgctatcgagaagggagcggatgccatgttcatcttcaagctcgtgcctcctcgagctggactctctaaggctgtcaatttcaccaagccgactgtacactactttgccgtgcccaaccttcagcagggccgtgcttggatggcagcattgatgaaggcgactatcgaccgcgacgacagccaaccgatgacttcaacatatcagcagaagaccatctctcttgctaaggccagacagatgcgccaccgcccacctgctctcatgaacctcgatgagaaggttgaagaagtcccgagccctgttgacgaggagaacaaaggcggcctgggcatctcgttcaatgaggttgacagtgcagtgtctggtctcgacaaaccaggtggccaacgcgtcgaaagtgcaaaagtcccgaaatcaatgttctctggcgagaacgatgataatgacttcagaagctttgagccatcaccgcagagtgcctgattggctgagcacaaccttgctgtgtcaagtttgatcaattttcgatcatttcatgtgagctccagccatgtgagggatctgtctgcagaaaggcgatactcgatgactaccaccaaattttcacgctggattttctaagtagcttattacaatttgcttcctcgcatccgtccaaatacccaatggcgtatagcatcacgcgcataaccatgacatctcctatgtcttattggaattagttgtccgagacacagatcggaaatcatttgtctaaagcatgtgtcttgcaatgacgggaataagggcagaccgtcgaggtgggagggaattgcgacgggaatggagcgctgatacctgatgcaatgactgaacgaggatactgataaatgtacgaaagtatgtagctttcctagccatgatcctgcgaccgcttgcgcccgacaatgccttctcgagattcaaggagccacagttgcatcttgatatggtcttagacagtaattgttgcggggagctgggtagctagcaagtaatcagatgagcactaccttagctaataaacctgtataaatattaattcgcgatggtttcctacc

SEQ ID NO: 17825 - DNA, 2001 bp, Muscodor strobelii
  misc_feature: SGI cDNA ID NO. 565962
  misc_feature: Reduced expression when VOC is produced
  misc_feature: Encodes the peptide sequence at SEQ ID NO 17826
atgagcctctttctcgcctcaagacagacctcgagggtcttgtcaagtctcattagaactcgtccaacatatcatattaagagatgtacgccgagcacatatctcgtcaaaagaagctccgtgcgaaagcgtggctatgctgtgcctcctaaatattggcaaccagcgatcagaaccgggaagaagtcagatcccctaaagatcttgttctgtggctctgatgagttcagctgtgcttctctgaaggctttattcaaagaacaggtcgagaacaaggatttgattgagaggatcgatgttgttgtgcgtcccggaaagccgacggggagggggaggaaggaaattcgggagccattactcaagggtttagcaacacagctaggtctcagtatctacgaaagggacaccttcacagggtggaacatgcctgaggatatcaacctcataatagccgtatcattcgggctcttcgtacctccacgactcttgcaagcagctaaatatggcggtctgaatttgcatccctccttactcccagatcttcgcggccctgcgccactccaccacacattgatgcaaggccgtaaaataacaggcgtcactttgcaaacactagacgacaaagcctacgaccatggggtgattctcgaccagactcaccctgatccccgccatgctgaggcattacttattccagatgactgcacgactgtaccccaacttcacgatctcgtaacaccagtcgcagcatcaatgctagtccgtagtctccgcgaaggactgcacatccagccacatgaagatagacgctggcggaagatagatgccagctcccaagatgacaaacctctgatccacgcacccaaaatcaaaaaggaagacagtcaactcacacgcactctcctccaatctctcgaagaggaaaatgcagtgcttcgagaacaaccggcgaaagcaccctcgggcacagagattactctttcgaacaaaggtctgctatcgcgataccaagacgccgtaggccctctctggtttcacgcccggcccaacgagacaggcaggaagaaacaaaagcgtatcctcatcacgtctctcaccgaattgcccttcgatccgaattccccccgtccgacaaattgggataagtcacaaaagttacctttcggtgttaaagatgatgctctggaaacagcggcatcggatcccacgggtttgagaggatacgctatcgagatacaggagcagcaccttgcggacgagactagtaccgacgcttcggctgagttgaaggccttatcagaaggacaaggacctccgtctgaagaacagcaacctccatccaaaggcctatccccttccgaatccctaaccacacaacttccctcagaccaacccgctgaaccatctactcacatcgatccctttctacctatcgaatcccatgaccaatctactcccactcctccggttaaccaaacccccaaacccaaagaaaccaacctaatactctggtccacccccggatctaaaaccctccacctctccaactacctaataaacagcataaaagtcgaaggccgctccgcccaaccagcctgggaaggtctccgagaattcatcaaagaatggcgacacatccatatgcacactcctccccctccccctcccccttcatcccagggaaccaaaaaatccaacaaaggccctcgaatcttcaaatacgaagcaaatccagtgcggttccaatggtcgggacaggggacagcaaaagggggcgggatcaaacagatgacgaggtttttggattttctcgatcagaaggcggcgagattgaacaaagcggcagaagatgttgcgctgtataaggagataggtgggggaatagtgaggggaagggaggaatatgaatcttcggttgatgggcaggggcagaaacagaaggagaagaagaggaatatcatgagagaaaggtgggcgggtaacaaagtggatggagattga

SEQ ID NO: 17826 - protein, 666 aa, Muscodor strobelii
  misc_feature: SGI Peptide ID NO. 565962
  misc_feature (66)..(257): Pfam Id: PF00551 Pfam Desc: Formyl transferase
  misc_feature (148)..(219): Pfam Id: PF00551 Pfam Desc: Formyl transferase
  misc_feature (59)..(298): NCBI GI: 256732162 Blast Desc: NECHADRAFT_41740 [Nectria haematococca mpVI 77-13-4]
  misc_feature (61)..(297): NCBI GI: 46137263 Blast Desc: FG10147.1 [Gibberella zeae PH-1]
  misc_feature (50)..(418): NCBI GI: 226281785 Blast Desc: methionyl-tRNA formyltransferase [Paracoccidioides brasiliensis Pb01]
  misc_feature (50)..(418): NCBI GI: 226287897 Blast Desc: conserved [Paracoccidioides brasiliensis Pb18]
  misc_feature (50)..(418): NCBI GI: 225680249 Blast Desc: mitochondrial formyl-methionyl-tRNA transformylase [Paracoccidioides brasiliensis Pb03]
  misc_feature (33)..(297): NCBI GI: 240280121 Blast Desc: mitochondrial formyl-methionyl-tRNA transformylase [Ajellomyces capsulatus H143]
  misc_feature (41)..(418): NCBI GI: 225560559 Blast Desc: mitochondrial formyl-methionyl-tRNA transformylase [Ajellomyces capsulatus G186AR]
  misc_feature (53)..(297): NCBI GI: 259484785 Blast Desc: TPA: methionyl-tRNA formyltransferase family protein, (AFU_orthologue; AFUA_6G06920) [Aspergillus nidulans FGSC A4]
  misc_feature (34)..(366): NCBI GI: 261206382 Blast Desc: methionyl-tRNA formyltransferase [Ajellomyces dermatitidis SLH14081] gi|239592987|gb|EEQ75568.1| methionyl-tRNA formyltransferase [Ajellomyces dermatitidis SLH14081] ER-3]
  misc_feature (61)..(374): NCBI GI: 85100424 Blast Desc: NCU04313 [Neurospora crassa OR74A] gi|28922493|gb|EAA31723.1| [Neurospora crassa OR74A]
  misc_feature (65)..(383): SWISSPROT Homolog: EC 2.1.2.9 Methionyl-tRNA formyltransferase
  misc_feature: Useful for introducing or modulating the production of volatile compounds
MSLFLASRQTSRVLSSLIRTRPTYHIKRCTPSTYLVKRSSVRKRGYAVPPKYWQPAIRTGKKSDPLKILFCGSDEFSCASLKALFKEQVENKDLIERIDVVVRPGKPTGRGRKEIREPLLKGLATQLGLSIYERDTFTGWNMPEDINLIIAVSFGLFVPPRLLQAAKYGGLNLHPSLLPDLRGPAPLHHTLMQGRKITGVTLQTLDDKAYDHGVILDQTHPDPRHAEALLIPDDCTTVPQLHDLVTPVAASMLVRSLREGLHIQPHEDRRWRKIDASSQDDKPLIHAPKIKKEDSQLTRTLLQSLEEENAVLREQPAKAPSGTEITLSNKGLLSRYQDAVGPLWFHARPNETGRKKQKRILITSLTELPFDPNSPRPTNWDKSQKLPFGVKDDALETAASDPTGLRGYAIEIQEQHLADETSTDASAELKALSEGQGPPSEEQQPPSKGLSPSESLTTQLPSDQPAEPSTHIDPFLPIESHDQSTPTPPVNQTPKPKETNLILWSTPGSKTLHLSNYLINSIKVEGRSAQPAWEGLREFIKEWRHIHMHTPPPPPPPSSQGTKKSNKGPRIFKYEANPVRFQWSGQGTAKGGGIKQMTRFLDFLDQKAARLNKAAEDVALYKEIGGGIVRGREEYESSVDGQGQKQKEKKRNIMRERWAGNKVDGD

SEQ ID NO: 17827 - DNA, 459 bp, Muscodor strobelii
  misc_feature: SGI cDNA ID NO. 565963
  misc_feature: Reduced expression when VOC is produced
  misc_feature: Encodes the peptide sequence at SEQ ID NO 17828
atgcctcattcattactattcgtcccctcacctctgacctatcatccctttacagtgactcgttctcacaaagtcggagacaaggatcacgttggtttggctgagggcacggtcctcccccatgagaacctccccaagttctttgccaagagtggcttcgagggtgttgacccgaagaagaccaagaagaatggcggcggcagaggcaactggggtgctcccggcgaggaagtagtcgacgaccaattcaacttcgccaacgcccgccgtcgctccaacagcagcggctactctaaccacctccacgacttcaagaccaagttcgagttcaacgagcccgagcctgtcttcgaggagtccattcatgcccccccggctgaggatgacgacgccctgaccaagactgagacatcgtcttccgagggcagctctgtggacgaacgccacaagagcatgtaa

SEQ ID NO: 17828 - protein, 152 aa, Muscodor strobelii
  misc_feature: SGI Peptide ID NO. 565963
  misc_feature (19)..(143): NCBI GI: 145610955 Blast Desc: MGG_00777 [Magnaporthe grisea 70-15] gi|145018287|gb|EDK02566.1| MGG_00777 [Magnaporthe grisea 70-15]
  misc_feature (2)..(152): NCBI GI: 116197767 Blast Desc: CHGG_07039 [Chaetomium globosum CBS 148.51] gi|88178318|gb|EAQ85786.1| CHGG_07039 [Chaetomium globosum CBS 148.51]
  misc_feature (19)..(136): NCBI GI: 256731702 Blast Desc: NECHADRAFT_100506 [Nectria haematococca mpVI 77-13-4]
  misc_feature (19)..(128): NCBI GI: 261351811 Blast Desc: conserved [Verticillium albo-atrum VaMs.102]
  misc_feature (21)..(151): NCBI GI: 156043117 Blast Desc: SS1G_10561 [Sclerotinia sclerotiorum 1980] gi|154694949|gb|EDN94687.1| SS1G_10561 [Sclerotinia sclerotiorum 1980]
  misc_feature (15)..(149): NCBI GI: 189196830 Blast Desc: conserved [Pyrenophora tritici-repentis Pt-1C-BFP] gi|187980632|gb|EDU47258.1| conserved [Pyrenophora tritici-repentis Pt-1C-BFP]
  misc_feature (17)..(151): NCBI GI: 28950174 Blast Desc: [Neurospora crassa]
  misc_feature (12)..(132): NCBI GI: 240274190 Blast Desc: conserved [Ajellomyces capsulatus H143]
  misc_feature (19)..(151): NCBI GI: 164426397 Blast Desc: NCU04314 [Neurospora crassa OR74A] gi|157071320|gb|EAA31724.2| [Neurospora crassa OR74A]
  misc_feature (1)..(132): NCBI GI: 225557695 Blast Desc: conserved [Ajellomyces capsulatus G186AR]
  misc_feature: Useful for introducing or modulating the production of volatile compounds
MPHSLLFVPSPLTYHPFTVTRSHKVGDKDHVGLAEGTVLPHENLPKFFAKSGFEGVDPKKTKKNGGGRGNWGAPGEEVVDDQFNFANARRRSNSSGYSNHLHDFKTKFEFNEPEPVFEESIHAPPAEDDDALTKTETSSSEGSSVDERHKSM

SEQ ID NO: 17829 - DNA, 3359 bp, Muscodor strobelii
  misc_feature: SGI EST ID NO. CUFF.43145.2
  misc_feature: Variant of the nucleotide sequence at SEQ ID NO 17827
tatcaattgtagaggctctttgtctcgctatcttgggtcgttgttgccaattcgaactgtttattgtagcctagcactgggcagacatacagtcacgcatgtagtactatgtagcccgcgtgatctacacgttttggttggagtcattcaagatgctacgatcacgcattcccgttgatgttcctgccttcctgcccagcctggcatgactctgcaggttgaagacacctaataacaaaaccctggacccatccccttgagcaagtatttgaagcatcaaacgcccactcttcgtaatcatctccatgactctcatctgtctctcacatctgccaccctcgcccaattgatctcttaagcttcattgcaagacgggtagccgccttgattacacacagcacacacagctacccctcaaaccctcgtcacgactcacgaccatctcttcggagcccgccaaattccccaataatttgacgcaatccctctatcggaactcacagtagacgccattccatcaagacaggctttctccacacacccgaagcatccaattggcatcggcatcggccgtctgactacttgaactccaactgcccttgacttcatctcccccctccttaacctcttaatcatcatcctacgacatctcatctccttttctcccatcgtttcaaccatcgggcttgttttgaagccatcacttcttttcattgcaatcaattgtttcgttgtcactagttgctggcgacgatctccatcaacaaaatcttaataactctcaccaaacctccatcactatgactcgttctcacaaagtcggagacaaggatcacgttggtttggctgagggcacggtcctcccccatgagaacctccccaagttctttgccaagagtggcttcgagggtgttgacccgaagaagaccaagaagaatggcggcggcagaggcaactggggtgctcccggcgaggaagtagtcgacgaccaattcaacttcgccaacgcccgccgtcgctccaacagcagcggctactctaaccacctccacgacttcaagaccaagttcgagttcaacgagcccgagcctgtcttcgaggagtccattcatgcccccccggctgaggatgacgacgccctgaccaagactgagacatcgtcttccgagggcagctctgtggacgaacgccacaagagcatgtaataacaacgattttgatcccaagagataatcccgacagttcagctcctgacgtcgctttcgcttgtatgtacacaacacttgtaacaaacgacacacaaaacgcagaaacaaatgagtaaaatgaaaacacaaacacaaccataattaatgaatcacgccgagctacatagctaaggtaaggtggctggcgcttacgaggatgaaggagaggtttggggaagatacggaaagctgatgggaactggacccctttatgagctgcaacgaaacaatgtcggatatctcatgatgatgatcaatcatggtggcacaacccacctgcaaatgtacaactaagatacggttagtcagacgatggactcgtgggcgagatcctcaattgacttgtattactgaattgtctcttgacatatgctagtggtgtgatttgtgtgtgatgatacaggtactattacagatatatctgtacaatcctatctcaacaaacaacctccacgccatctcctcactcacaataccattctaatctttattctaacatcttatcctacagacctgcgaaatcccatggtacaatctcaatatctcaaatcccttcaatctccatccactttgttacccgcccacctttctctcatgatattcctcttcttctccttctgtttctgcccctgcccatcaaccgaagattcatattcctcccttcccctcactattcccccacctatctccttatacagcgcaacatcttctgccgctttgttcaatctcgccgccttctgatcgagaaaatccaaaaacctcgtcatctgtttgatcccgcccccttttgctgtcccctgtcccgaccattggaaccgcactggatttgcttcgtatttgaagattcgagggcctttgttggattttttggttccctgggatgaagggggagggggagggggaggagtgtgcatatggatgtgtcgccattctttgatgaattctcggagaccttcccaggctggttgggcggagcggccttcgacttttatgctgtttattaggtagttggagaggtggagggttttagatccgggggtggaccagagtattaggttggtttctttgggtttgggggtttggttaaccggaggagtgggagtagattggtcatgggattcgataggtagaaagggatcgatgtgagtagatggttcagcgggttggtctgagggaagttgtgtggttagggattcggaaggggataggcctttggatggaggttgctgttcttcagacggaggtccttgtccttctgataaggccttcaactcagccgaagcgtcggtactactatcagcccaggcgtccgcccccgtttccccagtttaacacgccttatttcgcgttgtttggctgacgtctcgtccgcaaggtgctgctcctgtatctcgatagcgtatcctctcaaacccgtgggatccgatgccgctgtttccagagcatcatctttaacaccgaaaggtaacttttgtgacttatcccaatttgtcggacggggggaattcggatcgaagggcaattcggtgagagacgtgatgaggatacgcttttgtttcttcctgcctgtctcgttgggccgggcgtgaaaccagagagggcctacggcgtcttggtatcgcgatagcagacctttgttcgaaagagtaatctctgtgcccgagggtgctttcgccggttgttctcgaagcactgcattttcctcttcgagagattggaggagagtgcgtgtgagttgactgtcttcctttttgattttgggtgcgtggatcagaggtttgtcatcttgggagctggcatctatcttccgccagcgtctatcttcatgtggctggatgtgcagtccttcgcggagactacggactagcattgatgctgcgactggtgttacgagatcgtgaagttggggtacagtcgtgcagtcatctggaataagtaatgcctcagcatggcggggatcagggtgagtctggtcgagaatcaccccatggtcgtaggctttgtcgtctagtgtttgcaaagtgacgcctgttattttacggccttgcatcaatgtgtggtggagtggcgcagggccgcgaagatctgggagtaaggagggatgcaaattca

SEQ ID NO: 17830 - DNA, 498 bp, Muscodor strobelii
  misc_feature: SGI cDNA ID NO. 565964
  misc_feature: Reduced expression when VOC is produced
  misc_feature: Encodes the peptide sequence at SEQ ID NO 17831
atgccggtgccggggtacgagctgagctcgaaccttgctggcgacgatctccatcaacaaaatcttaataactctcaccaaacctccatcactatgactcgttctcacaaagtcggagacaaggatcacgttggtttggctgagggcacggtcctcccccatgagaacctccccaagttctttgccaagagtggcttcgagggtgttgacccgaagaagaccaagaagaatggcggcggcagaggcaactggggtgctcccggcgaggaagtagtcgacgaccaattcaacttcgccaacgcccgccgtcgctccaacagcagcggctactctaaccacctccacgacttcaagaccaagttcgagttcaacgagcccgagcctgtcttcgaggagtccattcatgcccccccggctgaggatgacgacgccctgaccaagactgagacatcgtcttccgagggcagctctgtggacgaacgccacaagagcatgtaa

SEQ ID NO: 17831 - protein, 165 aa, Muscodor strobelii
  misc_feature: SGI Peptide ID NO. 565964
  misc_feature (32)..(156): NCBI GI: 145610955 Blast Desc: MGG_00777 [Magnaporthe grisea 70-15] gi|145018287|gb|EDK02566.1| MGG_00777 [Magnaporthe grisea 70-15]
  misc_feature (26)..(165): NCBI GI: 116197767 Blast Desc: CHGG_07039 [Chaetomium globosum CBS 148.51] gi|88178318|gb|EAQ85786.1| CHGG_07039 [Chaetomium globosum CBS 148.51]
  misc_feature (32)..(149): NCBI GI: 256731702 Blast Desc: NECHADRAFT_100506 [Nectria haematococca mpVI 77-13-4]
  misc_feature (32)..(141): NCBI GI: 261351811 Blast Desc: conserved [Verticillium albo-atrum VaMs.102]
  misc_feature (32)..(164): NCBI GI: 156043117 Blast Desc: SS1G_10561 [Sclerotinia sclerotiorum 1980] gi|154694949|gb|EDN94687.1| SS1G_10561 [Sclerotinia sclerotiorum 1980]
  misc_feature (32)..(164): NCBI GI: 28950174 Blast Desc: [Neurospora crassa]
  misc_feature (32)..(164): NCBI GI: 164426397 Blast Desc: NCU04314 [Neurospora crassa OR74A] gi|157071320|gb|EAA31724.2| [Neurospora crassa OR74A]
  misc_feature (29)..(145): NCBI GI: 240274190 Blast Desc: conserved [Ajellomyces capsulatus H143]
  misc_feature (31)..(162): NCBI GI: 189196830 Blast Desc: conserved [Pyrenophora tritici-repentis Pt-1C-BFP] gi|187980632|gb|EDU47258.1| conserved [Pyrenophora tritici-repentis Pt-1C-BFP]
  misc_feature (32)..(145): NCBI GI: 225557695 Blast Desc: conserved [Ajellomyces capsulatus G186AR]
  misc_feature: Useful for introducing or modulating the production of volatile compounds
MPVPGYELSSNLAGDDLHQQNLNNSHQTSITMTRSHKVGDKDHVGLAEGTVLPHENLPKFFAKSGFEGVDPKKTKKNGGGRGNWGAPGEEVVDDQFNFANARRRSNSSGYSNHLHDFKTKFEFNEPEPVFEESIHAPPAEDDDALTKTETSSSEGSSVDERHKSM

SEQ ID NO: 17832 - DNA, 3359 bp, Muscodor strobelii; identical to SEQ ID NO: 17829
  misc_feature: SGI EST ID NO. CUFF.43145.2
  misc_feature: Variant of the nucleotide sequence at SEQ ID NO 17830

SEQ ID NO: 17833 - DNA, 1464 bp, Muscodor strobelii
  misc_feature: SGI cDNA ID NO. 565965
  misc_feature: Reduced expression when VOC is produced
  misc_feature: Encodes the peptide sequence at SEQ ID NO 17834
atgtcaagaatcgatagcgaaaagacaactcctggggattcgacacctgaacctgtcgagaccccgagcacccagtctagtgaatgggacagtgagcgctttttcggagcatcggtgtgtgtcgaagatgcaagacaagacttctcgttgcctctagcagatagagggaaggccgcctggctcttcttggcagcgtgttttgccatcgagtgtttagtatgggggctcccatactcgtttggcgtattccaagactactacagctcccatcctccatttcaaggacagcacaacattgccatcattgggaccagcggaatgggagtaatgtacttgacaacaccagtccttgtagctttcatcaaggcatttggccgatgggcacgatgggcaccacttctcggcctgctcataatggtcgtcgcactttcgttgagctcgctgtcgcagaccacgactcatctcatcttgactcaaggtatcttatatgggattggtggcggaatcacggtacaatccttgtatgatggtaagctccctttacggattcgacctccaggacatggtgaccgtgaatacctcgtcgttgattatatggacgaatggttcgacaagcggaagggtctggcgtacgggatcatgtggtctggcaccggtctcgcaggcgtcgtggtgccgctgctcatggactggcttctcggcaagctcgggttccggaacactcttcggctctgggcgggtctgctttttgtactggcggcgccgtttgtgtggttcatccgaccacgtgtgccaccgtcggccaacacgcgcgttagactgtctgacctgcgattcttaggttcgctcagtttttggctgtatcagtcggccaacattgtggagggactgggctttttcctcccgagcatttatctcccgacatacgtgcatggtttgttcggtgcagaatcattcacggctgccagcacggtgattctgatcaacatcgcgtcggtatttgggtgtattggcatgggaatcctcattgatcgcctacacgttaccacttgcatcttgctgtccacaataggggcgactgttgcggtgctggtaatctgggggttctcgccgtccgtatccgtgctgtacatattctgtgccgcgtacggtctgtttgccggatctttcacgtcgacatggccaggtatcatgatggaaatggcgcgacagcacagccaagatgacaagcagggacagcgtatagatacggtgatggtatttgggttcctcgccgtcggacgtggaattggcaatgtggcgacgggcccgctgagcgagagtctcatccggggctggccctggcaaggagaaagcagtgcatttggctacggtagtggttatggtagcatgattgtgtttacgggtattacggccctgcttggcggatctacttttgtttggagacgtctcggtcttctttag

SEQ ID NO: 17834 - protein, 487 aa, Muscodor strobelii
  misc_feature: SGI Peptide ID NO. 565965
  misc_feature (62)..(436): Pfam Id: PF07690 Pfam Desc: Major Facilitator Superfamily
  misc_feature (199)..(407): Pfam Id: PF07690 Pfam Desc: Major Facilitator Superfamily
  misc_feature (6)..(487): NCBI GI: 85086852 Blast Desc: NCU00298 [Neurospora crassa OR74A] gi|28918864|gb|EAA28533.1| conserved [Neurospora crassa OR74A]
  misc_feature (11)..(485): NCBI GI: 261358194 Blast Desc: Mch2p [Verticillium albo-atrum VaMs.102]
  misc_feature (49)..(485): NCBI GI: 46105134 Blast Desc: FG00195.1 [Gibberella zeae PH-1]
  misc_feature (36)..(487): NCBI GI: 238499151 Blast Desc: MFS monocarboxylate transporter, [Aspergillus flavus NRRL3357] gi|220692563|gb|EED48909.1| MFS monocarboxylate transporter, [Aspergillus flavus NRRL3357]
  misc_feature (42)..(487): NCBI GI: 169778464 Blast Desc: [Aspergillus oryzae RIB40] gi|83772435|dbj|BAE62564.1| protein product [Aspergillus oryzae]
  misc_feature (41)..(484): NCBI GI: 121699225 Blast Desc: MFS monocarboxylate transporter, [Aspergillus clavatus NRRL 1] gi|119396092|gb|EAW06524.1| MFS monocarboxylate transporter, [Aspergillus clavatus NRRL 1]
  misc_feature (54)..(484): NCBI GI: 119471201 Blast Desc: MFS monocarboxylate transporter, [Neosartorya fischeri NRRL 181] gi|119406289|gb|EAW16240.1| MFS monocarboxylate transporter, [Neosartorya fischeri NRRL 181]
  misc_feature (46)..(487): NCBI GI: 242767190 Blast Desc: MFS monocarboxylate transporter, [Talaromyces stipitatus ATCC 10500] gi|218724517|gb|EED23934.1| MFS monocarboxylate transporter, [Talaromyces stipitatus ATCC 10500]
  misc_feature (37)..(484): NCBI GI: 225555322 Blast Desc: conserved [Ajellomyces capsulatus G186AR]
  misc_feature (54)..(484): NCBI GI: 70992101 Blast Desc: MFS monocarboxylate transporter [Aspergillus fumigatus Af293] gi|66848532|gb|EAL88861.1| MFS monocarboxylate transporter, [Aspergillus fumigatus Af293]
  misc_feature: Useful for introducing or modulating the production of volatile compounds
MSRIDSEKTTPGDSTPEPVETPSTQSSEWDSERFFGASVCVEDARQDFSLPLADRGKAAWLFLAACFAIECLVWGLPYSFGVFQDYYSSHPPFQGQHNIAIIGTSGMGVMYLTTPVLVAFIKAFGRWARWAPLLGLLIMVVALSLSSLSQTTTHLILTQGILYGIGGGITVQSLYDGKLPLRIRPPGHGDREYLVVDYMDEWFDKRKGLAYGIMWSGTGLAGVVVPLLMDWLLGKLGFRNTLRLWAGLLFVLAAPFVWFIRPRVPPSANTRVRLSDLRFLGSLSFWLYQSANIVEGLGFFLPSIYLPTYVHGLFGAESFTAASTVILINIASVFGCIGMGILIDRLHVTTCILLSTIGATVAVLVIWGFSPSVSVLYIFCAAYGLFAGSFTSTWPGIMMEMARQHSQDDKQGQRIDTVMVFGFLAVGRGIGNVATGPLSESLIRGWPWQGESSAFGYGSGYGSMIVFTGITALLGGSTFVWRRLGLL

SEQ ID NO: 17835 - DNA, 1141 bp, Muscodor strobelii
  misc_feature: SGI EST ID NO. CUFF.41993.0
  misc_feature: Variant of the nucleotide sequence at SEQ ID NO 17833
tggctaccaggtacaatccttgtatgatgtatatggacgaatggttcgacaagcggaagggtctggcgtacgggatcatgtggtctggcaccggtctcgcaggcgtcgtggtgccgctgctcatggactggcttctcggcaagctcgggttccggaacactcttcggctctgggcgggtctgctttttgtactggcggcgccgtttgtgtggttcatccgaccacgtgtgccaccgtcggccaacacgcgcgttagactgtctgacctgcgattcttaggttcgctcagtttttggctgtatcagtcggccaacattgtggagggactgggctttttcctcccgagcatttatctcccgacatacgtgcatggtttgttcggtgcagaatcattcacggctgccagcacggtgattctgatcaacatcgcgtcggtatttgggtgtattggcatgggaatcctcattgatcgcctacacgttaccacttgcatcttgctgtccacaataggggcgactgttgcggtgctggtaatctgggggttctcgccgtccgtatccgtgctgtacatattctgtgccgcgtacggtctgtttgccggatctttcacgtcgacatggccaggtatcatgatggaaatggcgcgacagcacagccaagatgacaagcagggacagcgtatagatacggtgatggtatttgggttcctcgccgtcggacgtggaattggcaatgtggcgacgggcccgctgagcgagagtctcatccggggctggccctggcaaggagaaagcagtgcatttggctacggtagtggttatggtagcatgattgtgtttacgggtattacggccctgcttggcggatctacttttgtttggagacgtctcggtcttctttagaatagatggcagcgtcgattaggtattatggcgtctaaaactttgcagcttttgagccgaaatatattcaagtttcaacgtacgagtcccctagaagccgatgccgaagccgcatagggcaatgtgtgctagactacctattccagagagcctgctttgatccgattggagatcgaggaaaatcaatggccaaatgtagtaaggcaggacgggaaggatactagtaatctgaggtaatc

SEQ ID NO: 17836 - DNA, 1530 bp, Muscodor strobelii
  misc_feature: SGI cDNA ID NO. 565966
  misc_feature: Reduced expression when VOC is produced
  misc_feature: Encodes the peptide sequence at SEQ ID NO 17837
atgtcaagaatcgatagcgaaaagacaactcctggggattcgacacctgaacctgtcgagaccccgagcacccagtctagtgaatgggacagtgagcgctttttcggagcatcggtgtgtgtcgaagatgcaagacaagacttctcgttgcctctagcagatagagggaaggccgcctggctcttcttggcagcgtgttttgccatcgagtgtttagtatggggtatgctgcgcttctctaatcatttcgccctatacagtctccagttactcacattgaacttcgcagggctcccatactcgtttggcgtattccaagactactacagctcccatcctccatttcaaggacagcacaacattgccatcattgggaccagcggaatgggagtaatgtacttgacaacaccagtccttgtagctttcatcaaggcatttggccgatgggcacgatgggcaccacttctcggcctgctcataatggtcgtcgcactttcgttgagctcgctgtcgcagaccacgactcatctcatcttgactcaaggtatcttatatgggattggtggcggaatcacggtacaatccttgtatgatggtaagctccctttacggattcgacctccaggacatggtgaccgtgaatacctcgtcgttgattatatggacgaatggttcgacaagcggaagggtctggcgtacgggatcatgtggtctggcaccggtctcgcaggcgtcgtggtgccgctgctcatggactggcttctcggcaagctcgggttccggaacactcttcggctctgggcgggtctgctttttgtactggcggcgccgtttgtgtggttcatccgaccacgtgtgccaccgtcggccaacacgcgcgttagactgtctgacctgcgattcttaggttcgctcagtttttggctgtatcagtcggccaacattgtggagggactgggctttttcctcccgagcatttatctcccgacatacgtgcatggtttgttcggtgcagaatcattcacggctgccagcacggtgattctgatcaacatcgcgtcggtatttgggtgtattggcatgggaatcctcattgatcgcctacacgttaccacttgcatcttgctgtccacaataggggcgactgttgcggtgctggtaatctgggggttctcgccgtccgtatccgtgctgtacatattctgtgccgcgtacggtctgtttgccggatctttcacgtcgacatggccaggtatcatgatggaaatggcgcgacagcacagccaagatgacaagcagggacagcgtatagatacggtgatggtatttgggttcctcgccgtcggacgtggaattggcaatgtggcgacgggcccgctgagcgagagtctcatccggggctggccctggcaaggagaaagcagtgcatttggctacggtagtggttatggtagcatgattgtgtttacgggtattacggccctgcttggcggatctacttttgtttggagacgtctcggtcttctttag

SEQ ID NO: 17837 - protein, 509 aa, Muscodor strobelii
  misc_feature: SGI Peptide ID NO. 565966
  misc_feature (63)..(458): Pfam Id: PF07690 Pfam Desc: Major Facilitator Superfamily
  misc_feature (221)..(429): Pfam Id: PF07690 Pfam Desc: Major Facilitator Superfamily
  misc_feature (6)..(509): NCBI GI: 85086852 Blast Desc: NCU00298 [Neurospora crassa OR74A] gi|28918864|gb|EAA28533.1| conserved [Neurospora crassa OR74A]
  misc_feature (11)..(507): NCBI GI: 261358194 Blast Desc: Mch2p [Verticillium albo-atrum VaMs.102]
  misc_feature (49)..(507): NCBI GI: 46105134 Blast Desc: FG00195.1 [Gibberella zeae PH-1]
  misc_feature (36)..(509): NCBI GI: 238499151 Blast Desc: MFS monocarboxylate transporter, [Aspergillus flavus NRRL3357] gi|220692563|gb|EED48909.1| MFS monocarboxylate transporter, [Aspergillus flavus NRRL3357]
  misc_feature (42)..(509): NCBI GI: 169778464 Blast Desc: [Aspergillus oryzae RIB40] gi|83772435|dbj|BAE62564.1| protein product [Aspergillus oryzae]
  misc_feature (41)..(506): NCBI GI: 121699225 Blast Desc: MFS monocarboxylate transporter, [Aspergillus clavatus NRRL 1] gi|119396092|gb|EAW06524.1| MFS monocarboxylate transporter, [Aspergillus clavatus NRRL 1]
  misc_feature (54)..(506): NCBI GI: 119471201 Blast Desc: MFS monocarboxylate transporter, [Neosartorya fischeri NRRL 181] gi|119406289|gb|EAW16240.1| MFS monocarboxylate transporter, [Neosartorya fischeri NRRL 181]
  misc_feature (54)..(506): NCBI GI: 70992101 Blast Desc: MFS monocarboxylate transporter [Aspergillus fumigatus Af293] gi|66848532|gb|EAL88861.1| MFS monocarboxylate transporter, [Aspergillus fumigatus Af293]
  misc_feature (54)..(506): NCBI GI: 159124469 Blast Desc: MFS monocarboxylate transporter, [Aspergillus fumigatus A1163]
  misc_feature (46)..(509): NCBI GI: 242767190 Blast Desc: MFS monocarboxylate transporter, [Talaromyces stipitatus ATCC 10500] gi|218724517|gb|EED23934.1| MFS monocarboxylate transporter, [Talaromyces stipitatus ATCC 10500]
  misc_feature: Useful for introducing or modulating the production of volatile compounds
MSRIDSEKTTPGDSTPEPVETPSTQSSEWDSERFFGASVCVEDARQDFSLPLADRGKAAWLFLAACFAIECLVWGMLRFSNHFALYSLQLLTLNFAGLPYSFGVFQDYYSSHPPFQGQHNIAIIGTSGMGVMYLTTPVLVAFIKAFGRWARWAPLLGLLIMVVALSLSSLSQTTTHLILTQGILYGIGGGITVQSLYDGKLPLRIRPPGHGDREYLVVDYMDEWFDKRKGLAYGIMWSGTGLAGVVVPLLMDWLLGKLGFRNTLRLWAGLLFVLAAPFVWFIRPRVPPSANTRVRLSDLRFLGSLSFWLYQSANIVEGLGFFLPSIYLPTYVHGLFGAESFTAASTVILINIASVFGCIGMGILIDRLHVTTCILLSTIGATVAVLVIWGFSPSVSVLYIFCAAYGLFAGSFTSTWPGIMMEMARQHSQDDKQGQRIDTVMVFGFLAVGRGIGNVATGPLSESLIRGWPWQGESSAFGYGSGYGSMIVFTGITALLGGSTFVWRRLGLL

SEQ ID NO: 17838 - DNA, 1141 bp, Muscodor strobelii; identical to SEQ ID NO: 17835
  misc_feature: SGI EST ID NO. CUFF.41993.0
  misc_feature: Variant of the nucleotide sequence at SEQ ID NO 17836

SEQ ID NO: 17839 - DNA, 1056 bp, Muscodor strobelii
  misc_feature: SGI cDNA ID NO. 565967
  misc_feature: Reduced expression when VOC is produced
  misc_feature: Encodes the peptide sequence at SEQ ID NO 17840
atgtctttctccagcgtcttccaagacatgtctatcaaaggcgacggaagcaaggcgccccgtcgccccggccctgctccctcggtctcgactatcgacggcggcgcctcgcatgtctcacgctcctacgttagcactgctgccaccagtgtgagcatctccggcgacattggcagccaattgcacggcggctaccatcaccctctcgctcgtagctggcaggccgagcgtcagttgaccaagtcaatgctcatctatcctctcttcatctccgacatcgaggacgatgaaaccctgatcccctctctgcccggccagaaacgctggggcctcaacaagctcatccccttcctcgagcctctcgtccgcaagggtctgcgctctgtcattctgttcggtgtcccccttcttcccaacaccaaggacgctctcggtacctccgccgacgaccccaagggacctgtcatccaggccattcgcctactccgccagcgattcccccagctgttcatcaccgtcgatgtctgtctctgcgagtacacctcccacggccactgcggcattctccgcgatgatggaaccctcaacaaccagctctccgttgagcgtatcagcgatgtcgccatggcctatgccaacgctggagcccactgtgtggctccctccgacatgaacgacggccgtatccgagctatcaagctgaagcttatcgaagagggcattgcccacaagactctcctgatgtcctacgctgccaagttctcgggtgttctttacggacccttccgcgatgccgccggctctgctccctcgtttggcgaccgcaagtgctaccagcttccccctgggggcgatgctaaggacatcggccgtgatcttcctgtcgctgcctaccacgtttccggcgagtatgccatggttcatgctgccgccaaggctggtgtcttcgatctcaaggccatggccttcgaagtcaccgagggtatccttcgtgctggcgccaccattgtcgttagctacttcacgcctgagttcttggactggctggagaactga

SEQ ID NO: 17840 - protein, 351 aa, Muscodor strobelii
  misc_feature: SGI Peptide ID NO. 565967
  misc_feature (56)..(349): Pfam Id: PF00490 Pfam Desc: Delta-aminolevulinic acid dehydratase
  misc_feature (56)..(284): Pfam Id: PF00490 Pfam Desc: Delta-aminolevulinic acid dehydratase
  misc_feature (285)..(349): Pfam Id: PF00490 Pfam Desc: Delta-aminolevulinic acid dehydratase
  misc_feature (1)..(351): NCBI GI: 261351780 Blast Desc: delta-aminolevulinic acid dehydratase [Verticillium albo-atrum VaMs.102]
  misc_feature (1)..(351): NCBI GI: 256732117 Blast Desc: [Nectria haematococca mpVI 77-13-4]
  misc_feature (1)..(351): NCBI GI: 85103941 Blast Desc: delta-aminolevulinic acid dehydratase [Neurospora crassa OR74A] gi|28923173|gb|EAA32389.1| delta-aminolevulinic acid dehydratase [Neurospora crassa OR74A]
  misc_feature (1)..(351): NCBI GI: 154295421 Blast Desc: conserved [Botryotinia fuckeliana B05.10] gi|150844057|gb|EDN19250.1| conserved [Botryotinia fuckeliana B05.10]
  misc_feature (1)..(351): NCBI GI: 156048941 Blast Desc: conserved [Sclerotinia sclerotiorum 1980] gi|154692576|gb|EDN92314.1| conserved [Sclerotinia sclerotiorum 1980]
  misc_feature (1)..(351): NCBI GI: 39970093 Blast Desc: conserved [Magnaporthe grisea 70-15] gi|145013115|gb|EDJ97756.1| conserved [Magnaporthe grisea 70-15]
  misc_feature (1)..(351): NCBI GI: 116180078 Blast Desc: conserved [Chaetomium globosum CBS 148.51] gi|88184964|gb|EAQ92432.1| conserved [Chaetomium globosum CBS 148.51]
  misc_feature (1)..(351): NCBI GI: 171691913 Blast Desc: protein product [Podospora anserina] gi|170945905|emb|CAP72706.1| protein product [Podospora anserina]
  misc_feature (1)..(351): NCBI GI: 46137129 Blast Desc: FG10080.1 [Gibberella zeae PH-1]
  misc_feature (42)..(351): NCBI GI: 28950068 Blast Desc: porphobilinogen synthase [Neurospora crassa]
  misc_feature (56)..(351): SWISSPROT Homolog: EC 4.2.1.24 Porphobilinogen synthase
  misc_feature: Useful for introducing or modulating the production of volatile compounds
MSFSSVFQDMSIKGDGSKAPRRPGPAPSVSTIDGGASHVSRSYVSTAATSVSISGDIGSQLHGGYHHPLARSWQAERQLTKSMLIYPLFISDIEDDETLIPSLPGQKRWGLNKLIPFLEPLVRKGLRSVILFGVPLLPNTKDALGTSADDPKGPVIQAIRLLRQRFPQLFITVDVCLCEYTSHGHCGILRDDGTLNNQLSVERISDVAMAYANAGAHCVAPSDMNDGRIRAIKLKLIEEGIAHKTLLMSYAAKFSGVLYGPFRDAAGSAPSFGDRKCYQLPPGGDAKDIGRDLPVAAYHVSGEYAMVHAAAKAGVFDLKAMAFEVTEGILRAGATIVVSYFTPEFLDWLEN

SEQ ID NO: 17841 - DNA, 2380 bp, Muscodor strobelii
  misc_feature: SGI EST ID NO. CUFF.42272.1
  misc_feature: Variant of the nucleotide sequence at SEQ ID NO 17839
aaataatcaggaaccggctcacaggatataaaattttaagggtcgctcgcctctcaaagacggtcgacctccgaggtacttttgtttccttcgacttcccttgcataattgccaattgagagtgtgaaccacgttttatcaagtccaagtttgtgtctatcaattcatatataagtggcgacatcgaaggagcgacggaagctactgttgcaactagcggggttggtgcaacgtctgtgaccaactagagctctgccgttcgtcagtcgaattcactgcaactgtccgcgccgactccagcagacaattaatctcactaattgcccaactcactccccttctcttcaacatttcgccgttcacttcccgtcacccacttgcgaccccgcactctcaatcaccgccgttgacaagctgaagtcaccatgtctttctccagcgtcttccaagacatgtctatcaaaggcgacggaagcaaggcgccccgtcgccccggccctgctccctcggtctcgactatcgacggcggcgcctcgcatgtctcacgctcctacgttagcactgctgccaccagtgtgagcatctccggcgacattggcagccaattgcacggcggctaccatcaccctctcgctcgtagctggcaggccgagcgtcagttgaccaagtcaatgctcatctatcctctcttcatctccgacatcgaggacgatgaaaccctgatcccctctctgcccggccagaaacgctggggcctcaacaagctcatccccttcctcgagcctctcgtccgcaagggtctgcgctctgtcattctgttcggtgtcccccttcttcccaacaccaaggacgctctcggtacctccgccgacgaccccaagggacctgtcatccaggccattcgcctactccgccagcgattcccccagctgttcatcaccgtcgatgtctgtctctgcgagtacacctcccacggccactgcggcattctccgcgatgatggaaccctcaacaaccagctctccgttgagcgtatcagcgatgtcgccatggcctatgccaacgctggagcccactgtgtggctccctccgacatgaacgacggccgtatccgagctatcaagctgaagcttatcgaagagggcattgcccacaagactctcctgatgtcctacgctgccaagttctcgggtgttctttacggacccttccgcgatgccgccggctctgctccctcgtttggcgaccgcaagtgctaccagcttccccctggggggtcgtggtcttgcccgccgtgccatccaccgcgacattggcgaaggtgctgatatcattatggtcaaacccgcagcccagtacctcgacatcatcagcgatgctaaggacatcggccgtgatcttcctgtcgctgcctaccacgtttccggcgagtatgccatggttcatgctgccgccaaggctggtgtcttcgatctcaaggccatggccttcgaagtcaccgagggtatccttcgtgctggcgccaccattgtcgttagctacttcacgcctgagttcttggactggctggagaactgagttagagttgtttcaggatatgagaaatatgacgagactacagggcattttggcgtttgggtgtgatttgctattgctttacgagcaggtggcgttcaaggaaagcgaaacgatatgaaatggcatacaggtgcattattgctatattgcatggaacggttgacttgagatattgacaatcatggtcttgaagataagacagcattgtgttgcatgtccctcagccgatggactacgttacaatcatcagacacgaatgaagaaaaatggtgcgatgttaacaatcaaagttttgagttttctgctgtggtacattatgcttatacgccgtctttactacgttgagtttattaaccaccagatgtgctgagtcgtttttcgttacgcacttgattttcctaagtctgtagcagatcttgatcagtatcttcagcgagcggaaactagaatgtcgatttgctttcttagttactctcgagcctcttggtctggtctctatgaacaagctgtgacttgctgatggtccgctatacgtgcagaagtgacaacttcaagaacttgaaatggcaaactctatatcataataattccataaaagccaggagccatatctgatctctcaactcttgttagctagagcttgatacgactcgacaactgcgagatcttgatggaatagtgatgtagcagttggctgccctgacttccctgactgaagatcatgggatgcaaggaatcgcaattctgcacttgtcggagttttggcgagagttggagtgagttgtgattaagctggttttgc

SEQ ID NO: 17842 - DNA, 1284 bp, Muscodor strobelii
  misc_feature: SGI cDNA ID NO. 565968
  misc_feature: Encodes the peptide sequence at SEQ ID NO 17843
atgggtgctgttcaagttgctctggcaataggccttccatccaaatttgacagagcttatggagacagaacaagtgtctcgtacaaagggggagatctatacattaatggtaatcttgcgacacttctcacgcatgctgctctattcgatgcagaatacgctttgagtcaggtgtggaagccagccaaagacttggctgataaagaggcggcatttctcctcccagcgctcgagagccctgaagccgaaaagcctggctggacgcctaaggaagacaatggtgactggctgaagacggtctgtgatgttatcacctccgcagtcaaggctattcctgaggtcggtgacgctgcctctgcgcaaatgcagtgggtcaccgatttcaaatacggctctgacgaggagcacaagaaggcatatctcgaccaatcatttgccgaaattcacacttccatccagaaatctgcggatagaatcatccgagccgctgaagcaatacaagtgaaagacgtcgcatcgaaggtcagggcacacgtcagaggcgtcaaagagaggttgaacgactatcacaggcacaacgcatacatcaaagctgaatgggaccattccaaaattagtgcttatgcgcgcgcggaggatatggtcaagttccttcgcgatgaggttactagctcgcacgatagtttgaagagctgggttctggagctcgatgagacgaccgcgcccaacaacttcagcgatatctttcctatcttcgtcgagactcttgcattagagatggattgctacgtccttctcattaacgttcaagtcaaccgcgcagttaacgcggccatatttgccgagactcaggctgccgactcggcggtctacaaaaacgccatgtccgccgccgaggacttccgcaaagacgcagtggacctaaagtcggatttccaagcactgcgagcaggccgagctgacatgatcaaagatcttatggctcggctcatcaaagatcgcgtcagtgctatttctgcaccaaagtaccatgaacgccctgggcagatgattcacgaagacgtgacccaatacgtttggagtttcgatgataaatatacagggcgcacttgggagatctattcagataacctaggcgtacaaaagtctagcaagcaagatttcatcgaatacggccgggaatttgctaatctgtcgaataagtggttgaaagaccatgcgcctatcatcaaacagaggtttgcaggatatgagtttatacgagcgaagttgatggagccttag

SEQ ID NO: 17843 - protein, 427 aa, Muscodor strobelii
  misc_feature: SGI Peptide ID NO. 565968
MGAVQVALAIGLPSKFDRAYGDRTSVSYKGGDLYINGNLATLLTHAALFDAEYALSQVWKPAKDLADKEAAFLLPALESPEAEKPGWTPKEDNGDWLKTVCDVITSAVKAIPEVGDAASAQMQWVTDFKYGSDEEHKKAYLDQSFAEIHTSIQKSADRIIRAAEAIQVKDVASKVRAHVRGVKERLNDYHRHNAYIKAEWDHSKISAYARAEDMVKFLRDEVTSSHDSLKSWVLELDETTAPNNFSDIFPIFVETLALEMDCYVLLINVQVNRAVNAAIFAETQAADSAVYKNAMSAAEDFRKDAVDLKSDFQALRAGRADMIKDLMARLIKDRVSAISAPKYHERPGQMIHEDVTQYVWSFDDKYTGRTWEIYSDNLGVQKSSKQDFIEYGREFANLSNKWLKDHAPIIKQRFAGYEFIRAKLMEP

SEQ ID NO: 17844 - DNA, 1713 bp, Muscodor strobelii
  misc_feature: SGI cDNA ID NO. 565969
  misc_feature: Encodes the peptide sequence at SEQ ID NO 17845
atgaagtctcagattatagtcatttgctatttcctgctgttacgcacagcagcgacagcaccgaccgagaacgactccccgacattgactactatcgccatcccagctgggacggtagtcggaacagcaatcgaggatgtcgaatactaccgcggtatcccctacgctgaagcaccagtaggacctttaagactacgtgctccagtacgagccccggagttcgataccttcgaggcgacgggaactggtccatcttgtccccagatgacaaatgtatacttgacttcccttgctgaggaagttgtagtgattcccgaggtcgcatccgcgttatctatactccaagcagctcccgatgttcaggaagactgtctgacaatctccgtcatgcgaccaaaagacactccccaagacgcgaagctgccggttttattctggatctacggcggcggatacgaaatcgggagttctgtgccttacaacgggtcagttctcaccccgcagtctgtagcccaggggactcctatcatactcgtaaccgtcaactaccgagtaaacggatttggtttcatgccaggaaaagaagtcctcgcagagggtgtatcgaacctcggacttctagaccagcgaatggctctcgaatgggtagcggacaacatcggtgctttcggcggagatccagacaaagtcacgatctgggggcaaagcgctggtgcgtatagtgtcttcaaccagatggctctttacggtgggaatattacgtacaaaggaaaagatgtcttcagagccgggataatgaacagtggcaccatcctacccactgaggctattgattcaccccgtgctcaggcaattttcgataccgttgctcaggaagctgggtgtggtgatgtgcctagcgaggagaagctggattgtctgagaggtttggacttcgacacgttttataacgctacgaattccgtcccgtcgccgtttagttatcattctccggcttcgagttacactgttcgcgcggatggagtggttatacctgttagtcctgagatatcggcgagagatggattgtttgcgaatgttcctgttattgttggggatcaggaggacgagggaacattcctatccctaacccaaaacaacctaacaacaacctcagacctctacacattcctccacgagctcatctaccaaaacgcgactctccagcaaatcaaagatttcgtcgccacgtacccctatgccaacggcacagccggatctcccttccgaacaggttcttccaacgtagcgtatccgcaattcaagcgcatggccgctctcttaggtgacatgacattcacgctggcccgtcgggcatttctcaatctcgcatcggaatacggactgaaagcttggtcgtaccttggaacttatggacatgaagtcccgatattgggtacgtttcacactcaggatttacccacgattttctatgggagtgatgatgtggcgaggagtattcagacgaggtatattgcttttgttgatagtttggatcctaatgatgggcggctgaaggctcctgagggtttccagactgagtggcctgcgtgggataagtgtggggtgaagttgcttgagtttggagcgaatgcgaccggaatcttgacggatgactttaggaaggatagtggtgagtttattttgggacatttggatgcgcttagggagtaa

SEQ ID NO: 17845 - protein, 570 aa, Muscodor strobelii
  misc_feature: SGI Peptide ID NO. 565969
  misc_feature (6)..(554): Pfam Id: PF00135 Pfam Desc: Carboxylesterase
  misc_feature (6)..(467): Pfam Id: PF00135 Pfam Desc: Carboxylesterase
  misc_feature (13)..(569): NCBI GI: 84993514 Blast Desc: sterol esterase precursor [Melanocarpus albomyces]
  misc_feature (21)..(569): NCBI GI: 145235765 Blast Desc: An03g06560 [Aspergillus niger] gi|134058220|emb|CAK38412.1| protein product [Aspergillus niger]
  misc_feature (4)..(569): NCBI GI: 189208005 Blast Desc: lipase 3 precursor [Pyrenophora tritici-repentis Pt-1C-BFP] gi|187976429|gb|EDU43055.1| lipase 3 precursor [Pyrenophora tritici-repentis Pt-1C-BFP]
  misc_feature (17)..(569): NCBI GI: 171678173 Blast Desc: protein product [Podospora anserina] gi|170937156|emb|CAP61813.1| protein product [Podospora anserina]
  misc_feature (31)..(568): NCBI GI: 46109442 Blast Desc: FG01603.1 [Gibberella zeae PH-1]
  misc_feature (31)..(569): NCBI GI: 85093411 Blast Desc: NCU09575 [Neurospora crassa OR74A] gi|28921135|gb|EAA30450.1| NCU09575 [Neurospora crassa OR74A]
  misc_feature (31)..(569): NCBI GI: 70982851 Blast Desc: extracellular lipase [Aspergillus fumigatus Af293] gi|66844578|gb|EAL84915.1| extracellular lipase, [Aspergillus fumigatus Af293] gi|159123837|gb|EDP48956.1| extracellular A1163]
  misc_feature (8)..(561): NCBI GI: 238507487 Blast Desc: extracellular lipase, [Aspergillus flavus NRRL3357] gi|220689658|gb|EED46009.1| extracellular lipase, [Aspergillus flavus NRRL3357]
  misc_feature (19)..(569): NCBI GI: 256730747 Blast Desc: NECHADRAFT_30050 [Nectria haematococca mpVI 77-13-4]
  misc_feature (31)..(568): NCBI GI: 116205752 Blast Desc: CHGG_02169 [Chaetomium globosum CBS 148.51] gi|88182766|gb|EAQ90234.1| CHGG_02169 [Chaetomium globosum CBS 148.51]
  misc_feature (13)..(554): SWISSPROT Homolog: EC 3.1.1.3 Triacylglycerol lipase
MKSQIIVICYFLLLRTAATAPTENDSPTLTTIAIPAGTVVGTAIEDVEYYRGIPYAEAPVGPLRLRAPVRAPEFDTFEATGTGPSCPQMTNVYLTSLAEEVVVIPEVASALSILQAAPDVQEDCLTISVMRPKDTPQDAKLPVLFWIYGGGYEIGSSVPYNGSVLTPQSVAQGTPIILVTVNYRVNGFGFMPGKEVLAEGVSNLGLLDQRMALEWVADNIGAFGGDPDKVTIWGQSAGAYSVFNQMALYGGNITYKGKDVFRAGIMNSGTILPTEAIDSPRAQAIFDTVAQEAGCGDVPSEEKLDCLRGLDFDTFYNATNSVPSPFSYHSPASSYTVRADGVVIPVSPEISARDGLFANVPVIVGDQEDEGTFLSLTQNNLTTTSDLYTFLHELIYQNATLQQIKDFVATYPYANGTAGSPFRTGSSNVAYPQFKRMAALLGDMTFTLARRAFLNLASEYGLKAWSYLGTYGHEVPILGTFHTQDLPTIFYGSDDVARSIQTRYIAFVDSLDPNDGRLKAPEGFQTEWPAWDKCGVKLLEFGANATGILTDDFRKDSGEFILGHLDALRE

SEQ ID NO: 17846 - DNA, 4131 bp, Muscodor strobelii
  misc_feature: SGI cDNA ID NO. 565970
  misc_feature: Encodes the peptide sequence at SEQ ID NO 17847
atggacccactgagcacagttgcctcactgatagcagtggtgcaaataagcagtagtgtgattctcgtctgccgagactactacacgagcgtaaaagacgcagcgaaggacataagacgggtaataggcgaggtggaagatgtcaagagtattgcacagcgtctcattcagactgcgtggagcgactacaaatcggacctaccttcactgcaggatataggacagcctagcggcgcgttgcagagatgtgttgaagagttgatcgacctcaaagctagtctcaagccgagaaaagctgagagttggagatggccgttcaaaaaggccgaagtagaggggagacttcgggtgcttgcgacgataaaagcaacgctgcagctggcgcttgcagccgacaatgctcaagccattgtcgatgtcctcaacaatactcgaactgtccctataatacaagagaaggtcatgtttctatctgatctcgtagagcatgacattgaagatcgcaaaagagaggactgtttgcaatggctcggtgatcatgatcagctagctaaacatgaaaatgcatgtatcaagagcctcgagggtactgggcactggaccatggagaatcaagagtacttgaaatggaaagctgaaccgggtcttatatggctgaaaggataccctgggagtgggaaaactgtattgtgcgcaaagattattcaggatctaggacgcaattgcctcgacgatgacgatataagaatatgctacttttatttcgacgcgtccacccaggataacctcagcctcgacctgttgtataaatgcttcatccaccagcttgtatctcaaacacctaggctacctaaattcatggaaaagctgttccacagacactcggactacaggcacggctcgggcatattatccccagttcaatggagcaaagtctttcacgaactggtatgcgagtttcagaaggtcttcatagtgatcgatgcgctagacgaatgcgaagcatccattggattggacactatactcgctactgtctctgaaatctcagatatatctaagtacaaagtgcatcttttagcaactggtagggatctggaacaaataaggaatagcatttttggcactacggccgggtccttggctataggaggtgaaaatctggacctagatcttcaaatcgcgctgaaacatcatttatctacgttccccaaattcgcgaggtggagcacctccttgaagcgaaatattacagaagccctcttggctcaagcaaacgggtccttccgttggcttgactgccaggtccaggaactaaagaagtgttcgactcaagcagctgttcggaagcttttgaacaacctaccggaatcgctgccgatctactatacgcgtacgatagaccaattcagggacgaaaatcgtatcatggtccagaatcttttacgttgggttgcctttgcccttagaccattatctatcgaggagattgccagtgcaatctctatcaatgtcactcattgcgatcatccattcattgacgaaaatcttgaactacttgacccgacacaatttttggacgggtgctccagtctcctttcgacttatcctgccgctgaccgtgacgatggtcgggtgtacgtaagactggcacatttctctgtgaaagagttcattctttcagagtatatccaagacagcccttgcgcagacttcgccacagaagtacaccttgcacatctgatgttggagactagttgcattgcttacttccagcatgcagtaacctcactgtcagatgacaattggacggactatccacttataagttacgcaggtaatttctggctaaaacacaaagaactggccggtcaacatagcgtaacagatgccataagaactctaatgattgacctattcgacaattcaaagccatacttcaataaatggcgccaaatcgcctccgtggaccgaccttggcttgacgagggtgacaagcaagaggatgagtatcgcccgctttattgcgctgcattatttggtctgtctgacatcgtaagagtgctgatcgagcgaggcagcgatctgaatgagctaaatgggatccatggcactgctctgcaagctgctgccgttaagggtcatacggaagtcatgagagttctgatagaggcccacgcagacttgaacgccaaaggggggtcattcgggtcggcaatcactgcagcctcggcctatggccatgaatcaattgtcaacgatctccttgaagcaggcgcttcagctgatcctccagcacggtggttggacgacgggcgtacggatcccttatttgtagcggccaagaaaggctatctcggaatttgcaaattacttctaaagtatggggcggtggatcatttccggatgaaagagcgtcccgggtccgccttgcatgctgcagtggccgctggccatctcgacgttgtcagagagctcttgaggcatgaatgggtggtgtcatctaattcgcccaggatgcgcggcataatctccccagcttctggtggtatgagagctagccaatactccgctgcagaaagtggaaatattgacatactccgagagctgataggatacgggctcaataaagacgaaatattgaggtacgctgccagggctggggatgagactctagtactggagaaattagacaatggcgcaaatatcaatgaacctgggacgataagcgaccacaggcggccgttattatctgctgctcgcggcggtcatgcttctattgtcagggagctcctagcccgaggagcagatccaagtttaactacagagtattcgtctgcactgatggaggcagttgagggaagaaatatagatgtcgtgcggatgatcatcgcagctggaggtattccaaagaaagattcttatccgcggccctcacacgttctatcatcggcggtgagaggcagacaagagcaaattgtcgaaatacttatcgacgctggcattgaaacgcacgattcccttatcagttcagcccttcacgaagacaatacagggttcaagatgctcctaaaatttggtgccgacatccatcaagaagactcggatgacgacgcctctatactgcaagcttctgcacgaggtggatcaatacccatcgtggaatatctacttaagaacggaatcagccccgacaaaacaatcggtcatatcacgacaccacttatggaagcaattcgttcccacaattggcatgcagcccggattctaatcgactggggagctgatgtcaatgccaatccaccaatttatcgggatcctgggagtggcagtggagccgtataccatggtctgacgtggccaccaacaaaggcttatgaaacaccacttaccatggcaatcagggctcagagtcccggcttggcgcgattattgatgagccggggagccactgtaaagccagatcaacctacaactaccggaacgccgcttttatacgccgtttgggaatgttacgctgatctcgtcgaacagttgctaatcaaaggggcagaccctaatcagagagggacggcactaaaacgaaaacacgcgacatttccgctgctcctagcagcagagaaagagaatgttgagatcatagatctcttgatttccgccggtgctcgtgtcaatgatcaggatgaacaagggttttcggcgctccacgttgcagctgcttgcgaccaatcaaaggggcttgaatgcctagtcaagaaacatgctgcggacttccacctgagacttcacaacggcagccagccactacattcggcagcatcgagaggaaccgcggccagtgtgaatatgctcctcgatgctggcgcccaaattcatgctcggaacgacgtaggcaggacaccactccactgggccgtggagaaaggaaattgggacacggtagaagtgcttcttgatagaggggctgatgtacacattaaaaccgacgatgatggtccgaagactgtcctcgatatggcgtatctagctaaggacatgaataagtgggacaagatccggcgcatagagaaatcttgggatgatgggagagtcgacaaactactggcgagaatcaacgagatgacaaaatag

SEQ ID NO: 17847 - protein, 1376 aa, Muscodor strobelii
  misc_feature: SGI Peptide ID NO. 565970
  misc_feature (1297)..(1329): Pfam Id: PF00023 Pfam Desc: Ankyrin repeat
  misc_feature (1264)..(1296): Pfam Id: PF00023 Pfam Desc: Ankyrin repeat
  misc_feature (911)..(943): Pfam Id: PF00023 Pfam Desc: Ankyrin repeat
  misc_feature (1197)..(1229): Pfam Id: PF00023 Pfam Desc: Ankyrin repeat
  misc_feature (669)..(701): Pfam Id: PF00023 Pfam Desc: Ankyrin repeat
  misc_feature (1201)..(1229): Pfam Id: PF00023 Pfam Desc: Ankyrin repeat
  misc_feature (705)..(734): Pfam Id: PF00023 Pfam Desc: Ankyrin repeat
  misc_feature (1162)..(1191): Pfam Id: PF00023 Pfam Desc: Ankyrin repeat
  misc_feature (1070)..(1099): Pfam Id: PF00023 Pfam Desc: Ankyrin repeat
  misc_feature (1)..(1103): NCBI GI: 145237264 Blast Desc: An07g01930 [Aspergillus niger] gi|134075746|emb|CAK48094.1| protein product [Aspergillus niger]
  misc_feature (104)..(1324): NCBI GI: 67526171 Blast Desc: AN3543.2 [Aspergillus nidulans FGSC A4] gi|40739678|gb|EAA58868.1| AN3543.2 [Aspergillus nidulans FGSC A4] gi|259481936|tpe|CBF75924.1| TPA: conserved [Aspergillus FGSC
  misc_feature (145)..(999): NCBI GI: 169596849 Blast Desc: SNOG_01194 [Phaeosphaeria nodorum SN15] gi|111069723|gb|EAT90843.1| SNOG_01194 [Phaeosphaeria nodorum SN15]
  misc_feature (135)..(1327): NCBI GI: 212532817 Blast Desc: multiple ankyrin repeats single kh domain protein, [Penicillium marneffei ATCC 18224] gi|210071929|gb|EEA26018.1| multiple ankyrin repeats single kh domain protein, [Penicillium
  misc_feature (1)..(1100): NCBI GI: 261188753 Blast Desc: ankyrin repeat protein [Ajellomyces dermatitidis SLH14081] gi|239592022|gb|EEQ74603.1| ankyrin repeat protein [Ajellomyces dermatitidis SLH14081]
  misc_feature (1)..(1100): NCBI GI: 239610323 Blast Desc: ankyrin repeat protein [Ajellomyces dermatitidis ER-3]
  misc_feature (4)..(882): NCBI GI: 238845951 Blast Desc: ankyrin repeat protein [Microsporum canis CBS 113480]
  misc_feature (167)..(1325): NCBI GI: 255951228 Blast Desc: Pc22g24930 [Penicillium chrysogenum Wisconsin 54-1255] gi|211593398|emb|CAP99781.1| Pc22g24930 [Penicillium chrysogenum Wisconsin 54-1255]
  misc_feature (189)..(1061): NCBI GI: 170111436 Blast Desc: ectomycorrhiza-induced ankyrin-domain/NACHT-domain containing protein [Laccaria bicolor S238N-H82] gi|164638280|gb|EDR02559.1| ectomycorrhiza-induced containing
  misc_feature (1)..(968): NCBI GI: 212545278 Blast Desc: NACHT domain protein [Penicillium marneffei ATCC 18224] gi|210065762|gb|EEA19856.1| NACHT domain protein [Penicillium marneffei ATCC 18224]
  misc_feature (673)..(1339): SWISSPROT Homolog: EC 2.4.2.30 NAD(+) ADP-ribosyltransferase
MDPLSTVASLIAVVQISSSVILVCRDYYTSVKDAAKDIRRVIGEVEDVKSIAQRLIQTAWSDYKSDLPSLQDIGQPSGALQRCVEELIDLKASLKPRKAESWRWPFKKAEVEGRLRVLATIKATLQLALAADNAQAIVDVLNNTRTVPIIQEKVMFLSDLVEHDIEDRKREDCLQWLGDHDQLAKHENACIKSLEGTGHWTMENQEYLKWKAEPGLIWLKGYPGSGKTVLCAKIIQDLGRNCLDDDDIRICYFYFDASTQDNLSLDLLYKCFIHQLVSQTPRLPKFMEKLFHRHSDYRHGSGILSPVQWSKVFHELVCEFQKVFIVIDALDECEASIGLDTILATVSEISDISKYKVHLLATGRDLEQIRNSIFGTTAGSLAIGGENLDLDLQIALKHHLSTFPKFARWSTSLKRNITEALLAQANGSFRWLDCQVQELKKCSTQAAVRKLLNNLPESLPIYYTRTIDQFRDENRIMVQNLLRWVAFALRPLSIEEIASAISINVTHCDHPFIDENLELLDPTQFLDGCSSLLSTYPAADRDDGRVYVRLAHFSVKEFILSEYIQDSPCADFATEVHLAHLMLETSCIAYFQHAVTSLSDDNWTDYPLISYAGNFWLKHKELAGQHSVTDAIRTLMIDLFDNSKPYFNKWRQIASVDRPWLDEGDKQEDEYRPLYCAALFGLSDIVRVLIERGSDLNELNGIHGTALQAAAVKGHTEVMRVLIEAHADLNAKGGSFGSAITAASAYGHESIVNDLLEAGASADPPARWLDDGRTDPLFVAAKKGYLGICKLLLKYGAVDHFRMKERPGSALHAAVAAGHLDVVRELLRHEWVVSSNSPRMRGIISPASGGMRASQYSAAESGNIDILRELIGYGLNKDEILRYAARAGDETLVLEKLDNGANINEPGTISDHRRPLLSAARGGHASIVRELLARGADPSLTTEYSSALMEAVEGRNIDVVRMIIAAGGIPKKDSYPRPSHVLSSAVRGRQEQIVEILIDAGIETHDSLISSALHEDNTGFKMLLKFGADIHQEDSDDDASILQASARGGSIPIVEYLLKNGISPDKTIGHITTPLMEAIRSHNWHAARILIDWGADVNANPPIYRDPGSGSGAVYHGLTWPPTKAYETPLTMAIRAQSPGLARLLMSRGATVKPDQPTTTGTPLLYAVWECYADLVEQLLIKGADPNQRGTALKRKHATFPLLLAAEKENVEIIDLLISAGARVNDQDEQGFSALHVAAACDQSKGLECLVKKHAADFHLRLHNGSQPLHSAASRGTAASVNMLLDAGAQIHARNDVGRTPLHWAVEKGNWDTVEVLLDRGADVHIKTDDDGPKTVLDMAYLAKDMNKWDKIRRIEKSWDDGRVDKLLARINEMTK

SEQ ID NO: 17848 - DNA, 672 bp, Muscodor strobelii
  misc_feature: SGI cDNA ID NO. 565971
  misc_feature: Encodes the peptide sequence at SEQ ID NO 17849
atgaagcttgagccgaggctgttcaatgccctcagcgcaggagtgacgggaggctacctacagcagagtttccaggccgtcgcccagagctatcccttgtcgctgacagacggcgaatgtggttatttcacttttgtccccgtaatgaaagaattttgcggtacattgtctcatggtacagtaaacgatgcccattgtgataatattattaacgaagaaaactggtgcgatacaataccatggaccctcgacgggcaggcggacggcgaaatagtcttcgtcaaaacagattgcggaacaagagaaccattgcccttggaacagcaggacatggtttatcagcactcaggcgttgcgctggaccctaaagcagttgctgacatgcttaatacttgggtccaagacacatgcaaagtagactaccaattctgggacgactattttcaagtcacaggcaagaactggtcgcctgatttgctcggacctaatggtgataatttgaagaaggcgattgggcactgtggaaagctgacttcatggcatttcagcatgggcaatgataatagttggtttgccgatggcaagctacccattggggtaaagagttgtgtcggaactcaagttgtcaatgctggtggaagctcagccggaggttgccgaggagcaggttaa

SEQ ID NO: 17849 - protein, 223 aa, Muscodor strobelii
  misc_feature: SGI Peptide ID NO. 565971
MKLEPRLFNALSAGVTGGYLQQSFQAVAQSYPLSLTDGECGYFTFVPVMKEFCGTLSHGTVNDAHCDNIINEENWCDTIPWTLDGQADGEIVFVKTDCGTREPLPLEQQDMVYQHSGVALDPKAVADMLNTWVQDTCKVDYQFWDDYFQVTGKNWSPDLLGPNGDNLKKAIGHCGKLTSWHFSMGNDNSWFADGKLPIGVKSCVGTQVVNAGGSSAGGCRGAG

SEQ ID NO: 17850 - DNA, 1680 bp, Muscodor strobelii
  misc_feature: SGI cDNA ID NO. 565972
  misc_feature: Encodes the peptide sequence at SEQ ID NO 17851
atggctactgatgagatgtcgctgaaggatttcgtggtcccaacccagaaggaactcaaggggtttgatctcgacgatccacaaatcatcaatctcatccacgatgctgagcaagcagctgagtccgaccgtcatttgacgattagacaggccattagcaagtataagaaggctgtattctgggccatgttcctgtcgactagtcttatcatggagggttacgacttggtcctcataaactcattcttcgggcagacacagtttcaaaataggttcggagagccgagtcccacaagtcctggggcgaagattattacagccccatggcagtcaggcttgtcaaactcttccgtcgtgggtcagctggttgggcttcttgtcaactcttatgcccaggacagattcggttgcaggccaacaatgatggtctttatgtcatggatggcaatattcattttcattccggtctttgctccatcccttcccgtgctggctgtaggagaggcgctgtgtggtgtttcatggggcgtgtttcaaactttatcaacgacgtacgcctctgaagttgtcccgacaattttgagaccttatgtcacagcatacgtctgcatgtgctggggagctggaatcttactctcttcaggtgtgattcgcgccgttgtcggtatccatggtgatcttggctggagacttccattcgtcctgcaatggatatggcctgtgccacttttcatcggggcgtaccttgctcccgagtcaccatggaatgccataagacgtggcaactttgagcaggctagaaatagtctagtgcgtcttcgccaagcatcgccagacattgaccacgaagtgaattgtaccttggcatacattcaacatactactactttagagaaagccgaaactgatgggtctagctttcttgaattgttccagggaacaaatcttcgacgaaccgagattaattgcgtagtatgggctgcccagattctgtgtggcaacgccatccttggctattcagttgttttcctggaagctgccggcttttccgaagaacaagcctttgatctcaatattgcactgtccgcgacctatatcattggcggagttatctgttggcttctgttcccccattttgggagagcgacaatatacatgtcaggtttgactcttatgttcttcatcctcatagtcatcggagctctcggcttcgtgcatgacagccaaagtgcggagttggccatcggaatactactcgttctctcaacattggtcaatttgacaactattgggcctgcctgctaccccattgtagccgagacaccatctgggaggctgagatacaaaacaattgtagctggacgcatagtctacaatattactggcatattttcgaactcggtaacaccccgcatgataagtgcgtcaagttggaactggggagcaaaatcagcgcttttctacgcaggaacaaatcttctttgcaacgtatggtgctggttccgcctgccggagaccaaagaccgttcgttcggtgagatcgatttactatttgacaacaaagtatctgcaagaaagttcaagcatacaaaagtagaccaatttgcacatcagagtattgatatggggaagggggatgcgatagtagacgagaagaatcattatgcgcaccaagagtga

SEQ ID NO: 17851 - protein, 559 aa, Muscodor strobelii
  misc_feature: SGI Peptide ID NO. 565972
  misc_feature (65)..(466): Pfam Id: PF07690 Pfam Desc: Major Facilitator Superfamily
  misc_feature (61)..(518): Pfam Id: PF00083 Pfam Desc: Sugar (and other) transporter
  misc_feature (116)..(466): Pfam Id: PF07690 Pfam Desc: Major Facilitator Superfamily
  misc_feature (9)..(546): NCBI GI: 159128376 Blast Desc: MFS alpha-glucoside transporter, [Aspergillus fumigatus A1163]
  misc_feature (9)..(546): NCBI GI: 70985975 Blast Desc: MFS alpha-glucoside transporter [Aspergillus fumigatus Af293] gi|66846120|gb|EAL86453.1| MFS alpha-glucoside transporter, [Aspergillus fumigatus Af293]
  misc_feature (9)..(546): NCBI GI: 119473897 Blast Desc: MFS alpha-glucoside transporter, [Neosartorya fischeri NRRL 181] gi|119406977|gb|EAW16927.1| MFS alpha-glucoside transporter, [Neosartorya fischeri NRRL 181]
  misc_feature (15)..(559): NCBI GI: 242788370 Blast Desc: MFS alpha-glucoside transporter, [Talaromyces stipitatus ATCC 10500] gi|218721352|gb|EED20771.1| MFS alpha-glucoside transporter, [Talaromyces stipitatus ATCC 10500]
  misc_feature (12)..(551): NCBI GI: 121712214 Blast Desc: MFS alpha-glucoside transporter, [Aspergillus clavatus NRRL 1] gi|119401874|gb|EAW12296.1| MFS alpha-glucoside transporter, [Aspergillus clavatus NRRL 1]
  misc_feature (12)..(559): NCBI GI: 67538268 Blast Desc: AN5304.2 [Aspergillus nidulans FGSC A4] gi|40743274|gb|EAA62464.1| AN5304.2 [Aspergillus nidulans FGSC A4] gi|259485257|tpe|CBF82135.1| TPA: MFS alpha-glucoside FGSC
  misc_feature (12)..(535): NCBI GI: 115400065 Blast Desc: conserved [Aspergillus terreus NIH2624] gi|114191287|gb|EAU32987.1| conserved [Aspergillus terreus NIH2624]
  misc_feature (9)..(559): NCBI GI: 256721381 Blast Desc: NECHADRAFT_44721 [Nectria haematococca mpVI 77-13-4]
  misc_feature (6)..(547): NCBI GI: 256723018 Blast Desc: NECHADRAFT_97430 [Nectria haematococca mpVI 77-13-4]
  misc_feature (15)..(533): NCBI GI: 212544033 Blast Desc: MFS alpha-glucoside transporter, [Penicillium marneffei ATCC 18224] gi|210067078|gb|EEA21171.1| MFS alpha-glucoside transporter, [Penicillium marneffei ATCC 18224]
MATDEMSLKDFVVPTQKELKGFDLDDPQIINLIHDAEQAAESDRHLTIRQAISKYKKAVFWAMFLSTSLIMEGYDLVLINSFFGQTQFQNRFGEPSPTSPGAKIITAPWQSGLSNSSVVGQLVGLLVNSYAQDRFGCRPTMMVFMSWMAIFIFIPVFAPSLPVLAVGEALCGVSWGVFQTLSTTYASEVVPTILRPYVTAYVCMCWGAGILLSSGVIRAVVGIHGDLGWRLPFVLQWIWPVPLFIGAYLAPESPWNAIRRGNFEQARNSLVRLRQASPDIDHEVNCTLAYIQHTTTLEKAETDGSSFLELFQGTNLRRTEINCVVWAAQILCGNAILGYSVVFLEAAGFSEEQAFDLNIALSATYIIGGVICWLLFPHFGRATIYMSGLTLMFFILIVIGALGFVHDSQSAELAIGILLVLSTLVNLTTIGPACYPIVAETPSGRLRYKTIVAGRIVYNITGIFSNSVTPRMISASSWNWGAKSALFYAGTNLLCNVWCWFRLPETKDRSFGEIDLLFDNKVSARKFKHTKVDQFAHQSIDMGKGDAIVDEKNHYAHQE

SEQ ID NO: 17852 - DNA, 226 bp, Muscodor strobelii
  misc_feature: SGI EST ID NO. CUFF.42093.0
  misc_feature: Variant of the nucleotide sequence at SEQ ID NO 17850
gtccgaccgtcatttgacgattagacaggccattagcaagtataagaaggctgtattctgggccatgttcctgtcgactagtcttatcatggagggttacgacttggtcctcataaactcattcttcgggcagacacagtttcaaaataggttcggagagccgagtcccacaagtcctggggcgaagattattacagccccatggcagtcaggcttgtcaaactct

SEQ ID NO: 17853 - DNA, 1758 bp, Muscodor strobelii
  misc_feature: SGI cDNA ID NO. 565973
  misc_feature: Encodes the peptide sequence at SEQ ID NO 17854
atggaaaaatataccgctacgtatcgcaacgatcagcgggatctcacaacgacggaggatcttctatctaatattgacgatcgcatacatgggccgttacagggcttcattgagaaatacttcggccatttccagtacagctacgacaataactgcctaaaaattcacgactcaacaggtgcatccaaaacttacaatatcccatcactcgcaccgtcgccagaccggttcattgcctggttcaacgacgttgtcgtgcgtgatcaagaccctcaacgatgttcgtgggaaattgaaaacgatgcaaccttcgaaagctcgcaattcttcctaagcaagccatccaactcaacaaccacggataaacctcatccactcgggactgaaatcaacgtgatcggccaattctaccaacaccaagatgcccaataccaacacggactattacgtctttgcaaactagctcagttggtctttgcaagccagcctactcggctattcctgcacggattctacatccgtgggtcactagcagagttctgggtattcgaccgttctggcctttactgcagcgattttatacatattcaaagagactttactaaattcatcgccaccctcttcagttatcagcagatgacagatcgagagcttggcagggatcacctcctccagagggattcaattggtactcatatcacacttcgcggtacgggtaaggtctatatcgaccctcagcccatcgaaagccgtgatgatttgataggcagtggcatgtcttgtttccgagctcgacatccgagttcagatcaatggactcacgtcatcaaattcaagtggcgatgggctagacatcgatcggaaaatgagttgttgcaactagcaatagaccggggtgcccggggcgccgtctctgtaactcattacgaagaatttgaggatacggcgtacttacgtcgagctcttcgctggggaccgcacaaacgattcaaacgatcgcctactaacgataacaacggcgcagcccccgattcaaagcaagagcgtgcgctcgcagactacacagaagaaaccgagcactatttccaaaaacgcatcctgacctgcatcatgacgtcgcctctcggccgaccactgcattcattccagtctctcacagagttactacaggccttctgcggggcgataaaatgtcatcgctcgctataccatgacgccggaatcctccatcaagacatatcaccagggaacatcatcatagtcgacacccaagaccccaactctgttgatggaattctcattgatctcgacgtcgcagttcagcacgacttcggcgctaattctcaggtaggcatcattgggacaagaccattcatggctattggagttctcgaaggcgagctacatagctatcgtcatgacttggagtcgtttttctacgttttgctttggacgctcatttctaaccacgagcaaaatcctccggcttcaagtaggttgtgtcgctggggtaggagcgatttggagtttgatgacttggcgaaatacaaggctcatgatatgaaagagggactagtggctttcttggaggaattgtcacctgaatacagggtattgcagccactgatcgagaaattacatgagctggtcttttctccaaatagtggcactgagcccgagcctgggagctggaaacgattgtatgatgatatgattgactcgtttggagaggcgatcgcttgcagcgagcatacatag

SEQ ID NO: 17854 - protein, 585 aa, Muscodor strobelii
  misc_feature: SGI Peptide ID NO. 565973
  misc_feature (19)..(584): NCBI GI: 238839613 Blast Desc: conserved [Microsporum canis CBS 113480]
  misc_feature (120)..(575): NCBI GI: 256729441 Blast Desc: NECHADRAFT_84008 [Nectria haematococca mpVI 77-13-4]
  misc_feature (126)..(579): NCBI GI: 256725368 Blast Desc: NECHADRAFT_83171 [Nectria haematococca mpVI 77-13-4]
  misc_feature (33)..(583): NCBI GI: 154282847 Blast Desc: [Ajellomyces capsulatus NAm1] gi|150410399|gb|EDN05787.1| [Ajellomyces capsulatus NAm1]
  misc_feature (15)..(579): NCBI GI: 46109738 Blast Desc: FG01751.1 [Gibberella zeae PH-1]
  misc_feature (19)..(567): NCBI GI: 238845689 Blast Desc: conserved [Microsporum canis CBS 113480]
  misc_feature (33)..(579): NCBI GI: 119177306 Blast Desc: CIMG_07606 [Coccidioides immitis RS]
  misc_feature (129)..(580): NCBI GI: 154276464 Blast Desc: [Ajellomyces capsulatus NAm1] gi|150414150|gb|EDN09515.1| [Ajellomyces capsulatus NAm1]
  misc_feature (33)..(583): NCBI GI: 154280963 Blast Desc: [Ajellomyces capsulatus NAm1] gi|150411473|gb|EDN06861.1| [Ajellomyces capsulatus NAm1]
  misc_feature (33)..(583): NCBI GI: 225559996 Blast Desc: conserved [Ajellomyces capsulatus G186AR]
MEKYTATYRNDQRDLTTTEDLLSNIDDRIHGPLQGFIEKYFGHFQYSYDNNCLKIHDSTGASKTYNIPSLAPSPDRFIAWFNDVVVRDQDPQRCSWEIENDATFESSQFFLSKPSNSTTTDKPHPLGTEINVIGQFYQHQDAQYQHGLLRLCKLAQLVFASQPTRLFLHGFYIRGSLAEFWVFDRSGLYCSDFIHIQRDFTKFIATLFSYQQMTDRELGRDHLLQRDSIGTHITLRGTGKVYIDPQPIESRDDLIGSGMSCFRARHPSSDQWTHVIKFKWRWARHRSENELLQLAIDRGARGAVSVTHYEEFEDTAYLRRALRWGPHKRFKRSPTNDNNGAAPDSKQERALADYTEETEHYFQKRILTCIMTSPLGRPLHSFQSLTELLQAFCGAIKCHRSLYHDAGILHQDISPGNIIIVDTQDPNSVDGILIDLDVAVQHDFGANSQVGIIGTRPFMAIGVLEGELHSYRHDLESFFYVLLWTLISNHEQNPPASSRLCRWGRSDLEFDDLAKYKAHDMKEGLVAFLEELSPEYRVLQPLIEKLHELVFSPNSGTEPEPGSWKRLYDDMIDSFGEAIACSEHT

SEQ ID NO: 17855 - DNA, 442 bp, Muscodor strobelii
  misc_feature: SGI EST ID NO. CUFF.42110.0
  misc_feature: Variant of the nucleotide sequence at SEQ ID NO 17853
ctcaggtaggcatcattgggacaagaccattcatggctattggagttctcgaaggcgagctacatagctatcgtcatgacttggagtcgtttttctacgttttgctttggacgctcatttctaaccacgagcaaaatcctccggcttcaagtaggttgtgtcgctggggtaggagcgatttggagtttgatgacttggcgaaatacaaggctcatgatatgaaagagggactagtggctttcttggaggaattgtcacctgaatacagggtattgcagccactgatcgagaaattacatgagctggtcttttctccaaatagtggcactgagcccgagcctgggagctggaaacgattgtatgatgatatgattgactcgtttggagaggcgatcgcttgcagcgagcatacatagatgtatacaacagagatagagcaatt

SEQ ID NO: 17856 - DNA, 3132 bp, Muscodor strobelii
  misc_feature: SGI cDNA ID NO. 565974
  misc_feature: Encodes the peptide sequence at SEQ ID NO 17857
atgtctcaacagccactgagccagttcggggttgcaccgtcgtcttaccctgctgcgtcatcctccgctgctggcataccacccacctccctcaagtccgcatccccgccgcctccgaacgcgaaccaattcgccaacagcgacgacaacagcctctccaacgccgctcaagctggtgccggcacctctcaacacaagcgtgtctaccaggcatgcatcccgtgtcgccgacgcaaggtccgctgcgacctcggcagtgtcgacaacccccacgatcccccttgcatgcgatgtcgtcgcgagagcaaggaatgtttcttcagcgccacccgtagaaagaggaagaatgaagacgacttagaagagtatcccgacgagtacatcattcgcaacggtcgaaaacgccactacctcgacgacacacctcccgtcctcgacgagaagaaggccttcaaccctgtccctctgactcccagcggcactggcaacagatctcaaccattaagaagacctgacgacttcgacgatggcaagggtggagatcctcgtcgcggtagttatgccgaatcggccgaggactccaatgtccagatggagaacctcgaggcacaaaatgttatgaggaagaatatctatggccctcatgatgcactggatctgctgtacaaagccgccaccaatagtgaaaatcccggagaggtccgccctgaaccttcaccagtaacctcgatcaataattccacgcccagcatcatccagcctggccaaccatccatacccggccgcaaaacacctcatacccattccgcctcccttggcgctcgccccacgtcccggcttgcttccaagtctgctgatccgatcgatccccgactcatacctggtaacgaagcggatgagatagccaaggttgaagctcgtctcagcgtggaaaatgaacctggatatcatgaggcgttgcaggcctgggctcgcttcagatttgtccgagctggatggtttaccaaggaggaggctatcaagtatatcgtctactactacgaatatctctctcctatgactccggtctcgccgcctacgtttcgcggtcctgcttctcacgttaccttgctaacagaagagcccattcttgctgtcactttactcacaattgcttcgagatactacagtatagtaacgactggcggtcattgtcgatctcatgcgatacacgaggagctatggcgatacctgcgtaggatgatcgaaagatgtctctggggccaggaggcattcggtggtggtttctgtggatcgggcgctgatgacgcacaaacttccagcactgctccgtggagaggcttgcggaaaggcagtcttcgcacccttggcacgattgaatcgctgttgatattaactgagtggcatccccgagctttacactttcctccggaggaagccatcgatgagctgatgctcccgtcgcatgacccacgctactcgatatcgacggaagacgaggcgatcccacgacctggcggtaacgtcggaggccgaaggattgaaagctggctcgagcccgcctggcggagtgatcgcatgtgttggatgctgctcagtaatgcgcaaggattggcctatgagctgggtgtgttcgatgacatcgatgagatgctggcaacgaacgcgattcaaagaccggagtacgaagatgaatcttatcgtttgcgcgcgatgcgcatcaagcgcttacttctgatctacctgacccagctggccggacgtcttggctggacgaacatggtaccagagagcattcggaggactgacccagttttctcgcagcgacgcccagtcacgaatgaaggacaaacaccaggaacgaacacatcagcgtcaactttcgtgtacgtgcctgatgtggagctcgacgatcagatcattcagtgctgggtcggcgtcagcaacgccatgcatttgggcaacgagagactcttccgatcgcggaagcacacgaccgagataatacagagcggcaactacactaggctgctcaaggatttccagcccatcttgaaggaatggtggaaggaatttgagcgttttcgtctgcccgagtttatccgccatatcctaacgattgagtatgaatatgtgcgcatttatgtcaactctttggctctgcaggccgtggtggagaggtgtaccaataacgctactggtgccactactagcaatcatgaggctttccgcggtgttaatggcagcgcagagctatcgccccagacacagaactatctcggtgctctgcccattggtcatctaggtcgctttggccctgaagaccaagagtacatcaaagaggttgtgcttggttctcgtagcctgctgagcactgttgtcgatggactctacaaaggtggctatctgaagcatgccccggtccggacctatttcagaatcatcagcggcgctatgttcctgctcaaaacatttgctttaggtgcgccgaagtctgatgtcgaaatgagtatcagtctgctggatcgaactgttcatgcgctgcggacttgcgtcgtggatgatatacatcttgggacgagattcggtgatttgctcgaatcgcttacgacgagattgagagatcggtttaagcatgctcctaccgcggaggctaagaacctcgcggtcaatggggaggctgcgaaggtgaatgtaaatgggcagatggcgaatctgggtgtagctaatgggtttaatgggcacggggtggggttcgctgttcctgaacgtacatctaccccctccggcggcgtttcagcgacgcctttcgatataccatcgggaaacttcccattccccgcgaatccggcgtcgttctttggaccgagtacgccggtcgcgaataacaatagtgggtcggcgatggacacgtccaatggcttaaatgagaatatgtttgatgcgagtgattggaccacggacgatatgtggtatctaccaccgggtgcgggtctgttccagaatgtcggcgagaactcgaatgttactatgacggatcagggcgttaacgtgggcggcgttgatttacttgagtttatggctatggatcctcctcccgggttcggcatggatgggaactatggagcttga

SEQ ID NO: 17857 - protein, 1043 aa, Muscodor strobelii
  misc_feature: SGI Peptide ID NO. 565974
  misc_feature (70)..(115): Pfam Id: PF00172 Pfam Desc: Fungal Zn(2)-Cys(6) binuclear cluster domain
  misc_feature (28)..(1042): NCBI GI: 46116534 Blast Desc: FG04109.1 [Gibberella zeae PH-1]
  misc_feature (6)..(1038): NCBI GI: 256725732 Blast Desc: [Nectria haematococca mpVI 77-13-4]
  misc_feature (64)..(1039): NCBI GI: 164429109 Blast Desc: NCU00445 [Neurospora crassa OR74A] gi|157072414|gb|EAA27473.2| conserved [Neurospora crassa OR74A]
  misc_feature (63)..(1043): NCBI GI: 261359290 Blast Desc: conserved [Verticillium albo-atrum VaMs.102]
  misc_feature (6)..(1015): NCBI GI: 116207652 Blast Desc: CHGG_03119 [Chaetomium globosum CBS 148.51] gi|88183716|gb|EAQ91184.1| CHGG_03119 [Chaetomium globosum CBS 148.51]
  misc_feature (47)..(1030): NCBI GI: 156040778 Blast Desc: SS1G_11367 [Sclerotinia sclerotiorum 1980] gi|154695751|gb|EDN95489.1| SS1G_11367 [Sclerotinia sclerotiorum 1980]
  misc_feature (37)..(879): NCBI GI: 171686154 Blast Desc: protein product [Podospora anserina] gi|170943038|emb|CAP68691.1| protein product [Podospora anserina]
  misc_feature (414)..(1033): NCBI GI: 145602077 Blast Desc: MGG_12915 [Magnaporthe grisea 70-15] gi|145010525|gb|EDJ95181.1| MGG_12915 [Magnaporthe grisea 70-15]
  misc_feature (29)..(1034): NCBI GI: 189199080 Blast Desc: conserved [Pyrenophora tritici-repentis Pt-1C-BFP] gi|187982976|gb|EDU48464.1| conserved [Pyrenophora tritici-repentis Pt-1C-BFP]
  misc_feature (88)..(1034): NCBI GI: 169613895 Blast Desc: SNOG_10082 [Phaeosphaeria nodorum SN15] gi|160707234|gb|EAT82417.2| SNOG_10082 [Phaeosphaeria nodorum SN15]
MSQQPLSQFGVAPSSYPAASSSAAGIPPTSLKSASPPPPNANQFANSDDNSLSNAAQAGAGTSQHKRVYQACIPCRRRKVRCDLGSVDNPHDPPCMRCRRESKECFFSATRRKRKNEDDLEEYPDEYIIRNGRKRHYLDDTPPVLDEKKAFNPVPLTPSGTGNRSQPLRRPDDFDDGKGGDPRRGSYAESAEDSNVQMENLEAQNVMRKNIYGPHDALDLLYKAATNSENPGEVRPEPSPVTSINNSTPSIIQPGQPSIPGRKTPHTHSASLGARPTSRLASKSADPIDPRLIPGNEADEIAKVEARLSVENEPGYHEALQAWARFRFVRAGWFTKEEAIKYIVYYYEYLSPMTPVSPPTFRGPASHVTLLTEEPILAVTLLTIASRYYSIVTTGGHCRSHAIHEELWRYLRRMIERCLWGQEAFGGGFCGSGADDAQTSSTAPWRGLRKGSLRTLGTIESLLILTEWHPRALHFPPEEAIDELMLPSHDPRYSISTEDEAIPRPGGNVGGRRIESWLEPAWRSDRMCWMLLSNAQGLAYELGVFDDIDEMLATNAIQRPEYEDESYRLRAMRIKRLLLIYLTQLAGRLGWTNMVPESIRRTDPVFSQRRPVTNEGQTPGTNTSASTFVYVPDVELDDQIIQCWVGVSNAMHLGNERLFRSRKHTTEIIQSGNYTRLLKDFQPILKEWWKEFERFRLPEFIRHILTIEYEYVRIYVNSLALQAVVERCTNNATGATTSNHEAFRGVNGSAELSPQTQNYLGALPIGHLGRFGPEDQEYIKEVVLGSRSLLSTVVDGLYKGGYLKHAPVRTYFRIISGAMFLLKTFALGAPKSDVEMSISLLDRTVHALRTCVVDDIHLGTRFGDLLESLTTRLRDRFKHAPTAEAKNLAVNGEAAKVNVNGQMANLGVANGFNGHGVGFAVPERTSTPSGGVSATPFDIPSGNFPFPANPASFFGPSTPVANNNSGSAMDTSNGLNENMFDASDWTTDDMWYLPPGAGLFQNVGENSNVTMTDQGVNVGGVDLLEFMAMDPPPGFGMDGNYGA

SEQ ID NO: 17858 - DNA, 3988 bp, Muscodor strobelii
  misc_feature: SGI EST ID NO. CUFF.42364.2
  misc_feature: Variant of the nucleotide sequence at SEQ ID NO 17856
tctctatctcttccatttcacatactgctgctatctgtactatcgcacttacaacctgattgatgagaaccttttttctttccgcattgcgcgcgcgctgacgttgactttgacatataccgttgccctactttagtgcctggtctcgcccgggcggggactgtgattggcttttcgaccaagcggacgtctgcttagaggttcccgcgcccagacgccgatcacaggccagattccagaagcggcaacgacctgtcccacttggaggctgaccggcgctggacccaaggagagggccgaatcgctgataaaccccagactccatacctacctcacatccccctcatgctctcataagccctcgaaacccgccttaagccgagatccccattcccgaccgactcgaccaccggtgagcagagagtcagaaacagcgacgctgtgcttaggcttagggaaatgtctcaacagccactgagccagttcggggttgcaccgtcgtcttaccctgctgcgtcatcctccgctgctggcataccacccacctccctcaagtccgcatccccgccgcctccgaacgcgaaccaattcgccaacagcgacgacaacagcctctccaacgccgctcaagctggtgccggcacctctcaacacaagcgtgtctaccaggcatgcatcccgtgtcgccgacgcaaggtccgctgcgacctcggcagtgtcgacaacccccacgatcccccttgcatgcgatgtcgtcgcgagagcaaggaatgtttcttcagcgccacccgtagaaagaggaagaatgaagacgacttagaagagtatcccgacgagtacatcattcgcaacggtcgaaaacgccactacctcgacgacacacctcccgtcctcgacgagaagaaggccttcaaccctgtccctctgactcccagcggcactggcaacagatctcaaccattaagaagacctgacgacttcgacgatggcaagggtggagatcctcgtcgcggtagttatgccgaatcggccgaggactccaatgtccagatggagaacctcgaggcacaaaatgttatgaggaagaatatctatggccctcatgatgcactggatctgctgtacaaagccgccaccaataggtacgtctccatatctcgcttccaactattgatggctcgaagaaaggcgagttgctcatacgaatgacacagcagtgaaaatcccggagaggtccgccctgaaccttcaccagtaacctcgatcaataattccacgcccagcatcatccagcctggccaaccatccatacccggccgcaaaacacctcatacccattccgcctcccttggcgctcgccccacgtcccggcttgcttccaagtctgctgatccgatcgatccccgactcatacctggtaacgaagcggatgagatagccaaggttgaagctcgtctcagcgtggaaaatgaacctggatatcatgaggcgttgcaggcctgggctcgcttcagatttgtccgagctggatggtttaccaaggaggaggctatcaagtatatcgtctactactacgaatatctctctcctatgactccggtctcgccgcctacgtttcgcggtcctgcttctcacgttaccttgctaacagaagagcccattcttgctgtcactttactcacaattgcttcgagatactacagtatagtaacgactggcggtcattgtcgatctcatgcgatacacgaggagctatggcgatacctgcgtaggatgatcgaaagatgtctctggggccaggaggcattcggtggtggtttctgtggatcgggcgctgatgacgcacaaacttccagcactgctccgtggagaggcttgcggaaaggcagtcttcgcacccttggcacgattgaatcgctgttgatattaactgagtggcatccccgagctttacactttcctccggaggaagccatcgatgagctgatgctcccgtcgcatgacccacgctactcgatatcgacggaagacgaggcgatcccacgacctggcggtaacgtcggaggccgaaggattgaaagctggctcgagcccgcctggcggagtgatcgcatgtgttggatgctgctcagtaatgcgcaaggattggcctatgagctgggtgtgttcgatgacatcgatgagatgctggcaacgaacgcgattcaaagaccggagtacgaagatgaatcttatcgtttgcgcgcgatgcgcatcaagcgcttacttctgatctacctgacccagctggccggacgtcttggctggacgaacatggtaccagagagcattcggaggactgacccagttttctcgcagcgacgcccagtcacgaatgaaggacaaacaccaggaacgaacacatcagcgtcaactttcgtgtacgtgcctgatgtggagctcgacgatcagatcattcagtgctgggtcggcgtcagcaacgccatgcatttgggcaacgagagactcttccgatcgcggaagcacacgaccgagataatacagagcggcaactacactaggctgctcaaggatttccagcccatcttgaaggaatggtggaaggaatttgagcgttttcgtctgcccgagtttatccgccatatcctaacgattgagtatgaatatgtgcgcatttatgtcaactctttggctctgcaggccgtggtggagaggtgtaccaataacgctactggtgccactactagcaatcatgaggctttccgcggtgttaatggcagcgcagagctatcgccccagacacagaactatctcggtgctctgcccattggtcatctaggtcgctttggccctgaagaccaagagtacatcaaagaggttgtgcttggttctcgtagcctgctgagcactgttgtcgatggactctacaaaggtggctatctgaagcatgccccggtccggacctatttcagaatcatcagcggcgctatgttcctgctcaaaacatttgctttaggtgcgccgaagtctgatgtcgaaatgagtatcagtctgctggatcgaactgttcatgcgctgcggacttgcgtcgtggatgatatacatcttgggacgagattcggtgatttgctcgaatcgcttacgacgagattgagagatcggtttaagcatgctcctaccgcggaggctaagaacctcgcggtcaatggggaggctgcgaaggtgaatgtaaatgggcagatggcgaatctgggtgtagctaatgggtttaatgggcacggggtggggttcgctgttcctgaacgtacatctaccccctccggcggcgtttcagcgacgcctttcgatataccatcgggaaacttcccattccccgcgaatccggcgtcgttctttggaccgagtacgccggtcgcgaataacaatagtgggtcggcgatggacacgtccaatggcttaaatgagaatatgtttgatgcgagtgattggaccacggacgatatgtggtatctaccaccgggtgcgggtctgttccagaatgtcggcgagaactcgaatgttactatgacggatcagggcgttaacgtgggcggcgttgatttacttgagtttatggctatggatcctcctcccgggttcggcatggatgggaactatggagcttgagggccgactgagcaggctggtcgaggctcgagcgagactgagagtgggaaagtgacgaacatgatgttgatttgctgagcaaagctggtgaattgttgaggactatatgggaagggctgcatcggtatcgaggtgttgtggtctgtgcattatcatctatttagctgtggctggtgttccggcagggagcatgtaggggcgggcgttggaagctacttatgtgcttgctaagaggttcgagcttgagtttaactgagacttctccgtgagaggagagaataaaaggcgtttgacattgtgcctttgggcgcgaacctgagtg

SEQ ID NO: 17859 - DNA, 3135 bp, Muscodor strobelii
  misc_feature: SGI cDNA ID NO. 565975
  misc_feature: Reduced expression when VOC is produced
  misc_feature: Encodes the peptide sequence at SEQ ID NO 17860
atgtctcaacagccactgagccagttcggggttgcaccgtcgtcttaccctgctgcgtcatcctccgctgctggcataccacccacctccctcaagtccgcatccccgccgcctccgaacgcgaaccaattcgccaacagcgacgacaacagcctctccaacgccgctcaagctggtgccggcacctctcaacacaagcgtgtctaccaggcatgcatcccgtgtcgccgacgcaaggtccgctgcgacctcggcagtgtcgacaacccccacgatcccccttgcatgcgatgtcgtcgcgagagcaaggaatgtttcttcagcgccacccgtagaaagaggaagaatgaagacgacttagaagagtatcccgacgagtacatcattcgcaacggtcgaaaacgccactacctcgacgacacacctcccgtcctcgacgagaagaaggccttcaaccctgtccctctgactcccagcggcactggcaacagatctcaaccattaagaagacctgacgacttcgacgatggcaagggtggagatcctcgtcgcggtagttatgccgaatcggccgaggactccaatgtccagatggagaacctcgaggcacaaaatgttatgaggaagaatatctatggccctcatgatgcactggatctgctgtacaaagccgccaccaatagcagtgaaaatcccggagaggtccgccctgaaccttcaccagtaacctcgatcaataattccacgcccagcatcatccagcctggccaaccatccatacccggccgcaaaacacctcatacccattccgcctcccttggcgctcgccccacgtcccggcttgcttccaagtctgctgatccgatcgatccccgactcatacctggtaacgaagcggatgagatagccaaggttgaagctcgtctcagcgtggaaaatgaacctggatatcatgaggcgttgcaggcctgggctcgcttcagatttgtccgagctggatggtttaccaaggaggaggctatcaagtatatcgtctactactacgaatatctctctcctatgactccggtctcgccgcctacgtttcgcggtcctgcttctcacgttaccttgctaacagaagagcccattcttgctgtcactttactcacaattgcttcgagatactacagtatagtaacgactggcggtcattgtcgatctcatgcgatacacgaggagctatggcgatacctgcgtaggatgatcgaaagatgtctctggggccaggaggcattcggtggtggtttctgtggatcgggcgctgatgacgcacaaacttccagcactgctccgtggagaggcttgcggaaaggcagtcttcgcacccttggcacgattgaatcgctgttgatattaactgagtggcatccccgagctttacactttcctccggaggaagccatcgatgagctgatgctcccgtcgcatgacccacgctactcgatatcgacggaagacgaggcgatcccacgacctggcggtaacgtcggaggccgaaggattgaaagctggctcgagcccgcctggcggagtgatcgcatgtgttggatgctgctcagtaatgcgcaaggattggcctatgagctgggtgtgttcgatgacatcgatgagatgctggcaacgaacgcgattcaaagaccggagtacgaagatgaatcttatcgtttgcgcgcgatgcgcatcaagcgcttacttctgatctacctgacccagctggccggacgtcttggctggacgaacatggtaccagagagcattcggaggactgacccagttttctcgcagcgacgcccagtcacgaatgaaggacaaacaccaggaacgaacacatcagcgtcaactttcgtgtacgtgcctgatgtggagctcgacgatcagatcattcagtgctgggtcggcgtcagcaacgccatgcatttgggcaacgagagactcttccgatcgcggaagcacacgaccgagataatacagagcggcaactacactaggctgctcaaggatttccagcccatcttgaaggaatggtggaaggaatttgagcgttttcgtctgcccgagtttatccgccatatcctaacgattgagtatgaatatgtgcgcatttatgtcaactctttggctctgcaggccgtggtggagaggtgtaccaataacgctactggtgccactactagcaatcatgaggctttccgcggtgttaatggcagcgcagagctatcgccccagacacagaactatctcggtgctctgcccattggtcatctaggtcgctttggccctgaagaccaagagtacatcaaagaggttgtgcttggttctcgtagcctgctgagcactgttgtcgatggactctacaaaggtggctatctgaagcatgccccggtccggacctatttcagaatcatcagcggcgctatgttcctgctcaaaacatttgctttaggtgcgccgaagtctgatgtcgaaatgagtatcagtctgctggatcgaactgttcatgcgctgcggacttgcgtcgtggatgatatacatcttgggacgagattcggtgatttgctcgaatcgcttacgacgagattgagagatcggtttaagcatgctcctaccgcggaggctaagaacctcgcggtcaatggggaggctgcgaaggtgaatgtaaatgggcagatggcgaatctgggtgtagctaatgggtttaatgggcacggggtggggttcgctgttcctgaacgtacatctaccccctccggcggcgtttcagcgacgcctttcgatataccatcgggaaacttcccattccccgcgaatccggcgtcgttctttggaccgagtacgccggtcgcgaataacaatagtgggtcggcgatggacacgtccaatggcttaaatgagaatatgtttgatgcgagtgattggaccacggacgatatgtggtatctaccaccgggtgcgggtctgttccagaatgtcggcgagaactcgaatgttactatgacggatcagggcgttaacgtgggcggcgttgatttacttgagtttatggctatggatcctcctcccgggttcggcatggatgggaactatggagcttga

SEQ ID NO: 17860 - protein, 1044 aa, Muscodor strobelii
  misc_feature: SGI Peptide ID NO. 565975
  misc_feature (70)..(115): Pfam Id: PF00172 Pfam Desc: Fungal Zn(2)-Cys(6) binuclear cluster domain
  misc_feature (28)..(1043): NCBI GI: 46116534 Blast Desc: FG04109.1 [Gibberella zeae PH-1]
  misc_feature (6)..(1039): NCBI GI: 256725732 Blast Desc: [Nectria haematococca mpVI 77-13-4]
  misc_feature (64)..(1040): NCBI GI: 164429109 Blast Desc: NCU00445 [Neurospora crassa OR74A] gi|157072414|gb|EAA27473.2| conserved [Neurospora crassa OR74A]
  misc_feature (63)..(1044): NCBI GI: 261359290 Blast Desc: conserved [Verticillium albo-atrum VaMs.102]
  misc_feature (6)..(1016): NCBI GI: 116207652 Blast Desc: CHGG_03119 [Chaetomium globosum CBS 148.51] gi|88183716|gb|EAQ91184.1| CHGG_03119 [Chaetomium globosum CBS 148.51]
  misc_feature (47)..(1031): NCBI GI: 156040778 Blast Desc: SS1G_11367 [Sclerotinia sclerotiorum 1980] gi|154695751|gb|EDN95489.1| SS1G_11367 [Sclerotinia sclerotiorum 1980]
  misc_feature (37)..(880): NCBI GI: 171686154 Blast Desc: protein product [Podospora anserina] gi|170943038|emb|CAP68691.1| protein product [Podospora anserina]
  misc_feature (415)..(1034): NCBI GI: 145602077 Blast Desc: MGG_12915 [Magnaporthe grisea 70-15] gi|145010525|gb|EDJ95181.1| MGG_12915 [Magnaporthe grisea 70-15]
  misc_feature (29)..(1035): NCBI GI: 189199080 Blast Desc: conserved [Pyrenophora tritici-repentis Pt-1C-BFP] gi|187982976|gb|EDU48464.1| conserved [Pyrenophora tritici-repentis Pt-1C-BFP]
  misc_feature (88)..(1035): NCBI GI: 169613895 Blast Desc: SNOG_10082 [Phaeosphaeria nodorum SN15] gi|160707234|gb|EAT82417.2| SNOG_10082 [Phaeosphaeria nodorum SN15]
  misc_feature: Useful for introducing or modulating the production of volatile compounds
MSQQPLSQFGVAPSSYPAASSSAAGIPPTSLKSASPPPPNANQFANSDDNSLSNAAQAGAGTSQHKRVYQACIPCRRRKVRCDLGSVDNPHDPPCMRCRRESKECFFSATRRKRKNEDDLEEYPDEYIIRNGRKRHYLDDTPPVLDEKKAFNPVPLTPSGTGNRSQPLRRPDDFDDGKGGDPRRGSYAESAEDSNVQMENLEAQNVMRKNIYGPHDALDLLYKAATNSSENPGEVRPEPSPVTSINNSTPSIIQPGQPSIPGRKTPHTHSASLGARPTSRLASKSADPIDPRLIPGNEADEIAKVEARLSVENEPGYHEALQAWARFRFVRAGWFTKEEAIKYIVYYYEYLSPMTPVSPPTFRGPASHVTLLTEEPILAVTLLTIASRYYSIVTTGGHCRSHAIHEELWRYLRRMIERCLWGQEAFGGGFCGSGADDAQTSSTAPWRGLRKGSLRTLGTIESLLILTEWHPRALHFPPEEAIDELMLPSHDPRYSISTEDEAIPRPGGNVGGRRIESWLEPAWRSDRMCWMLLSNAQGLAYELGVFDDIDEMLATNAIQRPEYEDESYRLRAMRIKRLLLIYLTQLAGRLGWTNMVPESIRRTDPVFSQRRPVTNEGQTPGTNTSASTFVYVPDVELDDQIIQCWVGVSNAMHLGNERLFRSRKHTTEIIQSGNYTRLLKDFQPILKEWWKEFERFRLPEFIRHILTIEYEYVRIYVNSLALQAVVERCTNNATGATTSNHEAFRGVNGSAELSPQTQNYLGALPIGHLGRFGPEDQEYIKEVVLGSRSLLSTVVDGLYKGGYLKHAPVRTYFRIISGAMFLLKTFALGAPKSDVEMSISLLDRTVHALRTCVVDDIHLGTRFGDLLESLTTRLRDRFKHAPTAEAKNLAVNGEAAKVNVNGQMANLGVANGFNGHGVGFAVPERTSTPSGGVSATPFDIPSGNFPFPANPASFFGPSTPVANNNSGSAMDTSNGLNENMFDASDWTTDDMWYLPPGAGLFQNVGENSNVTMTDQGVNVGGVDLLEFMAMDPPPGFGMDGNYGA

SEQ ID NO: 17861 - DNA, 3988 bp, Muscodor strobelii; identical to SEQ ID NO: 17858
  misc_feature: SGI EST ID NO. CUFF.42364.2
  misc_feature: Variant of the nucleotide sequence at SEQ ID NO 17859

SEQ ID NO: 17862 - DNA, 687 bp, Muscodor strobelii
  misc_feature: SGI cDNA ID NO. 565976
  misc_feature: Reduced expression when VOC is produced
  misc_feature: Encodes the peptide sequence at SEQ ID NO 17863
atgcagatcgagcgcaaggtccggctcgtcaccgagcagcgcaacattcccaaggaatcgcccatgccggagtttcccatgaaggaatggagtgtcaaggtctacctcgtcgaccaggacggcaacgagcgtccggccaactgcttccagaaggtcacttacaacctccacccctccttcgaggagccccagcagaccttcaccgatgcccccttcgcctgcagcaacgagggatggggcgagttcgagatgtccatcgacctctacaccaccgagaagatgaagcagaccatcttccacgacctcaacttccagtcgccccgctacgagagcgagcagcccgtcaccttcaagaacccctcccaggctctgatccagatcctgcgcgagaccggccccgttggcgacggcgacgagagcaaggccgccaaggcacgtaaggctgccgacagcaagaagcgcaagcaccagtttgactacgagaagatcggcgatgcgctgaccaaactgaacgaggacgacctcctgcacgtcatccagctgatccacgaccacaaatctgaagataccatgacccagaacgacctcgaccgcggcgagttcaccgtcgacctttttaccatgcccgagaacctgacccggatgatctgggacttcctgctcgagcagaagattgtccaggcctag

SEQ ID NO: 17863 - protein, 228 aa, Muscodor strobelii
  misc_feature: SGI Peptide ID NO. 565976
  misc_feature (27)..(110): Pfam Id: PF03366 Pfam Desc: YEATS family
  misc_feature (1)..(226): NCBI GI: 40882136 Blast Desc: related to transcription initiation factor IIF 30K chain [Neurospora crassa]
  misc_feature (5)..(226): NCBI GI: 164429107 Blast Desc: NCU00444 [Neurospora crassa OR74A] gi|157072413|gb|EAA27472.2| conserved [Neurospora crassa OR74A]
  misc_feature (3)..(220): NCBI GI: 154305199 Blast Desc: BC1G_08894 [Botryotinia fuckeliana B05.10] gi|150853636|gb|EDN28828.1| BC1G_08894 [Botryotinia fuckeliana B05.10]
  misc_feature (3)..(220): NCBI GI: 156040930 Blast Desc: SS1G_11443 [Sclerotinia sclerotiorum 1980] gi|154695827|gb|EDN95565.1| SS1G_11443 [Sclerotinia sclerotiorum 1980]
  misc_feature (1)..(226): NCBI GI: 116207650 Blast Desc: CHGG_03118 [Chaetomium globosum CBS 148.51] gi|88183715|gb|EAQ91183.1| CHGG_03118 [Chaetomium globosum CBS 148.51]
  misc_feature (1)..(221): NCBI GI: 171686152 Blast Desc: protein product [Podospora anserina] gi|170943037|emb|CAP68690.1| protein product [Podospora anserina]
  misc_feature (1)..(220): NCBI GI: 145602081 Blast Desc: MGG_05204 [Magnaporthe grisea 70-15] gi|145010527|gb|EDJ95183.1| MGG_05204 [Magnaporthe grisea 70-15]
  misc_feature (1)..(221): NCBI GI: 261359289 Blast Desc: conserved [Verticillium albo-atrum VaMs.102]
  misc_feature (3)..(226): NCBI GI: 256725731 Blast Desc: [Nectria haematococca mpVI 77-13-4]
  misc_feature (1)..(226): NCBI GI: 46116532 Blast Desc: FG04108.1 [Gibberella zeae PH-1]
  misc_feature: Useful for introducing or modulating the production of volatile compounds
MQIERKVRLVTEQRNIPKESPMPEFPMKEWSVKVYLVDQDGNERPANCFQKVTYNLHPSFEEPQQTFTDAPFACSNEGWGEFEMSIDLYTTEKMKQTIFHDLNFQSPRYESEQPVTFKNPSQALIQILRETGPVGDGDESKAAKARKAADSKKRKHQFDYEKIGDALTKLNEDDLLHVIQLIHDHKSEDTMTQNDLDRGEFTVDLFTMPENLTRMIWDFLLEQKIVQA

SEQ ID NO: 17864 - DNA, 1664 bp, Muscodor strobelii
  misc_feature: SGI EST ID NO. CUFF.42303.1
  misc_feature: Variant of the nucleotide sequence at SEQ ID NO 17862
tcacgcctcagctgcagcttccagcttccattgtcctgaggacctctgcgcgagagcaccgcaccgcacagcatcgcactgcactgcactgcactgtcctgctctgctttctgcacgcgatttgagcgagcagtaaacccaagccaacgccgacgccgacgccttcctccttctgggcaattgctgtctaccgccctcgtccttgccaagcacaaaacccacgacacgactcgcaccgcctgcaccacctccacgcgcgtcactgaccacccgtcgcccttctctcgcaagctcgtctctctgtttgcccgtgttcacctgcctttgattcccacccgcgattggaacaaacatactcgtaatcgcactgcgctgcacgttttggcccctccgcaagtggattggaacttcacgcacgcccaacatgcagatcgagcgcaaggtccggctcgtcaccgagcagcgcaacattcccaaggaatcgcccatgccggagtttcccatgaaggaatggagtgtcaaggtctacctcgtcgaccaggacggcaacgagcgtccggccaactgcttccagaaggtcacttacaacctccacccctccttcgaggagccccagcagaccttcaccgatgcccccttcgcctgcagcaacgagggatggggcgagttcgagatgtccatcgacctctacaccaccgagaagatgaagcagaccatcttccacgacctcaacttccagtcgccccgctacgagagcgagcagcccgtcaccttcaagaacccctcccaggctctgatccagatcctgcgcgagaccggccccgttggcgacggcgacgagagcaaggccgccaaggcacgtaaggctgccgacagcaagaagcgcaagcaccagtttgactacgagaagatcggcgatgcgctgaccaaactgaacgaggacgacctcctgcacgtcatccagctgatccacgaccacaaatctgaagataccatgacccagaacgacctcgaccgcggcgagttcaccgtcgacctttttaccatgcccgagaacctgacccggatgatctgggacttcctgctcgagcagaagattgtccaggcctagagggcgggctcggcgttggagcagcaggcatgattgggtttccacgttgcaccggaagatcttcgcatggcaggcgttttaaggaaaggcacccccctcgagttttacgggattcccttctcccagccacaaaacttgggcgttccggttctacgatattctcctttgtcataaaggcccccttatggaaacgccttcgggcctttccgcgcgatatgcagtctttgagggccacaggaggaagagacgacggaaaatcacaggagcacatcatggtggaggtgatggtggttggcggaactagcgacgacatctgatacccgatgctgtatttcgggagggcatcattaggctagataaaggccgtactgaccgtatcgttatgcatctataggaagcgcggtcagatagttacagatagttacatggcatcgctagttatgagtagctatgatgatattgagcattgaacctaacgtgtccccatgcattttgacgtgacgtttcttttagatgtgcttgagacggatgtgagtctcgtctctgcttcctg

SEQ ID NO: 17865 - DNA, 1470 bp, Muscodor strobelii
  misc_feature: SGI cDNA ID NO. 565977
  misc_feature: Encodes the peptide sequence at SEQ ID NO 17866
atggcagcttttgattttttcaaccttactgtagcctgtggcgcagcggtcatagtatattgtgcttgtgctgtggtgtacaggttatggtttcaccctttggcgaagtatccaggcccacgacttgcagcagtctcagagttttggtacatatggaaatggacttcttcccggtacccatttgccatcgaggaagcacatcgtaaatacggtgatatcgttcgagtcgcccccaatgaactctcgttcgcgaccgtccaatcatttcgcgacatataccatcccgcatcaggcaacaagttgttcctgaagtcaaatttttacgagatacctgggattcagtctgccataataacagccagagaccctgcagtacacgcaagacagaaaaaatacctttcagcagggttcagctcaaaagcccttcgcagccaggagacgtcgattcaagagtacattgatctatttgtccagcaggtggggaagttaggtggaccagaaggtccgggaatcgacctcgaggaatgtttcaagtggttgaccttcgatatcataggggacttgactttcggcgaatcttttggtgctatagcggaagggaaaaaggggttctggataaagcttttatttgacacaacctatgtgatgactcttggaaacctgtggtatcgtttcccacctattctgctggctatacccttggttgctcccaaaggcgcgataggcaagttcagacatcacgaggcattaacgagggagaaggtacagaaacgtgtcatgatgggcgattccctccaacgcgacgatttcttctcacatctgctccgaaagggcggcagtgatgtctcacaagatgaaatgaaaaaccaagcctctgtgttgatgtttgcgggcgcggaaacgagcgcgacagcccttcctgccgcagtatacttcctcttgaccaacgaggaaagctacgataagttcaaacatgagatacgatcgcgcttttcgactatcaacgagataaatggcgatacgacggcagacctgacatacttgtcggcggtaattgaagagcagctacgtttgtttcctccggttggctttggtcttccacgcgtgtgcacaggagccatgatagatggccactacattcctgctggagtgactgtcagtgctgacaattggacaaccacgcgctcggagcgatactggaaagaccctatgtccttcttgcccgaacgctggattggtgaaggatttggtgacacaagagacgctagtcagccattttcacttgggccacgagcatgtctaggcatcaacttggcttatcttgagatgaaactcaccttagccaaattgatctttgcatatgactgggaattggtcagtaaagacgtgcagatttttgggaagagcaaattctatgtcttgtggcataaacctgaggtgtgggtacggttccacccccggcaatcttag

SEQ ID NO: 17866 - protein, 489 aa, Muscodor strobelii
  misc_feature: SGI Peptide ID NO. 565977
  misc_feature (38)..(484): Pfam Id: PF00067 Pfam Desc: Cytochrome P450
  misc_feature (149)..(484): Pfam Id: PF00067 Pfam Desc: Cytochrome P450
  misc_feature (11)..(488): NCBI GI: 46138361 Blast Desc: FG10695.1 [Gibberella zeae PH-1]
  misc_feature (25)..(488): NCBI GI: 256725278 Blast Desc: NECHADRAFT_45567 [Nectria haematococca mpVI 77-13-4]
  misc_feature (17)..(484): NCBI GI: 259485752 Blast Desc: TPA: cytochrome P450, (Eurofung) [Aspergillus nidulans FGSC A4]
  misc_feature (15)..(484): NCBI GI: 154289577 Blast Desc: BC1G_16084 [Botryotinia fuckeliana B05.10] gi|150849019|gb|EDN24212.1| BC1G_16084 [Botryotinia fuckeliana B05.10] gi|169635728|emb|CAP58782.1| cytochrome P40 monooxygenase
  misc_feature (6)..(485): NCBI GI: 255931847 Blast Desc: Pc12g06380 [Penicillium chrysogenum Wisconsin 54-1255] gi|211582099|emb|CAP80265.1| Pc12g06380 [Penicillium chrysogenum Wisconsin 54-1255]
  misc_feature (19)..(489): NCBI GI: 67522561 Blast Desc: AN1737.2 [Aspergillus nidulans FGSC A4] gi|40744867|gb|EAA64023.1| AN1737.2 [Aspergillus nidulans FGSC A4] gi|259487082|tpe|CBF85469.1| TPA: cytochrome P450, (Eurofung)
  misc_feature (55)..(484): NCBI GI: 156054726 Blast Desc: SS1G_06211 [Sclerotinia sclerotiorum 1980] gi|154703991|gb|EDO03730.1| SS1G_06211 [Sclerotinia sclerotiorum 1980]
  misc_feature (55)..(486): NCBI GI: 154296440 Blast Desc: BC1G_13046 [Botryotinia fuckeliana B05.10] gi|150843407|gb|EDN18600.1| BC1G_13046 [Botryotinia fuckeliana B05.10]
  misc_feature (17)..(484): NCBI GI: 121712479 Blast Desc: benzoate 4-monooxygenase cytochrome P450 [Aspergillus clavatus NRRL 1] gi|119402003|gb|EAW12425.1| benzoate 4-monooxygenase cytochrome P450 [Aspergillus clavatus NRRL 1]
  misc_feature (13)..(489): NCBI GI: 188596513 Blast Desc: BCL4p [Botryotinia fuckeliana]
  misc_feature (34)..(458): SWISSPROT Homolog: EC 1.14.13.12 Benzoate 4-monooxygenase
MAAFDFFNLTVACGAAVIVYCACAVVYRLWFHPLAKYPGPRLAAVSEFWYIWKWTSSRYPFAIEEAHRKYGDIVRVAPNELSFATVQSFRDIYHPASGNKLFLKSNFYEIPGIQSAIITARDPAVHARQKKYLSAGFSSKALRSQETSIQEYIDLFVQQVGKLGGPEGPGIDLEECFKWLTFDIIGDLTFGESFGAIAEGKKGFWIKLLFDTTYVMTLGNLWYRFPPILLAIPLVAPKGAIGKFRHHEALTREKVQKRVMMGDSLQRDDFFSHLLRKGGSDVSQDEMKNQASVLMFAGAETSATALPAAVYFLLTNEESYDKFKHEIRSRFSTINEINGDTTADLTYLSAVIEEQLRLFPPVGFGLPRVCTGAMIDGHYIPAGVTVSADNWTTTRSERYWKDPMSFLPERWIGEGFGDTRDASQPFSLGPRACLGINLAYLEMKLTLAKLIFAYDWELVSKDVQIFGKSKFYVLWHKPEVWVRFHPRQS

SEQ ID NO: 17867 - DNA, 2296 bp, Muscodor strobelii
  misc_feature: SGI EST ID NO. CUFF.42163.0
  misc_feature: Variant of the nucleotide sequence at SEQ ID NO 17865
ctaatttctaagcgaaaaaatttgtctatctttatgccacggagtgtagtgcacagtgcacgagccagatagcgcacatatcacgatgcggtgtgcatcagtatgtcacttcgtattctcactccttctctcttcatacgagagcaatggtcattgctgccccggcagaacgatggcacggtacctatccatcttacttctgcgtttgttccttctcttcacttcttccgatcgcgtttttgtgtgagaatcacacattaccaggtttgctaatcctagccaccacagcaagataacgggttttaacaagggtccgtcagctgaaaacaattgccaaaagcaaagcgaaccatagaactatcgattctgacccaatagagccgcgtcgtctataatgacgtgcatcaagcgatacacgtattgcgctcgaacttcataattcattttctaagatggcggtgttgcgggggagatgttccgccgctagaggagaagggagaacttcagacccccaagtcaatcatcttctttaagaaaacttcttgaagaaaaagtctgtacgtctcgatctatgaaagctgtcctccgtatcagaagtcgaaatggcagcttttgattttttcaaccttactgtagcctgtggcgcagcggtaagtatttttctaacacggccttggtgtttacttcactgactagagatcgtctttggcaggtcatagtatattgtgcttgtgctgtggtgtacaggttatggtttcaccctttggcgaagtatccaggcccacgacttgcagcagtctcagagttttggtacatatggaaatggacttcttcccggtacccatttgccatcgaggaagcacatcgtaaatacggtgatatcgttcgagtcgcccccaatgaactctcgttcgcgaccgtccaatcatttcgcgacatataccatcccgcatcaggcaacaagttgttcctgaagtcaaatttttacgagatacctgggattcagtctgccataataacagccagagaccctgcagtacacgcaagacagaaaaaatacctttcagcagggttcagctcaaaagcccttcgcagccaggagacgtcgattcaagagtacattgatctatttgtccagcaggtggggaagttaggtggaccagaaggtccgggaatcgacctcgaggaatgtttcaagtggttgaccttcgatatcataggggacttgactttcggcgaatcttttggtgctatagcggaagggaaaaaggggttctggataaagcttttatttgacacaacctatgtgatgactcttggaaacctgtggtatcgtttcccacctattctgctggctatacccttggttgctcccaaaggcgcgataggcaagttcagacatcacgaggcattaacgagggagaaggtacagaaacgtgtcatgatgggcgattccctccaacgcgacgatttcttctcacatctgctccgaaagggcggcagtgatgtctcacaagatgaaatgaaaaaccaagcctctgtgttgatgtttgcgggcgcggaaacgagcgcgacagcccttcctgccgcagtatacttcctcttgaccaacgaggaaagctacgataagttcaaacatgagatacgatcgcgcttttcgactatcaacgagataaatggcgatacgacggcagacctgacatacttgtcggcggtaattgaagagcagctacgtttgtttcctccggttggctttggtcttccacgcgtgtgcacaggagccatgatagatggccactacattcctgctggagtgactgtcagtgctgacaattggacaaccacgcgctcggagcgatactggaaagaccctatgtccttcttgcccgaacgctggattggtgaaggatttggtgacacaagagacgctagtcagccattttcacttgggccacgagcatgtctaggcatcaacttggcttatcttgagatgaaactcaccttagccaaattgatctttgcatatgactgggaattggtcagtaaagacgtgcagatttttgggaagagcaaattctatgtcttgtggcataaacctgaggtgtgggtacggttccacccccggcaatcttaggatctgggtaagctgtaagccagatacgtagtaggcttctatggagatttcgcgcgcgtctctcggaatgttacaagagttagactaagtatatgggggtaaggtagcgttgttgacaactagtcgtaggataggaaatgggatgaattttctgccaagtca

SEQ ID NO: 17868 - DNA, 1017 bp, Muscodor strobelii
  misc_feature: SGI cDNA ID NO. 565978
  misc_feature: Elevated expression when VOC is produced
  misc_feature: Encodes the peptide sequence at SEQ ID NO 17869
atggacggcagtggtgttgcaattatcattggcgcaggaagcggcataggccgggaatccgctcttttctttgcagagaggggtgcccgcgctgtcatatttgctgatcagggcgttgctgccgcgatagccgcatctgaagagagcaaaggcatcgcaaccgccaagtgctacgagacaccggctctccacgtagacgtacgtgatcgacagtcagccaaagctgtcatcactgcagtgaaggagaatttctctaaacttgactatgctataaattgcgctgggattcctcgcacaattgctgccgaactgtcagccgtggacgagatggagtacgaaaatttgcatgatgtgaacgcgaaagggatcttgcattgtttgcaagaaaagattagcgtgatggaagacagaaaatccttgttctctgagggtcgctccggtcaccggagcgtcggtgccggagccatcattaataacacctcgctgtcggcggtgctgggcactgcgcagtccgctacctatgtcgcgagtaaatttgctgcgcatggaatcatcaaatgcgctgcgcttgaaaatcgtgctagcgggctccgtatcaacgaagtccgccctgccttcaccgacacgcctaagctacaacgtgggatccaaaagcaactagagatcgggaagattctcaataaatcaatgccgctgaaacgagtggccactcctgaggagattgtaaatgcagtccacttcctagcaagtccaggagcaagcctcgtcaacgggcagtcgatcgcggtggattctggagtgtcattattctcacttgagcaagacctcgtaactactcaagcacaagacactaaaaccaatgtaaacgtaggtctggatccaagtattgaagatgagaatgttctctgcttctgctctagtttcctttgtgacccgtcaccgttttcgtcatccacctatcttatccatgggggcaggcattccacagcagcggtatttaaacagatcgctatctga

SEQ ID NO: 17869 - protein, 338 aa, Muscodor strobelii
  misc_feature: SGI Peptide ID NO. 565978
  misc_feature (5)..(193): Pfam Id: PF00106 Pfam Desc: short chain dehydrogenase
  misc_feature (5)..(202): Pfam Id: PF08659 Pfam Desc: KR domain
  misc_feature (5)..(34): Pfam Id: PF08659 Pfam Desc: KR domain
  misc_feature (5)..(268): NCBI GI: 242816340 Blast Desc: oxidoreductase, short-chain dehydrogenase/reductase family [Talaromyces stipitatus ATCC 10500] gi|218715096|gb|EED14519.1| oxidoreductase, short-chain family
  misc_feature (11)..(267): NCBI GI: 154316211 Blast Desc: BC1G_03691 [Botryotinia fuckeliana B05.10] gi|150846477|gb|EDN21670.1| BC1G_03691 [Botryotinia fuckeliana B05.10]
  misc_feature (4)..(267): NCBI GI: 156048278 Blast Desc: SS1G_08870 [Sclerotinia sclerotiorum 1980] gi|154693267|gb|EDN93005.1| SS1G_08870 [Sclerotinia sclerotiorum 1980]
  misc_feature (4)..(269): NCBI GI: 154294990 Blast Desc: BC1G_13361 [Botryotinia fuckeliana B05.10] gi|150844490|gb|EDN19683.1| BC1G_13361 [Botryotinia fuckeliana B05.10]
  misc_feature (5)..(241): NCBI GI: 145238224 Blast Desc: An07g06820 [Aspergillus niger] gi|134076241|emb|CAK39527.1| protein product [Aspergillus niger]
  misc_feature (1)..(269): NCBI GI: 145602532 Blast Desc: MGG_12982 [Magnaporthe grisea 70-15] gi|145010941|gb|EDJ95597.1| MGG_12982 [Magnaporthe grisea 70-15]
  misc_feature (1)..(268): NCBI GI: 238840117 Blast Desc: short-chain dehydrogenase/reductase SDR [Microsporum canis CBS 113480]
  misc_feature (6)..(266): NCBI GI: 284167058 Blast Desc: short-chain dehydrogenase/reductase SDR [Haloterrigena turkmenica DSM 5511] gi|284016713|gb|ADB62663.1| short-chain dehydrogenase/reductase SDR [Haloterrigena turkmenica DSM 5511]
  misc_feature (5)..(269): NCBI GI: 145259387 Blast Desc: An04g09990 [Aspergillus niger] gi|134074978|emb|CAK39058.1| protein product [Aspergillus niger]
  misc_feature (6)..(270): NCBI GI: 109898231 Blast Desc: short-chain dehydrogenase/reductase SDR [Pseudoalteromonas atlantica T6c] gi|109700512|gb|ABG40432.1| short-chain dehydrogenase/reductase SDR [Pseudoalteromonas T6c]
  misc_feature (18)..(269): SWISSPROT Homolog: EC 1.1.1.100 3-oxoacyl-[acyl-carrier-protein] reductase
  misc_feature: Useful for introducing or modulating the production of volatile compounds
MDGSGVAIIIGAGSGIGRESALFFAERGARAVIFADQGVAAAIAASEESKGIATAKCYETPALHVDVRDRQSAKAVITAVKENFSKLDYAINCAGIPRTIAAELSAVDEMEYENLHDVNAKGILHCLQEKISVMEDRKSLFSEGRSGHRSVGAGAIINNTSLSAVLGTAQSATYVASKFAAHGIIKCAALENRASGLRINEVRPAFTDTPKLQRGIQKQLEIGKILNKSMPLKRVATPEEIVNAVHFLASPGASLVNGQSIAVDSGVSLFSLEQDLVTTQAQDTKTNVNVGLDPSIEDENVLCFCSSFLCDPSPFSSSTYLIHGGRHSTAAVFKQIAI

SEQ ID NO: 17870 - DNA, 1287 bp, Muscodor strobelii
  misc_feature: SGI EST ID NO. CUFF.42177.0
  misc_feature: Variant of the nucleotide sequence at SEQ ID NO 17868
ggacggcagtggtgttgcaattatcattggcgcaggaagcggcataggccgggaatccgctcttttctttgcagagaggggtgcccgcgctgtcatatttgctgatcagggcgttgctgccgcgatagccgcatctgaagagagcaaaggcatcgcaaccgccaagtgctacgagacaccggctctccacgtagacgtacgtgatcgacagtcagccaaagctgtcatcactgcagtgaaggagaatttctctaaacttgactatgctataaattgcgctgggattcctcgcacaattgctgccgaactgtcagccgtggacgagatggagtacgaaaatttgcatgatgtgaacgcgaaagggatcttgcattgtttgcaagaaaagattagcgtgatggaagacagaaaatccttgttctctgagggtcgctccggtcaccggagcgtcggtgccggagccatcattaataacacctcgctgtcggcggtgctgggcactgcgcagtccgctacctatgtcgcgagtaaatttgctgcgcatggaatcatcaaatgcgctgcgcttgaaaatcgtgctagcgggctccgtatcaacgaagtccgccctgccttcaccgacacgcctaagctacaacgtgggatccaaaagcaactagagatcgggaagattctcaataaatcaatgccgctgaaacgagtggccactcctgaggagattgtaaatgcagtccacttcctagcaagtccaggagcaagcctcgtcaacgggcagtcgatcgcggtggattctggagtgtcattattctcacttgagcaagacctcgtaactactcaagcacaagacactaaaaccaatgtaaacgtaggtctggatccaagtattgaagatgagaatgttctctgcttctgctctagtttcctttgtgacccgtcaccgttttcgtcatccacctatcttatccatgggggcaggcattccacagcagcggtatttaaacagatcgctatctgataattatctacatagcgagggcacacaccactcaataaacataggacagcttcaaaatcgagtattgggatacatcttggcgcgtcaggtcacttcacacggacatttatagacctaaatgctcacgccaaaggagtggtactccctacgatagtagttttgcctctaggtgctaggttgacacacgagttggaatagaccaatttgcgctcggcaatctgtgtgaagaaagccttaggtagatcggtagggacagtgagcttctgcaacga

SEQ ID NO: 17871 - DNA, 423 bp, Muscodor strobelii
  misc_feature: SGI cDNA ID NO. 565979
  misc_feature: Encodes the peptide sequence at SEQ ID NO 17872
atgaagttcacaactatttcctcgaccgccgtggcgactcttgccagcttggcaatggccatgccaaccgaatccaacgttccgaaacgcacagagcctggtgctatctccctactagttcacagtgctggctgcggtcttgttagctgccgctacgatttctcgttgattgcgcaggacaattacgtgccaggaattaacgggttcaatgtcaactgcgtcacgtttttcatgagcgacggacaaactgggggttgcaactattcacccgccaatcagttcgtctcgtacgaattttccgacaagtacccagagtcgataaagattaccatccaccacgaaatcaacgggaccgtggtcgctaccgcgaagggcgactggaatgcttcggggatggagatccctattcccgttgtctcataa

SEQ ID NO: 17872 - protein, 140 aa, Muscodor strobelii
  misc_feature: SGI Peptide ID NO. 565979
MKFTTISSTAVATLASLAMAMPTESNVPKRTEPGAISLLVHSAGCGLVSCRYDFSLIAQDNYVPGINGFNVNCVTFFMSDGQTGGCNYSPANQFVSYEFSDKYPESIKITIHHEINGTVVATAKGDWNASGMEIPIPVVS

SEQ ID NO: 17873 - DNA, 611 bp, Muscodor strobelii
  misc_feature: SGI EST ID NO. CUFF.42185.0
  misc_feature: Variant of the nucleotide sequence at SEQ ID NO 17871
gagaattccaatcatcatgaagttcacaactatttcctcgaccgccgtggcgactcttgccagcttggcaatggccatgccaaccgaatccaacgttccgaaacgcacagagcctggtgctatctccctactagttcacagtgctggctgcggtcttgttagctgccgctacgatttctcgttgattgcgcaggacaattacgtgccaggaattaacgggttcaatgtcaactgcgtcacgtttttcatgagcgacggacaaactgggggttgcaactattcacccgccaatcagttcgtctcgtacgaattttccgacaagtacccagagtcgataaagattaccatccaccacgaaatcaacgggaccgtggtcgctaccgcgaagggcgactggaatgcttcggggatggagatccctattcccgttgtctcataagctgctgtcacggagggtgtacagtcggcaatggaagatgcaggtgctggatagtgttgctaccacacctcgcgccaaactcatcgcctttcattaatactaaatgctcggattcgtttatttaattcctataatagatttcaagtatactacctcaattgcgcaattgttg

SEQ ID NO: 17874 - DNA, 423 bp, Muscodor strobelii
  misc_feature: SGI cDNA ID NO. 565980
  misc_feature: Encodes the peptide sequence at SEQ ID NO 17875
atggcacaattcaagttcaagacgcagcttgacgagtcctcatattattccccaggcgatggcaaagtctatcagccattaagagaacaaatcgtcagcctggcagtcgcacagggctacgatgaggctagtatgacggagcatggtgttgactgggcagacgaccaagccatatttcgacatgtcacggacgccctttataatcattacgtctcggcgtgtaacctgcggccattcgagacgttccaagagcaccttggagacaagttggaggattttatcaatgcacgcggcattggcgcgataatcaagaatactacactgaacatgaaaagagcgacttcatatcccgacttagcaagttctgaatccaccgagtttaagctcgaggcaaattatttgatagatcgtcattgcggctag

SEQ ID NO: 17875 - protein, 140 aa, Muscodor strobelii
  misc_feature: SGI Peptide ID NO. 565980
  misc_feature (9)..(119): NCBI GI: 225562457 Blast Desc: conserved [Ajellomyces capsulatus G186AR]
  misc_feature (9)..(119): NCBI GI: 154279214 Blast Desc: [Ajellomyces capsulatus NAm1] gi|150412363|gb|EDN07750.1| [Ajellomyces capsulatus NAm1]
  misc_feature (8)..(118): NCBI GI: 169610930 Blast Desc: SNOG_08574 [Phaeosphaeria nodorum SN15] gi|111062622|gb|EAT83742.1| SNOG_08574 [Phaeosphaeria nodorum SN15]
  misc_feature (39)..(120): NCBI GI: 240281164 Blast Desc: conserved [Ajellomyces capsulatus H143]
  misc_feature (7)..(118): NCBI GI: 58258841 Blast Desc: [Cryptococcus neoformans var. neoformans JEC21] gi|134106859|ref|XP_777971.1| CNBA4400 [Cryptococcus neoformans var. neoformans B-3501A] gi|50260671|gb|EAL23324.1| CNBA4400 var.
MAQFKFKTQLDESSYYSPGDGKVYQPLREQIVSLAVAQGYDEASMTEHGVDWADDQAIFRHVTDALYNHYVSACNLRPFETFQEHLGDKLEDFINARGIGAIIKNTTLNMKRATSYPDLASSESTEFKLEANYLIDRHCG

SEQ ID NO: 17876 - DNA, 344 bp, Muscodor strobelii
  misc_feature: SGI EST ID NO. CUFF.42191.0
  misc_feature: Variant of the nucleotide sequence at SEQ ID NO 17874
aagagaggttaggcctatcgagcccccattgttcagattttgcggctacgggaggctattaattgtacatctgacaatcaattctcaactcgctaacactgatcgtaccacgcatgtttgaagatggcacaattcaagttcaagacgcagcttgacgagtcctcatattattccccaggcgatggcaaagtctatcagccattaagagaacaaatcgtcagcctggcagtcgcacagggctacgatgaggctagtatgacggagcatggtgttgactgggcagacgaccaagccatatttcgacatgtcacggacgccctttataatcattacgtctcggcgtg

SEQ ID NO: 17877 - DNA, 1656 bp, Muscodor strobelii
  misc_feature: SGI cDNA ID NO. 565981
  misc_feature: Encodes the peptide sequence at SEQ ID NO 17878
atgttcggagctacacaagaccttataccaaatgtcatccggcgacagaaaggcaggtcgagaccttccgctatcattgtcgccgtggatggatctcgacaagtcataacttatgccgatctcgagaattggtccaacaaagctgcgtggtacttggacaagcttccaagtcagcaagtgctctacatgggccccaacgacatacgatatgttctatgggccatcgctgccatcaaaactgggaaatgtgttttgtacccttctttggtaaaccagatatccgcaaatcagcggctgttcgagaccattggctgcaagatattgttatatgcaccagaagccaaatcgatcctgacacccctcatggaagcagtgcgtcctaatgtggattgcatcgcctgccccaagtacaccgagatcacgagcatatatactgcacgggtatacccatatgaaaggacatacgacgaagtcaagcaatccccatttctaggtcttcatacgtcaggtacttcaggacaccctaaacccatatactggaaccatcttgccgtgtcttcactagcttctttccttgacccgtcgattctgaatgccgatggatatagctccaacttatatcgaacgctcatggataggaacgacgtttttgttccgtttccactgtatcatttctggggcatgggtaacgtgatgggatccatgtacgcagacacgacgctgatcctgccagcaccgaatacaaggctgtctcctgataactttgcgagtttgatacaaaatagcggctgtacagctgctattgcgcccccttctcttctggaagcaatgctacaccatccatcaggcatgaaatccctagcacgcctgagacacgttggctatactggcggaccgctgaacacttttcgcggtgaagcattagctaagcagctaccgcacttgttcacaatcttggcaagtaccgaaggtggaatctcgcacttggtttcgacgagcgatagttctcactggaactcgttcaagttcgtcgacgtcggacaacgcatggaggaagtgtcgtcagggatctacgagctagtttttcctcgctcggacctcgtcaaccaaacgtatgcttttttccatactcacccgcatcttcataaggaatttagaacctcggatctcttctccgcactggagaatgaaactggatggtgggtataccgtggcagggcagataactggatcgccatgtctaatggattaaaaatggacccgactgagacagaaaatgctattgcgtcttatcctgaagtcgcaggtgtactgatggcgggatcatctcgcacccgcccgtgtctacttgtggagctagttcaaaagaccgatactcaacaagggaaatctaacggccatggaggccatgatgagataatagaggcgttgtggcccactattgaagcagcaaacctcaaagcaccaaaattcgggcgtgtgccgagggaacttgtattattagcatccaaggaaaagcctttccttcgatcggggaaagggactgtccaaaggcgattgactattcaggcgtatgaacgggagattaatgacctctatgccaaggtggaaaagaaaatattccctcaaggtcgaaacctcacatcgtcgctataa

SEQ ID NO: 17878 - protein, 551 aa, Muscodor strobelii
  misc_feature: SGI Peptide ID NO. 565981
  misc_feature (37)..(439): Pfam Id: PF00501 Pfam Desc: AMP-binding enzyme
  misc_feature (37)..(313): Pfam Id: PF00501 Pfam Desc: AMP-binding enzyme
  misc_feature (6)..(548): NCBI GI: 212527370 Blast Desc: NRPS-like enzyme, [Penicillium marneffei ATCC 18224] gi|210073240|gb|EEA27327.1| NRPS-like enzyme, [Penicillium marneffei ATCC 18224]
  misc_feature (6)..(537): NCBI GI: 154318668 Blast Desc: BC1G_02723 [Botryotinia fuckeliana B05.10] gi|150857853|gb|EDN33045.1| BC1G_02723 [Botryotinia fuckeliana B05.10]
  misc_feature (8)..(537): NCBI GI: 156063804 Blast Desc: SS1G_02020 [Sclerotinia sclerotiorum 1980] gi|154697354|gb|EDN97092.1| SS1G_02020 [Sclerotinia sclerotiorum 1980]
  misc_feature (36)..(539): NCBI GI: 225561530 Blast Desc: ochratoxin A non-ribosomal peptide synthetase [Ajellomyces capsulatus G186AR]
  misc_feature (36)..(539): NCBI GI: 154282811 Blast Desc: [Ajellomyces capsulatus NAm1] gi|150410381|gb|EDN05769.1| [Ajellomyces capsulatus NAm1]
  misc_feature (36)..(534): NCBI GI: 156055522 Blast Desc: SS1G_05113 [Sclerotinia sclerotiorum 1980] gi|154702897|gb|EDO02636.1| SS1G_05113 [Sclerotinia sclerotiorum 1980]
  misc_feature (36)..(539): NCBI GI: 240274631 Blast Desc: ochratoxin A non-ribosomal peptide synthetase [Ajellomyces capsulatus H143]
  misc_feature (58)..(547): NCBI GI: 238506833 Blast Desc: NRPS-like enzyme, [Aspergillus flavus NRRL3357] gi|220689331|gb|EED45682.1| NRPS-like enzyme, [Aspergillus flavus NRRL3357]
  misc_feature (30)..(535): NCBI GI: 67523215 Blast Desc: AN2064.2 [Aspergillus nidulans FGSC A4] gi|40745740|gb|EAA64896.1| AN2064.2 [Aspergillus nidulans FGSC A4] gi|259487432|tpe|CBF86106.1| TPA: NRPS-like enzyme, (JCVI)
  misc_feature (36)..(532): NCBI GI: 169766960 Blast Desc: [Aspergillus oryzae RIB40] gi|83765806|dbj|BAE55949.1| protein product [Aspergillus oryzae]
MFGATQDLIPNVIRRQKGRSRPSAIIVAVDGSRQVITYADLENWSNKAAWYLDKLPSQQVLYMGPNDIRYVLWAIAAIKTGKCVLYPSLVNQISANQRLFETIGCKILLYAPEAKSILTPLMEAVRPNVDCIACPKYTEITSIYTARVYPYERTYDEVKQSPFLGLHTSGTSGHPKPIYWNHLAVSSLASFLDPSILNADGYSSNLYRTLMDRNDVFVPFPLYHFWGMGNVMGSMYADTTLILPAPNTRLSPDNFASLIQNSGCTAAIAPPSLLEAMLHHPSGMKSLARLRHVGYTGGPLNTFRGEALAKQLPHLFTILASTEGGISHLVSTSDSSHWNSFKFVDVGQRMEEVSSGIYELVFPRSDLVNQTYAFFHTHPHLHKEFRTSDLFSALENETGWWVYRGRADNWIAMSNGLKMDPTETENAIASYPEVAGVLMAGSSRTRPCLLVELVQKTDTQQGKSNGHGGHDEIIEALWPTIEAANLKAPKFGRVPRELVLLASKEKPFLRSGKGTVQRRLTIQAYEREINDLYAKVEKKIFPQGRNLTSSL

SEQ ID NO: 17879 - DNA, 2007 bp, Muscodor strobelii
  misc_feature: SGI EST ID NO. CUFF.42194.0
  misc_feature: Variant of the nucleotide sequence at SEQ ID NO 17877
ggggtgctcgtcagctataggtaggggggcgcttactcagcgtgctccaagtcaaactcttcagtaccaggctcacactctacgttcaagatccccgctgttttcaacactttctttccatccgcaatgagacaattaggagaagaatgttcggagctacacaagaccttataccaaatgtcatccggcgacagaaaggcaggtcgagaccttccgctatcattgtcgccgtggatggatctcgacaagtcataacttatgccgatctcgagaattggtccaacaaagctgcgtggtacttggacaagcttccaagtcagcaagtgctctacatgggccccaacgacatacgatatgttctatgggccatcgctgccatcaaaactgggaaatgtgttttgtacccttctttggtaaaccagatatccgcaaatcagcggctgttcgagaccattggctgcaagatattgttatatgcaccagaagccaaatcgatcctgacacccctcatggaagcagtgcgtcctaatgtggattgcatcgcctgccccaagtacaccgagatcacgagcatatatactgcacgggtatacccatatgaaaggacatacgacgaagtcaagcaatccccatttctaggtcttcatacgtcaggtacttcaggacaccctaaacccatatactggaaccatcttgccgtgtcttcactagcttctttccttgacccgtcgattctgaatgccgatggatatagctccaacttatatcgaacgctcatggataggaacgacgtttttgttccgtttccactgtatcatgtatgtcaggatgacatctcaatacagaactgttcggaagcgaacgactgatttgatactgtttccagttctggggcatgggtaacgtgatgggatccatgtacgcagacacgacgctgatcctgccagcaccgaatacaaggctgtctcctgataactttgcgagtttgatacaaaatagcggctgtacagctgctattgcgcccccttctcttctggaagcaatgctacaccatccatcaggcatgaaatccctagcacgcctgagacacgttggctatactggcggaccgctgaacacttttcgcggtgaagcattagctaagcagctaccgcacttgttcacaatcttggcaagtaccgaaggtggaatctcgcacttggtttcgacgagcgatagttctcactggaactcgttcaagttcgtcgacgtcggacaacgcatggaggaagtgtcgtcagggatctacgagctagtttttcctcgctcggacctcgtcaaccaaacgtatgcttttttccatactcacccgcatcttcataaggaatttagaacctcggatctcttctccgcactggagaatgaaactggatggtgggtataccgtggcagggcagataactggatcgccatgtctaatggattaaaaatggacccgactgagacagaaaatgctattgcgtcttatcctgaagtcgcaggtgtactgatggcgggatcatctcgcacccgcccgtgtctacttgtggagctagttcaaaagaccgatactcaacaagggaaatctaacggccatggaggccatgatgagataatagaggcgttgtggcccactattgaagcagcaaacctcaaagcaccaaaattcgggcgtgtgccgagggaacttgtattattagcatccaaggaaaagcctttccttcgatcggggaaagggactgtccaaaggcgattgactattcaggcgtatgaacgggagattaatgacctctatgccaaggtggaaaagaaaatattccctcaaggtcgaaacctcacatcgtcgctataaagccccacgtcttagtcccgggacgggcagtgtctgagatcaatcatatttctgtagtggggtgtagacggggttacttgaaagagtaagattaacgagggcttcatctgtatcgtcgtctttttcttcaactaaag

SEQ ID NO: 17880 - DNA, 1470 bp, Muscodor strobelii
  misc_feature: SGI cDNA ID NO. 565982
  misc_feature: Elevated expression when VOC is produced
  misc_feature: Encodes the peptide sequence at SEQ ID NO 17881
atgagtcgaaaaatatgggaacaacgggtaacaccaggtgtcgagatgcactggtgccagcccactgatctctccgcccggggcgtcagagaatatccccttacaggctgtgaccaggcaatgccaaaagcacacatccgaatggcaatattctacgagctcgctgaatcaactgttgagttgcgaagacaaattgtcacgtccatggcgtccggattagagaaactcgcgtcgcagctcccctgcctcaccgccgccgttaatgtcgatcctgcatcgaagcgcgccactatgagaacagctggcaatgataatggaatactctttctcgcgaaaggggtagacgctgtgggaaccaatacgccgtcatatgcggaacttgagcgtgagcgtttcgcgccttgggaattggcaagtaattttaagatctatttccaagatggtctaataaatcctgcaccttcgcatcagggccaccaggatggactgctagcatgcatatttcagctcaatttcatcagaggcggggcgattttgactgcggcctttcagcacaacgtcgtagacggcccaagtatcgacgtcatatttcgtgcctggagcgttcattgccgaggactcgagtctgtgccaatggtgaccgatcgctcgatacttatcgatcctgacatgcccagtccttccgaggtcgaatatctggaacagaagttatcagctcgtggctgtatggttgactccactaagccgaattcgaataatccactgtctactattgcgggcgtacccgttaagtcggccattatcactataagacgcgatcggatcttagcattgaaagaggaagtggccgcgaaacgcgctgcacgagtttcttcacacgattgcgtccatgctcttctctggaccgcgctggtccgagccaagtgcactgcaggcgacagcattggctttgaggactcgtggactgtctttccaatcacttttcgttctgtcgccaatccagggttcccaaggaattacatcggaaactcgactctcctgaacggtgttaacttctccattgaggcactcacgggacctgacgcgcttctcgatgctgctgtcgcactgcgaagcgtgattggcaatgtcgatgccacttacgttaaggacgccgtgacttggcttggtagtgtggaggcaccggtatcgaggacctggatgactagcccgccccgaaaaatggacgccctccttacgagctgggcaggtctcgactaccgagcctgggatctgggcttcggccccgctactgctcttagacccgccttttctaggatcccactactgaccttgcccgcaacgaaggcggaccgcgataacgaacaggtcttcgaagctatcattgctgcccctgggaagattcatgagatactggagaaagatgtcgcatttcaaggacttgttaaggattactacctcgagccttag

SEQ ID NO: 17881 - protein, 489 aa, Muscodor strobelii
  misc_feature: SGI Peptide ID NO. 565982
  misc_feature (12)..(481): Pfam Id: PF02458 Pfam Desc: Transferase family
  misc_feature (1)..(489): NCBI GI: 121714675 Blast Desc: trichothecene biosynthesis acetyltransferase, [Aspergillus clavatus NRRL 1] gi|119403102|gb|EAW13522.1| trichothecene biosynthesis acetyltransferase, [Aspergillus NRRL
  misc_feature (34)..(479): NCBI GI: 212538955 Blast Desc: trichothecene 3-O-acetyltransferase, [Penicillium marneffei ATCC 18224] gi|210069375|gb|EEA23466.1| trichothecene 3-O-acetyltransferase, [Penicillium marneffei ATCC 18224]
  misc_feature (25)..(479): NCBI GI: 256723646 Blast Desc: NECHADRAFT_52215 [Nectria haematococca mpVI 77-13-4]
  misc_feature (25)..(478): NCBI GI: 212526250 Blast Desc: conserved [Penicillium marneffei ATCC 18224] gi|210072680|gb|EEA26767.1| conserved [Penicillium marneffei ATCC 18224]
  misc_feature (62)..(475): NCBI GI: 169624304 Blast Desc: SNOG_15410 [Phaeosphaeria nodorum SN15] gi|111056223|gb|EAT77343.1| SNOG_15410 [Phaeosphaeria nodorum SN15]
  misc_feature (27)..(481): NCBI GI: 212546971 Blast Desc: conserved [Penicillium marneffei ATCC 18224] gi|210065159|gb|EEA19254.1| conserved [Penicillium marneffei ATCC 18224]
  misc_feature (31)..(489): NCBI GI: 121712064 Blast Desc: transferase family protein [Aspergillus clavatus NRRL 1] gi|119401799|gb|EAW12221.1| transferase family protein [Aspergillus clavatus NRRL 1]
  misc_feature (20)..(462): NCBI GI: 168056525 Blast Desc: [Physcomitrella patens subsp. patens] gi|162668324|gb|EDQ54934.1| [Physcomitrella patens subsp. patens]
  misc_feature (29)..(478): NCBI GI: 115437986 Blast Desc: [Aspergillus terreus NIH2624] gi|114188765|gb|EAU30465.1| [Aspergillus terreus NIH2624]
  misc_feature (42)..(428): NCBI GI: 145254399 Blast Desc: An18g01540 [Aspergillus niger] gi|134084194|emb|CAK47227.1| protein product [Aspergillus niger]
  misc_feature (167)..(431): SWISSPROT Homolog: EC 2.3.1.144 Anthranilate N-benzoyltransferase
  misc_feature: Useful for introducing or modulating the production of volatile compounds
MSRKIWEQRVTPGVEMHWCQPTDLSARGVREYPLTGCDQAMPKAHIRMAIFYELAESTVELRRQIVTSMASGLEKLASQLPCLTAAVNVDPASKRATMRTAGNDNGILFLAKGVDAVGTNTPSYAELERERFAPWELASNFKIYFQDGLINPAPSHQGHQDGLLACIFQLNFIRGGAILTAAFQHNVVDGPSIDVIFRAWSVHCRGLESVPMVTDRSILIDPDMPSPSEVEYLEQKLSARGCMVDSTKPNSNNPLSTIAGVPVKSAIITIRRDRILALKEEVAAKRAARVSSHDCVHALLWTALVRAKCTAGDSIGFEDSWTVFPITFRSVANPGFPRNYIGNSTLLNGVNFSIEALTGPDALLDAAVALRSVIGNVDATYVKDAVTWLGSVEAPVSRTWMTSPPRKMDALLTSWAGLDYRAWDLGFGPATALRPAFSRIPLLTLPATKADRDNEQVFEAIIAAPGKIHEILEKDVAFQGLVKDYYLEP

SEQ ID NO: 17882 - DNA, 1902 bp, Muscodor strobelii
  misc_feature: SGI EST ID NO. CUFF.42203.0
  misc_feature: Variant of the nucleotide sequence at SEQ ID NO 17880
cgatatcgaatctatgtgtgataatcatgtacttttcctgagaaagagctctatcccattacatcctctcagaacagcgctattgtgatctcactaagcatgagtcgaaaaatatgggaacaacgggtaacaccaggtgtcgagatgcactggtgccagcccactgatctctccgcccggggcgtcagagaatatccccttacaggctgtgaccaggcaatgccaaaagcacacatccgaatggcaatattctacgagctcgctgaatcaactgttgagttgcgaagacaaattgtcacgtccatggcgtccggattagagaaactcgcgtcgcagctcccctgcctcaccgccgccgttaatgtcgatcctgcatcgaagcgcgccactatgagaacagctggcaatgataatggaatactctttctcgcgaaaggggtagacgctgtgggaaccaatacgccgtcatatgcggaacttgagcgtgagcgtttcgcgccttgggaattggcaagtaattttaagatctatttccaagatggtctaataaatcctgcaccttcgcatcagggccaccaggatggactgctagcatgcatatttcagctcaatttcatcagaggcggggcgattttgactgcggcctttcagcacaacgtcgtagacggcccaagtatcgacgtcatatttcgtgcctggagcgttcattgccgaggactcgagtctgtgccaatggtgaccgatcgctcgatacttatcgatcctgacatgcccagtccttccgaggtcgaatatctggaacagaagttatcagctcgtggctgtatggttgactccactaagccgaattcgaataatccactgtctactattgcgggcgtacccgttaagtcggccattatcactataagacgcgatcggatcttagcattgaaagaggaagtggccgcgaaacgcgctgcacgagtttcttcacacgattgcgtccatgctcttctctggaccgcgctggtccgagccaagtgcactgcaggcgacagcattggctttgaggactcgtggactgtctttccaatcacttttcgttctgtcgccaatccagggttcccaaggaattacatcggaaactcgactctcctgaacggtgttaacttctccattgaggcactcacgggacctgacgcgcttctcgatgctgctgtcgcactgcgaagcgtgattggcaatgtcgatgccacttacgttaaggacgccgtgacttggcttggtagtgtggaggcaccggtatcgaggacctggatgactagcccgccccgaaaaatggacgccctccttacgagctgggcaggtctcgactaccgagcctgggatctgggcttcggccccgctactgctcttagacccgccttttctaggatcccactactgaccttgcccgcaacgaaggcggaccgcgataacgaacaggtcttcgaagctatcattgctgcccctgggaagattcatgagatactggagaaagatgtcgcatttcaaggacttgttaaggattactacctcgagccttaggtgaacacgatgcattcatgaaattagacaaggccatcgaacctctaaaaaaatttgcgggatgaagatttacataccgctacagagatcaagtagataatccctctccttttgataaggattttatatccatgacatgatatgacatgttggtcgggacgtccttcaccagcctctagacaagctgcctcattgccggaaaatgagatctggtgttgtcggattcggaatgatacatcctccgctccgcgttagatctctagtgatggttccacaaacctcaatatcgtatgtaatagcatgagcactgcctataccacaattccagattga

SEQ ID NO: 17883 - DNA, 2973 bp, Muscodor strobelii
  misc_feature: SGI cDNA ID NO. 565983
  misc_feature: Encodes the peptide sequence at SEQ ID NO 17884
atggccacgacagaaaataaagccaactgcccagatgcaggtacagagcaacaaataccagatcgcgaaccaactctcaaaccttttttcagtttgcgggagggcttcggcttgattacaaactcaagctacagatatacaaacaaagacgcaaccgttgatatcatcgctgtgccctgcatcggtgccctgcctagtaccacatggatgcaaatttcggcggattcgtcggacgttgaaaagtcctggattgtcagtgaaatccatgagcaggttagcacggcccgaatcatgctttattggcacagaacaccgcaacaggttaagacaatcgatgctgctgctcgagacctcctaaaaatgattcaagagatgcggaaggacgttaagcaaactcggccgattttcttcatctgtcacagcattggaggtttagtcgttaagtcggccctagtcaaggcgagtgaagaagtgcaatacaggccaattttggataactgtcatggtgtcaccttcttcgcgacgcctcatcgaggctcaaaccggttatctatggcggaagaacgtgaatcgattcgaaatctgctctcacttgaagcactattgccgacttctatcactgatggactacaatgccaatccccagatttgtcggcgatccacgacaagttcatcgatcttgcgggtgaactccgtctttggacgctacacgaaactgaagaacccgagctttggaagacgaaaaaggctctcattacttccattgaatcaagcgtcattgggtcaaggacagagcatattttacctctcaagaatgatcatgcacagtgtgcctcattcagtggcgatgatgtccaggcgaagatgccgtacctcatcgaccttcgagaagctattcgcaaagcacaatggctcagcgaacatgaacacaccaacttagatatttctacgaaagtcatggtcgagtcgactcattgctatgaagatgtcaataattcaaaaaaacgttgggtcaggttatctagctcgacgaagtcgctggaagatttcctcgcgactggcataggcaactctgagaacgagctagcaaaccagctaccagatcggaatcagaaacctcaaagtactccgggggatgatcaacctatagctcaatcttctttgtcttcaagggcacttgagactccgaacccagacgggtctgaaaaattatgcatgaaggcagccgttgcaaatgacaaagcaaaggcatcaaatgaaaaattcaagaagtctacctctgcatcgtttttctcatttttccccactgctttacatctttcacaccatgacaggagttctgacgatgttgatcctcaacttagcagtgttgccaacacacaatccacctcaagtgcaacgaatgtggttgcagcagcttcggcagctcgtcacactgcgagaagtctacaggccaatgatgataacaacccagctcgagtagactccaatgagcccttgccccctaccagtcagccaacacctgacaacacaacggtttcagaatcggataatgtctcgcctgagcagaaaattaagttgctgtggattcatgtgcctttcaacaatccggtctgggtcaggcaaatcttagaaaagttttcaccgcaattgaacgacaattgtcaactactggtcgatactcactacaacgacaccaaatttactcccagcaaaagtttcaagtggcacgaacttcctcgctctcctactgccaagttttacctctatcttccatacttacattatgacacttatctgaacatgatccgtcgccgcgacatggttgtttgccgccagaaatatggacgtacaagccccacgccccaagaagttgctagggtagattcactggagcttcgagtgatgtggcaatttctcggacacgatcacgcatttcaagcacgaagaaccttggaccagtatggccatcctgacttacaaagcacctggccaagagacgatgatcagatgctgtataaacttactaggcgtaaattcagtaagtcggcgagcagcatgttaagcaggtggtatgatcctgaggggcatattgtgaacgacacgctggaaaaattccaaaaggctgaggggcatttcttcagtagcagtgcgaaggctcgcaaagataaagaggagagcagaaaattgatcgacggtaacgttctcatggtagaccaactgtggctttgggtgattgatgataacaccttggtgactttctttcctgaacgagaatctcctccaagagaagggccattatataaggaagccgatctacgagagactatcaagaagcacctgaaagaagattacaatacggcaccagccaatgacgttttcaatgcagctgcatcaatgatcttccatgcggtgacgatgttcatggacggatatcagatcatgagagcaaagaaaaaggctctcgtttacatggcggaaatcatggagcttcgtgatatggaggatgagttacaaacgctagcgaggctgttcaaggagcagaacgataccatcaacaacatgcgccagctaaccgacaacgtgccctgtctgtatgatgctgcacatcgattgaaggaataccaagaacgagttactagcatgacgacccacgtgaaggatttgcaaaagagttatgagaagcttcttcaattagttcagtttcaggcagaggcagacgagtcgagatcgcatcaagacctcgccgattctcagaaccgctccttaatgatatttacgatatttactgtctttttttcaccactcagcttcttcacgagtgtctttggcatgaacactcgtgaatgggctggtccagacgcgaatcaattccctagcttaaagcttatcggtgccatagctctattaatcaagcttagttccatcctcggctcttttgatcagcataacactacttgcggctctaagtag

SEQ ID NO: 17884 - protein, 990 aa, Muscodor strobelii
  misc_feature: SGI Peptide ID NO. 565983
  misc_feature (53)..(956): NCBI GI: 238493603 Blast Desc: conserved [Aspergillus flavus NRRL3357] gi|220696532|gb|EED52874.1| conserved [Aspergillus flavus NRRL3357]
  misc_feature (53)..(982): NCBI GI: 67539836 Blast Desc: AN6088.2 [Aspergillus nidulans FGSC A4] gi|40738873|gb|EAA58063.1| AN6088.2 [Aspergillus nidulans FGSC A4]
  misc_feature (53)..(982): NCBI GI: 259479725 Blast Desc: TPA: conserved [Aspergillus nidulans FGSC A4]
  misc_feature (50)..(931): NCBI GI: 145246622 Blast Desc: An12g04900 [Aspergillus niger] gi|134080279|emb|CAK32609.1| protein product [Aspergillus niger]
  misc_feature (85)..(982): NCBI GI: 146322878 Blast Desc: conserved [Aspergillus fumigatus Af293] gi|129558505|gb|EBA27487.1| conserved [Aspergillus fumigatus Af293] gi|159129344|gb|EDP54458.1| conserved [Aspergillus A1163]
  misc_feature (524)..(980): NCBI GI: 164426021 Blast Desc: NCU04767 [Neurospora crassa OR74A] gi|157071168|gb|EAA30980.2| [Neurospora crassa OR74A]
  misc_feature (524)..(980): NCBI GI: 39979213 Blast Desc: [Neurospora crassa]
  misc_feature (580)..(976): NCBI GI: 256727872 Blast Desc: NECHADRAFT_46452 [Nectria haematococca mpVI 77-13-4]
  misc_feature (538)..(980): NCBI GI: 46130868 Blast Desc: FG08989.1 [Gibberella zeae PH-1]
  misc_feature (520)..(980): NCBI GI: 116202171 Blast Desc: CHGG_08970 [Chaetomium globosum CBS 148.51] gi|88177488|gb|EAQ84956.1| CHGG_08970 [Chaetomium globosum CBS 148.51]
MATTENKANCPDAGTEQQIPDREPTLKPFFSLREGFGLITNSSYRYTNKDATVDIIAVPCIGALPSTTWMQISADSSDVEKSWIVSEIHEQVSTARIMLYWHRTPQQVKTIDAAARDLLKMIQEMRKDVKQTRPIFFICHSIGGLVVKSALVKASEEVQYRPILDNCHGVTFFATPHRGSNRLSMAEERESIRNLLSLEALLPTSITDGLQCQSPDLSAIHDKFIDLAGELRLWTLHETEEPELWKTKKALITSIESSVIGSRTEHILPLKNDHAQCASFSGDDVQAKMPYLIDLREAIRKAQWLSEHEHTNLDISTKVMVESTHCYEDVNNSKKRWVRLSSSTKSLEDFLATGIGNSENELANQLPDRNQKPQSTPGDDQPIAQSSLSSRALETPNPDGSEKLCMKAAVANDKAKASNEKFKKSTSASFFSFFPTALHLSHHDRSSDDVDPQLSSVANTQSTSSATNVVAAASAARHTARSLQANDDNNPARVDSNEPLPPTSQPTPDNTTVSESDNVSPEQKIKLLWIHVPFNNPVWVRQILEKFSPQLNDNCQLLVDTHYNDTKFTPSKSFKWHELPRSPTAKFYLYLPYLHYDTYLNMIRRRDMVVCRQKYGRTSPTPQEVARVDSLELRVMWQFLGHDHAFQARRTLDQYGHPDLQSTWPRDDDQMLYKLTRRKFSKSASSMLSRWYDPEGHIVNDTLEKFQKAEGHFFSSSAKARKDKEESRKLIDGNVLMVDQLWLWVIDDNTLVTFFPERESPPREGPLYKEADLRETIKKHLKEDYNTAPANDVFNAAASMIFHAVTMFMDGYQIMRAKKKALVYMAEIMELRDMEDELQTLARLFKEQNDTINNMRQLTDNVPCLYDAAHRLKEYQERVTSMTTHVKDLQKSYEKLLQLVQFQAEADESRSHQDLADSQNRSLMIFTIFTVFFSPLSFFTSVFGMNTREWAGPDANQFPSLKLIGAIALLIKLSSILGSFDQHNTTCGSK

SEQ ID NO: 17885 - DNA, 247 bp, Muscodor strobelii
  misc_feature: SGI EST ID NO. CUFF.42224.0
  misc_feature: Variant of the nucleotide sequence at SEQ ID NO 17883
catattgtgaacgacacgctggaaaaattccaaaaggctgaggggcatttcttcagtagcagtgcgaaggctcgcaaagataaagaggagagcagaaaattgatcgacggtaacgttctcatggtagaccaactgtggctttgggtgattgatgataacaccttggtgactttctttcctgaacgagaatctcctccaagagaagggccattatataaggaagccgatctacgagagactatcaaga

SEQ ID NO: 17886 - DNA, 309 bp, Muscodor strobelii
  misc_feature: SGI cDNA ID NO. 565984
  misc_feature: Encodes the peptide sequence at SEQ ID NO 17887
atgaggaccggaacaacaagcgcagcatcttttgcccactgcgctgtgagtcactgttatgcagtgtcgatagcacggcgatccattcacgtcgaggagatgaccaagtatcatcatccagatgcgcgcaagcagttctacggtcccctgaagaaggttcatgacaaacagttgccagagaattgccaagtcgccgagagtgagcttatcaagctcacgacgacatcaaggccagttgaggcactgaattccgagatagtgcttccacagtcactacacgacagtcctcgccccgcgacaattttctaa

SEQ ID NO: 17887 - protein, 102 aa, Muscodor strobelii
  misc_feature: SGI Peptide ID NO. 565984
MRTGTTSAASFAHCAVSHCYAVSIARRSIHVEEMTKYHHPDARKQFYGPLKKVHDKQLPENCQVAESELIKLTTTSRPVEALNSEIVLPQSLHDSPRPATIF

SEQ ID NO: 17888 - DNA, 1455 bp, Muscodor strobelii
  misc_feature: SGI cDNA ID NO. 565985
  misc_feature: Reduced expression when VOC is produced
  misc_feature: Encodes the peptide sequence at SEQ ID NO 17889
atggacttcaactcgggcacagcctacgccgagtctgacgccgatgacgagtacgagcgcagcctgcatacggggtcccctatcctccaaaccgactccgagatctcccccaccgactcggacggcctctcctccaccgaacacaccccgaccacctacggctatcgcaactcagccgaccgcctacccgagaccatcatctccgagtggactgctgacgagtgtgccgacttcatcgcctccatcggcctgcagcagtactctgatcgcttccttgagaacgagattgtcggagaagctctggtagctctactacacgatgacctcaagtccatgggcgtgaccagtgttggccaccgtttgaccatactgaagagcgtctacgatgtcaagaaggcccaggacatcccaatagaaagcgatcactatgttcctctctctgctgatgccgaagctcaatacgctacggccacactgaaggacatcaaacaactggtagatcagttgcgcctgcgagacgagcgaattagccttatggagcaggatttgcgacgccaggccgatgactttcgacgactgcgcgaagatatgctgcctgccttgcgattggctaagaatgcccagacaccgctgcccaacgtgtccaacaaccagaactacggatacgagacagccactatatcacctccggcacccacatccgcctccacccagtcttcggccggactgaagcgccagtactctaccaagaagatcgtacttggtacgaaccccatgagcatatctcccagtcatctgcagaccactcacgggcacccgacggcagagcaaactctcgaccccgccagcgctgccgagcgagccgtcctctcttcctcacaccttgccgccatgaacggttccggccaggccgcatcacctggctactcgcccaacatcccatctccgacctcccctcctactcttagcaacgccacgctcggatcacggacctaccgctccgacgcccccacaccctcatcccgctctacattccaggactctgagcatggctacaactcaaagcaaggcggtgttgcgcctcggcgaatgcagacgcccgtgcccgagaccccgggctccagcagctcatcagtggagatcttcaagtcgtttagggtctcgatggacgatccctgctacaaggtgctgccagccgctctgaagaagtaccagatcaatgcgccctgggatcagtatgcactgtatattgtgtatggtgaccaggagcgttgtctaggcttggaggagaaaccgcttattttgtttaagcagctggataaggagggcaagaagccgatgttcatgctcagaaagactaatacggcccaggcggatggtgatacgcccagctcggctggactcggcagtgcgggtatgagaccgacttatgatccgccgggtggtattatataa

SEQ ID NO: 17889 - protein, 484 aa, Muscodor strobelii
  misc_feature: SGI Peptide ID NO. 565985
  misc_feature (67)..(133): Pfam Id: PF07647 Pfam Desc: SAM domain (Sterile alpha motif)
  misc_feature (360)..(455): Pfam Id: PF00788 Pfam Desc: Ras association (RalGDS/AF-6) domain
  misc_feature (68)..(131): Pfam Id: PF00536 Pfam Desc: SAM domain (Sterile alpha motif)
  misc_feature (382)..(455): Pfam Id: PF00788 Pfam Desc: Ras association (RalGDS/AF-6) domain
  misc_feature (1)..(484): NCBI GI: 39940082 Blast Desc: MGG_05199 [Magnaporthe grisea 70-15] gi|145010533|gb|EDJ95189.1| MGG_05199 [Magnaporthe grisea 70-15]
  misc_feature (1)..(484): NCBI GI: 46116518 Blast Desc: FG04101.1 [Gibberella zeae PH-1]
  misc_feature (1)..(484): NCBI GI: 256726138 Blast Desc: [Nectria haematococca mpVI 77-13-4]
  misc_feature (1)..(484): NCBI GI: 85081729 Blast Desc: NCU00455 [Neurospora crassa OR74A] gi|28917851|gb|EAA27538.1| conserved [Neurospora crassa OR74A]
  misc_feature (1)..(454): NCBI GI: 171686198 Blast Desc: protein product [Podospora anserina] gi|170943060|emb|CAP68713.1| protein product [Podospora anserina]
  misc_feature (1)..(484): NCBI GI: 154309222 Blast Desc: BC1G_07505 [Botryotinia fuckeliana B05.10] gi|150852329|gb|EDN27521.1| BC1G_07505 [Botryotinia fuckeliana B05.10]
  misc_feature (22)..(484): NCBI GI: 116207660 Blast Desc: CHGG_03123 [Chaetomium globosum CBS 148.51] gi|88183720|gb|EAQ91188.1| CHGG_03123 [Chaetomium globosum CBS 148.51]
  misc_feature (1)..(484): NCBI GI: 156058366 Blast Desc: SS1G_03194 [Sclerotinia sclerotiorum 1980] gi|154700982|gb|EDO00721.1| SS1G_03194 [Sclerotinia sclerotiorum 1980]
  misc_feature (9)..(484): NCBI GI: 71002732 Blast Desc: MAPKKK cascade protein kinase regulator Ste50 [Aspergillus fumigatus Af293] gi|28394449|gb|AAM08676.1| Ste50p [Aspergillus fumigatus] gi|66853685|gb|EAL94009.1| MAPKKK cascade
  misc_feature (9)..(484): NCBI GI: 119482303 Blast Desc: protein kinase regulator Ste50 [Neosartorya fischeri NRRL 181] gi|119409334|gb|EAW19283.1| protein kinase regulator Ste50 [Neosartorya fischeri NRRL 181]
  misc_feature: Useful for introducing or modulating the production of volatile compounds
MDFNSGTAYAESDADDEYERSLHTGSPILQTDSEISPTDSDGLSSTEHTPTTYGYRNSADRLPETIISEWTADECADFIASIGLQQYSDRFLENEIVGEALVALLHDDLKSMGVTSVGHRLTILKSVYDVKKAQDIPIESDHYVPLSADAEAQYATATLKDIKQLVDQLRLRDERISLMEQDLRRQADDFRRLREDMLPALRLAKNAQTPLPNVSNNQNYGYETATISPPAPTSASTQSSAGLKRQYSTKKIVLGTNPMSISPSHLQTTHGHPTAEQTLDPASAAERAVLSSSHLAAMNGSGQAASPGYSPNIPSPTSPPTLSNATLGSRTYRSDAPTPSSRSTFQDSEHGYNSKQGGVAPRRMQTPVPETPGSSSSSVEIFKSFRVSMDDPCYKVLPAALKKYQINAPWDQYALYIVYGDQERCLGLEEKPLILFKQLDKEGKKPMFMLRKTNTAQADGDTPSSAGLGSAGMRPTYDPPGGII

SEQ ID NO: 17890 - DNA, 2308 bp, Muscodor strobelii
  misc_feature: SGI EST ID NO. CUFF.42258.0
  misc_feature: Variant of the nucleotide sequence at SEQ ID NO 17888
gtctcctgtgcggactgactgaactgggaagcggcgacttggagcactgccaacaacagcgacgcaccttccgacatcaaagaacttgacaagaaaaaacagtcacgccgatttgagcacattgcaaattgtgcgaattgaccctgccacgagaccttccatttctccgttcacctacgcagctgccacttgactcgccgtctgtgtcgtcgacctcacaaccacctcacaaccaacaccccctcctcactcatacttgatcgacctgcacggcgaccatcccattcttgcgtgcacctcaacgtcttcgccgtggctcatccacagtatcaacacccacatcagcccttgtttctccgacacaatctcgagccccatacggcctcttctgcattagagcccaccatccggcgaaaagacctgggggagggatcgtgggatctgcgagaccaataccgagtcgccgccaaccaacaaccacaacccccacaggccaacaccaagaccaacaagatggacttcaactcgggcacagcctacgccgagtctgacgccgatgacgagtacgagcgcagcctgcatacggggtcccctatcctccaaaccgactccgagatctcccccaccgactcggacggcctctcctccaccgaacacaccccgaccacctacggctatcgcaactcagccgaccgcctacccgagaccatcatctccgagtggactgctgacgagtgtgccgacttcatcgcctccatcggcctgcagcagtactctgatcgcttccttgagaacgagattgtcggagaagctctggtagctctactacacgatgacctcaagtccatgggcgtgaccagtgttggccaccgtttgaccatactgaagagcgtctacgatgtcaagaaggcccaggacatcccaatagaaagcgatcactatgttcctctctctgctgatgccgaagctcaatacgctacggccacactgaaggacatcaaacaactggtagatcagttgcgcctgcgagacgagcgaattagccttatggagcaggatttgcgacgccaggccgatgactttcgacgactgcgcgaagatatgctgcctgccttgcgattggctaagaatgcccagacaccgctgcccaacgtgtccaacaaccagaactacggatacgagacagccactatatcacctccggcacccacatccgcctccacccagtcttcggccggactgaagcgccagtactctaccaagaagatcgtacttggtacgaaccccatgagcatatctcccagtcatctgcagaccactcacgggcacccgacggcagagcaaactctcgaccccgccagcgctgccgagcgagccgtcctctcttcctcacaccttgccgccatgaacggttccggccaggccgcatcacctggctactcgcccaacatcccatctccgacctcccctcctactcttagcaacgccacgctcggatcacggacctaccgctccgacgcccccacaccctcatcccgctctacattccaggactctgagcatggctacaactcaaagcaaggcggtgttgcgcctcggcgaatgcagacgcccgtgcccgagaccccgggctccagcagctcatcagtggagatcttcaagtcgtttagggtctcgatggacgatccctgctacaaggtgctgccagccgctctgaagaagtaccagatcaatgcgccctgggatcagtatgcactgtatattgtgtatggtgaccaggagcgttgtctaggcttggaggagaaaccgcttattttgtttaagcagctggataaggagggcaagaagccgatgttcatgctcagaaagactaatacggcccaggcggatggtgatacgcccagctcggctggactcggcagtgcgggtatgagaccgacttatgatccgccgggtggtattatataagagcaggatgaggaaggaggggacatgattggctcaacgatgagtgagggatcgagaaggaccagcgagtgatttatgagtgcctcatcttgcatgtacctgctatggtatgataaggcacggactgatatggtgaggaaagaagtatcagagacagataaggatggggaaaataggggatggattcatggggctgtgaggaaagggcaagggaatacgggatgtaccagcgttgtagcatactatgaggtacagatgattgcatagcgtgcgggcaaagatttctttgtttctaccgggactctactgagttttgaactttgatctaggtatgagtgac

SEQ ID NO: 17891 - DNA, 1968 bp, Muscodor strobelii
  misc_feature: SGI cDNA ID NO. 565986
  misc_feature: Reduced expression when VOC is produced
  misc_feature: Encodes the peptide sequence at SEQ ID NO 17892
atgcctcgcaagatcacgatcccctttacgggtgggaactcgaacaccatggcccagccagcagcgcttgccgagaggcggccttcgcaatccaagggaaaccgcctcagccagttcttctcgtcatcccccaagaacaaggagcaatccccggccaaggagactttgatggcgatgcaaaacaactcggcacaatctcttggagcccctggtgctggtctgcctagcatctctgtctcttctcctgatctgcagacggatgaggccacaaccaccttgttccagtccaccgattccaccgaaatttccctgcagaagcgtcgtgatgcccaatttggtcccctccttcaccccgatcaccgttacgtgagcatgcatcatggagaacccctggctgcgcccattatcgatgagcccccctactactatgtcctcactacctatatcagctatcttctgcttctcgctctcggccatatcagagacttcttcggcaagcgcttcagcaagaaggctttgtacaagactctgcgtgctaacaacggatatgcgcccctgaacgacgacttcgacagcttctacacgcgacgactgaagctccgcattgatgatgtgtttgcaagaactagcactggtgtccctggccgtttcatcaacctcttggaccgtgtctctgtgaatttcaatgagtcgtacaactacaccggtaccacaaccgagactctgaacatgagctcttacaactaccttggtttcgctcagtctgaaggtccctgtgctgatgctgtggaggagtgtgtccgcaaatatggcttgagcttttccagcacccgagccgattccggtagctcagatctggtccaggaagtcgaagaagaggttgcagcattcgtaggaaagccggctgccatggtcttctcaatggggtttgtcacaaattcaagcacattccctgccctcgtctctaagggttgtctgataatatctgacgagctcaaccacgcttcgatccggctgggtgcccgcctctccggtgctgtgattagatctttcaagcacaacgacatggcggatctcgaggccagactcagggaggccattgcccagggccaaccgcgcactcatcgtccgtggaagaagatattggttgctgtcgaaggtctctattctatggagggtactatgtgtgatctgcccggcattctgaacctcaaggacacctacaaattccatctgtatgttgatgaggcgcacagtgttggtgctctaggacctcgaggacgtggtgtttgtgactatttcgggatcgaccccagcagagtggatattctcatggggactttgaccaagtcttttggtgccaatggaggctatatcgcagccgagaagaacatcatcgacaagctgaagagctccaatgccgcaacgatgcttggcgaggcaccgacacctgctgttctcatgcagatttacgcctctctgaagatcatcactggcgacctagtgcctggtgagggtgaggagcgacttcagcgtattgccttcaactcgcgttatctgcgtctcggtctcaagcgattgggcatgatagtgtatggccatgacgactcacccatcatccccattaccctctacaaccctgcgaagatccccgccttcagccacgaaatgctcaagcgcaatatctcagtggtcgttgttggttacccggcaacaccgctcatcagctcccgcgcccgattctgtgtctcctctgcccacaacaaggatgatctggaccgcctcctcgctgcttgtgacgaggtctctgacattttgcaactcaagttttcaacgggcattgctggtggccagagagcgttgcccgagggcgtgtctgctgaggaccgcatcatcgagcagccccgatggtcgcttgaagaggttatcgaggctggtgcaaccgacgccaagcttcgtcttcggtaa

SEQ ID NO: 17892 - protein, 655 aa, Muscodor strobelii
  misc_feature: SGI Peptide ID NO. 565986
  misc_feature (239)..(599): Pfam Id: PF00155 Pfam Desc: Aminotransferase class I and II
  misc_feature (1)..(655): NCBI GI: 261359184 Blast Desc: serine palmitoyltransferase [Verticillium albo-atrum VaMs.102]
  misc_feature (1)..(655): NCBI GI: 85081699 Blast Desc: serine palmitoyltransferase 2 [Neurospora crassa OR74A] gi|28917843|gb|EAA27530.1| serine palmitoyltransferase 2 [Neurospora crassa OR74A]
  misc_feature (1)..(655): NCBI GI: 171686202 Blast Desc: protein product [Podospora anserina] gi|170943062|emb|CAP68715.1| protein product [Podospora anserina]
  misc_feature (17)..(655): NCBI GI: 256726139 Blast Desc: [Nectria haematococca mpVI 77-13-4]
  misc_feature (1)..(655): NCBI GI: 145602091 Blast Desc: MGG_05197 [Magnaporthe grisea 70-15] gi|145010535|gb|EDJ95191.1| MGG_05197 [Magnaporthe grisea 70-15]
  misc_feature (17)..(655): NCBI GI: 46116520 Blast Desc: FG04102.1 [Gibberella zeae PH-1]
  misc_feature (1)..(655): NCBI GI: 116207656 Blast Desc: CHGG_03121 [Chaetomium globosum CBS 148.51] gi|88183718|gb|EAQ91186.1| CHGG_03121 [Chaetomium globosum CBS 148.51]
  misc_feature (26)..(655): NCBI GI: 156040820 Blast Desc: SS1G_11388 [Sclerotinia sclerotiorum 1980] gi|154695772|gb|EDN95510.1| SS1G_11388 [Sclerotinia sclerotiorum 1980]
  misc_feature (35)..(651): NCBI GI: 242807017 Blast Desc: serine palmitoyltransferase 2, [Talaromyces stipitatus ATCC 10500] gi|218715489|gb|EED14911.1| serine palmitoyltransferase 2, [Talaromyces stipitatus ATCC 10500]
  misc_feature (20)..(655): NCBI GI: 119174154 Blast Desc: CIMG_09059 [Coccidioides immitis RS]
  misc_feature (79)..(650): SWISSPROT Homolog: EC 2.3.1.50 Serine C-palmitoyltransferase
  misc_feature: Useful for introducing or modulating the production of volatile compounds
MPRKITIPFTGGNSNTMAQPAALAERRPSQSKGNRLSQFFSSSPKNKEQSPAKETLMAMQNNSAQSLGAPGAGLPSISVSSPDLQTDEATTTLFQSTDSTEISLQKRRDAQFGPLLHPDHRYVSMHHGEPLAAPIIDEPPYYYVLTTYISYLLLLALGHIRDFFGKRFSKKALYKTLRANNGYAPLNDDFDSFYTRRLKLRIDDVFARTSTGVPGRFINLLDRVSVNFNESYNYTGTTTETLNMSSYNYLGFAQSEGPCADAVEECVRKYGLSFSSTRADSGSSDLVQEVEEEVAAFVGKPAAMVFSMGFVTNSSTFPALVSKGCLIISDELNHASIRLGARLSGAVIRSFKHNDMADLEARLREAIAQGQPRTHRPWKKILVAVEGLYSMEGTMCDLPGILNLKDTYKFHLYVDEAHSVGALGPRGRGVCDYFGIDPSRVDILMGTLTKSFGANGGYIAAEKNIIDKLKSSNAATMLGEAPTPAVLMQIYASLKIITGDLVPGEGEERLQRIAFNSRYLRLGLKRLGMIVYGHDDSPIIPITLYNPAKIPAFSHEMLKRNISVVVVGYPATPLISSRARFCVSSAHNKDDLDRLLAACDEVSDILQLKFSTGIAGGQRALPEGVSAEDRIIEQPRWSLEEVIEAGATDAKLRLR

SEQ ID NO: 17893 - DNA, 3077 bp, Muscodor strobelii
  misc_feature: SGI EST ID NO. CUFF.42792.1
  misc_feature: Variant of the nucleotide sequence at SEQ ID NO 17891
cagatcgtcgtcccatccggccttgaatcccgctattcccttctcattttacgccttcattttccacctcttttcttctaacctccctctcccttttctttccctcctgttacctctctcaccctctcgcctgcactcgcgacgatcttcctcctcctgctccgccgcaccaatcttcggtttccgatctgggggaacgacgttcgagtcggtgtttgttggtcaacaagtatttacctcagccagtgtgtacctgcttgtccagtcagtgtctgcgttccagtcaccgttcgattgcaccacaccaaacgggaattccgttcccaccacgctcctttccaacaaaaccaattctgctcgcctgctagttgaagcctgcctgtcaatctataattaatcgtaatatcaatcccgatcccgcctgcccaaacttaaacagaagagtatcgaaattagctcaatccccctcaacatacggctcatcgaccaccattttgttaatttcacgataatactacactacctctcttgcgccactttagcctagatattcctgacgaagcatcggattcgaaatgcctcgcaagatcacgatcccctttacgggtgggaactcgaacaccatggcccagccagcagcgcttgccgagaggcggccttcgcaatccaagggaaaccgcctcagccagttcttctcgtcatcccccaagaacaaggagcaatccccggccaaggagactttgatggcgatgcaaaacaactcggcacaatctcttggagcccctggtgctggtctgcctagcatctctgtctcttctcctgatctgcagacggatgaggccacaaccaccttgttccagtccaccgattccaccgaaatttccctgcagaagcgtcgtgatgcccaatttggtcccctccttcaccccgatcaccgttacgtgagcatgcatcatggagaacccctggctgcgcccattatcgatgagcccccctactactatgtcctcactacctatatcagctatcttctgcttctcgctctcggccatatcagagacttcttcggcaagcgcttcagcaagaaggctttgtacaagactctgcgtgctaacaacggatatgcgcccctgaacgacgacttcgacagcttctacacgcgacgactgaagctccgcattgatgatgtgtttgcaagaactagcactggtgtccctggccgtttcatcaacctcttggaccgtgtctctgtgaatttcaatgagtcgtacaactacaccggtaccacaaccgagactctgaacatgagctcttacaactaccttggtttcgctcagtctgaaggtccctgtgctgatgctgtggaggagtgtgtccgcaaatatggcttgagcttttccagcacccgagccgattccggtagctcagatctggtccaggaagtcgaagaagaggttgcagcattcgtaggaaagccggctgccatggtcttctcaatggggtttgtcacaaattcaagcacattccctgccctcgtctctaagggttgtctgataatatctgacgagctcaaccacgcttcgatccggctgggtgcccgcctctccggtgctgtgattagatctttcaagcacaacgacatggcggatctcgaggccagactcagggaggccattgcccagggccaaccgcgcactcatcgtccgtggaagaagatattggttgctgtcgaaggtctctattctatggagggtactatgtgtgatctgcccggcattctgaacctcaaggacacctacaaattccatctgtatgttgatgaggcgcacagtgttggtgctctaggacctcgaggacgtggtgtttgtgactatttcgggatcgaccccagcagagtggatattctcatggggactttgaccaagtcttttggtgccaatggaggctatatcgcagccgagaagaacatcatcgacaagctgaagagctccaatgccgcaacgatgcttggcgaggcaccgacacctgctgttctcatgcagatttacgcctctctgaagatcatcactggcgacctagtgcctggtgagggtgaggagcgacttcagcgtattgccttcaactcgcgttatctgcgtctcggtctcaagcgattgggcatgatagtgtatggccatgacgactcacccatcatccccattaccctctacaaccctgcgaagatccccgccttcagccacgaaatgctcaagcgcaatatctcagtggtcgttgttggttacccggcaacaccgctcatcagctcccgcgcccgattctgtgtctcctctgcccacaacaaggatgatctggaccgcctcctcgctgcttgtgacgaggtctctgacattttgcaactcaagttttcaacgggcattgctggtggccagagagcgttgcccgagggcgtgtctgctgaggaccgcatcatcgagcagccccgatggtcgcttgaagaggttatcgaggctggtgcaaccgacgccaagcttcgtcttcggtaaccgcttctcgcccctctgttcagactcatcattcacttgcatttaccggcgtttcttgaaaacatgacatcggttcatcgatgcaatccataacccggggcgccttggagttgtgtggtcagcaatatagcaaccgatagggcatcggttcattgtttattccagggaaaggagttggaggttgtgacccatgccattcgcttgacagatagagacaacttcaattcttccgaccctgagcggccgcggtcgtccgtcgttgacggcccatgcggcgccagatgaccagtttgtgtgcggtggagggtaagggaggccttccggcacacgtgttgagggttcggtactactccccccctgttgttgaagtacatgcaaagcaaccatccgtgggtggttgacttgatgtagggggataggctcattcgcgggggtagccccagttgagcgtattgtgaactatagactcatcactcgtagatagattcaaatcagaaattagcattgctgattcatttaccagtcgtctgtccc

SEQ ID NO: 17894 - DNA, 2055 bp, Muscodor strobelii
  misc_feature: SGI cDNA ID NO. 565987
  misc_feature: Reduced expression when VOC is produced
  misc_feature: Encodes the peptide sequence at SEQ ID NO 17895
atgactgtcaatggggcatcaaagcccgaacctacggagctatggcggcatccggacccagagtcgactcgcatgttcgccttcttacagcatgtcaagagcaaataccaattaaacatcgaagattatccaggtctcctgaaatggtccaccgaaaatgtttcagacttctggggtgaggtctggcacttttgcggcatcaaggcctcagagtcctatacacaggttcttccagagaatgcaccaatgtttccgcgaccagatttcttctcgggagcactgttgaacttcgcagagaatctgctcttccccgaaaatgcgcaagttaaggacgacgccgtggctatcataacagcaacagaaatcgaaggccaactgcaaaatgtgacgtgggccatgctgcgtgaggacgtacgccgctgttcaaatgcgctccgagcagccggcgtgaaacagaaagacgtcgtcgctggattcgtctcaaatcatactgaggccgtagtcgctatgctcgctgctgctactttgggcgctatctggaccggtattagccctgataatggtatcagcgctgtcctagacaggctggctcagattgagcccaaggtcctatttgctgataatggaatggtctataatgggaagaattggtcatccaatgataaaacaaaagctatcgtggacgtattgaagacaaagcgtttgcaaattgtcgttgtgattgataacataccggagctcggaacagatattggggtttctggggatggacttacggtggttgagtatcagaacttactgaacagctctagcgaagaaccacttgtcttcgaacagctcccgccctctcaccccctttacgttctatactcttcaggcaccacaggacttccaaaggcaatcgtccacacagctctcggcacgttaatccaacacaagaaagagcactttcttcactgctcaatggatcagaactcccggatgctctactacactactacctcctggatgatgtggcactggagtatctcagcattagcttgtggtacttcacttgttctttacacaggctcgccattcaaaccccacggctatatgtccatacccaaactactctcctcacttcaagtcacgcatttcgggacttcagcttcgtatttgactacacttgagacgaatgaggtgtatcctactaaggaagtcgatctttcgagactgcaggctatttactctacagcgtcgcctctgcctccttcgactttctctttcgtttacggtatgtgccagaaagcattcccaccccacataaacctagcctccataaccggcggaacagacataatctcgctcttcggcgctccatgccctttacaccccgtctacgtcggcgaaattcaatgcgccggtctaggcatggccatcgcagtcgtggactccatcaccggggagcccacaccaggtgaagacggagagctggtctgtctaaagccattcccctgccaacccctaaccttctggggcgccgacggcaactcaaaatacaagagctcctacttcgagcgcttcgacaacatatggcatcacggcgacttcgtccggatcgacactcgcaccggcggattgacaatgcttggtcgttccgacggcgttttgaaaccctctggtgtcaggtttggaagcgcggagatttataatgtgctgacgaagttcttcggtacggaaatcgaggaagcggtttgtgttggacgcagacgggaacaggatagagatgaggctgtttgtctttttgtggttatgaatgaggggcagacgtttgatgaggggttgagaaagaggattcaaggtgtgattaggaaggagttgagtcctagacatgtcccgtctgttgttgaggaggcgggtggtgggatcccgaagacggggaatgggaagaagatcgaagtcgctgtcaaacagattctttctggtctgaatgtcaaaacgaatgctagcgttgctaaccccgaggcactggtgtggtttaagacttgggctatccagcatgagaacgactga

SEQ ID NO: 17895 - protein, 684 aa, Muscodor strobelii
  misc_feature: SGI Peptide ID NO. 565987
  misc_feature (130)..(580): Pfam Id: PF00501 Pfam Desc: AMP-binding enzyme
  misc_feature (5)..(678): NCBI GI: 46116522 Blast Desc: FG04103.1 [Gibberella zeae PH-1]
  misc_feature (13)..(682): NCBI GI: 85081694 Blast Desc: NCU00446 [Neurospora crassa OR74A] gi|28917842|gb|EAA27529.1| NCU00446 [Neurospora crassa OR74A]
  misc_feature (12)..(622): NCBI GI: 171686204 Blast Desc: protein product [Podospora anserina] gi|170943063|emb|CAP68716.1| protein product [Podospora anserina]
  misc_feature (5)..(681): NCBI GI: 145602093 Blast Desc: MGG_05196 [Magnaporthe grisea 70-15] gi|145010536|gb|EDJ95192.1| MGG_05196 [Magnaporthe grisea 70-15]
  misc_feature (12)..(680): NCBI GI: 154303914 Blast Desc: BC1G_08841 [Botryotinia fuckeliana B05.10] gi|150854425|gb|EDN29617.1| BC1G_08841 [Botryotinia fuckeliana B05.10]
  misc_feature (1)..(681): NCBI GI: 121701639 Blast Desc: acetoacetyl-CoA synthase [Aspergillus clavatus NRRL 1] gi|119397227|gb|EAW07658.1| acetoacetyl-CoA synthase [Aspergillus clavatus NRRL 1]
  misc_feature (10)..(681): NCBI GI: 238842714 Blast Desc: acetoacetyl-coenzyme A synthetase [Microsporum canis CBS 113480]
  misc_feature (1)..(681): NCBI GI: 70995598 Blast Desc: acetoacetyl-CoA synthase [Aspergillus fumigatus Af293] gi|41581263|emb|CAE47912.1| acetoacetyl-coa synthetase, [Aspergillus fumigatus] gi|66850189|gb|EAL90516.1| synthase
  misc_feature (1)..(681): NCBI GI: 159131309 Blast Desc: acetoacetyl-CoA synthase [Aspergillus fumigatus A1163]
  misc_feature (1)..(681): NCBI GI: 119495583 Blast Desc: acetoacetyl-CoA synthase [Neosartorya fischeri NRRL 181] gi|119412735|gb|EAW22676.1| acetoacetyl-CoA synthase [Neosartorya fischeri NRRL 181]
  misc_feature (10)..(676): SWISSPROT Homolog: EC 6.2.1.16 Acetoacetate--CoA ligase
  misc_feature: Useful for introducing or modulating the production of volatile compounds
MTVNGASKPEPTELWRHPDPESTRMFAFLQHVKSKYQLNIEDYPGLLKWSTENVSDFWGEVWHFCGIKASESYTQVLPENAPMFPRPDFFSGALLNFAENLLFPENAQVKDDAVAIITATEIEGQLQNVTWAMLREDVRRCSNALRAAGVKQKDVVAGFVSNHTEAVVAMLAAATLGAIWTGISPDNGISAVLDRLAQIEPKVLFADNGMVYNGKNWSSNDKTKAIVDVLKTKRLQIVVVIDNIPELGTDIGVSGDGLTVVEYQNLLNSSSEEPLVFEQLPPSHPLYVLYSSGTTGLPKAIVHTALGTLIQHKKEHFLHCSMDQNSRMLYYTTTSWMMWHWSISALACGTSLVLYTGSPFKPHGYMSIPKLLSSLQVTHFGTSASYLTTLETNEVYPTKEVDLSRLQAIYSTASPLPPSTFSFVYGMCQKAFPPHINLASITGGTDIISLFGAPCPLHPVYVGEIQCAGLGMAIAVVDSITGEPTPGEDGELVCLKPFPCQPLTFWGADGNSKYKSSYFERFDNIWHHGDFVRIDTRTGGLTMLGRSDGVLKPSGVRFGSAEIYNVLTKFFGTEIEEAVCVGRRREQDRDEAVCLFVVMNEGQTFDEGLRKRIQGVIRKELSPRHVPSVVEEAGGGIPKTGNGKKIEVAVKQILSGLNVKTNASVANPEALVWFKTWAIQHEND

SEQ ID NO: 17896 - DNA, 1862 bp, Muscodor strobelii
  misc_feature: SGI EST ID NO. CUFF.42269.0
  misc_feature: Variant of the nucleotide sequence at SEQ ID NO 17894
tttgaagcatctacatattgtgagacgccggaggtaggtgacgagggtaactacatgaagctgactaccgaagagcttgattactagcgacggtctaacccgacggtcacttccaacatcttgcgtcccagagctatgggtttcacttgtgattgttcggcattcgggtctgaacaaacaacaaaatgcattctcaatgactgcgttcgcctcacgatatagctttgtcattgctcctcatcatttaaatatcaaaatttgatcgatgggcaaatactacagcaacaaactaccggtctcgctccataaactatgacaattttaggctttccgacgggtagctgtctaccgtcgggttaagtggcccatgtaactcacggcttcggccggcctccatcggacctggatggagatggatctcacctcgtgcgccgttgcaaaatcagtgcttaaacttgttgttgcccctgaacacccaggaaaatcaaacccaagatatcttggtcggtgatcgtctgtctttcttcacgatcgccagatactaatttcaaggcatacgtggtgcaatttgatcccgctgtaaacatgactgtcaatggggcatcaaagcccgaacctacggagctatggcggcatccggacccagagtcgactcgcatgttcgccttcttacagcatgtcaagagcaaataccaattaaacatcgaagattatccaggtctcctgaaatggtccaccgaaaatgtttcagacttctggggtgaggtctggcacttttgcggcatcaaggcctcagagtcctatacacaggttcttccagagaatgcaccaatgtttccgcgaccagatttcttctcgggagcactgttgaacttcgcagagaatctgctcttccccgaaaatgcgcaagttaaggacgacgccgtggctatcataacagcaacagaaatcgaaggccaactgcaaaatgtgacgtgggccatgctgcgtgaggacgtacgccgctgttcaaatgcgctccgagcagccggcgtgaaacagaaagacgtcgtcgctggattcgtctcaaatcatactgaggccgtagtcgctatgctcgctgctgctactttgggcgctatctggaccggtattagccctgataatggtatcagcgctgtcctagacaggctggctcagattgagcccaaggtcctatttgctgataatggaatggtctataatgggaagaattggtcatccaatgataaaacaaaagctatcgtggacgtattgaagacaaagcgtttgcaaattgtcgttgtgattgataacataccggagctcggaacagatattggggtttctggggatggacttacggtggttgagtatcagaacttactgaacagctctagcgaagaaccacttgtcttcgaacagctcccgccctctcaccccctttacgttctatactcttcaggcaccacaggacttccaaaggcaatcgtccacacagctctcggcacgttaatccaacacaagaaagagcactttcttcactgctcaatggatcagaactcccggatgctctactacactactacctcctggatgatgtggcactggagtatctcagcattagcttgtggtacttcacttgttctttacacaggctcgccattcaaaccccacggctatatgtccatacccaaactactctcctcacttcaagtcacgcatttcgggacttcagcttcgtatttgactacacttgagacgaatgaggtgtatcctactaaggaagtcgatctttcgagactgcaggctatttactctacagcgtcgcctctgcctccttcgactttctctttcgtttacgg

SEQ ID NO: 17897 - DNA, 1059 bp, Muscodor strobelii
  misc_feature: SGI cDNA ID NO. 565988
  misc_feature: Encodes the peptide sequence at SEQ ID NO 17898
atgggcgacgatgaggttgattttagggctatgcctaagattgagcttcacgctcacctctccggctcaataagtagggactgtctacacgagatatgggcccagaaacacgaagcggggcagacggatctggaagatccggtggttgttatgcctatgggaaaacatgactatgatcttgatacgttcttcccgttgttttcggagtatatctataagttggtgaatgatgtatcgtcgctgcgtttgtcgacaatgagagtcgttgaggaattcgcgagagatggcgtggtgtatcttgagctgaggactacgccgcgcggaatgcctagtgcttctctgtccaaagaagactacatatcggagatcctgtctgctatctctgccgcccgggaaacaaacccgtcgataagagtaaaactcatcctatccatcgaccgacggaacacactcgacgaagcttacgaagtgctcgcccttgccactaaattccactctcgcggagtagttgggatagatctctgtggcgacccaacgaaaggagacgtcagtctcttcagaccggtatttcaacaagctaaggaggctgggctgggcgtcactgtgcattttgcggaggcggaacagagtgggagcgagagggagttggatgagattttaagctggaacccggatagactgggacatgttatacacgtaccggataggattaaaggagtcattagggagaggggtttagggttagaactttgcttgagttgtaatgtgttggcgaagatgattaggggtggaggatttgagagtcatcattttggggagtggtgggataacaagggcgatgggaatggcaatggagggagggcggtggttgttccttgtaccgatgatgtgggagtcttcggaagtccgttgtcgaatgagtgggcgttgattaggaagtattttggtctgagtcgggcggaaatattaggtctcgcgaggaaggggattgatgttatctttggaggagaggaagagaaggagtggttgagagggattatgtggaatgttcagaagtga

SEQ ID NO: 17898 - protein, 352 aa, Muscodor strobelii
  misc_feature: SGI Peptide ID NO. 565988
  misc_feature (10)..(346): Pfam Id: PF00962 Pfam Desc: Adenosine/AMP deaminase
  misc_feature (10)..(229): Pfam Id: PF00962 Pfam Desc: Adenosine/AMP deaminase
  misc_feature (1)..(349): NCBI GI: 40882142 Blast Desc: related to adenosine deaminase [Neurospora crassa]
  misc_feature (14)..(349): NCBI GI: 164429100 Blast Desc: NCU00438 [Neurospora crassa OR74A] gi|157072410|gb|EAA27466.2| [Neurospora crassa OR74A]
  misc_feature (6)..(348): NCBI GI: 154308349 Blast Desc: BC1G_07920 [Botryotinia fuckeliana B05.10] gi|150853005|gb|EDN28197.1| BC1G_07920 [Botryotinia fuckeliana B05.10]
  misc_feature (5)..(350): NCBI GI: 156058944 Blast Desc: SS1G_03484 [Sclerotinia sclerotiorum 1980] gi|154701271|gb|EDO01010.1| SS1G_03484 [Sclerotinia sclerotiorum 1980]
  misc_feature (6)..(349): NCBI GI: 261359223 Blast Desc: adenosine deaminase [Verticillium albo-atrum VaMs.102]
  misc_feature (9)..(351): NCBI GI: 145240191 Blast Desc: An08g06270 [Aspergillus niger] gi|134077256|emb|CAK45597.1| protein product [Aspergillus niger]
  misc_feature (9)..(352): NCBI GI: 121701335 Blast Desc: adenosine deaminase, [Aspergillus clavatus NRRL 1] gi|119397075|gb|EAW07506.1| adenosine deaminase, [Aspergillus clavatus NRRL 1]
  misc_feature (9)..(351): NCBI GI: 146322642 Blast Desc: adenosine deaminase [Aspergillus fumigatus Af293] gi|129557769|gb|EAL90656.2| adenosine deaminase, [Aspergillus fumigatus Af293] gi|159131449|gb|EDP56562.1| adenosine deaminase,
  misc_feature (9)..(349): NCBI GI: 259489069 Blast Desc: TPA: adenosine deaminase, (AFU_orthologue; AFUA_1G13240) [Aspergillus nidulans FGSC A4]
  misc_feature (9)..(343): NCBI GI: 238844595 Blast Desc: adenosine/AMP deaminase family protein [Microsporum canis CBS 113480]
  misc_feature (6)..(345): SWISSPROT Homolog: EC 3.5.4.4 Adenosine deaminase
MGDDEVDFRAMPKIELHAHLSGSISRDCLHEIWAQKHEAGQTDLEDPVVVMPMGKHDYDLDTFFPLFSEYIYKLVNDVSSLRLSTMRVVEEFARDGVVYLELRTTPRGMPSASLSKEDYISEILSAISAARETNPSIRVKLILSIDRRNTLDEAYEVLALATKFHSRGVVGIDLCGDPTKGDVSLFRPVFQQAKEAGLGVTVHFAEAEQSGSERELDEILSWNPDRLGHVIHVPDRIKGVIRERGLGLELCLSCNVLAKMIRGGGFESHHFGEWWDNKGDGNGNGGRAVVVPCTDDVGVFGSPLSNEWALIRKYFGLSRAEILGLARKGIDVIFGGEEEKEWLRGIMWNVQK

SEQ ID NO: 17899 - DNA, 2684 bp, Muscodor strobelii
  misc_feature: SGI EST ID NO. CUFF.42339.1
  misc_feature: Variant of the nucleotide sequence at SEQ ID NO 17897
agcgatcagtggttgtgcggcgaggctgcgtgcttgcttgccgactgcgacatacttcgtgttatagtctctgccgtgccgatagccgaacttttatgtcattagagatattgactgataattttgtgagatcttgctgagatgggcgacgatgaggttgattttagggctatgcctaagattgagcttcacgctcacctctccggctcaataagtagggactgtctacacgagatatgggcccagaaacacgaagcggggcagacggatctggaagatccggtggttgttatgcctatgggaaaacatgactatgatcttgatacgttcttcccgttgttttcggagtatatctataagttggtgaatgatgtatcgtcgctgcgtttgtcgacaatgagagtcgttgaggaattcgcgagagatggcgtggtgtatcttgagctgaggactacgccgcgcggaatgcctagtgcttctctgtccaaagaagactacatatcggagatcctgtctgctatctctgccgcccgggaaacaaacccgtcgataagagtaaaactcatcctatccatcgaccgacggaacacactcgacgaagcttacgaagtgctcgcccttgccactaaattccactctcgcggagtagttgggatagatctctgtggcgacccaacgaaaggagacgtcagtctcttcagaccggtatttcaacaagctaaggaggctgggctgggcgtcactgtgcattttgcggaggcggaacagagtgggagcgagagggagttggatgagattttaagctggaacccggatagactgggacatgttatacacgtaccggataggattaaaggagtcattagggagaggggtttagggttagaactttgcttgagttgtaatgtgttggcgaagatgattaggggtggaggatttgagagtcatcattttggggagtggtgggataacaagggcgatgggaatggcaatggagggagggcggtggttgttccttgtaccgatgatgtgggagtcttcggaagtccgttgtcgaatgagtgggcgttgattaggaagtattttggtctgagtcgggcggaaatattaggtctcgcgaggaaggggattgatgttatctttggaggagaggaagagaaggagtggttgagagggattatgtggaatgttcagaagtgacaaaggtgatggacgcgcggtacagctgtttggtgcacagatttgggcataccagcaacactattatgccaggtatgactcctactccgccgccttcagtcgacgcaaagatgaattgaatgaatctctagtccgatagttggattaattgctctcagtagaggtaaggaagacgggatgatcttatggtctacgcttgtgagatatcaagtctactacaagtaacacatagcataacccttctacttgacactctggaacaagtaaacgtagtatcccatttgttccgactctgtatttaatctctctcgcgtctattaccagctgagtccgtcttgccaactagtctcagggactgtcttgtcttatactgtcctctagatttatatctctcttctttgtctttgtaccttttatccggatctaaaccatcgcccaaaaatcagggaggcatctaatgccatccccttagaatagcgtactcgtccgaaaactcacatgaataaatgtcgtagccctctcagtcgttctcatgctggatagcccaagtcttaaaccacaccagtgcctcggggttagcaacgctagcattcgttttgacattcagaccagaaagaatctgtttgacagcgacttcgatcctgcagtatcaccattagcaaagcactccaggcactcttccaaaacctccaacacccaaaaccgttctcctaaacaagaaacaaaaacccgaaaggtaaactcacttcttcccattccccgtcttcgggatcccaccacccgcctcctcaacaacagacgggacatgtctaggactcaactccttcctaatcacaccttgaatcctctttctcaacccctcatcaaacgtctgcccctcattcataaccacaaaaagacaaacagcctcatctctatcctgttcccgtctgcgtccaacacaaaccgcttcctcgatttccgtaccgaagaacttcgtcagcacattataaatctccgcgcttccaaacctgacaccagagggtttcaaaacgccgtcggaacgaccaagcattgtcaatccgccggtgcgagtgtcgatccggacgaagtcgccgtgatgccatatgttgtcgaagcgctcgaagtaggagctcttgtattttgagttgccgtcggcgccccagaaggttaggggttggcaggggaatggctttagacagaccactggagtaaattgtaagttgggtttgagttgcaaagagggaagattaaggaactcacgctctccgtcttcacctggtgtgggctccccggtgatggagtccacgactgcgatggccatgcctagaccggcgcattgaatttcgccgacgtagacggggtgtaaagggcatggagcgccgaagagcgagattatgtctgttccgccggttatggaggctaggtttatgtggggtgggaatgctttctaaagcacgcgcaatgttagttgggatcttgtg

SEQ ID NO: 17900 - DNA, 1773 bp, Muscodor strobelii
  misc_feature: SGI cDNA ID NO. 565989
  misc_feature: Elevated expression when VOC is produced
  misc_feature: Encodes the peptide sequence at SEQ ID NO 17901
atggctgggatggacgcatcatcgaaactagaagcgtcggcgccaacagacatttggtcaactccaacacagacttctcggcccaggcctgcaacaattcatgagggcttctcattctgcgcgggagatgagtttggtgcgatgacatcttgggatacatcttctgctttgggcatgaacacaccgagcgacagtttgtcgcgtcccgtatcaatgcatcagaatttctttccgggtttggcaatggataacaatccttggggaacgaagacatgtgacgacaacttagatgtccctcaactcgacagcgatatgatgattggccaagctttcactacggacgaagccattccaatccttgaccttcgatacccgggttcccaagtagagaatgatgccttcaattttgaatctcgccttaaaccccgccgaatgtcaggctcttcattcactatgtcgacgaccggaggtgtctcggacatgccttcctacgaagacttctcgacgacgttatcagaggctccctcgttctcttctgactaccctccaccatctaacaggaactcgcttatgtcctcaacgcagctatctccggttgcctcaccacgaatgacgccgcagagtcgctcagagctcgttcgcgcgcaaagccgtggtcgtggagcgtcgccttcccctcgccctggtttacgctcagcgccgtacaatatggatggaaactcacgcaacaaacgttggtctactggttcttatggtactacgcaaaatcgcagaccgtcaccttttgtctatcaccatacccacgacgcattcggcgctcgtatgccttcacgtcactcatcacccacgatctccaaccctcctttaccgttgaacttcggaaatctgcaggctatgcagaattatccgttccttgtctcgcatcctcccccttttcgaaatagcatgattctacctacacagcttccatctcagttgccgtcgaacggagtgcttggcgatcctcaccatttcgatacgcctgccccgttaatgtctcatggattgttcaggatgctgcaaagtaacgctgacccgcattcgttacatggtcattataccgatctatccgacccaccagatctatatgcgtcactccacgaagagcagataccaccgccaccggaggacatgaacccgtctgaccctgacatggttccgcatgaacaagagctacgatttgagggcgatctatatactccaagatgggtccgggggcacggaaataagcgggaaggatggtgtggaatttgcaaaccagggcgatggctcgtattgaagaattctgccttctggtatgataagagttttacgcacggtatcagtgctgcgacgggcaatcctttccaggaaccacaagaaacgagacgaatggatgggaatcctgatgtctgggagggtctatgtggtagctgcaatgactggattgcattggtcagcagcaagaagaagggtaccacgtggtttcggcatgcttacaagtgccacacacatccaaagatcaaagatgcgccgaagcggcgtagggagagtagccatagccacccgcggactctagctgctccagtgtcgaggcccaagattgaacactcgcgtcctacaacaccgcagcatcagacctctggatccatggctgcaacgccaacgccaaccacggtgcatcaaacacccgtacaaaatgagctcttgttccacaacacgttcccaacaccagatgccaacaacatgatttaa

SEQ ID NO: 17901 - protein, 590 aa, Muscodor strobelii
  misc_feature: SGI Peptide ID NO. 565989
  misc_feature (13)..(567): NCBI GI: 39940030 Blast Desc: MGG_05225 [Magnaporthe grisea 70-15] gi|145010501|gb|EDJ95157.1| MGG_05225 [Magnaporthe grisea 70-15]
  misc_feature (1)..(563): NCBI GI: 171686650 Blast Desc: protein product [Podospora anserina] gi|170943286|emb|CAP68939.1| protein product [Podospora anserina]
  misc_feature (17)..(568): NCBI GI: 256733288 Blast Desc: [Nectria haematococca mpVI 77-13-4]
  misc_feature (17)..(566): NCBI GI: 46124591 Blast Desc: FG06673.1 [Gibberella zeae PH-1]
  misc_feature (18)..(568): NCBI GI: 261360270 Blast Desc: conserved [Verticillium albo-atrum VaMs.102]
  misc_feature (1)..(562): NCBI GI: 85109784 Blast Desc: NCU06235 [Neurospora crassa OR74A] gi|28924737|gb|EAA33850.1| conserved [Neurospora crassa OR74A]
  misc_feature (197)..(563): NCBI GI: 116192253 Blast Desc: CHGG_05844 [Chaetomium globosum CBS 148.51] gi|88181757|gb|EAQ89225.1| CHGG_05844 [Chaetomium globosum CBS 148.51]
  misc_feature (75)..(524): NCBI GI: 169623094 Blast Desc: SNOG_14772 [Phaeosphaeria nodorum SN15] gi|111056844|gb|EAT77964.1| SNOG_14772 [Phaeosphaeria nodorum SN15]
  misc_feature (75)..(563): NCBI GI: 189188342 Blast Desc: conserved [Pyrenophora tritici-repentis Pt-1C-BFP] gi|187972116|gb|EDU39615.1| conserved [Pyrenophora tritici-repentis Pt-1C-BFP]
  misc_feature (117)..(523): NCBI GI: 226288699 Blast Desc: conserved [Paracoccidioides brasiliensis Pb18]
  misc_feature: Useful for introducing or modulating the production of volatile compounds
MAGMDASSKLEASAPTDIWSTPTQTSRPRPATIHEGFSFCAGDEFGAMTSWDTSSALGMNTPSDSLSRPVSMHQNFFPGLAMDNNPWGTKTCDDNLDVPQLDSDMMIGQAFTTDEAIPILDLRYPGSQVENDAFNFESRLKPRRMSGSSFTMSTTGGVSDMPSYEDFSTTLSEAPSFSSDYPPPSNRNSLMSSTQLSPVASPRMTPQSRSELVRAQSRGRGASPSPRPGLRSAPYNMDGNSRNKRWSTGSYGTTQNRRPSPFVYHHTHDAFGARMPSRHSSPTISNPPLPLNFGNLQAMQNYPFLVSHPPPFRNSMILPTQLPSQLPSNGVLGDPHHFDTPAPLMSHGLFRMLQSNADPHSLHGHYTDLSDPPDLYASLHEEQIPPPPEDMNPSDPDMVPHEQELRFEGDLYTPRWVRGHGNKREGWCGICKPGRWLVLKNSAFWYDKSFTHGISAATGNPFQEPQETRRMDGNPDVWEGLCGSCNDWIALVSSKKKGTTWFRHAYKCHTHPKIKDAPKRRRESSHSHPRTLAAPVSRPKIEHSRPTTPQHQTSGSMAATPTPTTVHQTPVQNELLFHNTFPTPDANNMI

SEQ ID NO: 17902 - DNA, 3681 bp, Muscodor strobelii
  misc_feature: SGI EST ID NO. CUFF.42285.0
  misc_feature: Variant of the nucleotide sequence at SEQ ID NO 17900
ccaccgtcgtctcgatctgccccgtctgatccagcggaatacatggttaatgtcaagccaccccctcccaaattcccccagtgttcctggcgaggctcatcgtcctaggtagtgaagtctcaccttactctgtctggacacgtacccattttggatgctccctctatccttagtatgctatatcaaattagggtccgtcctgttatatcccaccccgggctagactatcccaaaagaagtcggctcccgccatgggtcctctaactggggcagtccctggctgctcgccagttttgattacatctcttgcatctcatacagcaaaggcactcgaatgactccccttcctccgtcaatggactcggtgctggtgaaaagctgccactccgaggctcaccatctgccctgatcccctcggaacatatcatcgacagccagatgcaacctgcccaaccctgccagtgaatcccagtaacccgcacgggtccttgtccgctgccctgtcgtgatgtccatctacagcccagccaagctgtgcctcgtacactgatctctctgtcaagtcccaaacgtgcccaggtttgtatcatgagaatccggcttagctccctaccggtgttccgaagctgacccaacttgaccgtgctgaagcgacttacgtgacccgggatgatgcttctttcgccgaatacttcttttatacctctgggggacctatgccgccctccggccacatactctcttttctcttcttcttgccttgccactacccgcttgatatagaccatgagagcatactactgctagtcgttccttattttcttaccatccttaacaaagcctactattgcccctctggtctataataccgggagctggttctcttgtccccaagacacgccagcatacgtgtgctatcccgaaccaactcgaggatcgttgttcttccttcacatatcccacaactcactcgacacgctccttacatacaggcacctacctggcccttcgctctcttctctgctcacgccgtgagcccaacaatcttccaactatattcttgattaaaaaaatttagtcgcattccttgaccaatccacactttccagtcaccgtcggaaattattaattgtttgacaatccatagcacaagatcttattactattattgtggcaccaccccggtaatatacctgagcctactatcttgcttgacatctataagcaatgaacccaaatgagaggcacctgcgacagcagataccaacgcccactttcatatttggtctgggtgagaacataagagacgagcgaacgccgagttcgacacctatggtaaccatggctgggatggacgcatcatcgaaactagaagcgtcggcgccaacagacatttggtcaactccaacacagacttctcggcccaggcctgcaacaattcatgagggcttctcattctgcgcgggagatgagtttggtgcgatgacatcttgggatacatcttctgctttgggcatgaacacaccgagcgacagtttgtcgcgtcccgtatcaatgcatcagaatttctttccgggtttggcaatggataacaatccttggggaacgaagacatgtgacgacaacttagatgtccctcaactcgacagcgatatgatgattggccaagctttcactacggacgaagccattccaatccttgaccttcgatacccgggttcccaagtagagaatgatgccttcaattttgaatctcgccttaaaccccgccgaatgtcaggctcttcattcactatgtcgacgaccggaggtgtctcggacatgccttcctacgaagacttctcgacgacgttatcagaggctccctcgttctcttctgactaccctccaccatctaacaggaactcgcttatgtcctcaacgcagctatctccggttgcctcaccacgaatgacgccgcagagtcgctcagagctcgttcgcgcgcaaagccgtggtcgtggagcgtcgccttcccctcgccctggtttacgctcagcgccgtacaatatggatggaaactcacgcaacaaacgttggtctactggttcttatggtactacgcaaaatcgcagaccgtcaccttttgtctatcaccatacccacgacgcattcggcgctcgtatgccttcacgtcactcatcacccacgatctccaaccctcctttaccgttgaacttcggaaatctgcaggctatgcagaattatccgttccttgtctcgcatcctcccccttttcgaaatagcatgattctacctacacagcttccatctcagttgccgtcgaacggagtgcttggcgatcctcaccatttcgatacgcctgccccgttaatgtctcatggattgttcaggatgctgcaaagtaacgctgacccgcattcgttacatggtcattataccgatctatccgacccaccagatctatatgcgtcactccacgaagagcagataccaccgccaccggaggacatgaacccgtctgaccctgacatggttccgcatgaacaagagctacgatttgagggcgatctatatactccaagatgggtccgggggcacggaaataagcgggaaggatggtgtggaatttgcaaaccagggcgatggctcgtattgaagaattctgccttctggtatgataagagttttacgcacggtatcagtgctgcgacgggcaatcctttccaggaaccacaagaaacgagacgaatggatgggaatcctgatgtctgggagggtctatgtggtagctgcaatgactggattgcattggtcagcagcaagaagaagggtaccacgtggtttcggcatgcttacaagtgccacacacatccaaagatcaaagatgcgccgaagcggcgtagggagagtagccatagccacccgcggactctagctgctccagtgtcgaggcccaagattgaacactcgcgtcctacaacaccgcagcatcagacctctggatccatggctgcaacgccaacgccaaccacggtgcatcaaacacccgtacaaaatgagctcttgttccacaacacgttcccaacaccagatgccaacaacatgatttaaaacaaactcggcgtaaaagcgacttttctcaaatctcgttcttttattctacaagaaacagattgatgcttgtttctgccatcttttcctggttaatggcattgatgaaatgaaacgatatagacaggcacttggcaagtgccggacggcagcgttgggtcactttcgaccctgttattgatccctacgacttttctcactctatataccacactattaactatcgtcgacctctttgttgacgtcatctctcgtttaattgtctatacacagcacataacttggacgacctcgttcctcaaatttcctattttattttttagatggtcaaattgtagatagtcatgttatctgataccctgtggctgtcatcttgggaggcgggaacctggaatcaagacgagggggacatggtcgtgggggctgagacgatgaacatacagaaaatggtttatctggatatgcggaggccgctgttgagcagtggtatttcacgctttcatgtatatggccgaggaaataaggtggaattggtactctatgatattgatactcggtagatccggt

SEQ ID NO: 17903 - DNA, 330 bp, Muscodor strobelii
  misc_feature: SGI cDNA ID NO. 565990
  misc_feature: Encodes the peptide sequence at SEQ ID NO 17904
atgccttaccctcagcagatgtccatgtctcggcccgtggagcctcaaccgtctcagcagcggggcacatctactgcaccactctcatcaggacaaccatacggtgtccagcagccattggctcacccgccaggctaccatcagaacgcaaacgcctcggagctagatcgatatcagagatcagctgctgaacagcgtgcatatgaagagggtcaggataactcagaaggcgggagcgtgtggggggcagctaagaaactggctcagcagactggtgagcggcttgccgctgctgagcacgaagtttggaaaaagctcaacaacgagtaa

SEQ ID NO: 17904 - protein, 109 aa, Muscodor strobelii
  misc_feature: SGI Peptide ID NO. 565990
  misc_feature (40)..(109): NCBI GI: 256733289 Blast Desc: NECHADRAFT_100235 [Nectria haematococca mpVI 77-13-4]
  misc_feature (40)..(107): NCBI GI: 261360268 Blast Desc: conserved [Verticillium albo-atrum VaMs.102]
  misc_feature (40)..(109): NCBI GI: 46124589 Blast Desc: FG06672.1 [Gibberella zeae PH-1]
  misc_feature (40)..(109): NCBI GI: 85109788 Blast Desc: NCU06237 [Neurospora crassa OR74A] gi|28924739|gb|EAA33852.1| [Neurospora crassa OR74A]
  misc_feature (40)..(109): NCBI GI: 156051404 Blast Desc: [Sclerotinia sclerotiorum 1980] gi|154704887|gb|EDO04626.1| [Sclerotinia sclerotiorum 1980]
MPYPQQMSMSRPVEPQPSQQRGTSTAPLSSGQPYGVQQPLAHPPGYHQNANASELDRYQRSAAEQRAYEEGQDNSEGGSVWGAAKKLAQQTGERLAAAEHEVWKKLNNE

SEQ ID NO: 17905 - DNA, 2732 bp, Muscodor strobelii
  misc_feature: SGI EST ID NO. CUFF.42299.0
  misc_feature: Variant of the nucleotide sequence at SEQ ID NO 17903
cactaccaacacaagcatctctatccggatgctcaaataaacattacttatttgaagtaggactcatatttcgatgctgaggattactccaaatcaattcagctgttagttcagattatcgtcagaggatcgttaggtgtgttatttgttatatggacgattgcatagtcagtgctgccatttattttgactcttgcgtgacagtatggtggggggatgtgatctgtcgaattaggtagacatcaacctgtcccagtttgactcatgtatgtttattactcgtcaagccatctgggctacggctctgaggaatctgtgcaggcaagctgaacttgcacttgatagatgtccttaagtaaggttgcatagagtgtctaatcatttgcttcaggtcaagaaagcatcgtcctgtccgacatccgcttgctgttttccactctgaagtcttttcaggctgatcatcctcaagtgcactatgacgtctgtctcgattcctcgcccacgtaacacttcgaactcacgcctgagcaaactttccatccctacttccgtgcacagctgagacgtgatactgtgatctgtcctctcgcctacttccctgaagattatcattgcgtatcatcagcttctagattggcgtatacctgcaagtatactacaccataaaattgcctggctccatttctcacctctacccgcatcgtgacggttctctccttagaacttccgtagcattcaccacgccaagtccacgcttcgtgtagaggcgcaacatcataatcgtcgtcttggctctacttacccagaatgcctcccattcctgtttacagcaatagtccgattgtcgctgccaaaccagatggagtgacccccaagacagccagcccgggcgacatcccaaccaccagatctgctgcggtgccaacgccaactcaggagtctgcttatcccgcggcacaaccgggagctgtaccttcacttccgaagcctacaccaaccatgcaaatgggtaatgctggcccccgccgcctcaaccaggagccgttccttctactatcccgcctccacccaaggctggcgagaagtatcaaccgccaatccagacaccaactgctgcgatgccttaccctcagcagatgtccatgtctcggcccgtggagcctcaaccgtctcagcagcggggcacatctactgcaccactctcatcaggacaaccatacggtgtccagcagccattggctcacccgccaggctaccatcagaacgcaaacgcctcggagctagatcgatatcagagatcagctgctgaacagcgtgcatatgaagagggtcaggataactcagaaggcgggagcgtgtggggggcagctaagaaactggctcagcagactggtgagcggcttgccgctgctgagcacgaagtttggaaaaagctcaacaacgagtaaccaaatgtgatgacaccattgcttttcgtgtgtatttgtcgcgcgaaggattttccagccatgctcgcttcaatctccatctccggcgttggccaatgatagcacaataagctgcgcaaaactcgcctatagtacagtatcacacaagtcagtgtgaagaggctgccgcaacgtttgataagatgcagctagtttctatttacggcgctgatgcaaggtgttttggtaccctagccattctgtacataactaaggtagctcgatgcgaggaagtaccagttggcttacattatgaacttggcaaacatgtaagactacatcacatcacgagccgtgggggccgttgacggaatcgtgacggtattgttcagtaggctagtgataatcaaaaaatcaagcattgcgaccattgatgtctgcttaccacgtgattagcaaaccattccctttatccaaccgatctacaagatttctctgacaaccggatttcagaacggttccgtttgtgtgcaaatggaccgaccgcgccttgcagttttttcagcgtaacatccacttgcgcaatcattatcgccatcgcggcttcgagctccataataagagttcgcatatggctcgacgctcgaagttgagaggatgcgggtaaaggcgaaggcattgaataatttcccgaaacgttgatgtttgtcatgcgagccacggctcaaccccagtagccttgtttgaaggcaactctgggcgtcaagtgacccacagaacaactcatcgaattcgaaaagaagggttatcccttctaccatgtacgcaaactcctcaccaagaaaccgaccgagcgtatggctgtacgcgtaaccttaatggcacccgtttactgtttcgtttctctctagaggcccccgcccttccgaacaactgacagctcggtactagctagtgaatatgggcggagggggtttaacctttgactgcctcggaaacacggtctatgatcatcgaaactgacaggcctttcatctacctaccactttacgcgtgatgtaggtggacggcgcgttagccaaatagggatgatgcggttcacctcccatctacacttccgtacttatactccgacttaatgcgtcggcttatatagtacagttatgagttctctaccgatgcctatgatggtggtcgatatttcttcgggaggccgcccatctcaacatacacatacttggtttatggcaggtgtctctatgtatatgtagcttcgacttacatagaatgtatagcaaattcgcg

SEQ ID NO: 17906 - DNA, 2223 bp, Muscodor strobelii
  misc_feature: SGI cDNA ID NO. 565991
  misc_feature: Encodes the peptide sequence at SEQ ID NO 17907
atggtcggcaaggttagcgagcgcgtccttctgcgcgaaggtctggagcgaaccgacaatggcatgaagcagacaagctggccggatgtcacgcccatcaaccagaagaactactacactgactacatgaaacgcgatgaccaggtgcttgccctccgactgcaggctgaagccgcgcgagaccggctggtgcagtccgccaaggaccgcgaccgcgccctcgcccgcaatggccacgccgaggtgccgctgcccatcagcgacatgcagcccgaagaggcccaggtgcccacgagcgacggcatggacccctccaaggtcatcgtcatccaccccggcagccagaacctgcgcatcggcctggccagcgacgccctgcccaagaccatccccatgaccctcgccaccaagttcccccagaccgagtccgagatgtacgaggccctgccgcgccgccagttcgaggccaagaccaccgaccagcagtacggcgaggactggtccaagaagtacgtcaagatgtgcaacgacctgaagatcgacatgcgcgccaacaagcgcaaggtgctgccgaattccaaggagctggtcgtcaactacaacagaagaacggaacccgagaagatacccaagcacaacgatccccaggagatagagtggaccgacgtcaacgccctcgaagacccgaaatcatcagcctcgtgcttcatcggcaatgcggcccagcgcgtccccgacgactcggaccccaaattcaaactctggtggccgctgcagtacggcgtcttgaacgaagacgactacaccaccgccgagcatctcttcgacgacttcgagacccttctggacaaagccatcaggcatgagctgggcttgaagagcacaagcacctggaagaactacagttgtgtcttcgtcatacccgacatatatgacaagaaatacgtcgagcaggtgttgcgatcgtgcatgacctggttcgagttcagcaggatatgcttcatgcaggagagtatggcggccgcgtttggtgccggctacacccaggcttgcgtcgtcgacgtgggtgcccaaaagacatcgattgcctgcgtggaagatggactctgcatcgaggactcgcgcataaatctcaagtatggcggatacgatgtgaccgacactttcatcaagatgatgctatacgacaacttcccttaccaggagataaacttgaggcggcggtacgatttcctactcgccgaagagctcaagatcaaacactgcaccatgtcgcaagcagaaatatctgtgcagcaatacaactttcacctccgtgctccgaatcaacctacttacaaataccaattcaagacctacgacgaggttatcctcgcccctatgggattctacgacccttccatcttcgacaactctacaaagttacgtggccgtcggaagttgatcgatcgctcatataatgcatacgatgccgatgtccccgacgacccagcgtctgcagcccagctcgcgatcctggctctcatcaagccgtccatcatgtccaatgccactggctttcaacctaacccctcagacccaaaccttgcaacgccgagcaaagaaaaatcgcaaccattcaacttcttatcacggagcggtgatttcaccggcacaccaggaggatccaatgtaggctcacctgctccagaaggcgccaatactccaatccctcccccgttccatttcggggcgaacagagccagcgggagtcccgcaccgaacggtgcaaacggtacgcgcacgggcacatccccagcgcctcccccaggcatgttcgtagattcacaggcacgcagcgcccgcgccatggccgcagagcgggattccatcctgcccgtagcgccactcgacatagcgattcttacaagcatccaaaacgccgctagaggcgatgacaagaggcttcgtgactttctgggcagcgttatggtcatcggcggtggatcaaagacgccccttttcacacagaccctcgaggagaaactccgcgctcgccgaccagacctcttcgatcgtatcctggtctcccgcagtgccagggatatggacgaacaggttgtggcgtggaagggcgcgtctgtgtttgcgaagctaccggctaacgatagctggattacccccttcgagttcgagcgtcttggtgcgcgcgtcttacatcataaggtgctctgggcttggtag

SEQ ID NO: 17907 - protein, 740 aa, Muscodor strobelii
  misc_feature: SGI Peptide ID NO. 565991
  misc_feature (102)..(737): Pfam Id: PF00022 Pfam Desc: Actin
  misc_feature (1)..(740): NCBI GI: 256732831 Blast Desc: Actin-related protein, ARP8 class [Nectria haematococca mpVI 77-13-4]
  misc_feature (1)..(740): NCBI GI: 46124585 Blast Desc: FG06670.1 [Gibberella zeae PH-1]
  misc_feature (1)..(740): NCBI GI: 85109790 Blast Desc: NCU06238 [Neurospora crassa OR74A] gi|28924740|gb|EAA33853.1| NCU06238 [Neurospora crassa OR74A]
  misc_feature (22)..(740): NCBI GI: 171686646 Blast Desc: protein product [Podospora anserina] gi|170943284|emb|CAP68937.1| protein product [Podospora anserina]
  misc_feature (1)..(740): NCBI GI: 145602045 Blast Desc: MGG_05229 [Magnaporthe grisea 70-15] gi|145010497|gb|EDJ95153.1| MGG_05229 [Magnaporthe grisea 70-15]
  misc_feature (3)..(740): NCBI GI: 156051762 Blast Desc: SS1G_07288 [Sclerotinia sclerotiorum 1980] gi|154705066|gb|EDO04805.1| SS1G_07288 [Sclerotinia sclerotiorum 1980]
  misc_feature (1)..(740): NCBI GI: 261360267 Blast Desc: conserved [Verticillium albo-atrum VaMs.102]
  misc_feature (13)..(737): NCBI GI: 116192249 Blast Desc: CHGG_05842 [Chaetomium globosum CBS 148.51] gi|88181755|gb|EAQ89223.1| CHGG_05842 [Chaetomium globosum CBS 148.51]
  misc_feature (1)..(740): NCBI GI: 121715564 Blast Desc: chromatin remodeling complex subunit (Arp8), [Aspergillus clavatus NRRL 1] gi|119403548|gb|EAW13965.1| chromatin remodeling complex subunit (Arp8), [Aspergillus NRRL 1]
  misc_feature (1)..(740): NCBI GI: 115384594 Blast Desc: conserved [Aspergillus terreus NIH2624] gi|114196536|gb|EAU38236.1| conserved [Aspergillus terreus NIH2624]
MVGKVSERVLLREGLERTDNGMKQTSWPDVTPINQKNYYTDYMKRDDQVLALRLQAEAARDRLVQSAKDRDRALARNGHAEVPLPISDMQPEEAQVPTSDGMDPSKVIVIHPGSQNLRIGLASDALPKTIPMTLATKFPQTESEMYEALPRRQFEAKTTDQQYGEDWSKKYVKMCNDLKIDMRANKRKVLPNSKELVVNYNRRTEPEKIPKHNDPQEIEWTDVNALEDPKSSASCFIGNAAQRVPDDSDPKFKLWWPLQYGVLNEDDYTTAEHLFDDFETLLDKAIRHELGLKSTSTWKNYSCVFVIPDIYDKKYVEQVLRSCMTWFEFSRICFMQESMAAAFGAGYTQACVVDVGAQKTSIACVEDGLCIEDSRINLKYGGYDVTDTFIKMMLYDNFPYQEINLRRRYDFLLAEELKIKHCTMSQAEISVQQYNFHLRAPNQPTYKYQFKTYDEVILAPMGFYDPSIFDNSTKLRGRRKLIDRSYNAYDADVPDDPASAAQLAILALIKPSIMSNATGFQPNPSDPNLATPSKEKSQPFNFLSRSGDFTGTPGGSNVGSPAPEGANTPIPPPFHFGANRASGSPAPNGANGTRTGTSPAPPPGMFVDSQARSARAMAAERDSILPVAPLDIAILTSIQNAARGDDKRLRDFLGSVMVIGGGSKTPLFTQTLEEKLRARRPDLFDRILVSRSARDMDEQVVAWKGASVFAKLPANDSWITPFEFERLGARVLHHKVLWAW

SEQ ID NO: 17908 - DNA, 3373 bp, Muscodor strobelii
  misc_feature: SGI EST ID NO. CUFF.42317.0
  misc_feature: Variant of the nucleotide sequence at SEQ ID NO 17906
ggatcaagtgttttcacatgcgctaccctgaagctgtttgcgatatgctaacaccttaacgcgatgtgcggcgatgtgacgaactatggcaattgaactagtgtaaacaggttgattcggattggctgtgatagatcgattggcctgaagtagcggccggatagggaacggcgaagtcggcggcgagaactagatgatggaagggaaaaaaagaaacgtacagtgaagaggatgcgagggctttgaagtggaagcgaaactgaaaagcgcagactacatagatgtaccttaaaaactacgaagtttagaggtcagggcaagggccaacgccagcctcaacaccaacgacggacacgagggacagcgatagccccaacgcgataggcgacaggcgacaggcggattcgacgccccgtccccaaaagtgataaacgacattcaacccgccacaatacgacaacatcccaccgatgcgatgccgtcgccagtgctcccttgaacaccactttcgaccaccgatcgccaacggcaccgctggagctcgatccatcagccgcggcagacgaacgacgcgaaactacaagtccatctctctatttagacaggccccatcgtctgcatctctcacatcctttctgaacctctaccaccgccgtcatggtcggcaaggttagcgagcgcgtccttctgcgcgaaggtctggagcgaaccgacaatggcatgaagcagacaagctggccggatgtcacgcccatcaaccagaagaactactacactgactacatgaaacgcgatgaccaggtgcttgccctccgactgcaggctgaagccgcgcgagaccggctggtgcagtccgccaaggaccgcgaccgcgccctcgcccgcaatggccacgccgaggtgccgctgcccatcagcgacatgcagcccgaagaggcccaggtgcccacgagcgacggcatggacccctccaaggtcatcgtcatccaccccggcagccagaacctgcgcatcggcctggccagcgacgccctgcccaagaccatccccatgaccctcgccaccaagttcccccagaccgagtccgagatgtacgaggccctgccgcgccgccagttcgaggccaagaccaccgaccagcagtacggcgaggactggtccaagaagtacgtcaagatgtgcaacgacctgaagatcgacatgcgcgccaacaagcgcaaggtgctgccgaattccaaggagctggtcgtcaactacaacagaagaacggaacccgagaagatacccaagcacaacgatccccaggagatagagtggaccgacgtcaacgccctcgaagacccgaaatcatcagcctcgtgcttcatcggcaatgcggcccagcgcgtccccgacgactcggaccccaaattcaaactctggtggccgctgcagtacggcgtcttgaacgaagacgactacaccaccgccgagcatctcttcgacgacttcgagacccttctggacaaagccatcaggcatgagctgggcttgaagagcacaagcacctggaagaactacagttgtgtcttcgtcatacccgacatatatgacaagaaatacgtcgagcaggtgttgcgatcgtgcatgacctggttcgagttcagcaggatatgcttcatgcaggagagtatggcggccgcgtttggtgccggctacacccaggcttgcgtcgtcgacgtgggtgcccaaaagacatcgattgcctgcgtggaagatggactctgcatcgaggactcgcgcataaatctcaagtatggcggatacgatgtgaccgacactttcatcaagatgatgctatacgacaacttcccttaccaggagataaacttgaggcggcggtacgatttcctactcgccgaagagctcaagatcaaacactgcaccatgtcgcaagcagaaatatctgtgcagcaatacaactttcacctccgtgctccgaatcaacctacttacaaataccaattcaagacctacgacgaggttatcctcgcccctatgggattctacgacccttccatcttcgacaactctacaaagttacgtggccgtcggaagttgatcgatcgctcatataatgcatacgatgccgatgtccccgacgacccagcgtctgcagcccagctcgcgatcctggctctcatcaagccgtccatcatgtccaatgccactggctttcaacctaacccctcagacccaaaccttgcaacgccgagcaaagaaaaatcgcaaccattcaacttcttatcacggagcggtgatttcaccggcacaccaggaggatccaatgtaggctcacctgctccagaaggcgccaatactccaatccctcccccgttccatttcggggcgaacagagccagcgggagtcccgcaccgaacggtgcaaacggtacgcgcacgggcacatccccagcgcctcccccaggcatgttcgtagattcacaggcacgcagcgcccgcgccatggccgcagagcgggattccatcctgcccgtagcgccactcgacatagcgattcttacaagcatccaaaacgccgctagaggcgatgacaagaggcttcgtgactttctgggcagcgttatggtcatcggcggtggatcaaagacgccccttttcacacagaccctcgaggagaaactccgcgctcgccgaccagacctcttcgatcgtatcctggtctcccgcagtgccagggatatggacgaacaggttgtggcgtggaagggcgcgtctgtgtttgcgaagctaccggctaacgatagctggattacccccttcgagttcgagcgtcttggtgcgcgcgtcttacatcataaggtgctctgggcttggtagtgacagtgccccgcgtatgggtgagacggaagtacaagtccacgaggattttatttgcctatctgtggttctattctatctttagtctcgcctgattgggtgaagaaacagaagacaaaacgatagaggtgaaggcaaatggtagtagtgtaaagatacagacacagtcctaatcaaggtctgttttgtaacgtgacctggcgttgaaggcgactatggaatgatttgtaggagactggtccaacaatgagggtagactatcatgcatgtagtctggtccaacgagcttctaatttctctccattattttgcagctcgctagagacagacaggctttgtcagtcgagtttttaaactctgctgtgaaaataaatcgcatcgacacttgctgacacacttgtacacttaatcgcatcagcaataaatgtcatcaaatgtgcgctgtcaacttgagattaaatcagacagatggacaatagcaataatgtgagag

SEQ ID NO: 17909 - DNA, 1584 bp, Muscodor strobelii
  misc_feature: SGI cDNA ID NO. 565992
  misc_feature: Elevated expression when VOC is produced
  misc_feature: Encodes the peptide sequence at SEQ ID NO 17910
atgcaccagattggagcccaagccgacgtcaactggttcaccttggccatttctcctctcgagggcgccgatccggatatggttgacaggggccaagtgcttgactgcgaagatgatgagatggccgcgctgtactacctcttccagcgtgagtggttcgatcggctctgggtccggcaggaaatcactttggcggcacaggagtctgcggttgtgctgtgcggttcggcatcggtaccatggaaagatttccgggtggcttggctgttgattagagacaagcccttttttcattttgatgaggcgcctctctttcgcgcacgaattgacaagcttgacgggtttctattcctcctaccttcggcctacttgactgggttgcgagcgcaatttggcagcatgatctgcagcgttccgcacgactacctgtacgccgttcgagcccttctgaatccgaaagtccaacggatgatcgaggtcgactatacgcttccgaaagaagaggcgtttcgcaatgctgtggttgcctacttggacacaattggtgatctagacatactcacgcagtgtcagttttcgtcgacatggaacggtccgagctgggttcccgactggtcttccaaggaatcaatacccgatttcaatattacgttgatggtgcgtcaaccagtgtcaggcatgataaatgcacctttcgagcaagatgggagcaatctgagagtcatgggagtgtttctctctgagattgtcgaggtaacgccactatatccattcgcgcaggccgatgaacggcgggatctgggtattgaagtcatgctccataaaatacgcaatatcatgctcaataagagcacaggttctcttgaagatgagtatccagctggtgacggcacatatctggatgcgttcgcgcggactctgtgcacgaactgcttcaaagataactatcgcttaccggactcggacatgaaaccgagtttcgctgaagtaagggacttcctgtccagacacgtgggcaaggctctccgttcagaataccttagcgatgaagacctgggagcgtatgattatattgggcgtaattgtaggggcaaagtctttatgcgcaccactgacgggctcattggcctggccacccaagtcgcgaagccaggcgaccagatttggaccatctttggatgcttgcaacatctcatgctccggccaacgagtagggaggaaggatgtaattatcgacttgtcggtgagtgttttgtgagtggttactctgatggacaagctgttctggggccactgccgcccgagatctcgctagtatttacgacggtgggccggagaccagcatggatatttgaggatactacaaccggtactacccattttgttgacccgcggttgaagacgctaggagcggataccgtagagtacgaggaaatgttaacgcagaatcggttgaaagagactattcctggccagacgttgtgggaagaggactgcgatacgtacatcacaatccagcaggaagagttagatcgtttgatgagagcgaggggagttcatgtgcagcaagtgactctagtctaa

SEQ ID NO: 17910 - protein, 527 aa, Muscodor strobelii
  misc_feature: SGI Peptide ID NO. 565992
  misc_feature (24)..(486): NCBI GI: 261353850 Blast Desc: conserved [Verticillium albo-atrum VaMs.102]
  misc_feature (41)..(433): NCBI GI: 256730222 Blast Desc: NECHADRAFT_82497 [Nectria haematococca mpVI 77-13-4]
  misc_feature (43)..(527): NCBI GI: 256719970 Blast Desc: NECHADRAFT_98482 [Nectria haematococca mpVI 77-13-4]
  misc_feature (43)..(437): NCBI GI: 46139411 Blast Desc: FG11220.1 [Gibberella zeae PH-1]
  misc_feature (38)..(527): NCBI GI: 145609067 Blast Desc: MGG_09107 [Magnaporthe grisea 70-15] gi|145016510|gb|EDK00940.1| MGG_09107 [Magnaporthe grisea 70-15]
  misc_feature (42)..(469): NCBI GI: 154311024 Blast Desc: BC1G_06630 [Botryotinia fuckeliana B05.10] gi|150851034|gb|EDN26227.1| BC1G_06630 [Botryotinia fuckeliana B05.10]
  misc_feature (37)..(469): NCBI GI: 256727220 Blast Desc: NECHADRAFT_32743 [Nectria haematococca mpVI 77-13-4]
  misc_feature (11)..(527): NCBI GI: 115492481 Blast Desc: [Aspergillus terreus NIH2624] gi|114197728|gb|EAU39428.1| [Aspergillus terreus NIH2624]
  misc_feature (18)..(469): NCBI GI: 39974569 Blast Desc: MGG_00569 [Magnaporthe grisea 70-15] gi|145018530|gb|EDK02809.1| MGG_00569 [Magnaporthe grisea 70-15]
  misc_feature (1)..(470): NCBI GI: 171678935 Blast Desc: protein product [Podospora anserina] gi|170937538|emb|CAP62196.1| protein product [Podospora anserina]
  misc_feature: Useful for introducing or modulating the production of volatile compounds
MHQIGAQADVNWFTLAISPLEGADPDMVDRGQVLDCEDDEMAALYYLFQREWFDRLWVRQEITLAAQESAVVLCGSASVPWKDFRVAWLLIRDKPFFHFDEAPLFRARIDKLDGFLFLLPSAYLTGLRAQFGSMICSVPHDYLYAVRALLNPKVQRMIEVDYTLPKEEAFRNAVVAYLDTIGDLDILTQCQFSSTWNGPSWVPDWSSKESIPDFNITLMVRQPVSGMINAPFEQDGSNLRVMGVFLSEIVEVTPLYPFAQADERRDLGIEVMLHKIRNIMLNKSTGSLEDEYPAGDGTYLDAFARTLCTNCFKDNYRLPDSDMKPSFAEVRDFLSRHVGKALRSEYLSDEDLGAYDYIGRNCRGKVFMRTTDGLIGLATQVAKPGDQIWTIFGCLQHLMLRPTSREEGCNYRLVGECFVSGYSDGQAVLGPLPPEISLVFTTVGRRPAWIFEDTTTGTTHFVDPRLKTLGADTVEYEEMLTQNRLKETIPGQTLWEEDCDTYITIQQEELDRLMRARGVHVQQVTLV

SEQ ID NO: 17911 - DNA, 2453 bp, Muscodor strobelii
  misc_feature: SGI EST ID NO. CUFF.42306.0
  misc_feature: Variant of the nucleotide sequence at SEQ ID NO 17909
ctgataggcatggataccaatccatggcttgcctcccttcctgaatctgggctagaaagcttggatcaaagtattgcgacgtgcgccgtatgaaatctggcgatgatgtcgtggtgtagaggcactcactaatagtaaattatccgaatttaactctggcaatagattctcgagtgtgaaatcgtcaatccctccaaggccaccatactcgacttgcggctcgattgagccaaatacgagctgcctctcatgggtcgacggcccgctcgacaggagagcaaatcgatctcttcaaaaacaggggagaagtacacttacgaatcgttcccggacaatgcagctgggaaacacatccgtatcgcgacagtgcaaccagggagctccaatgagcatatccaaataatactccgatgcgagaaattcgacgccgaccacattcctaaatatgaggctctatcgtacacatggggcccagccgtctcgaaagaagaacaatgcccgccacaggtcgatgtatatcatgcacaacatcgccacatacttagaccgcacttctctccttcaagtgcgaagcctctcacagtaacgcacaacctccttctcgctcttcgtcagctgcgctctgagacgtcacctcgagacctatggatcgacgctatatgcatagatcaggagaacatgggtgagaaggggccacaagtagccatgatgggtgacatctacactcacgctgcccgggttcttggtctggctaggcactgaaagcgacgatagcgatcgtgcaatgaacatcatgcaccagattggagcccaagccgacgtcaactggttcaccttggccatttctcctctcgagggcgccgatccggatatggttgacaggggccaagtgcttgactgcgaagatgatgagatggccgcgctgtactacctcttccagcgtgagtggttcgatcggctctgggtccggcaggaaatcactttggcggcacaggagtctgcggttgtgctgtgcggttcggcatcggtaccatggaaagatttccgggtggcttggctgttgattagagacaagcccttttttcattttgatgaggcgcctctctttcgcgcacgaattgacaagcttgacgggtttctattcctcctaccttcggcctacttgactgggttgcgagcgcaatttggcagcatgatctgcagcgttccgcacgactacctgtacgccgttcgagcccttctgaatccgaaagtccaacggatgatcgaggtcgactatacgcttccgaaagaagaggcgtttcgcaatgctgtggttgcctacttggacacaattggtgatctagacatactcacgcagtgtcagttttcgtcgacatggaacggtccgagctgggttcccgactggtcttccaaggaatcaatacccgatttcaatattacgttgatggtgcgtcaaccagtgtcaggcatgataaatgcacctttcgagcaagatgggagcaatctgagagtcatgggagtgtttctctctgagattgtcgaggtaacgccactatatccattcgcgcaggccgatgaacggcgggatctgggtattgaagtcatgctccataaaatacgcaatatcatgctcaataagagcacaggttctcttgaagatgagtatccagctggtgacggcacatatctggatgcgttcgcgcggactctgtgcacgaactgcttcaaagataactatcgcttaccggactcggacatgaaaccgagtttcgctgaagtaagggacttcctgtccagacacgtgggcaaggctctccgttcagaataccttagcgatgaagacctgggagcgtatgattatattgggcgtaattgtaggggcaaagtctttatgcgcaccactgacgggctcattggcctggccacccaagtcgcgaagccaggcgaccagatttggaccatctttggatgcttgcaacatctcatgctccggccaacgagtagggaggaaggatgtaattatcgacttgtcggtgagtgttttgtgagtggttactctgatggacaagctgttctggggccactgccgcccgagatctcgctagtatttacgacggtgggccggagaccagcatggatatttgaggatactacaaccggtactacccattttgttgacccgcggttgaagacgctaggagcggataccgtagagtacgaggaaatgttaacgcagaatcggttgaaagagactattcctggccagacgttgtgggaagaggactgcgatacgtacatcacaatccagcaggaagagttagatcgtttgatgagagcgaggggagttcatgtgcagcaagtgactctagtctaagatgatcgttacagacctatttgatcatatcgcgagaagaacgggcctggaagacaataacaattcactacctgca

SEQ ID NO: 17912 - DNA, 528 bp, Muscodor strobelii
  misc_feature: SGI cDNA ID NO. 565993
  misc_feature: Elevated expression when VOC is produced
  misc_feature: Encodes the peptide sequence at SEQ ID NO 17913
atgggtcgacggcccgctcgacaggagagcaaatcgatctcttcaaaaacaggggagaagtacacttacgaatcgttcccggacaatgcagctgggaaacacatccgtatcgcgacagtgcaaccagggagctccaatgagcatatccaaataatactccgatgcgagaaattcgacgccgaccacattcctaaatatgaggctctatcgtacacatggggcccagccgtctcgaaagaagaacaatgcccgccacaggtcgatgtatatcatgcacaacatcgccacatacttagaccgcacttctctccttcaagtgcgaagcctctcacagtaacgcacaacctccttctcgctcttcgtcagctgcgctctgagacgtcacctcgagacctatggatcgacgctatatgcatagatcaggagaacatgggtgagaaggggccacaagtagccatgatgggtgacatctacactcacgctgcccgggttcttgtaagtgctatgcctgctgagaatctagaatga

SEQ ID NO: 17913 - protein, 175 aa, Muscodor strobelii
  misc_feature: SGI Peptide ID NO. 565993
  misc_feature (66)..(166): Pfam Id: PF06985 Pfam Desc: Heterokaryon incompatibility protein (HET)
  misc_feature (13)..(166): NCBI GI: 169612545 Blast Desc: SNOG_09395 [Phaeosphaeria nodorum SN15] gi|160702530|gb|EAT83587.2| SNOG_09395 [Phaeosphaeria nodorum SN15]
  misc_feature (21)..(166): NCBI GI: 169616049 Blast Desc: SNOG_11196 [Phaeosphaeria nodorum SN15] gi|111060575|gb|EAT81695.1| SNOG_11196 [Phaeosphaeria nodorum SN15]
  misc_feature (17)..(173): NCBI GI: 256730775 Blast Desc: NECHADRAFT_30134 [Nectria haematococca mpVI 77-13-4]
  misc_feature (14)..(166): NCBI GI: 171678763 Blast Desc: protein product [Podospora anserina] gi|170937451|emb|CAP62109.1| protein product [Podospora anserina]
  misc_feature (18)..(171): NCBI GI: 39942670 Blast Desc: MGG_03415 [Magnaporthe grisea 70-15] gi|145010046|gb|EDJ94702.1| MGG_03415 [Magnaporthe grisea 70-15]
  misc_feature (33)..(174): NCBI GI: 115389026 Blast Desc: [Aspergillus terreus NIH2624] gi|114194414|gb|EAU36114.1| [Aspergillus terreus NIH2624]
  misc_feature (35)..(173): NCBI GI: 256730222 Blast Desc: NECHADRAFT_82497 [Nectria haematococca mpVI 77-13-4]
  misc_feature (33)..(166): NCBI GI: 256721216 Blast Desc: NECHADRAFT_101059 [Nectria haematococca mpVI 77-13-4]
  misc_feature (32)..(170): NCBI GI: 171678935 Blast Desc: protein product [Podospora anserina] gi|170937538|emb|CAP62196.1| protein product [Podospora anserina]
  misc_feature (19)..(166): NCBI GI: 46109348 Blast Desc: FG01556.1 [Gibberella zeae PH-1]
  misc_feature: Useful for introducing or modulating the production of volatile compounds
MGRRPARQESKSISSKTGEKYTYESFPDNAAGKHIRIATVQPGSSNEHIQIILRCEKFDADHIPKYEALSYTWGPAVSKEEQCPPQVDVYHAQHRHILRPHFSPSSAKPLTVTHNLLLALRQLRSETSPRDLWIDAICIDQENMGEKGPQVAMMGDIYTHAARVLVSAMPAENLE

SEQ ID NO: 17914 - DNA, 2453 bp, Muscodor strobelii; identical to SEQ ID NO: 17911
  misc_feature: SGI EST ID NO. CUFF.42306.0
  misc_feature: Variant of the nucleotide sequence at SEQ ID NO 17912

SEQ ID NO: 17915 - DNA, 486 bp, Muscodor strobelii
  misc_feature: SGI cDNA ID NO. 565994
  misc_feature: Encodes the peptide sequence at SEQ ID NO 17916
atggcgcccatagcgcccatagaccacaatgccatcgagcagcaactcaaagacacaatccaatccctgcacaacataatggtccaagtaacatcctacgacgcctcaggccaacccccatccacaccgtcacacccctcgcgcgcatcgcgcgatgtcctagtcgccgagctaggcgccctctcgcgctccctccaagccgtacaccacacatccacaacccggaccctaccccaggtcccccccgaactcgtccagtacgtcgataacggccggaaccccgacatttacacgcgagagtttgttgagttggtcagacgaggaaatcagctcatgagagggaagcagagcgcgttcgcgagcttcaaggatgtgcttgctacgcagatacagaacgctatgcctgagttgaaggatgatactgtgcgggtgcttgaggcgacgggcggcggttcgacggcgactggaacgggcggtacgacgtag

SEQ ID NO: 17916 - protein, 161 aa, Muscodor strobelii
  misc_feature: SGI Peptide ID NO. 565994
  misc_feature (1)..(150): NCBI GI: 46124599 Blast Desc: FG06677.1 [Gibberella zeae PH-1]
  misc_feature (1)..(150): NCBI GI: 256733284 Blast Desc: [Nectria haematococca mpVI 77-13-4]
  misc_feature (12)..(161): NCBI GI: 39939852 Blast Desc: MGG_05314 [Magnaporthe grisea 70-15] gi|145010401|gb|EDJ95057.1| MGG_05314 [Magnaporthe grisea 70-15]
  misc_feature (1)..(148): NCBI GI: 156051420 Blast Desc: SS1G_07117 [Sclerotinia sclerotiorum 1980] gi|154704895|gb|EDO04634.1| SS1G_07117 [Sclerotinia sclerotiorum 1980]
  misc_feature (1)..(150): NCBI GI: 116208182 Blast Desc: CHGG_03384 [Chaetomium globosum CBS 148.51] gi|121787722|sp|Q2H8S0.1|MED10_CHAGB RecName: Full=Mediator of RNA polymerase II transcription subunit 10; AltName: complex 10
  misc_feature (1)..(148): NCBI GI: 154301898 Blast Desc: BC1G_10186 [Botryotinia fuckeliana B05.10] gi|150855578|gb|EDN30770.1| BC1G_10186 [Botryotinia fuckeliana B05.10]
  misc_feature (16)..(148): NCBI GI: 261360261 Blast Desc: mediator of RNA polymerase II transcription subunit 10 [Verticillium albo-atrum VaMs.102]
  misc_feature (1)..(157): NCBI GI: 85080777 Blast Desc: NCU00220 [Neurospora crassa OR74A] gi|74613862|sp|Q7RXK7.1|MED10_NEUCR RecName: Full=Mediator of RNA polymerase II transcription subunit 10; AltName: Full=Mediator 10
  misc_feature (4)..(158): NCBI GI: 240108134 Blast Desc: mediator of RNA polymerase II transcription subunit, [Coccidioides posadasii C735 delta SOWgp]
  misc_feature (4)..(157): NCBI GI: 119187617 Blast Desc: CIMG_03856 [Coccidioides immitis RS]
MAPIAPIDHNAIEQQLKDTIQSLHNIMVQVTSYDASGQPPSTPSHPSRASRDVLVAELGALSRSLQAVHHTSTTRTLPQVPPELVQYVDNGRNPDIYTREFVELVRRGNQLMRGKQSAFASFKDVLATQIQNAMPELKDDTVRVLEATGGGSTATGTGGTT

SEQ ID NO: 17917 - DNA, 1172 bp, Muscodor strobelii
  misc_feature: SGI EST ID NO. CUFF.42387.0
  misc_feature: Variant of the nucleotide sequence at SEQ ID NO 17915
cctaccttcacttgtcattgccagctttcgactccctcagtcccgtcctccctcaacgactaacctttccgccctttccaccaggaaacagcctcagcgatttctgcaatcatggcgcccatagcgcccatagaccacaatgccatcgagcagcaactcaaagacacaatccaatccctgcacaacataatggtccaagtaacatcctacgacgcctcaggccaacccccatccacaccgtcacacccctcgcgcgcatcgcgcgatgtcctagtcgccgagctaggcgccctctcgcgctccctccaagccgtacaccacacatccacaacccggaccctaccccaggtcccccccgaactcgtccagtacgtcgataacggccggaaccccgacatttacacgcgagagtttgttgagttggtcagacgaggaaatcagctcatgagagggaagcagagcgcgttcgcgagcttcaaggatgtgcttgctacgcagatacagaacgctatgcctgagttgaaggatgatactgtgcgggtgcttgaggcgacgggcggcggttcgacggcgactggaacgggcggtacgacgtagtgggtaatggtaagaggtatgatcagaaggctggcacctatagtacgaggtatttgcatcgacctagccttcgacgagatcctgcgaggcaagactacatttaatggcgtttagacgaacgggttcacaacggtatggcatatagcaaggcgttacttttacatctcaattttggaggaacggcaacaaaacatcgcaattgattatcacccaaggtctaaaaccacgcatgcaaagcgatatcattctttccatttaagaggcaaaaatattctgcgcaaacgccattttccgtgatatgcaacaaacgtttcccacgttgaacctttagatcgcacactatgcttttaataacttgacgagctcggcagcaatcaagtcaccgacttccttagttcccgtctgaccaccaaggtcctttgtccggaccccgctatccagaacatttcttacggcctgctcgatggcatcggcctctttgggtaataagagagagtacctgcacatcatggccactgatagaatcgtgccgatggggttaacaatacccttgcctgagatatctggagccgaac

SEQ ID NO: 17918 - DNA, 1098 bp, Muscodor strobelii
  misc_feature: SGI cDNA ID NO. 565995
  misc_feature: Reduced expression when VOC is produced
  misc_feature: Encodes the peptide sequence at SEQ ID NO 17919
atggcggcgcataacatcgttgtgttcggaggagatcactgtggccccgaggttgttgctgagggtctgaaggttctcaaagctatcgaggaaaacagttcagttaaattcaacgtccaaaaccatcttcttggtggttgctctattaacgctcacggcacccctttgacggacgaagcccttagtgccgccaagtcagcagacgccgtgcttctcggcgccatcggaggacccgaatggggcaccggtgccgtccgcccggaacaaggtatcctgagactacgcaaggagatggagacatacggcaatctgcggccctgcttcttcccctcggagtccctggtcgagtactcgccgctcaagtcggaggtctgcaaaggcaccgatttcaccgtcatccgggaattgacgggtggtatttactttggcgaccgcaaggaagacgatggcagtggatttgccctggacaccgaaccttactcccgccacgaaattgagcgtattactcgccttgcagcaaatctggcgcttactcgcaaccctccggccccggtctggagtttagataaggccaatgtgctggctactagtcgtctatggcgcaaggtcgttactgaggttatggagaaggagttccctcagcttgaactgcaccatcagctcattgatagcgcggctatgattatggtcaagaacccgcgcggtttgaatggtgttgtcgttacgagtaacttgttcggtgacattatcagtgatgaagccagtgttatccctggcagcattggcttgagccccagtgccagtctgagcggcattccagacggaaagaacagatgcaacggtatctacgaaccgattcacggttcggctccagatatctcaggcaagggtattgttaaccccatcggcacgattctatcagtggccatgatgtgcaggtactctctcttattacccaaagaggccgatgccatcgagcaggccgtaagaaatgttctggatagcggggtccggacaaaggaccttggtggtcagacgggaactaaggaagtcggtgacttgattgctgccgagctcgtcaagttattaaaagcatag

SEQ ID NO: 17919 - protein, 365 aa, Muscodor strobelii
  misc_feature: SGI Peptide ID NO. 565995
  misc_feature (5)..(355): Pfam Id: PF00180 Pfam Desc: Isocitrate/isopropylmalate dehydrogenase
  misc_feature (1)..(364): NCBI GI: 238484081 Blast Desc: 3-isopropylmalate dehydrogenase Leu2A [Aspergillus flavus NRRL3357] gi|27901558|dbj|BAC55906.1| [Aspergillus oryzae] gi|220701329|gb|EED57667.1| 3-isopropylmalate dehydrogenase Leu2A
  misc_feature (1)..(364): NCBI GI: 169767244 Blast Desc: [Aspergillus oryzae RIB40] gi|83765948|dbj|BAE56091.1| protein product [Aspergillus oryzae]
  misc_feature (1)..(364): NCBI GI: 115397605 Blast Desc: 3-isopropylmalate dehydrogenase [Aspergillus terreus NIH2624] gi|114192585|gb|EAU34285.1| 3-isopropylmalate dehydrogenase [Aspergillus terreus NIH2624]
  misc_feature (1)..(364): NCBI GI: 121700831 Blast Desc: 3-isopropylmalate dehydrogenase Leu2A [Aspergillus clavatus NRRL 1] gi|119396823|gb|EAW07254.1| 3-isopropylmalate dehydrogenase Leu2A [Aspergillus clavatus NRRL 1]
  misc_feature (1)..(364): NCBI GI: 156051390 Blast Desc: SS1G_07102 [Sclerotinia sclerotiorum 1980] gi|154704880|gb|EDO04619.1| SS1G_07102 [Sclerotinia sclerotiorum 1980]
  misc_feature (1)..(364): NCBI GI: 154292482 Blast Desc: BC1G_14880 [Botryotinia fuckeliana B05.10] gi|150846077|gb|EDN21270.1| BC1G_14880 [Botryotinia fuckeliana B05.10]
  misc_feature (1)..(364): NCBI GI: 70996378 Blast Desc: 3-isopropylmalate dehydrogenase Leu2A [Aspergillus fumigatus Af293] gi|66850579|gb|EAL90906.1| 3-isopropylmalate dehydrogenase Leu2A [Aspergillus fumigatus Af293] dehydrogenase
  misc_feature (1)..(364): NCBI GI: 67517272 Blast Desc: LE3A_ASPNG 3-isopropylmalate dehydrogenase A (Beta-IPM dehydrogenase A) (IMDH A) (3-IPM-DH A) [Aspergillus nidulans FGSC A4] gi|40746785|gb|EAA65941.1| LE3A_ASPNG 3-isopropylmalate A A)
  misc_feature (1)..(365): NCBI GI: 54036194 Blast Desc: LEU3_SORMA RecName: Full=3-isopropylmalate dehydrogenase; Short=3-IPM-DH; Short=IMDH; AltName: Full=Beta-IPM dehydrogenase gi|37223191|gb|AAQ90189.1| beta-isopropylmalate
  misc_feature (1)..(364): NCBI GI: 119494713 Blast Desc: 3-isopropylmalate dehydrogenase Leu2A [Neosartorya fischeri NRRL 181] gi|119412334|gb|EAW22275.1| 3-isopropylmalate dehydrogenase Leu2A [Neosartorya fischeri NRRL 181]
  misc_feature (1)..(365): SWISSPROT Homolog: EC 1.1.1.85 3-isopropylmalate dehydrogenase
  misc_feature: Useful for introducing or modulating the production of volatile compounds
MAAHNIVVFGGDHCGPEVVAEGLKVLKAIEENSSVKFNVQNHLLGGCSINAHGTPLTDEALSAAKSADAVLLGAIGGPEWGTGAVRPEQGILRLRKEMETYGNLRPCFFPSESLVEYSPLKSEVCKGTDFTVIRELTGGIYFGDRKEDDGSGFALDTEPYSRHEIERITRLAANLALTRNPPAPVWSLDKANVLATSRLWRKVVTEVMEKEFPQLELHHQLIDSAAMIMVKNPRGLNGVVVTSNLFGDIISDEASVIPGSIGLSPSASLSGIPDGKNRCNGIYEPIHGSAPDISGKGIVNPIGTILSVAMMCRYSLLLPKEADAIEQAVRNVLDSGVRTKDLGGQTGTKEVGDLIAAELVKLLKA

SEQ ID NO: 17920 - DNA, 2240 bp, Muscodor strobelii
  misc_feature: SGI EST ID NO. CUFF.42388.1
  misc_feature: Variant of the nucleotide sequence at SEQ ID NO 17918
cttcggagcgcctttggtttttattgagagcacacaaagccatttggttgaaatacaactcttaatctcttctcataccacttcaaatatccatattctcttgattggtattttaattcccttcttcaggtttttcgtgcttcaacacacattgtagggatggcggcgcataacatcgttgtgttcggaggagatcactgtggccccgaggttgttgctgagggtctgaaggttctcaaagctatcgaggaaaacagttcagttaaattcaacgtccaaaaccatcttcttggtggttgctctattaacgctcacggcacccctttgacggacgaagcccttagtgccgccaagtcagcagacgccgtgcttctcggcgccatcggaggacccgaatggggcaccggtgccgtccgcccggaacaaggtatcctgagactacgcaaggagatggagacatacggcaatctgcggccctgcttcttcccctcggagtccctggtcgagtactcgccgctcaagtcggaggtctgcaaaggcaccgatttcaccgtcatccgggaattgacgggtggtatttactttggcgaccgcaaggaagacgatggcagtggatttgccctggacaccgaaccttactcccgccacgaaattgagcgtattactcgccttgcagcaaatctggcgcttactcgcaaccctccggccccggtctggagtttagataaggccaatgtgctggctactagtcgtctatggcgcaaggtcgttactgaggttatggagaaggagttccctcagcttgaactgcaccatcagctcattgatagcgcggctatgattatggtcaagaacccgcgcggtttgaatggtgttgtcgttacgagtaacttgttcggtgacattatcagtgatgaagccagtgttatccctggcagcattggcttgagccccagtgccagtctgagcggcattccagacggaaagaacagatgcaacggtatctacgaaccgattcacggttcggctccagatatctcaggcaagggtattgttaaccccatcggcacgattctatcagtggccatgatgtgcaggtactctctcttattacccaaagaggccgatgccatcgagcaggccgtaagaaatgttctggatagcggggtccggacaaaggaccttggtggtcagacgggaactaaggaagtcggtgacttgattgctgccgagctcgtcaagttattaaaagcatagtgtgcgatctaaaggttcaacgtgggaaacgtttgttgcatatcacggaaaatggcgtttgcgcagaatatttttgcctcttaaatggaaagaatgatatcgctttgcatgcgtggttttagaccttgggtgataatcaattgcgatgttttgttgccgttcctccaaaattgagatgtaaaagtaacgccttgctatatgccataccgttgtgaacccgttcgtctaaacgccattaaatgtagtcttgcctcgcaggatctcgtcgaaggctaggtcgatgcaaatacctcgtactataggtgccagccttctgatcatacctcttaccattacccactacgtcgtaccgcccgttccagtcgccgtcgaaccgccgcccgtcgcctcaagcacccgcacagtatcatccttcaactcaggcatagcgttctgtatctgcgtagcaagcacatccttgaagctcgcgaacgcgctctgcttccctctcatgagctgatttcctcgtctgaccaactcaacaaactctcgcgtgtaaatgtcggggttccggccgttatcgacgtactggacgagttcgggggggacctggggtagggtccgggttgtggatgtgtggtgtacggcttggagggagcgcgagagggcgcctagctcggcgactaggacatcgcgcgatgcgcgcgaggggtgtgacggtgtggatgggggttggcctgaggcgtcgtaggatgttacttggaccattatgttgtgcagggattggattgtgtctttgagttgctctggtagatggtttagttcggtgatttagcagtggggatctagagaactgacgctcgatggcattgtggtctatgggcgctatgggcgccatgattgcagaaatcgctgaggctgtttcctggtggaaagggcggaaaggttagtcgttgagggaggacgggactgagggagtcgaaagctggcaatgacaagtgaag

SEQ ID NO: 17921 - DNA, 1911 bp, Muscodor strobelii
  misc_feature: SGI cDNA ID NO. 565996
  misc_feature: Encodes the peptide sequence at SEQ ID NO 17922
atgagtgcagatcagccagtttccagctctggcgatcctaccgcgctgcctcccaccccgaaagaaacaccaacctcggccgacttccccccgtccgtttttgaaaccccaaaggcgagtgagacgagacttgacgactcgaatggttggactccccaattcgccgaggaatactcagtcttcaactcaactcccgggaatttgcgagggacctcaggaccttttcccggctctgcacctctgtaccccttatctcctcaccataagagactactctccgctgaaaccattgctaccgagattgcatcacaggccaatcacttctcgacgacctcttcgttccctttgcccgccgtcgatccatcccatcaactgcaatcatctccaccactaggaggctcctttcccagtcctcaggaaactcagtttcagaccatctcacaacagagctcagcaaagaaaccccgccgggctattttggtcgacaaccagcctcagaccgctactcctcctccatctgctcgcaaaggggaacgacggcttgctccaaagccacaccccgatagcatgcaacatgatgggttcgagcaggattacatgtcaggccaacagcagcaacatttgcaaaatggctttgaaacagctccgatagacatgtttgggatgccgttattagcacctgcgatggcgcccagtttggaagacaatcaaagtttttgggaccatggaaatgggatggatgtggatttctcggtgccagtgtccgcctcatttcatgcctcgaatcatagacctatgaactcattggactggggcaaggctaatgaaatgttccaagaaagtggcgtcgtaaatgggaagactcaagagatcacctcgccgctaaaaaaggagcggttgcttgcaccaaagccagcctctctacctaatgtggatatgagcatgacagatgagtctgtgttcgctcattcattctctctccctggcgacgatccatttggaatgaacggtgttgatccaggtcttttgttctcgcaacatcaagccgcagggatagaattatcattcgattctgcggctcagtccggcatgatggacccaatacctccccagcagactctcacctcgccaacagaaggaccaaagcgtgggcaaatacggcgctcggttagcacgcgagatggaagcagagacaagaagggtgagaggcatacgttgacttcgcctgtcaagtcaagcagtcgtccggggctcttgcgcagtgctagtgaaaatagagggcggaagccaggtgctcgaggtaccaatttaccgaacttggcaccggctgtccgatccggtcctcctgcgagaaatggcaggtccgcttcccagggctcaagaatcagcggacggacgtcgccacttaagattcacaatcgcctctcaagtctcagttccattccagaaaatagcggaccccgcacccatacttctgtccgattcaccattgactcacgggggcgtgcgcgtgccgagacgacagttatcgttgatggcgatcagcagtcgccattaaggcgtcgtgtgggcgaagagaggggtgaccttggttcttcaggagacgagtcttcgtcatcagatgacgaaccaataatcgtccctagcaggaattcgtcgttctcagtaccggaaccgtcgcggccaacatattctcgccctccgcatagctctcaaagaagctttagcgaccagagcacgagcagtcttggtatctattacgctgagcccagcgtctttcagaacgacggggacagtgatgccgaaacagtgatgaatgtcgctgtcaatggcagccgcagcggtgatgcaatgagcgagctgcgaaaactcctcatcgaccatatccccatcgacgttcaccgaagctag

SEQ ID NO: 17922 - protein, 636 aa, Muscodor strobelii
  misc_feature: SGI Peptide ID NO. 565996
  misc_feature (11)..(625): NCBI GI: 261360271 Blast Desc: conserved [Verticillium albo-atrum VaMs.102]
  misc_feature (7)..(624): NCBI GI: 171686652 Blast Desc: protein product [Podospora anserina] gi|170943287|emb|CAP68940.1| protein product [Podospora anserina]
  misc_feature (12)..(627): NCBI GI: 256733287 Blast Desc: NECHADRAFT_37819 [Nectria haematococca mpVI 77-13-4]
  misc_feature (7)..(624): NCBI GI: 116207116 Blast Desc: CHGG_02851 [Chaetomium globosum CBS 148.51] gi|88183448|gb|EAQ90916.1| CHGG_02851 [Chaetomium globosum CBS 148.51]
  misc_feature (7)..(627): NCBI GI: 46124593 Blast Desc: FG06674.1 [Gibberella zeae PH-1]
  misc_feature (49)..(625): NCBI GI: 156051392 Blast Desc: SS1G_07103 [Sclerotinia sclerotiorum 1980] gi|154704881|gb|EDO04620.1| SS1G_07103 [Sclerotinia sclerotiorum 1980]
  misc_feature (49)..(625): NCBI GI: 154292480 Blast Desc: BC1G_14879 [Botryotinia fuckeliana B05.10] gi|150846076|gb|EDN21269.1| BC1G_14879 [Botryotinia fuckeliana B05.10]
  misc_feature (483)..(629): NCBI GI: 164425226 Blast Desc: NCU06233 [Neurospora crassa OR74A] gi|157070841|gb|EAA33848.2| conserved [Neurospora crassa OR74A]
  misc_feature (105)..(624): NCBI GI: 39940032 Blast Desc: MGG_05224 [Magnaporthe grisea 70-15] gi|145010503|gb|EDJ95159.1| MGG_05224 [Magnaporthe grisea 70-15]
  misc_feature (218)..(361): NCBI GI: 164425226 Blast Desc: NCU06233 [Neurospora crassa OR74A] gi|157070841|gb|EAA33848.2| conserved [Neurospora crassa OR74A]
MSADQPVSSSGDPTALPPTPKETPTSADFPPSVFETPKASETRLDDSNGWTPQFAEEYSVFNSTPGNLRGTSGPFPGSAPLYPLSPHHKRLLSAETIATEIASQANHFSTTSSFPLPAVDPSHQLQSSPPLGGSFPSPQETQFQTISQQSSAKKPRRAILVDNQPQTATPPPSARKGERRLAPKPHPDSMQHDGFEQDYMSGQQQQHLQNGFETAPIDMFGMPLLAPAMAPSLEDNQSFWDHGNGMDVDFSVPVSASFHASNHRPMNSLDWGKANEMFQESGVVNGKTQEITSPLKKERLLAPKPASLPNVDMSMTDESVFAHSFSLPGDDPFGMNGVDPGLLFSQHQAAGIELSFDSAAQSGMMDPIPPQQTLTSPTEGPKRGQIRRSVSTRDGSRDKKGERHTLTSPVKSSSRPGLLRSASENRGRKPGARGTNLPNLAPAVRSGPPARNGRSASQGSRISGRTSPLKIHNRLSSLSSIPENSGPRTHTSVRFTIDSRGRARAETTVIVDGDQQSPLRRRVGEERGDLGSSGDESSSSDDEPIIVPSRNSSFSVPEPSRPTYSRPPHSSQRSFSDQSTSSLGIYYAEPSVFQNDGDSDAETVMNVAVNGSRSGDAMSELRKLLIDHIPIDVHRS

SEQ ID NO: 17923 - DNA, 3770 bp, Muscodor strobelii
  misc_feature: SGI EST ID NO. CUFF.42321.0
  misc_feature: Variant of the nucleotide sequence at SEQ ID NO 17921
tggggttcacatccagtctcgtgcatttggaagtcgagatggccaatgaagttgttgtgtcccgggggttatagtaggaccagggcattcttgcctgctgctcatgcttgcgcttttagacattgggaagaactttagaggcaactcatttgtggcccctttccacctcccgacggtcttcacagtcttcgattgcttgatacttccttgttgcagcgacaattggatctggccatttgacacatcgggcacagttgggatcattagtctgcgtgggcggtgagatccgtttcctggtgtacagtagcacagaccttagcggaatttccagccctagtaggcgccctgcgaccgtttcaacttcctcacctcctaataccagagttatctgtctggccttgagccaccgtctcggacttcacttgctacttggatactctgtcggccgctattgctgaatccctaatacaattgctttgtctgtagtgtctcgggcagtcggacgtttgcttgcttttctgctcgactgcagtgtaattcttatgtgcaacgatagaccacacaaccttagaaagcaactcgaccttgacgaattcgattgtacggtttcttcaaatacatgctctgtctgaatattctttgattgaaacgcattgcctctgtcaaacccggccagctatcatactcgacatttccttgttagacaagccatcaagagggaggttaggagctaagggggaaagaagaaaaaggccaaaacacctctgaccctggtttgctatgtgagagcggtctatatcgtaaccacgacaaattggctatgagtgcagatcagccagtttccagctctggcgatcctaccgcgctgcctcccaccccgaaagaaacaccaacctcggccgacttccccccgtccgtttttgaaaccccaaaggcgagtgagacgagacttgacgactcgaatggttggactccccaattcgccgaggaatactcagtcttcaactcaactcccgggaatttgcgagggacctcaggaccttttcccggctctgcacctctgtaccccttatctcctcaccataagagactactctccgctgaaaccattgctaccgagattgcatcacaggccaatcacttctcgacgacctcttcgttccctttgcccgccgtcgatccatcccatcaactgcaatcatctccaccactaggaggctcctttcccagtcctcaggaaactcagtttcagaccatctcacaacagagctcagcaaagaaaccccgccgggctattttggtcgacaaccagcctcagaccgctactcctcctccatctgctcgcaaaggggaacgacggcttgctccaaagccacaccccgatagcatgcaacatgatgggttcgagcaggattacatgtcaggccaacagcagcaacatttgcaaaatggctttgaaacagctccgatagacatgtttgggatgccgttattagcacctgcgatggcgcccagtttggaagacaatcaaagtttttgggaccatggaaatgggatggatgtggatttctcggtgccagtgtccgcctcatttcatgcctcgaatcatagacctatgaactcattggactggggcaaggctaatgaaatgttccaagaaagtggcgtcgtaaatgggaagactcaagagatcacctcgccgctaaaaaaggagcggttgcttgcaccaaagccagcctctctacctaatgtggatatgagcatgacagatgagtctgtgttcgctcattcattctctctccctggcgacgatccatttggaatgaacggtgttgatccaggtcttttgttctcgcaacatcaagccgcagggatagaattatcattcgattctgcggctcagtccggcatgatggacccaatacctccccagcagactctcacctcgccaacagaaggaccaaagcgtgggcaaatacggcgctcggttagcacgcgagatggaagcagagacaagaagggtgagaggcatacgttgacttcgcctgtcaagtcaagcagtcgtccggggctcttgcgcagtgctagtgaaaatagagggcggaagccaggtgctcgaggtaccaatttaccgaacttggcaccggctgtccgatccggtcctcctgcgagaaatggcaggtccgcttcccagggctcaagaatcagcggacggacgtcgccacttaagattcacaatcgcctctcaagtctcagttccattccagaaaatagcggaccccgcacccatacttctgtccgattcaccattgactcacgggggcgtgcgcgtgccgagacgacagttatcgttgatggcgatcagcagtcgccattaaggcgtcgtgtgggcgaagagaggggtgaccttggttcttcaggagacgagtcttcgtcatcagatgacgaaccaataatcgtccctagcaggaattcgtcgttctcagtaccggaaccgtcgcggccaacatattctcgccctccgcatagctctcaaagaagctttagcgaccagagcacgagcagtcttggtatctattacgctgagcccagcgtctttcagaacgacggggacagtgatgccgaaacagtgatgaatgtcgctgtcaatggcagccgcagcggtgatgcaatgagcgagctgcgaaaagtacgagaggatcgccagaaacggctaccttccctgaacactaaccatcgcttcacatctggagcaccatatagctcctcatcgaccatatccccatcgacgttcaccgaagctagcctcacgcactcttcaaccgaccgaggaaatcaaatccgctgcatttgtaatacgacgttgtctcagatcaacggcaacggatatatggtacagtgcgaatcatgcgaaatgtggttgcatggcaagtgtgtcaacattacgcgtcagactctcccgcgcgtctacatctgtgcctattgcgccaatactcctaatgctcatggtgcgcgtggtcgcgaggcacgaagggttggagggttaagttcgcgcccaagtgcatcctcgccgctagcacataaagctcgatcctttcgatgaagagatatcacagggcaatatgaagctaggatggcatatagaacatgagagttgaatgataagtaataggggcatacataggaatctctcttgatgatgaccagcaagactgaccacaatggggcgatcaaaaactggagcagcttagatacccgatgaagtcgtgtcgatgtgcatagatgctcttggttaacaatgcaaacgaaaatcaagaaacaccatttggcctgaagccttcgtagcgaatgactccatccagtaactgcgctgcaggacgcatctcggcttcggcgtgagatgttggatacaggccgttccgaggtaatgggacaagtaaagcgagactgagtggattgggcaatgtgggagatgatgacgtcgatatgtgagcggtatttagtcctagagctgcctcgtgacttaacgataaaccgttcacgacaatctgactgactgtacagcatgataccaacacctctaaaccgaataacgctatagtatattgcgcgtccgatccgaatatcgctaccttatgtattgcagccactcagagcataaaagaagatagtaaatgaggcagactgcattatttgcaatttataaactttctcagaatgctttagagcaaaacgagctttacagataaacggcattctcgatctgactg

SEQ ID NO: 17924 - DNA, 894 bp, Muscodor strobelii
  misc_feature: SGI cDNA ID NO. 565998
  misc_feature: Elevated expression when VOC is produced
  misc_feature: Encodes the peptide sequence at SEQ ID NO 17925
atgtctacgtcaacagatatcattacggaaagcgaaaagctcaaaaccggtagagatgtacgtctttacgcacggagatatccttgcgctaacacctctgggcttgcaccaacataccttcaagcaaatctcatagttttaccctcgaaatatgcttcagattttgccttgctttgtgccaggaatccggtgccgtgtccacttatcgcagaatcgaatgaactcggaagatgggacgcaatccgttcacatctcccaggattagatggacttaccatgttgagggacgtcgatatcagaaaagacgtgccaaaatataacgtatataaagattccgtcttggtcaaggatggttgtcgagatatagtcgacgaatggacagaagatcatgttgcattcctcgttggctgttctttcagcttcgagtctgcattgaatgcagccggcctaaagccgcttcatcaggttctcaagcgcaatgtccccatgtaccgcaccacgcttccgttatgtcctgcaggagtgttcacaagctcgacatttgtcgtatcgatgcgcgcataccggacaagcgatgtagctcgcgtccgggaaatcacgagagcttactctgtcactcatggtgagcccatcgcctggggctgggacgccctgaagacgctaggcatcgatgacattgattcacctcagtggggtgacggaccgcttacacgagatggtcgtcctctgagtgatttccaggggcatgatgagctggttcctgtgttttggggatgcggtgttacacctcaagaagcagtgatgaaggctaatttgaagggtaccgtcatgtcccactcgcctgggcatatgttagtattggattgtcgagattcggaacttatgtctgcatga

SEQ ID NO: 17925 - protein, 297 aa, Muscodor strobelii
  misc_feature: SGI Peptide ID NO. 565998
  misc_feature (131)..(288): Pfam Id: PF07286 Pfam Desc: Domain of function (DUF1445)
  misc_feature (14)..(295): NCBI GI: 256733066 Blast Desc: NECHADRAFT_38082 [Nectria haematococca mpVI 77-13-4]
  misc_feature (14)..(296): NCBI GI: 261352182 Blast Desc: DUF1445 domain-containing protein [Verticillium albo-atrum VaMs.102]
  misc_feature (16)..(295): NCBI GI: 154308231 Blast Desc: BC1G_07861 [Botryotinia fuckeliana B05.10] gi|150852946|gb|EDN28138.1| BC1G_07861 [Botryotinia fuckeliana B05.10]
  misc_feature (16)..(296): NCBI GI: 156058824 Blast Desc: SS1G_03424 [Sclerotinia sclerotiorum 1980] gi|154701211|gb|EDO00950.1| SS1G_03424 [Sclerotinia sclerotiorum 1980]
  misc_feature (8)..(297): NCBI GI: 39943672 Blast Desc: MGG_03847 [Magnaporthe grisea 70-15] gi|145014535|gb|EDJ99103.1| MGG_03847 [Magnaporthe grisea 70-15]
  misc_feature (9)..(296): NCBI GI: 242815684 Blast Desc: DUF1445 domain protein [Talaromyces stipitatus ATCC 10500] gi|218714957|gb|EED14380.1| DUF1445 domain protein [Talaromyces stipitatus ATCC 10500]
  misc_feature (13)..(288): NCBI GI: 58267790 Blast Desc: [Cryptococcus neoformans var. neoformans JEC21] gi|134112563|ref|XP_775054.1| CNBE5300 [Cryptococcus neoformans var. neoformans B-3501A] gi|50257704|gb|EAL20407.1| CNBE5300 var.
  misc_feature (2)..(295): NCBI GI: 115443188 Blast Desc: conserved [Aspergillus terreus NIH2624] gi|114188270|gb|EAU29970.1| conserved [Aspergillus terreus NIH2624]
  misc_feature (15)..(288): NCBI GI: 169771909 Blast Desc: [Aspergillus oryzae RIB40] gi|83768283|dbj|BAE58422.1| protein product [Aspergillus oryzae]
  misc_feature (15)..(288): NCBI GI: 238485492 Blast Desc: DUF1445 domain protein [Aspergillus flavus NRRL3357] gi|220698863|gb|EED55202.1| DUF1445 domain protein [Aspergillus flavus NRRL3357]
  misc_feature: Useful for introducing or modulating the production of volatile compounds
MSTSTDIITESEKLKTGRDVRLYARRYPCANTSGLAPTYLQANLIVLPSKYASDFALLCARNPVPCPLIAESNELGRWDAIRSHLPGLDGLTMLRDVDIRKDVPKYNVYKDSVLVKDGCRDIVDEWTEDHVAFLVGCSFSFESALNAAGLKPLHQVLKRNVPMYRTTLPLCPAGVFTSSTFVVSMRAYRTSDVARVREITRAYSVTHGEPIAWGWDALKTLGIDDIDSPQWGDGPLTRDGRPLSDFQGHDELVPVFWGCGVTPQEAVMKANLKGTVMSHSPGHMLVLDCRDSELMSA

SEQ ID NO: 17926 - DNA, 1023 bp, Muscodor strobelii
  misc_feature: SGI cDNA ID NO. 565999
  misc_feature: Encodes the peptide sequence at SEQ ID NO 17927
atggccacagaaaacggccaacctatgcaattcagtgagcctgtgcaattcagtcgcttgcctacggaactacgcttgttgatatggagttttgttgcacttgaactgaagccaggacgcagtcctcaggtcttcgcccttcatctcgtcaccccgcatgacacggatcaagcgccgtatcacatccgtccgcatcctaacttgaaaacacaaaccgccagtctcaggacaatgctgtcagtcaaccaagagagtcgtgcctttgcactgaaattgttcccggatgtgctcactgtcaatgacgagacgggcgccatcattcgctttgacagcgaccgagatctggtttatcttgatgggccgtttgacgcacatttgatggagacaagctggaactacgctgtatgtataccgtcggctatccaaatcgagatttttattgataatttctcagagattattgggcatcttgcactgtgccctaacctcgagggctatattacatcaaccgaacttatgctgcctgatgcggccattgatctcacatggtatgtgatgaaatttcttcggccgtttaaatgcctcgatgctgtatactactccattcccgtgcgcccaagtacccggaaggaagaattcgagttttgtgcgtccaacaaggtttaccgccatcaaaccaacggcgagaaaccagttgtgtattgctggcccgaccttattgacaacgcagaatacgccagcaacgaaccctcgttgtcccataggtggcgtcgcatcgatacagaattcggcgatcttgttgaatcactcttacaagaccctgacattgatgcgaatgagaaggcacgcatacatgaatgtattgatccccacctcagtgaagatgacttgtggtatttgcacgatattccgttctggaagatggtggtgttctccggagagagggcagtgaatcggttccggtatttgttctcagattatgaagattccgatgacgatgcatattgcaccaagtttgactaa

SEQ ID NO: 17927 - protein, 340 aa, Muscodor strobelii
  misc_feature: SGI Peptide ID NO. 565999
  misc_feature (16)..(323): NCBI GI: 256729571 Blast Desc: NECHADRAFT_47302 [Nectria haematococca mpVI 77-13-4]
  misc_feature (16)..(323): NCBI GI: 46117578 Blast Desc: FG04631.1 [Gibberella zeae PH-1]
  misc_feature (16)..(238): NCBI GI: 116205732 Blast Desc: CHGG_02159 [Chaetomium globosum CBS 148.51] gi|88182756|gb|EAQ90224.1| CHGG_02159 [Chaetomium globosum CBS 148.51]
  misc_feature (16)..(239): NCBI GI: 39977303 Blast Desc: MGG_06554 [Magnaporthe grisea 70-15] gi|145016005|gb|EDK00495.1| MGG_06554 [Magnaporthe grisea 70-15]
  misc_feature (16)..(119): NCBI GI: 171678253 Blast Desc: protein product [Podospora anserina] gi|170937196|emb|CAP61853.1| protein product [Podospora anserina]
  misc_feature (16)..(118): NCBI GI: 39942782 Blast Desc: MGG_03471 [Magnaporthe grisea 70-15] gi|145009979|gb|EDJ94635.1| MGG_03471 [Magnaporthe grisea 70-15]
MATENGQPMQFSEPVQFSRLPTELRLLIWSFVALELKPGRSPQVFALHLVTPHDTDQAPYHIRPHPNLKTQTASLRTMLSVNQESRAFALKLFPDVLTVNDETGAIIRFDSDRDLVYLDGPFDAHLMETSWNYAVCIPSAIQIEIFIDNFSEIIGHLALCPNLEGYITSTELMLPDAAIDLTWYVMKFLRPFKCLDAVYYSIPVRPSTRKEEFEFCASNKVYRHQTNGEKPVVYCWPDLIDNAEYASNEPSLSHRWRRIDTEFGDLVESLLQDPDIDANEKARIHECIDPHLSEDDLWYLHDIPFWKMVVFSGERAVNRFRYLFSDYEDSDDDAYCTKFD

SEQ ID NO: 17928 - DNA, 1923 bp, Muscodor strobelii
  misc_feature: SGI EST ID NO. CUFF.42355.1
  misc_feature: Variant of the nucleotide sequence at SEQ ID NO 17926
tttctcagagattattgggcatcttgcactgtgccctaacctcgagggctatattacatcaaccgaacttatgctgcctgatgcggccattgatctcacatggtatgtgatgaaatttcttcggccgtttaaatgcctcgatgctgtatactactccattcccgtgcgcccaagtacccggaaggaagaattcgagttttgtgcgtccaacaaggtttaccgccatcaaaccaacggcgagaaaccagttgtgtattgctggcccgaccttattgacaacgcagaatacgccagcaacgaaccctcgttgtcccataggtggcgtcgcatcgatacagaattcggcgatcttgttgaatcactcttacaagaccctgacattgatgcgaatgagaaggcacgcatacatgaatgtattgatccccacctcagtgaagatgacttgtggtatttgcacgatattccgttctggaagatggtggtgttctccggagagagggcagtgaatcggttccggtatttgttctcagattatgaagattccgatgacgatgcatattgcaccaagtttgactaagcgaagctcgtcatgtgtatacgcattatcctacccgccaaagatgttgtgcctcatggcagaatttgaaatagctatgttgttgagatctttccacaaatgaaagactggttgtataatttgaagtattcggacgaatcaactctttgcatacacttcacaatactctatctttttcttcttacgtagcgcttctccacctccctttatgagcagtttccctcaatactgatcaagcaaagcggagttgctcgtaatagtaatgctagtcagtatgtgccatcattgccagagatgataattggcaaaagcaagttcgatagagtacaattatttacatcaaaatggtttaatgaactcatgcagacataagttccgaatctcgacaatccaatactaacatatgcccaggcgagtgggacatgacggtacccttcaaattagccttcatcactgcttcttgaggtgtaacaccgcatccccaaaacacaggaaccagctcatcatgcccctggaaatcactcagaggacgaccatctcgtgtaagcggtccgtcaccccactgaggtgaatcaatgtcatcgatgcctagcgtcttcagggcgtcccagccccaggcgatgggctcaccatgagtgacagagtaagctctcgtgatttcccggacgcgagctacatcgcttgtccggtatgcgcgcatcgatacgacaaatgtcgagcttgtgaacactcctgcaggacataacggaagcgtggtgcggtacatggggacattgcgcttgagaacctgatgaagcggctttaggccggctgcattcaatgcagactcgaagctgaaagaacagccaacgaggaatgcaacatgatcttctgtccattcgtcgactatatctcgacaaccatccttgaccaagacggaatctttatatacgttatattttggcacgtcttttctgatatcgacgtccctcaacatggtaagtccatctaatcctgggagatgtgaacggattgcgtcccatcttccgagttcattcgattctgcgataagtggacacggcaccggattcctggcacaaagcaaggcaaaatctgaagcatatttcgagggtaaaactatgagatttgcttgaaggtatgttggtgcaagcccagaggtgttagcgcaaggatatctccgtgcgtaaagacgtacatctctaccggttttgagcttttcgctttccgtaatgatatctgttgacgtagacatggctagaaagaacaatccacacgacaaagatcacttctaattgaaagcacattcgccattctgattgtaggaggatcgtgtgccgggagttaaa

SEQ ID NO: 17929 - DNA, 1233 bp, Muscodor strobelii
  misc_feature: SGI cDNA ID NO. 566000
  misc_feature: Encodes the peptide sequence at SEQ ID NO 17930
atggagcagtcatacatcgcactcgtcttcgacggacagacgtttgactcgctcaagcaagctacagcatggatcgcggatatcgtggacccgagagagcgcttcagagcccaagaaaaaattgcccggcaggcctttcaacaggtgtcacaaaatgcggactgcttcgagcagtatatggcgtaccttgaaagcgatcaagtagcttatcgatccgtgttagagagctatagagcattcgagaaggcattcgaagatgagctgtcctttgcccgagatgtaaggaaattgcgtgatcgcagacaggagtcgatacgttgcatccaacacaggtggtctaatgagccgcaagctttagcttggatcgagttcctaaccttacgatcttcgaaccgatattcaaaacagtttttcgacaaacttcggaccttagcgaggagcgtcaaaagctggcaaattgcacaacaacggatcaatgctgctgtgaaactccgcctcggatgccggaaaaggggtatccgtttcgtgaaggacatcacgaccggcgacttgtttagtgccaagaatggcaagttccagaagataatgctgacgaaggtaatgccacccgacgatgattggcttcgaaagcaagatatgcatatagacgaatttggattattagcttcaaacacaagggtggaattaccgcctctggatgctagcaatgttgggagcatcgcggtctatcatcgtctaaacccatcgtcatccatgtttggagagactttgacggtggatagtgatagtaccgccaactcaaaaatcgaccctgatctatcagatagcgaagaagcatctgttttcgtagctgagacaccaccaaccgatgtcgatgtcacgatgacgacagctgaatgggcgaatcagttcaagcgttgtgggtgttctatagacgtaggggacgagttcatcgagaaaatctctcaggtatcagagtggccactgagagaaaagctagacatgctcgacgttttgctcggcttcaagctgctctgccaatcccatagcagacgatttgcatggggtttaggtctggatgttgtacgcgtggagcaagaggagatgaaagaccgccttaaagaggttgcagagagaagaaatttgttactggctatcgagaatgagtcgagttctttgcgcttatttcgaaaagaggaactcttcgcaatactttacgaggatgaagactga

SEQ ID NO: 17930 - protein, 410 aa, Muscodor strobelii
  misc_feature: SGI Peptide ID NO. 566000
MEQSYIALVFDGQTFDSLKQATAWIADIVDPRERFRAQEKIARQAFQQVSQNADCFEQYMAYLESDQVAYRSVLESYRAFEKAFEDELSFARDVRKLRDRRQESIRCIQHRWSNEPQALAWIEFLTLRSSNRYSKQFFDKLRTLARSVKSWQIAQQRINAAVKLRLGCRKRGIRFVKDITTGDLFSAKNGKFQKIMLTKVMPPDDDWLRKQDMHIDEFGLLASNTRVELPPLDASNVGSIAVYHRLNPSSSMFGETLTVDSDSTANSKIDPDLSDSEEASVFVAETPPTDVDVTMTTAEWANQFKRCGCSIDVGDEFIEKISQVSEWPLREKLDMLDVLLGFKLLCQSHSRRFAWGLGLDVVRVEQEEMKDRLKEVAERRNLLLAIENESSSLRLFRKEELFAILYEDED

SEQ ID NO: 17931 - DNA, 1544 bp, Muscodor strobelii
  misc_feature: SGI EST ID NO. CUFF.42342.0
  misc_feature: Variant of the nucleotide sequence at SEQ ID NO 17929
gtgaagcctctgatctttgtctaattgtatcagccattgcatactgctgttccggcatccagggttgaacaaagaacgagttcattagcctactctttgtttattatacttgaaattgatgctcgagggagccttgccccgtgacgttttcgcccaaatcatgagacaactcttggtctctttgaacatcgccccagtacctttcttaggcatcctcatctagtgtgcaagcagcttccttcgccataaacccaccgagcatctgaaattgtaatcatggagcagtcatacatcgcactcgtcttcgacggacagacgtttgactcgctcaagcaagctacagcatggatcgcggatatcgtggacccgagagagcgcttcagagcccaagaaaaaattgcccggcaggcctttcaacaggtgtcacaaaatgcggactgcttcgagcagtatatggcgtaccttgaaagcgatcaagtagcttatcgatccgtgttagagagctatagagcattcgagaaggcattcgaagatgagctgtcctttgcccgagatgtaaggaaattgcgtgatcgcagacaggagtcgatacgttgcatccaacacaggtggtctaatgagccgcaagctttagcttggatcgagttcctaaccttacgatcttcgaaccgatattcaaaacagtttttcgacaaacttcggaccttagcgaggagcgtcaaaagctggcaaattgcacaacaacggatcaatgctgctgtgaaactccgcctcggatgccggaaaaggggtatccgtttcgtgaaggacatcacgaccggcgacttgtttagtgccaagaatggcaagttccagaagataatgctgacgaaggtaatgccacccgacgatgattggcttcgaaagcaagatatgcatatagacgaatttggattattagcttcaaacacaagggtggaattaccgcctctggatgctagcaatgttgggagcatcgcggtctatcatcgtctaaacccatcgtcatccatgtttggagagactttgacggtggatagtgatagtaccgccaactcaaaaatcgaccctgatctatcagatagcgaagaagcatctgttttcgtagctgagacaccaccaaccgatgtcgatgtcacgatgacgacagctgaatgggcgaatcagttcaagcgttgtgggtgttctatagacgtaggggacgagttcatcgagaaaatctctcaggtatcagagtggccactgagagaaaagctagacatgctcgacgttttgctcggcttcaagctgctctgccaatcccatagcagacgatttgcatggggtttaggtctggatgttgtacgcgtggagcaagaggagatgaaagaccgccttaaagaggttgcagagagaagaaatttgttactggctatcgagaatgagtcgagttctttgcgcttatttcgaaaagaggaactcttcgcaatactttacgaggatgaagactgaaatttctgaactaggtactgttatctttatccttt

SEQ ID NO: 17932 - DNA, 1023 bp, Muscodor strobelii
  misc_feature: SGI cDNA ID NO. 566001
  misc_feature: Encodes the peptide sequence at SEQ ID NO 17933
atgtccgcctcgcttcctggcaaccgggagctgcccgagtcgcagtacgatctgagcacgtattggggtcgtgtgcgccagaccgccagcatcaccgacccaaggacgctcctggcgggcaagagcggccttgaagatgcgaagcagctgatcgtcgcgtacaagcagggcgacatcaaggagatgacgcctgagctctggagggcaaagaagatagtcgattcgacattgcacccagataccggcaagcctgttctgctccctttccgcatgtcatgtttcgccctctctaacttggtcgttacggcgggcatgctcacgcctggtctttccaataccggcaccgttctctggcaaatcgccaaccagtccctgaatgtggctataaataatgcgaacgccaacaagtccacccctctctcctattctaagatcgcacaatcctacttcctcgccgtcggcgcctcatgttctgtggccgttggcctgaactctctcgtgccgcgcctgaagcgagtctctccctccaccaaacttgttctgggccgcttggtgccctttgccgcggtcgcatccgccggtttcctcaatgtcttcctgatgcgtggtgaggagatgcgcgtgggaatcgatgtctaccccgtgctgtcaagcgcggacaaagaacggctggcagccgagggccgtgccgaaagcgacgtggcgtcgttgggaaagagcaaaaaggcggctacactggccgtggctgagacggcgttcagtcgcgtgctcaatagcactcccatcatggtggtcccaccccttatcctcgttcgacttcaacgcacaaattggctccgtgcgaaccagaaaatgacgcttcccgtgaatctggccctgatcttgggcatgagctacgtcgcgttgcctttggctcttgctgcatttccacaacgccagagaatcagtgccgggagtcttgaagaggagtttcatgggcgaggtggggagggtggaatggttgtgttcaatcgtggcatatga

SEQ ID NO: 17933 - protein, 340 aa, Muscodor strobelii
  misc_feature: SGI Peptide ID NO. 566001
  misc_feature (16)..(340): Pfam Id: PF03820 Pfam Desc: Tricarboxylate carrier
  misc_feature (16)..(212): Pfam Id: PF03820 Pfam Desc: Tricarboxylate carrier
  misc_feature (236)..(340): Pfam Id: PF03820 Pfam Desc: Tricarboxylate carrier
  misc_feature (1)..(340): NCBI GI: 85086560 Blast Desc: NCU00227 [Neurospora crassa OR74A] gi|28918793|gb|EAA28462.1| NCU00227 [Neurospora crassa OR74A]
  misc_feature (1)..(340): NCBI GI: 171685600 Blast Desc: protein product [Podospora anserina] gi|170942761|emb|CAP68414.1| protein product [Podospora anserina]
  misc_feature (1)..(340): NCBI GI: 169767052 Blast Desc: [Aspergillus oryzae RIB40] gi|83765852|dbj|BAE55995.1| protein product [Aspergillus oryzae]
  misc_feature (1)..(340): NCBI GI: 145601945 Blast Desc: MGG_05310 [Magnaporthe grisea 70-15] gi|145010404|gb|EDJ95060.1| MGG_05310 [Magnaporthe grisea 70-15]
  misc_feature (1)..(340): NCBI GI: 226285429 Blast Desc: sideroflexin-1 [Paracoccidioides brasiliensis Pb01]
  misc_feature (1)..(340): NCBI GI: 169599280 Blast Desc: SNOG_02458 [Phaeosphaeria nodorum SN15] gi|111069550|gb|EAT90670.1| SNOG_02458 [Phaeosphaeria nodorum SN15]
  misc_feature (1)..(340): NCBI GI: 115397411 Blast Desc: conserved [Aspergillus terreus NIH2624] gi|114192488|gb|EAU34188.1| conserved [Aspergillus terreus NIH2624]
  misc_feature (1)..(340): NCBI GI: 255957105 Blast Desc: Pc21g23380 [Penicillium chrysogenum Wisconsin 54-1255] gi|211591016|emb|CAP97235.1| Pc21g23380 [Penicillium chrysogenum Wisconsin 54-1255]
  misc_feature (1)..(340): NCBI GI: 154316299 Blast Desc: BC1G_03735 [Botryotinia fuckeliana B05.10] gi|150846521|gb|EDN21714.1| BC1G_03735 [Botryotinia fuckeliana B05.10]
  misc_feature (1)..(340): NCBI GI: 242778811 Blast Desc: mitochondrial cation transporter, [Talaromyces stipitatus ATCC 10500] gi|218722933|gb|EED22351.1| mitochondrial cation transporter, [Talaromyces stipitatus ATCC 10500]
MSASLPGNRELPESQYDLSTYWGRVRQTASITDPRTLLAGKSGLEDAKQLIVAYKQGDIKEMTPELWRAKKIVDSTLHPDTGKPVLLPFRMSCFALSNLVVTAGMLTPGLSNTGTVLWQIANQSLNVAINNANANKSTPLSYSKIAQSYFLAVGASCSVAVGLNSLVPRLKRVSPSTKLVLGRLVPFAAVASAGFLNVFLMRGEEMRVGIDVYPVLSSADKERLAAEGRAESDVASLGKSKKAATLAVAETAFSRVLNSTPIMVVPPLILVRLQRTNWLRANQKMTLPVNLALILGMSYVALPLALAAFPQRQRISAGSLEEEFHGRGGEGGMVVFNRGI

SEQ ID NO: 17934 - DNA, 2444 bp, Muscodor strobelii
  misc_feature: SGI EST ID NO. CUFF.42366.1
  misc_feature: Variant of the nucleotide sequence at SEQ ID NO 17932
cgcgctgcttatttcggaaccagaataaaacagcatatctgaataagttgaaaagtatgtgtctatgatactgtactatgccttaattttcgtcagataatggctcatggatcgtgagcacaagacggttgagatgatacgttttgtgctcattgtttctctgacgtgtgatgaatggtggtgttcactggcgaggaagtggtggaggctacctggcagaggaagagggattgagaggatccggacggtccacggacctgtcccggtgtcggcggatggtggcaggtcgcgtcgtctcttagtagctgctcggattgtagccaagattcaccgctagaaaaagagatgcgtcgcagtacgactcctttcgcgtgatgatcaattgcggccgtgaggtggcataggctgtcaagaagaaccgttggaggtgaacacgcgaaaacgctcgtcagtgcgctgctcgacgatatcccaccatgtccgcctcgcttcctggcaaccgggagctgcccgagtcgcagtacgatctgagcacgtattggggtcgtgtgcgccagaccgccagcatcaccgacccaaggacgctcctggcgggcaagagcggccttgaagatgcgaagcagctgatcgtcgcgtacaagcagggcgacatcaaggagatgacgcctgagctctggagggcaaagaagatagtcgattcgacattgcacccaggtaactccggcctcatctacgccctcttggacttacacgtggactcaggctgactgggatgcgattgatgccatcagataccggcaagcctgttctgctccctttccgcatgtcatgtttcgccctctctaacttggtcgttacggcgggcatgctcacgcctggtctttccaataccggcaccgttctctggcaaatcgccaaccagtccctgaatgtggctataaataatgcgaacgccaacaagtccacccctctctcctattctaagatcgcacaatcctacttcctcgccgtcggcgcctcatgttctgtggccgttggcctgaactctctcgtgccgcgcctgaagcgagtctctccctccaccaaacttgttctgggccgcttggtgccctttgccgcggtcgcatccgccggtttcctcaatgtcttcctgatgcgtggtgaggagatgcgcgtgggaatcgatgtctaccccgtgctgtcaagcgcggacaaagaacggctggcagccgagggccgtgccgaaagcgacgtggcgtcgttgggaaagagcaaaaaggcggctacactggccgtggctgagacggcgttcagtcgcgtgctcaatagcactcccatcatggtggtcccaccccttatcctcgttcgacttcaacgcacaaattggctccgtgcgaaccagaaaatgacgcttcccgtgaatctggccctgatcttgggcatgagctacgtcgcgttgcctttggctcttgctgcatttccacaacgccagagaatcagtgccgggagtcttgaagaggagtttcatgggcgaggtggggagggtggaatggttgtgttcaatcgtggcatatgataccccgaacctcacaataagaaacatatagaaaagagcaggttatcgacaaagtgagtctctacacttagaaacaagtatttacaggcttgacgacgtgagccggcgttctggaccatggaattatatcgggttcggcgacatagtcgcgaagtgattgtgtaacacttcgacagatgtttccagatccacttcgataaatacactgttacccttagtacatggcatgatgccaccgatatcaaaattatctggacttgtgtacatgactattgaatcctaagatgtcgcttgtatcgatcagtacccaagatgtgctgtatagagtgcctcctttggagtagagatacgtctcacatctagtcttctcattttttgccatgtcaggaggagtcgcgcggcctctcgtctgtctgcaaaatctggaagaccactttgtttgaaataattccttatcatcgaagcaggagagacaagtcaccaacgggacggtttattctagagacatagaacgagtttcggtacagtctcgtcgtgtagacagtattaggcgagtcttctgacaagacacagtggctaaaacatctattctccttattgcaacgcagtctattatgatgcgtgttacgtgaatgagtacagaatattctcctggcgtcaaaatgctgtccttaggtttgactaatactcgtgaagcgttatgtatgcatatgcgacacatctgattctgtgacaacctacttaagcgaccttgatgacgtgaaccgttttgatagcaacaatgttacgatgaaagcaaggatttccggatgagccggtctatttgacttggagtttctccgtgaacttcgcacttttaccatcgtgg

SEQ ID NO: 17935 - DNA, 2271 bp, Muscodor strobelii
  misc_feature: SGI cDNA ID NO. 566002
  misc_feature: Reduced expression when VOC is produced
  misc_feature: Encodes the peptide sequence at SEQ ID NO 17936
atgtccacgccgacgactgccacggccccattgcctccgcactatcgtcaccatcatcaccctgctgcccatcaccatcactacccgtcctatccgaccctgcctcccaccggtgccgcctaccgcagcgccgcgagtgctgcaaaccctatcctccccgccccgtcgtctgcctccacggcgtcgacagcgcccgtctccagtcgtccgccccagccgtcacagcaaccacagcaaccacagcactaccagccggcctaccacgccaatcctgcgtaccctgcacacgacgcctcccaccctgccgtctatgcaaatggagtaggtccgtctgtcgccgctgccagacacacctcgacgagaacgcattcgacgcccaggtcggagcccagctacatgcctccctcgtccaccacgacggccacgacggccacgacggcccacacatacgccgacatgcacgcacgcaagcggcggaggtccaaggagcccgattggaagacgttctacaagaacggcctgcccaaggagatcatcgtcattgacgacacccccgagcctgacgacaacaggtccgccgccgcctcctcacggccctacgcagagagcactgtgaatggctccgtcactgaccacggtgcccggcatgtggcgaagaagcggaaaaaggacgacagcgtgaaacaggagttgccacacgacccaacaagaacgactcgctcgtaccatcagccctctagtggctcagcttccaccgaccgtaccacctcagcctacaacaccaccgcacccacctctctctcctccaatggccagtatgaatatgagccacagcaacccggccagaagcggaaacgcaccacccgccaacaggctgtccaggatgcgaagcgacgcgaggtcgaggtcctgaccgacggctttctcgagtaccaaccgcccaagaagccgatcaagaagtcgggagaagtacacgtccgcctcatcaacgaagtacgttggcgaccacccgcaccacgcacacatcgaagaaatctcgctaatcccattcagcgccctcaccagagtagtgtcaaggtcgacgacgatgacgggcattacattgtggtacctgacgccgacctcacacaagactatacaatcgccaaactcctgggtcaaggtacatttggcaaggtcgtccaggcccgcgacaggaagcgaaacaagctcgtagccatcaagatcatccgggcagtgcagaagtaccgcgatgccagtcggattgagttgagagtgcttgagacgctcaagatgaacgatccagataaccgaaatcgttgcattcatctgcgagactgcttcgactaccgtggccacatctgcattgtcatggatctcctaggctcaagcgtcttcgacttcctcaagagcaacaactttgttcccttccccaacagccagatccagagctttgctcgtcagctgctgaccagcgtcgctttccttcatgacttgaacttagtccacacggacctcaagcctgaaaatattctcctttgtgataatgcttaccagacatttacttacaatcgacgtataccatcctcggctgctggagtcaaccgacaagctacacaacgcaaggtcctcctcgacaccgaaattaggctcatagactttgggtctgctacattcaacgacgaatatcactcgtctgtcgtctcgactcgacactatcgagcccccgagatcatactgggtctcggctggtcttttccttgcgatatctggagtataggttgtattcttgtcgagttcttcactggagatgcactctttcagactcacgacaacctcgagcacttggctatgatggaaaatgtctgtgacaacaggatcgatcagcatctcgtgcaaatggtcaacaaacaatcatcgcgtaacagcagcaactcaccagccaagtatgttgcactccatccaaccgcgcaccagcctattaaccaccacgatagatactttaaacgtctcaaattggactatcccgcaagcgagactacgagggcttcgagacggttcgttaggaacatgaaacgattaagtgacattatcccatctacaagcccatttcttcggctattcttggatctcttacaaaagatattcgtctacgaccctcagcgacgtatcactgctcgccaagcgctggcgcatccttggttccaggaagccgccataccagacgacggaaccgaggccatcaaaattcggctggaacgatgtgagtaa

SEQ ID NO: 17936 - protein, 756 aa, Muscodor strobelii
  misc_feature: SGI Peptide ID NO. 566002
  misc_feature (379)..(735): Pfam Id: PF00069 Pfam Desc: Protein kinase domain
  misc_feature (379)..(622): Pfam Id: PF00069 Pfam Desc: Protein kinase domain
  misc_feature (687)..(735): Pfam Id: PF00069 Pfam Desc: Protein kinase domain
  misc_feature (379)..(411): Pfam Id: PF07714 Pfam Desc: Protein tyrosine kinase
  misc_feature (23)..(755): NCBI GI: 46124519 Blast Desc: FG06637.1 [Gibberella zeae PH-1]
  misc_feature (1)..(755): NCBI GI: 256733309 Blast Desc: [Nectria haematococca mpVI 77-13-4]
  misc_feature (156)..(754): NCBI GI: 145601943 Blast Desc: MGG_05312 [Magnaporthe grisea 70-15] gi|145010403|gb|EDJ95059.1| MGG_05312 [Magnaporthe grisea 70-15]
  misc_feature (1)..(754): NCBI GI: 156037626 Blast Desc: SS1G_12527 [Sclerotinia sclerotiorum 1980] gi|154697935|gb|EDN97673.1| SS1G_12527 [Sclerotinia sclerotiorum 1980]
  misc_feature (156)..(754): NCBI GI: 116208196 Blast Desc: CHGG_03391 [Chaetomium globosum CBS 148.51] gi|88183988|gb|EAQ91456.1| CHGG_03391 [Chaetomium globosum CBS 148.51]
  misc_feature (154)..(754): NCBI GI: 154316297 Blast Desc: BC1G_03734 [Botryotinia fuckeliana B05.10] gi|150846520|gb|EDN21713.1| BC1G_03734 [Botryotinia fuckeliana B05.10]
  misc_feature (59)..(750): NCBI GI: 119494365 Blast Desc: protein kinase (Lkh1), [Neosartorya fischeri NRRL 181] gi|119412240|gb|EAW22181.1| protein kinase (Lkh1), [Neosartorya fischeri NRRL 181]
  misc_feature (1)..(750): NCBI GI: 70996582 Blast Desc: protein kinase (Lkh1) [Aspergillus fumigatus Af293] gi|66850681|gb|EAL91008.1| protein kinase (Lkh1), [Aspergillus fumigatus Af293] gi|159131782|gb|EDP56895.1| protein kinase
  misc_feature (82)..(750): NCBI GI: 212533757 Blast Desc: protein kinase (Lkh1), [Penicillium marneffei ATCC 18224] gi|210072399|gb|EEA26488.1| protein kinase (Lkh1), [Penicillium marneffei ATCC 18224]
  misc_feature (82)..(749): NCBI GI: 212533759 Blast Desc: protein kinase (Lkh1), [Penicillium marneffei ATCC 18224] gi|210072400|gb|EEA26489.1| protein kinase (Lkh1), [Penicillium marneffei ATCC 18224]
  misc_feature (310)..(737): SWISSPROT Homolog: EC 2.7.12.1 Dual-specificity kinase
  misc_feature: Useful for introducing or modulating the production of volatile compounds
MSTPTTATAPLPPHYRHHHHPAAHHHHYPSYPTLPPTGAAYRSAASAANPILPAPSSASTASTAPVSSRPPQPSQQPQQPQHYQPAYHANPAYPAHDASHPAVYANGVGPSVAAARHTSTRTHSTPRSEPSYMPPSSTTTATTATTAHTYADMHARKRRRSKEPDWKTFYKNGLPKEIIVIDDTPEPDDNRSAAASSRPYAESTVNGSVTDHGARHVAKKRKKDDSVKQELPHDPTRTTRSYHQPSSGSASTDRTTSAYNTTAPTSLSSNGQYEYEPQQPGQKRKRTTRQQAVQDAKRREVEVLTDGFLEYQPPKKPIKKSGEVHVRLINEVRWRPPAPRTHRRNLANPIQRPHQSSVKVDDDDGHYIVVPDADLTQDYTIAKLLGQGTFGKVVQARDRKRNKLVAIKIIRAVQKYRDASRIELRVLETLKMNDPDNRNRCIHLRDCFDYRGHICIVMDLLGSSVFDFLKSNNFVPFPNSQIQSFARQLLTSVAFLHDLNLVHTDLKPENILLCDNAYQTFTYNRRIPSSAAGVNRQATQRKVLLDTEIRLIDFGSATFNDEYHSSVVSTRHYRAPEIILGLGWSFPCDIWSIGCILVEFFTGDALFQTHDNLEHLAMMENVCDNRIDQHLVQMVNKQSSRNSSNSPAKYVALHPTAHQPINHHDRYFKRLKLDYPASETTRASRRFVRNMKRLSDIIPSTSPFLRLFLDLLQKIFVYDPQRRITARQALAHPWFQEAAIPDDGTEAIKIRLERCE

SEQ ID NO: 17937 - DNA, 4210 bp, Muscodor strobelii
  misc_feature: SGI EST ID NO. CUFF.42468.0
  misc_feature: Variant of the nucleotide sequence at SEQ ID NO 17935
atactctctcctggcaacagaagacagaaacgagtacaattgtacgcagtgtttgccttgcgaataagccgttcttgacgtaacggaacatacttagagacgaaacatcaatgttcgaggtctgttcagccataagaccagacacttacaacctggcagttcttacaatagcagccactgccctcccaaattcccttccagtcgggttgaggaagttacttaaccagcggccaaggtgcacctagctcaggcctttctgctgtaggctgtacttgcaacactggcgcagcagcgggtgagattcaagtactcgctaacaaggttgcctggtagtctctggcaacgcccacctgcactcttctgctccctcgtggctgcgcactttctaatctggcaataaggttccctcttcccttgggtacagtaccgcccagtggctagcaaggttcacgtcacgtccgccctagcactcagggtcttagatacctaagtggtgcatgtgccggcgctggctgtcgttcgcctaccgtacctagcttcctcaccacacacactgaagacacacacaccaacgctatcactgcatgcctgtcggcgatctacagcgcgcttgcacactggagcaggtcccaagaggctacccccagacgccagtcagcaggtgccccagcgccgtcgacagcgtcttttcgcagcgcagcgcagggaaacactgaagggaaagtggcacaggttggcggtccatccactcgtcaagtcggactctctcccctctcctctcctcgccctccgcacaacgtcgccgtccgtcgacaaatctccccccagcccacgacacgacaggatgtccacgccgacgactgccacggccccattgcctccgcactatcgtcaccatcatcaccctgctgcccatcaccatcactacccgtcctatccgaccctgcctcccaccggtgccgcctaccgcagcgccgcgagtgctgcaaaccctatcctccccgccccgtcgtctgcctccacggcgtcgacagcgcccgtctccagtcgtccgccccagccgtcacagcaaccacagcaaccacagcactaccagccggcctaccacgccaatcctgcgtaccctgcacacgacgcctcccaccctgccgtctatgcaaatggagtaggtccgtctgtcgccgctgccagacacacctcgacgagaacgcattcgacgcccaggtcggagcccagctacatgcctccctcgtccaccacgacggccacgacggccacgacggcccacacatacgccgacatgcacgcacgcaagcggcggaggtccaaggagcccgattggaagacgttctacaagaacggcctgcccaaggagatcatcgtcattgacgacacccccgagcctgacgacaacaggtccgccgccgcctcctcacggccctacgcagagagcactgtgaatggctccgtcactgaccacggtgcccggcatgtggcgaagaagcggaaaaaggacgacagcgtgaaacaggagttgccacacgacccaacaagaacgactcgctcgtaccatcagccctctagtggctcagcttccaccgaccgtaccacctcagcctacaacaccaccgcacccacctctctctcctccaatggccagtatgaatatgagccacagcaacccggccagaagcggaaacgcaccacccgccaacaggctgtccaggatgcgaagcgacgcgaggtcgaggtcctgaccgacggctttctcgagtaccaaccgcccaagaagccgatcaagaagtcgggagaagtacacgtccgcctcatcaacgaacgccctcaccagagtagtgtcaaggtcgacgacgatgacgggcattacattgtggtacctgacgccgacctcacacaagactatacaatcgccaaactcctgggtcaaggtacatttggcaaggtcgtccaggcccgcgacaggaagcgaaacaagctcgtagccatcaagatcatccgggcagtgcagaagtaccgcgatgccagtcggattgagttgagagtgcttgagacgctcaagatgaacgatccagataaccgaaatcgttgcattcatctgcgagactgcttcgactaccgtggccacatctgcattgtcatggatctcctaggctcaagcgtcttcgacttcctcaagagcaacaactttgttcccttccccaacagccagatccagagctttgctcgtcagctgctgaccagcgtcgctttccttcatgacttgaacttagtccacacggacctcaagcctgaaaatattctcctttgtgataatgcttaccagacatttacttacaatcgacgtataccatcctcggctgctggagtcaaccgacaagctacacaacgcaaggtcctcctcgacaccgaaattaggctcatagactttgggtctgctacattcaacgacgaatatcactcgtctgtcgtctcgactcgacactatcgagcccccgagatcatactgggtctcggctggtcttttccttgcgatatctggagtataggttgtattcttgtcgagttcttcactggagatgcactctttcagactcacgacaacctcgagcacttggctatgatggaaaatgtctgtgacaacaggatcgatcagcatctcgtgcaaatggtcaacaaacaatcatcgcgtaacagcagcaactcaccagccaaatactttaaacgtctcaaattggactatcccgcaagcgagactacgagggcttcgagacggttcgttaggaacatgaaacgattaagtgacattatcccatctacaagcccatttcttcggctattcttggatctcttacaaaagatattcgtctacgaccctcagcgacgtatcactgctcgccaagcgctggcgcatccttggttccaggaagccgccataccagacgacggaaccgaggccatcaaaattcggctggaacgattgagggaacaagactaccacatatcgcgtgtaccggtggctgcgtgaccggggcatgttgagttttgtcacgatctatatttcgttaatggacgagttgccgcaacagaatgccggcttgagggcactatgaaatggacaataaaggtccataatgatgcatatgttgcagttatgaatctccttcgaaaggtgcatggaaaggcgtttgagcgaagcattgacggtcgtcaacaaggccggtccacgacgttacataagagattggtcagacggacctgtatgatgccagacgaccgacgtgccgcgtcttctcaatatattccaatggtttatacccaaaagcgataccagtaggattaatagctcattcccggcttgaatacctcccattctgtagtgctcgacaaatgacatgtgacattccttttatcgctacaagtggcaagtggtgggaagccaacctgaacagctatggaattctcgttgtattggtgagccctccatttccctccacatctcacgatgacatgtatcttaggtatgtcagagaattcgatcgcatccgcaactcgctactctccatgctcgacttgtctggagcaacgattcgagaacaatagagctgtttcttcgacacatcggtcatacgagaacatgatgtgaaaacaaaggggaagcggaaaattcgaacaaagccaacgagtgctttggcaggacggtccttgtcttcatgcaacagggatcctggaatgataaatgtaagacaagtaccttggtcgctatgttgctctcgactatataccaccagtttgacacatacatacgcggacaatatacgtgagacttgtttagtcactgtgttagtgaacttcagttccctcgtgataccctttttacaaacgtgaaacagctgtcgagtattacacaaaaacgataaaccattgattcagacgttttacttaccctatgagtattggactccgcgatgtgtcggatgaccatgtcagtcgactgtgcaaactactcgcacggcgaccagaatatggcatcgcgattccgtcgggacgatggctacgaagacaggaggaaaagaggaggctgcttccaaaggaactgcttcgcccgaccaaccccttgaaaagattggctatgatacttgctgatcgatacgactccgaacacgctgatccccaggcggtgctttgctcggtg

SEQ ID NO: 17938 - DNA, 2199 bp, Muscodor strobelii
  misc_feature: SGI cDNA ID NO. 566003
  misc_feature: Encodes the peptide sequence at SEQ ID NO 17939
atgtccacgccgacgactgccacggccccattgcctccgcactatcgtcaccatcatcaccctgctgcccatcaccatcactacccgtcctatccgaccctgcctcccaccggtgccgcctaccgcagcgccgcgagtgctgcaaaccctatcctccccgccccgtcgtctgcctccacggcgtcgacagcgcccgtctccagtcgtccgccccagccgtcacagcaaccacagcaaccacagcactaccagccggcctaccacgccaatcctgcgtaccctgcacacgacgcctcccaccctgccgtctatgcaaatggagtaggtccgtctgtcgccgctgccagacacacctcgacgagaacgcattcgacgcccaggtcggagcccagctacatgcctccctcgtccaccacgacggccacgacggccacgacggcccacacatacgccgacatgcacgcacgcaagcggcggaggtccaaggagcccgattggaagacgttctacaagaacggcctgcccaaggagatcatcgtcattgacgacacccccgagcctgacgacaacaggtccgccgccgcctcctcacggccctacgcagagagcactgtgaatggctccgtcactgaccacggtgcccggcatgtggcgaagaagcggaaaaaggacgacagcgtgaaacaggagttgccacacgacccaacaagaacgactcgctcgtaccatcagccctctagtggctcagcttccaccgaccgtaccacctcagcctacaacaccaccgcacccacctctctctcctccaatggccagtatgaatatgagccacagcaacccggccagaagcggaaacgcaccacccgccaacaggctgtccaggatgcgaagcgacgcgaggtcgaggtcctgaccgacggctttctcgagtaccaaccgcccaagaagccgatcaagaagtcgggagaagtacacgtccgcctcatcaacgaacgccctcaccagagtagtgtcaaggtcgacgacgatgacgggcattacattgtggtacctgacgccgacctcacacaagactatacaatcgccaaactcctgggtcaaggtacatttggcaaggtcgtccaggcccgcgacaggaagcgaaacaagctcgtagccatcaagatcatccgggcagtgcagaagtaccgcgatgccagtcggattgagttgagagtgcttgagacgctcaagatgaacgatccagataaccgaaatcgttgcattcatctgcgagactgcttcgactaccgtggccacatctgcattgtcatggatctcctaggctcaagcgtcttcgacttcctcaagagcaacaactttgttcccttccccaacagccagatccagagctttgctcgtcagctgctgaccagcgtcgctttccttcatgacttgaacttagtccacacggacctcaagcctgaaaatattctcctttgtgataatgcttaccagacatttacttacaatcgacgtataccatcctcggctgctggagtcaaccgacaagctacacaacgcaaggtcctcctcgacaccgaaattaggctcatagactttgggtctgctacattcaacgacgaatatcactcgtctgtcgtctcgactcgacactatcgagcccccgagatcatactgggtctcggctggtcttttccttgcgatatctggagtataggttgtattcttgtcgagttcttcactggagatgcactctttcagactcacgacaacctcgagcacttggctatgatggaaaatgtctgtgacaacaggatcgatcagcatctcgtgcaaatggtcaacaaacaatcatcgcgtaacagcagcaactcaccagccaaatactttaaacgtctcaaattggactatcccgcaagcgagactacgagggcttcgagacggttcgttaggaacatgaaacgattaagtgacattatcccatctacaagcccatttcttcggctattcttggatctcttacaaaagatattcgtctacgaccctcagcgacgtatcactgctcgccaagcgctggcgcatccttggttccaggaagccgccataccagacgacggaaccgaggccatcaaaattcggctggaacgattgagggaacaagactaccacatatcgcgtgtaccggtggctgcgtga

SEQ ID NO: 17939 - protein, 732 aa, Muscodor strobelii
  misc_feature: SGI Peptide ID NO. 566003
  misc_feature (359)..(698): Pfam Id: PF00069 Pfam Desc: Protein kinase domain
  misc_feature (359)..(391): Pfam Id: PF07714 Pfam Desc: Protein tyrosine kinase
  misc_feature (82)..(712): NCBI GI: 212533759 Blast Desc: protein kinase (Lkh1), [Penicillium marneffei ATCC 18224] gi|210072400|gb|EEA26489.1| protein kinase (Lkh1), [Penicillium marneffei ATCC 18224]
  misc_feature (63)..(713): NCBI GI: 242778807 Blast Desc: protein kinase (Lkh1), [Talaromyces stipitatus ATCC 10500] gi|218722932|gb|EED22350.1| protein kinase (Lkh1), [Talaromyces stipitatus ATCC 10500]
  misc_feature (1)..(713): NCBI GI: 121700655 Blast Desc: protein kinase (Lkh1), [Aspergillus clavatus NRRL 1] gi|119396735|gb|EAW07166.1| protein kinase (Lkh1), [Aspergillus clavatus NRRL 1]
  misc_feature (59)..(713): NCBI GI: 238483867 Blast Desc: protein kinase (Lkh1), [Aspergillus flavus NRRL3357] gi|220701222|gb|EED57560.1| protein kinase (Lkh1), [Aspergillus flavus NRRL3357]
  misc_feature (81)..(713): NCBI GI: 259488719 Blast Desc: TPA: dual specificity protein kinase (Eurofung) [Aspergillus nidulans FGSC A4]
  misc_feature (159)..(717): NCBI GI: 189208987 Blast Desc: dual specificity tyrosine-phosphorylation-regulated kinase 3 [Pyrenophora tritici-repentis Pt-1C-BFP] gi|187976919|gb|EDU43545.1| dual specificity kinase 3 Pt-1C-BFP]
  misc_feature (132)..(714): NCBI GI: 115397407 Blast Desc: protein kinase lkh1 [Aspergillus terreus NIH2624] gi|114192486|gb|EAU34186.1| protein kinase lkh1 [Aspergillus terreus NIH2624]
  misc_feature (1)..(713): NCBI GI: 145230255 Blast Desc: An01g10170 [Aspergillus niger] gi|134055553|emb|CAK37199.1| protein product [Aspergillus niger]
  misc_feature (59)..(713): NCBI GI: 255957109 Blast Desc: Pc21g23400 [Penicillium chrysogenum Wisconsin 54-1255] gi|211591018|emb|CAP97237.1| Pc21g23400 [Penicillium chrysogenum Wisconsin 54-1255]
  misc_feature (1)..(721): NCBI GI: 238838901 Blast Desc: dual specificity protein kinase lkh1 [Microsporum canis CBS 113480]
  misc_feature (310)..(700): SWISSPROT Homolog: EC 2.7.12.1 Dual-specificity kinase
MSTPTTATAPLPPHYRHHHHPAAHHHHYPSYPTLPPTGAAYRSAASAANPILPAPSSASTASTAPVSSRPPQPSQQPQQPQHYQPAYHANPAYPAHDASHPAVYANGVGPSVAAARHTSTRTHSTPRSEPSYMPPSSTTTATTATTAHTYADMHARKRRRSKEPDWKTFYKNGLPKEIIVIDDTPEPDDNRSAAASSRPYAESTVNGSVTDHGARHVAKKRKKDDSVKQELPHDPTRTTRSYHQPSSGSASTDRTTSAYNTTAPTSLSSNGQYEYEPQQPGQKRKRTTRQQAVQDAKRREVEVLTDGFLEYQPPKKPIKKSGEVHVRLINERPHQSSVKVDDDDGHYIVVPDADLTQDYTIAKLLGQGTFGKVVQARDRKRNKLVAIKIIRAVQKYRDASRIELRVLETLKMNDPDNRNRCIHLRDCFDYRGHICIVMDLLGSSVFDFLKSNNFVPFPNSQIQSFARQLLTSVAFLHDLNLVHTDLKPENILLCDNAYQTFTYNRRIPSSAAGVNRQATQRKVLLDTEIRLIDFGSATFNDEYHSSVVSTRHYRAPEIILGLGWSFPCDIWSIGCILVEFFTGDALFQTHDNLEHLAMMENVCDNRIDQHLVQMVNKQSSRNSSNSPAKYFKRLKLDYPASETTRASRRFVRNMKRLSDIIPSTSPFLRLFLDLLQKIFVYDPQRRITARQALAHPWFQEAAIPDDGTEAIKIRLERLREQDYHISRVPVAA

SEQ ID NO: 17940 - DNA, 4210 bp, Muscodor strobelii; identical to SEQ ID NO: 17937
  misc_feature: SGI EST ID NO. CUFF.42468.0
  misc_feature: Variant of the nucleotide sequence at SEQ ID NO 17938

SEQ ID NO: 17941 - DNA, 2250 bp, Muscodor strobelii
  misc_feature: SGI cDNA ID NO. 566004
  misc_feature: Encodes the peptide sequence at SEQ ID NO 17942
atgtccacgccgacgactgccacggccccattgcctccgcactatcgtcaccatcatcaccctgctgcccatcaccatcactacccgtcctatccgaccctgcctcccaccggtgccgcctaccgcagcgccgcgagtgctgcaaaccctatcctccccgccccgtcgtctgcctccacggcgtcgacagcgcccgtctccagtcgtccgccccagccgtcacagcaaccacagcaaccacagcactaccagccggcctaccacgccaatcctgcgtaccctgcacacgacgcctcccaccctgccgtctatgcaaatggagtaggtccgtctgtcgccgctgccagacacacctcgacgagaacgcattcgacgcccaggtcggagcccagctacatgcctccctcgtccaccacgacggccacgacggccacgacggcccacacatacgccgacatgcacgcacgcaagcggcggaggtccaaggagcccgattggaagacgttctacaagaacggcctgcccaaggagatcatcgtcattgacgacacccccgagcctgacgacaacaggtccgccgccgcctcctcacggccctacgcagagagcactgtgaatggctccgtcactgaccacggtgcccggcatgtggcgaagaagcggaaaaaggacgacagcgtgaaacaggagttgccacacgacccaacaagaacgactcgctcgtaccatcagccctctagtggctcagcttccaccgaccgtaccacctcagcctacaacaccaccgcacccacctctctctcctccaatggccagtatgaatatgagccacagcaacccggccagaagcggaaacgcaccacccgccaacaggctgtccaggatgcgaagcgacgcgaggtcgaggtcctgaccgacggctttctcgagtaccaaccgcccaagaagccgatcaagaagtcgggagaagtacacgtccgcctcatcaacgaacgccctcaccagagtagtgtcaaggtcgacgacgatgacgggcattacattgtggtacctgacgccgacctcacacaagactatacaatcgccaaactcctgggtcaaggtacatttggcaaggtcgtccaggcccgcgacaggaagcgaaacaagctcgtagccatcaagatcatccgggcagtgcagaagtaccgcgatgccagtcggattgagttgagagtgcttgagacgctcaagatgaacgatccagataaccgaaatcgttgcattcatctgcgagactgcttcgactaccgtggccacatctgcattgtcatggatctcctaggctcaagcgtcttcgacttcctcaagagcaacaactttgttcccttccccaacagccagatccagagctttgctcgtcagctgctgaccagcgtcgctttccttcatgacttgaacttagtccacacggacctcaagcctgaaaatattctcctttgtgataatgcttaccagacatttacttacaatcgacgtataccatcctcggctgctggagtcaaccgacaagctacacaacgcaaggtcctcctcgacaccgaaattaggctcatagactttgggtctgctacattcaacgacgaatatcactcgtctgtcgtctcgactcgacactatcgagcccccgagatcatactgggtctcggctggtcttttccttgcgatatctggagtataggttgtattcttgtcgagttcttcactggagatgcactctttcagactcacgacaacctcgagcacttggctatgatggaaaatgtctgtgacaacaggatcgatcagcatctcgtgcaaatggtcaacaaacaatcatcgcgtaacagcagcaactcaccagccaagtatgttgcactccatccaaccgcgcaccagcctattaaccaccacgatagatactttaaacgtctcaaattggactatcccgcaagcgagactacgagggcttcgagacggttcgttaggaacatgaaacgattaagtgacattatcccatctacaagcccatttcttcggctattcttggatctcttacaaaagatattcgtctacgaccctcagcgacgtatcactgctcgccaagcgctggcgcatccttggttccaggaagccgccataccagacgacggaaccgaggccatcaaaattcggctggaacgattgagggaacaagactaccacatatcgcgtgtaccggtggctgcgtga

SEQ ID NO: 17942 - protein, 749 aa, Muscodor strobelii
  misc_feature: SGI Peptide ID NO. 566004
  misc_feature (359)..(715): Pfam Id: PF00069 Pfam Desc: Protein kinase domain
  misc_feature (359)..(602): Pfam Id: PF00069 Pfam Desc: Protein kinase domain
  misc_feature (667)..(715): Pfam Id: PF00069 Pfam Desc: Protein kinase domain
  misc_feature (359)..(391): Pfam Id: PF07714 Pfam Desc: Protein tyrosine kinase
  misc_feature (23)..(738): NCBI GI: 46124519 Blast Desc: FG06637.1 [Gibberella zeae PH-1]
  misc_feature (1)..(738): NCBI GI: 256733309 Blast Desc: [Nectria haematococca mpVI 77-13-4]
  misc_feature (156)..(741): NCBI GI: 145601943 Blast Desc: MGG_05312 [Magnaporthe grisea 70-15] gi|145010403|gb|EDJ95059.1| MGG_05312 [Magnaporthe grisea 70-15]
  misc_feature (1)..(734): NCBI GI: 156037626 Blast Desc: SS1G_12527 [Sclerotinia sclerotiorum 1980] gi|154697935|gb|EDN97673.1| SS1G_12527 [Sclerotinia sclerotiorum 1980]
  misc_feature (156)..(743): NCBI GI: 116208196 Blast Desc: CHGG_03391 [Chaetomium globosum CBS 148.51] gi|88183988|gb|EAQ91456.1| CHGG_03391 [Chaetomium globosum CBS 148.51]
  misc_feature (154)..(734): NCBI GI: 154316297 Blast Desc: BC1G_03734 [Botryotinia fuckeliana B05.10] gi|150846520|gb|EDN21713.1| BC1G_03734 [Botryotinia fuckeliana B05.10]
  misc_feature (59)..(730): NCBI GI: 119494365 Blast Desc: protein kinase (Lkh1), [Neosartorya fischeri NRRL 181] gi|119412240|gb|EAW22181.1| protein kinase (Lkh1), [Neosartorya fischeri NRRL 181]
  misc_feature (1)..(730): NCBI GI: 70996582 Blast Desc: protein kinase (Lkh1) [Aspergillus fumigatus Af293] gi|66850681|gb|EAL91008.1| protein kinase (Lkh1), [Aspergillus fumigatus Af293] gi|159131782|gb|EDP56895.1| protein kinase
  misc_feature (82)..(730): NCBI GI: 212533757 Blast Desc: protein kinase (Lkh1), [Penicillium marneffei ATCC 18224] gi|210072399|gb|EEA26488.1| protein kinase (Lkh1), [Penicillium marneffei ATCC 18224]
  misc_feature (82)..(729): NCBI GI: 212533759 Blast Desc: protein kinase (Lkh1), [Penicillium marneffei ATCC 18224] gi|210072400|gb|EEA26489.1| protein kinase (Lkh1), [Penicillium marneffei ATCC 18224]
  misc_feature (310)..(717): SWISSPROT Homolog: EC 2.7.12.1 Dual-specificity kinase
MSTPTTATAPLPPHYRHHHHPAAHHHHYPSYPTLPPTGAAYRSAASAANPILPAPSSASTASTAPVSSRPPQPSQQPQQPQHYQPAYHANPAYPAHDASHPAVYANGVGPSVAAARHTSTRTHSTPRSEPSYMPPSSTTTATTATTAHTYADMHARKRRRSKEPDWKTFYKNGLPKEIIVIDDTPEPDDNRSAAASSRPYAESTVNGSVTDHGARHVAKKRKKDDSVKQELPHDPTRTTRSYHQPSSGSASTDRTTSAYNTTAPTSLSSNGQYEYEPQQPGQKRKRTTRQQAVQDAKRREVEVLTDGFLEYQPPKKPIKKSGEVHVRLINERPHQSSVKVDDDDGHYIVVPDADLTQDYTIAKLLGQGTFGKVVQARDRKRNKLVAIKIIRAVQKYRDASRIELRVLETLKMNDPDNRNRCIHLRDCFDYRGHICIVMDLLGSSVFDFLKSNNFVPFPNSQIQSFARQLLTSVAFLHDLNLVHTDLKPENILLCDNAYQTFTYNRRIPSSAAGVNRQATQRKVLLDTEIRLIDFGSATFNDEYHSSVVSTRHYRAPEIILGLGWSFPCDIWSIGCILVEFFTGDALFQTHDNLEHLAMMENVCDNRIDQHLVQMVNKQSSRNSSNSPAKYVALHPTAHQPINHHDRYFKRLKLDYPASETTRASRRFVRNMKRLSDIIPSTSPFLRLFLDLLQKIFVYDPQRRITARQALAHPWFQEAAIPDDGTEAIKIRLERLREQDYHISRVPVAA

SEQ ID NO: 17943 - DNA, 4210 bp, Muscodor strobelii; identical to SEQ ID NO: 17937
  misc_feature: SGI EST ID NO. CUFF.42468.0
  misc_feature: Variant of the nucleotide sequence at SEQ ID NO 17941

SEQ ID NO: 17944 - DNA, 1890 bp, Muscodor strobelii
  misc_feature: SGI cDNA ID NO. 566005
  misc_feature: Reduced expression when VOC is produced
  misc_feature: Encodes the peptide sequence at SEQ ID NO 17945
atgatacttgctgatcgatacgactccgaacacgctgatccccaggcggtgctttgctcggtgcaccaggagcttaatccattcttgatcagaaggttgttccttactctttcgtatgaggttacggttcatacggatacgctgagaagttggcgggggagagttgagatacccgaagtcgcagctttcgtgggcagagtggatagcatcacggcgttgtggacgatgccggaactcttctacaagatctatggtgacacgccattcgaggggaagcatatatttgtcaggagtcgctgtgaggcttgtatcctcgcggccatcggggccaatgggcagtgtctcgccgacttgagagctgttctgatcgatcgtcaagaacgacggatgagagatggacggaaaccaaagacgccgaggttcacgaggtttgttgaagcttggatcgatcaactcaagaaaaagggcgaggagaagagagatcgtgcagcagagtgtagggcgaagagcgaggagatccttcacactctccgacagatccgacccgaggtcatgcagtggaggattgagcaaaaggcgattcacaaggagaagagggcttcgaggcaaccgatctatcaggaattgcagatctcagctacaagtgaaaaactagcaccgctgtcaaacactcacagccataagcgacgcacgagaaatgggattcctgttgctctcacggatcttgagcacgcggctggtcaacgacaagctgcgatggcgggtgcgagacggcagtcgaaaaacatatatcggcctgatagtctttgtgccttctccgaagttggacagaccaaccccttcatgccgctacctaatggacctcgccccagcaatcccgagccgaggatgagcggtgcgaccagcagtcatgaatcgcctacaatatctttcattcgtcagttcgagcaagagatttctctccacgaggactccgatccgtatgacgatggcacgacgcacgtcatggaggagatcgacgaagacgaagtcgaagcgagccgcgcgaaagtcgaaaattggtacgcggacagactcttcgaaggaaacgacaaagaagcaatcagtccaacagatcataaatcggtgatctccatggtgcacccagctttccgacctgatcaatctactgtcgctccctctgcgatcccaccacctctgaggctttcgaaagaaacaccgcaccacgcggctcccagcgtatggacagacatcaccgtcaagtctcccactaaccccagccacgaatcccagccgcctgttccaagggtcccatcagcacacaaagagaaagaagcgcctcgcaaagacagccgggcctcagagcgagaacaaagcccgaaagacaccaagcgcctcaactggcccgcaccacccacgggaccgcctcccgcacctcagactcaacctcagcatcaacttccgcaggcacaaccaagaacaaagccaaatcacaggagatacctcttccccgagtcttgcgccgacagtacactatcgatacaccagcggaactacataaggcagaagaaacgcatgcgagattatccgccggagctgaacccctttacgaggtcgggcagtagagatgatagtgagagtaaattgtctgggagtagggcgtcggggaaggtaccgagtttgagtgggagtcatggggataccgtttcgtctatacgcgatggtgggaggacaccgacggggtatcagtactcggaggcgagcttgataaatcgatatgcggaggagagtgagcagtgggatgatattgttcctgatgagagtgcgagtaatgttcattggagacggccgagtgggcagacggatgggatggggtggcctgggaagtag

SEQ ID NO: 17945 - protein, 629 aa, Muscodor strobelii
  misc_feature: SGI Peptide ID NO. 566005
  misc_feature (3)..(217): NCBI GI: 256733308 Blast Desc: NECHADRAFT_79466 [Nectria haematococca mpVI 77-13-4]
  misc_feature (16)..(153): NCBI GI: 46124521 Blast Desc: FG06638.1 [Gibberella zeae PH-1]
  misc_feature (6)..(150): NCBI GI: 261354096 Blast Desc: conserved [Verticillium albo-atrum VaMs.102]
  misc_feature (12)..(157): NCBI GI: 156037630 Blast Desc: SS1G_12529 [Sclerotinia sclerotiorum 1980] gi|154697937|gb|EDN97675.1| SS1G_12529 [Sclerotinia sclerotiorum 1980]
  misc_feature (12)..(202): NCBI GI: 154316293 Blast Desc: BC1G_03732 [Botryotinia fuckeliana B05.10] gi|150846518|gb|EDN21711.1| BC1G_03732 [Botryotinia fuckeliana B05.10]
  misc_feature (15)..(149): NCBI GI: 145230225 Blast Desc: An01g10020 [Aspergillus niger] gi|134055538|emb|CAK37184.1| [Aspergillus niger]
  misc_feature (17)..(146): NCBI GI: 115397391 Blast Desc: [Aspergillus terreus NIH2624] gi|114192478|gb|EAU34178.1| [Aspergillus terreus NIH2624]
  misc_feature (15)..(181): NCBI GI: 240111635 Blast Desc: CPC735_000390 [Coccidioides posadasii C735 delta SOWgp]
  misc_feature (19)..(181): NCBI GI: 119185877 Blast Desc: [Coccidioides immitis RS]
  misc_feature (14)..(137): NCBI GI: 145601941 Blast Desc: [Magnaporthe grisea 70-15] gi|145010402|gb|EDJ95058.1| [Magnaporthe grisea 70-15]
  misc_feature: Useful for introducing or modulating the production of volatile compounds
MILADRYDSEHADPQAVLCSVHQELNPFLIRRLFLTLSYEVTVHTDTLRSWRGRVEIPEVAAFVGRVDSITALWTMPELFYKIYGDTPFEGKHIFVRSRCEACILAAIGANGQCLADLRAVLIDRQERRMRDGRKPKTPRFTRFVEAWIDQLKKKGEEKRDRAAECRAKSEEILHTLRQIRPEVMQWRIEQKAIHKEKRASRQPIYQELQISATSEKLAPLSNTHSHKRRTRNGIPVALTDLEHAAGQRQAAMAGARRQSKNIYRPDSLCAFSEVGQTNPFMPLPNGPRPSNPEPRMSGATSSHESPTISFIRQFEQEISLHEDSDPYDDGTTHVMEEIDEDEVEASRAKVENWYADRLFEGNDKEAISPTDHKSVISMVHPAFRPDQSTVAPSAIPPPLRLSKETPHHAAPSVWTDITVKSPTNPSHESQPPVPRVPSAHKEKEAPRKDSRASEREQSPKDTKRLNWPAPPTGPPPAPQTQPQHQLPQAQPRTKPNHRRYLFPESCADSTLSIHQRNYIRQKKRMRDYPPELNPFTRSGSRDDSESKLSGSRASGKVPSLSGSHGDTVSSIRDGGRTPTGYQYSEASLINRYAEESEQWDDIVPDESASNVHWRRPSGQTDGMGWPGK

SEQ ID NO: 17946 - DNA, 2033 bp, Muscodor strobelii
  misc_feature: SGI EST ID NO. CUFF.42539.1
  misc_feature: Variant of the nucleotide sequence at SEQ ID NO 17944
ttgagatacccgaagtcgcagctttcgtgggcagagtggatagcatcacggcgttgtggacgatgccggaactcttctacaagatctatggtgacacgccattcgaggggaagcatatatttgtcaggagtcgctgtgaggcttgtatcctcgcggccatcggggccaatgggcagtgtctcgccgacttgagagctgttctgatcgatcgtcaagaacgacggatgagagatggacggaaaccaaagacgccgaggttcacgaggtttgttgaagcttggatcgatcaactcaagaaaaagggcgaggagaagagagatcgtgcagcagagtgtagggcgaagagcgaggagatccttcacactctccgacagatccgacccgaggtcatgcagtggaggattgagcaaaaggcgattcacaaggagaagagggcttcgaggcaaccgatctatcaggaattgcagatctcagctacaagtgaaaaactagcaccgctgtcaaacactcacagccataagcgacgcacgagaaatgggattcctgttgctctcacggatcttgagcacgcggctggtcaacgacaagctgcgatggcgggtgcgagacggcagtcgaaaaacatatatcggcctgatagtctttgtgccttctccgaagttggacagaccaaccccttcatgccgctacctaatggacctcgccccagcaatcccgagccgaggatgagcggtgcgaccagcagtcatgaatcgcctacaatatctttcattcgtcagttcgagcaagagatttctctccacgaggactccgatccgtatgacgatggcacgacgcacgtcatggaggagatcgacgaagacgaagtcgaagcgagccgcgcgaaagtcgaaaattggtacgcggacagactcttcgaaggaaacgacaaagaagcaatcagtccaacagatcataaatcggtgatctccatggtgcacccagctttccgacctgatcaatctactgtcgctccctctgcgatcccaccacctctgaggctttcgaaagaaacaccgcaccacgcggctcccagcgtatggacagacatcaccgtcaagtctcccactaaccccagccacgaatcccagccgcctgttccaagggtcccatcagcacacaaagagaaagaagcgcctcgcaaagacagccgggcctcagagcgagaacaaagcccgaaagacaccaagcgcctcaactggcccgcaccacccacgggaccgcctcccgcacctcagactcaacctcagcatcaacttccgcaggcacaaccaagaacaaagccaaatcacaggagatacctcttccccgagtcttgcgccgacagtacactatcgatacaccagcggaactacataaggcagaagaaacgcatgcgagattatccgccggagctgaacccctttacgaggtcgggcagtagagatgatagtgagagtaaattgtctgggagtagggcgtcggggaaggtaccgagtttgagtgggagtcatggggataccgtttcgtctatacgcgatggtgggaggacaccgacggggtatcagtactcggaggcgagcttgataaatcgatatgcggaggagagtgagcagtgggatgatattgttcctgatgagagtgcgagtaatgttcattggagacggccgagtgggcagacggatgggatggggtggcctgggaagtaggttaggagtcagagaatgcgatgttcatcttgtctaatgctgatgtggctctctattggattcaggaggtggtcagattatgggatatgctgtttgtgaagatgatatgatcaagtgatattaataaggtcatatgcaaagaaatcccgtacgatacaggtatggaacttgtatgtctataagtatcgagaataaacaggcttttcatcaagcgaatggttgaatcaaaatagtcgctttgtgaatactttgagatggtctatacctacatgtagagatcttgacagcacggtcactacggtaggc

SEQ ID NO: 17947 - DNA, 1953 bp, Muscodor strobelii
  misc_feature: SGI cDNA ID NO. 566006
  misc_feature: Reduced expression when VOC is produced
  misc_feature: Encodes the peptide sequence at SEQ ID NO 17948
atgcctccgtcctcgagacgatcacagaaggctcgccggccccgagacagcagccccagtccagctgttgccgagccgtcctcgcccacccggcctgccaagcgcagaaagaaggccggtgaaccgccctccgaacccattgatgaagaaggctctagcatgaccatagagccccccgccgatgtcgacgacgacccgagccggattattaatcaggttactcgacgcctacgacatcaagtcaccaatgcatctgtgaagtacgcgaacgagggcctcgagtccgtccccaacgtagaggcctttgcccagcttgccggcaacgattggacctactacatcaagaccttccctatcaacctcggacgaatcacccgcgaggacgtcgtcggcgagcaggatcccgaattcatccatgtcgatctcggcccctccaagcacttctcgcgccagatcgcctcgatcgactacaaccacgacaacgcaacctggttcatcacgccccgcggccgcaacagcgtcaaggtcaacagcgaccccatcaagagacccggccctccccacgctctgcgtagcggagaagtcatcgacgtcagcgggctggagatgatgtttgttctgccgcccgatgtctcgcctctcaacattcaccccagatacttagagacagccgaagcatcggacgagctagtccctccctcgagcagctccagaaccgctctcccgcctctaccttcctcagaagcctccatctcacactccgcacgccgcccaacatcgtctcgcgacttgcccattgcacccgcaccgcccgattacaagcgtcctggcacgccgccctcgaccaagagccgccccgcaaccgcgcaggctaagacgccagccacggataacacccagcgcaacgcgtccatcaatctcagcaaggacgagaataggcacatcaagccgcactatagctatgcacagatgatcacgcaggccattatcagtgtaccagagaagaagctgagtcttgcgaatatctacgccttcatcacggaacactacgcatactacagacatcagcctgctgccggatggcagaattccattaggcataacctgtccttgaataagtcattcaccaaggaccctcgcagtaccgacgagcccggcaaaggaatgaagtggaagattgtgcccgaagcgcaagcagaaatgattgccaattgttggaaagggggaagaggcggccacaggggctcttcggcgccgtcctcgcccagccagccaacatacatcacacacggcccaggcgatatggcgagcaaggaacctgctaaatcgcgcaccaagcacgaacccgccgcttcgccgacgacatcgccccctccgagggcgtcccagttccagtcgacagtgactcctattcgacgatttccatctacacgcctttatgacgacagcccacttccgcgcactaatgcccagcgcctgcaggcttctagttccttcgcggaagacccgcaatctcctgtggccctctcgtcctcgtatatccaggacgaaggagcatctttcgtgacaccagcgccccaacgtctcaatgtcagacttgcaccccccagtactgcgcagaagcctagccagcacatgcctactagctcgccggctcccttctggcaatatctggatatgggcgatacaccctacaagcccccggaggacataagtccgctcaaacagccgatcaagcgccctgcgcctgtcaacagcagcagtccacctccgcctgctagagatgcccgctcgcccctcggcagccctatacgtaagaaaaggaatattcaagacggggcgaaagtcagcgagaagatcgaagaagaggacgaagagtccggagggttcgatctatcgaagggtttccaaagtatcgagtcatatcaccgggctcccacgcgtgctgtctag

SEQ ID NO: 17948 - protein, 650 aa, Muscodor strobelii
  misc_feature: SGI Peptide ID NO. 566006
  misc_feature (316)..(411): Pfam Id: PF00250 Pfam Desc: Fork head domain
  misc_feature (316)..(402): Pfam Id: PF00250 Pfam Desc: Fork head domain
  misc_feature (1)..(643): NCBI GI: 46122021 Blast Desc: FG05388.1 [Gibberella zeae PH-1]
  misc_feature (1)..(643): NCBI GI: 256729768 Blast Desc: NECHADRAFT_105094 [Nectria haematococca mpVI 77-13-4]
  misc_feature (23)..(643): NCBI GI: 85082887 Blast Desc: NCU00019 [Neurospora crassa OR74A] gi|28918089|gb|EAA27770.1| NCU00019 [Neurospora crassa OR74A]
  misc_feature (98)..(575): NCBI GI: 116207426 Blast Desc: CHGG_03006 [Chaetomium globosum CBS 148.51] gi|88183603|gb|EAQ91071.1| CHGG_03006 [Chaetomium globosum CBS 148.51]
  misc_feature (1)..(643): NCBI GI: 37781371 Blast Desc: FKH1 [Acremonium chrysogenum]
  misc_feature (28)..(643): NCBI GI: 145608924 Blast Desc: MGG_06258 [Magnaporthe grisea 70-15] gi|145016346|gb|EDK00836.1| MGG_06258 [Magnaporthe grisea 70-15]
  misc_feature (7)..(552): NCBI GI: 171685966 Blast Desc: protein product [Podospora anserina] gi|170942944|emb|CAP68597.1| protein product [Podospora anserina]
  misc_feature (1)..(644): NCBI GI: 145233101 Blast Desc: An02g07900 [Aspergillus niger] gi|134056848|emb|CAK37753.1| protein product [Aspergillus niger]
  misc_feature (1)..(644): NCBI GI: 121705862 Blast Desc: forkhead transcription factor Fkh1/2, [Aspergillus clavatus NRRL 1] gi|119399340|gb|EAW09768.1| forkhead transcription factor Fkh1/2, [Aspergillus clavatus NRRL 1]
  misc_feature (1)..(644): NCBI GI: 255942243 Blast Desc: Pc18g00430 [Penicillium chrysogenum Wisconsin 54-1255] gi|211586623|emb|CAP94267.1| Pc18g00430 [Penicillium chrysogenum Wisconsin 54-1255]
  misc_feature: Useful for introducing or modulating the production of volatile compounds
MPPSSRRSQKARRPRDSSPSPAVAEPSSPTRPAKRRKKAGEPPSEPIDEEGSSMTIEPPADVDDDPSRIINQVTRRLRHQVTNASVKYANEGLESVPNVEAFAQLAGNDWTYYIKTFPINLGRITREDVVGEQDPEFIHVDLGPSKHFSRQIASIDYNHDNATWFITPRGRNSVKVNSDPIKRPGPPHALRSGEVIDVSGLEMMFVLPPDVSPLNIHPRYLETAEASDELVPPSSSSRTALPPLPSSEASISHSARRPTSSRDLPIAPAPPDYKRPGTPPSTKSRPATAQAKTPATDNTQRNASINLSKDENRHIKPHYSYAQMITQAIISVPEKKLSLANIYAFITEHYAYYRHQPAAGWQNSIRHNLSLNKSFTKDPRSTDEPGKGMKWKIVPEAQAEMIANCWKGGRGGHRGSSAPSSPSQPTYITHGPGDMASKEPAKSRTKHEPAASPTTSPPPRASQFQSTVTPIRRFPSTRLYDDSPLPRTNAQRLQASSSFAEDPQSPVALSSSYIQDEGASFVTPAPQRLNVRLAPPSTAQKPSQHMPTSSPAPFWQYLDMGDTPYKPPEDISPLKQPIKRPAPVNSSSPPPPARDARSPLGSPIRKKRNIQDGAKVSEKIEEEDEESGGFDLSKGFQSIESYHRAPTRAV

SEQ ID NO: 17949 - DNA, 5695 bp, Muscodor strobelii
  misc_feature: SGI EST ID NO. CUFF.42429.1
  misc_feature: Variant of the nucleotide sequence at SEQ ID NO 17947
gttgggtagtttgtagacgattcatactaggtcgtattcaacaaacacattgtctctcatgtgatagtgaaaacaatgttgctacctcaattggattaggaggtgcgtacaatgggtgcaatttgttgcctgggtgagttgcgccgttgccgggtttcgtcactttatatgaaaaagctcgggtgtaattttctgtgtctcttttttttttccactttacatcccaaaaggtagtccccacctcatcgcgtcgcgtgcggctacccaagtaaatcgtcttggcaagggaccttgatcaagccacttcttttgcggcggccgtcatcatcatcatcatcaccactcccagccatcatcgcaacaaggcatgctgcatggtgtttcgttaagtcattgtatcttttaagtagtatacaatcacttgaaacttgcagtaaactgctcgacatacaatacttcctgctcacgccttgcactttggccggggtactgttcgacatcacgtcccgcagacttgtcgcaacatcgccccgtcacccacttcaaagtcagcgtgtaaaccctattccctactgcgaaaaagcttcaccatccagcaaccttcaagcagtcattgttcgtccaatacatacatatacctacctctgtcaccatagaaacgatccataagacctcatatacacaccaatggtactgtgacctgcgcgcctgtccccccacatggccttcgcatgattcaactctactttcccgtcgccttttgtaccgtcgatatcgtcagccctgccgccggaccttctctcttacaacatgcctccgtcctcgagacgatcacagaaggctcgccggccccgagacagcagccccagtccagctgttgccgagccgtcctcgcccacccggcctgccaagcgcagaaagaaggccggtgaaccgccctccgaacccattgatgaagaaggctctagcatgaccatagagccccccgccgatgtcgacgacgacccgagccggattattaatcaggttactcgacgcctacgacatcaagtcaccaatgcatctgtgaagtacgcgaacgagggcctcgagtccgtccccaacgtagaggcctttgcccagcttgccggcaacgattggacctactacatcaagaccttccctatcaacctcggacgaatcacccgcgaggacgtcgtcggcgagcaggatcccgaattcatccatgtcgatctcggcccctccaagcacttctcgcgccagatcgcctcgatcgactacaaccacgacaacgcaacctggttcatcacgccccgcggccgcaacagcgtcaaggtcaacagcgaccccatcaagagacccggccctccccacgctctgcgtagcggagaagtcatcgacgtcagcgggctggagatgatgtttgttctgccgcccgatgtctcgcctctcaacattcaccccagatacttagagacagccgaagcatcggacgagctagtccctccctcgagcagctccagaaccgctctcccgcctctaccttcctcagaagcctccatctcacactccgcacgccgcccaacatcgtctcgcgacttgcccattgcacccgcaccgcccgattacaagcgtcctggcacgccgccctcgaccaagagccgccccgcaaccgcgcaggctaagacgccagccacggataacacccagcgcaacgcgtccatcaatctcagcaaggacgagaataggcacatcaagccgcactatagctatgcacagatgatcacgcaggccattatcagtgtaccagagaagaagctgagtcttgcgaatatctacgccttcatcacggaacactacgcatactacagacatcagcctgctgccggatggcagaattccattaggcataacctgtccttgaataagtcattcaccaaggaccctcgcagtaccgacgagcccggcaaaggaatgaagtggaagattgtgcccgaagcgcaagcagaaatgattgccaattgttggaaagggggaagaggcggccacaggggctcttcggcgccgtcctcgcccagccagccaacatacatcacacacggcccaggcgatatggcgagcaaggaacctgctaaatcgcgcaccaagcacgaacccgccgcttcgccgacgacatcgccccctccgagggcgtcccagttccagtcgacagtgactcctattcgacgatttccatctacacgcctttatgacgacagcccacttccgcgcactaatgcccagcgcctgcaggcttctagttccttcgcggaagacccgcaatctcctgtggccctctcgtcctcgtatatccaggacgaaggagcatctttcgtgacaccagcgccccaacgtctcaatgtcagacttgcaccccccagtactgcgcagaagcctagccagcacatgcctactagctcgccggctcccttctggcaatatctggatatgggcgatacaccctacaagcccccggaggacataagtccgctcaaacagccgatcaagcgccctgcgcctgtcaacagcagcagtccacctccgcctgctagagatgcccgctcgcccctcggcagccctatacgtaagaaaaggaatattcaagacggggcgaaagtcagcgagaagatcgaagaagaggacgaagagtccggagggttcgatctatcgaagtacgtttcatttctcagtagctttgtagtcatggtcgagagagtgctaatttcgtcataataggggtttccaaagtatcgagtcatatcaccgggctcccacgcgtgctgtctaggagacgccgccaaagtcggtcagcaaaataaatttcatgcgatgactatgaaaacgagtatttcgatagagacagccctgagagatcactagcaacttgcttgaaaccgtcgcataggaatccgacttccaagaagttgttgctagtgcactgtacgatgttgggtgtaggttatcaaatcaaaaaacaatgagtgtcacttctagccaaattacttcactctaccagactcgttgtaattactgtccttatgaaacaacaataagagtgactgacgtacctatgaggtgttcatccatactcccaatgattgccgccacgctatggctgcggacaggcacggaaagaatggggatggcgttgtgaaagtggtagcatccactgggactggcccgattgggtgtcgcgtgcagcctaacgtacctatgcaatctggggcgttgaagagacccatggaccctgatggcagaggctgagaaaacgatattgtttgcgattcacaaaatgaagcctttctcctgtgaaacaatacatagttagcatttgatagatcccggatcttggtctccaggaaatgcgattatcaggcagaaaataagttgcacctaccttatgtgtatatgtcatgtgtgattcacggatgatatctctctgactgtgtctgtgaggtcacctgagatgtggttccactggaggacgggtgacactgggtccccttgcagagccccagctttggtgttcactgccctgttcgtcagcgtccagctggcaaggctggtaacgtcaccaaacgctactacacaatacacctaacccaaagctgtcgaggctgtcctgtgacacctccgttccgtctccggctgaagctctgagacgcgcgagagacaactcccagaggcagcatctgagtcgaggcctctcgagtctttcccggtcttgcattccaccaacatcatcattcaaatagaacaccgctctatcacttgcaacaacgatatcgctactcctgcctcttagtccttttccctttatccggtgactcctgtcaccttctttcgcctacctcatccaaaaccgtcgcagcagataagagttgtcgcaaccattgcgtatccaagatggcgactaaggccgtcatcccctttctggtggccatgatgctgctcaccggagtatgcaacaccctcttgaccaagttgcaggacaaccaatgcgtccgtgactgcgatgaccccgatccctccaaacatgtccatttcgagcagccagtgctgcagacggcccagatgtttgtcggagaggctggctgctggatcgtcgtcggcttgatggccgcctactcccgtttcgtagcccgcaagaactccgatggataccagcctgtcaacgccaacgatgccgacgataacgccgatgctgctagcatcaactctgaacatgctctcctaagcaatggccaaagcgagaactccgggaaggccgatggagtgctaaagggatttggtgtcttgctccttgccttgcctgccatctgtgatattctggggacgacactcatgaatgctggtctgctcatggtggctgcttcgatctaccagatgacccgtggtgctttggtgctcttcgtcggcctcttcagtgtcatcttcctgcgccgcaagctatacctgttccagtggatttcgcttgtcggtgttgtgctaggtgttgccgttgtcggacttgctggtgctatttcgcctgacactaaggcaaagtccctgtcgatgcttgttgctgaagaccctgctgcagctgaggctgtgaaagttgtcgttggcgttttgctcatcgccggtgcccagatcttcactgcgacgcaattcgtgctggaggagtacctcctcgagcgatcgagcatcgagcccatcgaggttgttggctgggaaggagtgtttggtctgactgtcaccatcattggcatggtgatactccactttgctatcggtcagactgatgctggccgctatggtccattcgacatggtagagggctttcgacagatgacccacaacaagatcgtcttggtgtcgagtttcctcatcatgctgagcatcggtggtttcaacttcttcggtctctccgttacacgcagcgtcagcgcaacctcgaggtccactattgacacatgccgcactctgttcatctggattgtctctcttggtttaggctgggagactttcaagtggctccaggttgtcggctttgctctgcttgtctactttactttcgtgttcaatggccttgtccaaccccctttcgccttcctgcgacccaatcgcgaggttgaggagttgcttcccgaggagcctattgagcacaattaggagaatgctaggcagcgtcggtgcgcatcttccaaggatgacgaagaaaatggcagatgtgtctactccaggtgtgctcaagagcaccacagagctagagctctggcgctggagcgtcagtggtttgacgatgtcacggcacatctatttcgttgatcaaaggccgttatagtcttgccttcggcttcggcctcggcttcggacagcatacccaagtatgaggtggatttcggttcaccaaccacccaccgcctcccatgctatgttagccgaagatagtatgcgctcagtacattgttttggcatttaagagacataaattcgcattgcaccgtgcattgggaaggagttcggtgaccacagtttgtttggcgttgggacggacacttctcggttaggcgtctgggctcggtttcctgtactcatagtttcaagataaataaatcctttacgtagatattgctttgaatacaaacttcagatgaacgtttatgcacttcgg

SEQ ID NO: 17950 - DNA, 1248 bp, Muscodor strobelii
  misc_feature: SGI cDNA ID NO. 566007
  misc_feature: Encodes the peptide sequence at SEQ ID NO 17951
atggcgactaaggccgtcatcccctttctggtggccatgatgctgctcaccggagtatgcaacaccctcttgaccaagttgcaggacaaccaatgcgtccgtgactgcgatgaccccgatccctccaaacatgtccatttcgagcagccagtgctgcagacggcccagatgtttgtcggagaggctggctgctggatcgtcgtcggcttgatggccgcctactcccgtttcgtagcccgcaagaactccgatggataccagcctgtcaacgccaacgatgccgacgataacgccgatgctgctagcatcaactctgaacatgctctcctaagcaatggccaaagcgagaactccgggaaggccgatggagtgctaaagggatttggtgtcttgctccttgccttgcctgccatctgtgatattctggggacgacactcatgaatgctggtctgctcatggtggctgcttcgatctaccagatgacccgtggtgctttggtgctcttcgtcggcctcttcagtgtcatcttcctgcgccgcaagctatacctgttccagtggatttcgcttgtcggtgttgtgctaggtgttgccgttgtcggacttgctggtgctatttcgcctgacactaaggcaaagtccctgtcgatgcttgttgctgaagaccctgctgcagctgaggctgtgaaagttgtcgttggcgttttgctcatcgccggtgcccagatcttcactgcgacgcaattcgtgctggaggagtacctcctcgagcgatcgagcatcgagcccatcgaggttgttggctgggaaggagtgtttggtctgactgtcaccatcattggcatggtgatactccactttgctatcggtcagactgatgctggccgctatggtccattcgacatggtagagggctttcgacagatgacccacaacaagatcgtcttggtgtcgagtttcctcatcatgctgagcatcggtggtttcaacttcttcggtctctccgttacacgcagcgtcagcgcaacctcgaggtccactattgacacatgccgcactctgttcatctggattgtctctcttggtttaggctgggagactttcaagtggctccaggttgtcggctttgctctgcttgtctactttactttcgtgttcaatggccttgtccaaccccctttcgccttcctgcgacccaatcgcgaggttgaggagttgcttcccgaggagcctattgagcacaattag

SEQ ID NO: 17951 - protein, 415 aa, Muscodor strobelii
  misc_feature: SGI Peptide ID NO. 566007
  misc_feature (168)..(202): Pfam Id: PF00892 Pfam Desc: Integral membrane protein DUF6
  misc_feature (1)..(398): NCBI GI: 145608836 Blast Desc: MGG_06336 [Magnaporthe grisea 70-15] gi|145016265|gb|EDK00755.1| MGG_06336 [Magnaporthe grisea 70-15]
  misc_feature (4)..(398): NCBI GI: 171685910 Blast Desc: protein product [Podospora anserina] gi|170942916|emb|CAP68569.1| protein product [Podospora anserina]
  misc_feature (4)..(398): NCBI GI: 85082911 Blast Desc: NCU00025 [Neurospora crassa OR74A] gi|28918095|gb|EAA27776.1| NCU00025 [Neurospora crassa OR74A]
  misc_feature (1)..(415): NCBI GI: 46122013 Blast Desc: FG05384.1 [Gibberella zeae PH-1]
  misc_feature (1)..(398): NCBI GI: 116207414 Blast Desc: CHGG_03000 [Chaetomium globosum CBS 148.51] gi|88183597|gb|EAQ91065.1| CHGG_03000 [Chaetomium globosum CBS 148.51]
  misc_feature (1)..(414): NCBI GI: 261358430 Blast Desc: integral membrane protein [Verticillium albo-atrum VaMs.102]
  misc_feature (4)..(414): NCBI GI: 156051172 Blast Desc: SS1G_06993 [Sclerotinia sclerotiorum 1980] gi|154704771|gb|EDO04510.1| SS1G_06993 [Sclerotinia sclerotiorum 1980]
  misc_feature (1)..(398): NCBI GI: 256729771 Blast Desc: [Nectria haematococca mpVI 77-13-4]
  misc_feature (1)..(414): NCBI GI: 258576781 Blast Desc: conserved [Uncinocarpus reesii 1704] gi|237902838|gb|EEP77239.1| conserved [Uncinocarpus reesii 1704]
  misc_feature (1)..(414): NCBI GI: 240108145 Blast Desc: CPC735_004910 [Coccidioides posadasii C735 delta SOWgp]
MATKAVIPFLVAMMLLTGVCNTLLTKLQDNQCVRDCDDPDPSKHVHFEQPVLQTAQMFVGEAGCWIVVGLMAAYSRFVARKNSDGYQPVNANDADDNADAASINSEHALLSNGQSENSGKADGVLKGFGVLLLALPAICDILGTTLMNAGLLMVAASIYQMTRGALVLFVGLFSVIFLRRKLYLFQWISLVGVVLGVAVVGLAGAISPDTKAKSLSMLVAEDPAAAEAVKVVVGVLLIAGAQIFTATQFVLEEYLLERSSIEPIEVVGWEGVFGLTVTIIGMVILHFAIGQTDAGRYGPFDMVEGFRQMTHNKIVLVSSFLIMLSIGGFNFFGLSVTRSVSATSRSTIDTCRTLFIWIVSLGLGWETFKWLQVVGFALLVYFTFVFNGLVQPPFAFLRPNREVEELLPEEPIEHN

SEQ ID NO: 17952 - DNA, 5695 bp, Muscodor strobelii; identical to SEQ ID NO: 17949
  misc_feature: SGI EST ID NO. CUFF.42429.1
  misc_feature: Variant of the nucleotide sequence at SEQ ID NO 17950

SEQ ID NO: 17953 - DNA, 333 bp, Muscodor strobelii
  misc_feature: SGI cDNA ID NO. 566008
  misc_feature: Encodes the peptide sequence at SEQ ID NO 17954
atgggtctcgcgtacaacacctatctgaatagtaacaagatttacgggtgcaggaactgcaaggcccacctcgctaatcacgaggacatcatcagtcgtaacttccgaggccaacacggtaaggcgtacctcttcaacacggtggtcaacatcgacgcgggcgagccctcggagcgcagcatgacgacgggccgccacatcgtccgcgacatctcgtgccgccagtgcaaggagacggtcggctggaagtacgacaaggccttcgagaccagcgagaagtacaaggagggcaagttcatcctcgaggctgagctgctttgtaatgtcgcctag

SEQ ID NO: 17954 - protein, 110 aa, Muscodor strobelii
  misc_feature: SGI Peptide ID NO. 566008
  misc_feature (1)..(109): Pfam Id: PF03226 Pfam Desc: Yippee zinc-binding protein
  misc_feature (1)..(110): NCBI GI: 261358431 Blast Desc: yippee [Verticillium albo-atrum VaMs.102]
  misc_feature (1)..(110): NCBI GI: 39976721 Blast Desc: MGG_06263 [Magnaporthe grisea 70-15] gi|145016341|gb|EDK00831.1| MGG_06263 [Magnaporthe grisea 70-15]
  misc_feature (1)..(109): NCBI GI: 85082907 Blast Desc: NCU00024 [Neurospora crassa OR74A] gi|28918094|gb|EAA27775.1| conserved [Neurospora crassa OR74A]
  misc_feature (1)..(109): NCBI GI: 116207416 Blast Desc: CHGG_03001 [Chaetomium globosum CBS 148.51] gi|88183598|gb|EAQ91066.1| CHGG_03001 [Chaetomium globosum CBS 148.51]
  misc_feature (1)..(110): NCBI GI: 171685958 Blast Desc: protein product [Podospora anserina] gi|170942940|emb|CAP68593.1| protein product [Podospora anserina]
  misc_feature (1)..(110): NCBI GI: 156051160 Blast Desc: SS1G_06987 [Sclerotinia sclerotiorum 1980] gi|154704765|gb|EDO04504.1| SS1G_06987 [Sclerotinia sclerotiorum 1980]
  misc_feature (1)..(110): NCBI GI: 169622882 Blast Desc: SNOG_14666 [Phaeosphaeria nodorum SN15] gi|111056738|gb|EAT77858.1| SNOG_14666 [Phaeosphaeria nodorum SN15]
  misc_feature (1)..(110): NCBI GI: 189188546 Blast Desc: Yippee zinc-binding protein [Pyrenophora tritici-repentis Pt-1C-BFP] gi|187972218|gb|EDU39717.1| Yippee zinc-binding protein [Pyrenophora tritici-repentis Pt-1C-BFP]
  misc_feature (1)..(109): NCBI GI: 119187807 Blast Desc: CIMG_03951 [Coccidioides immitis RS] gi|240108063|gb|EER26237.1| Yippee zinc-binding family protein [Coccidioides posadasii C735 delta SOWgp]
  misc_feature (1)..(109): NCBI GI: 154299176 Blast Desc: BC1G_11766 [Botryotinia fuckeliana B05.10] gi|150857469|gb|EDN32661.1| BC1G_11766 [Botryotinia fuckeliana B05.10]
MGLAYNTYLNSNKIYGCRNCKAHLANHEDIISRNFRGQHGKAYLFNTVVNIDAGEPSERSMTTGRHIVRDISCRQCKETVGWKYDKAFETSEKYKEGKFILEAELLCNVA

SEQ ID NO: 17955 - DNA, 1409 bp, Muscodor strobelii
  misc_feature: SGI EST ID NO. CUFF.42395.0
  misc_feature: Variant of the nucleotide sequence at SEQ ID NO 17953
caaccgtccctccctcatgcaggcctcactccaccaacctcaatgaccgactgaacctacaaccactcacttgtcttgcacccctatgcctcatacctaggatcttctctctgtgtgtgtctgcattcgtccctttcgcatccgcctgtgatttatcagcatcttgtgatactcaagcctaactgccacccgatcttgggtttcatctgggtaagaacagcaactgtagagataggcgttcgtcagccggcagtctaaccgacacctctgcacctcaagtctgacgacagagacgagagacttgaaatcagtaccaccccgcctactgccagtcattgccgcggaccgaacttcccacctgatttcaaggacagactgaaccaggacgtcctagtctcagcatcgccgtccagttctgaatcaaacggcagaactgcaacagccagccatccaacattcctagtcaaaccagcctgctttcgacatccaccatgggtctcgcgtacaacacctatctgaatagtaacaagatttacgggtgcaggaactgcaaggcccacctcgctaatcacgaggacatcatcagtcgtaacttccgaggccaacacggtaaggcgtacctcttcaacacggtggtcaacatcgacgcgggcgagccctcggagcgcagcatgacgacgggccgccacatcgtccgcgacatctcgtgccgccagtgcaaggagacggtcggctggaagtacgacaaggccttcgagaccagcgagaagtacaaggagggcaagttcatcctcgaggctgagctgctttgtaatgtcgcctagttggttaggctgaagctgcccgggatgtgatgtgtggatgtatgtgtatgcgccgtgttgcaagactacatgtggccataccggggacggggagggggattatcggggttgatgacggtgattagggtatccgaaatggacggcggaagctcaccacaggcaatccgcgcccatttccacatctatcgatccctgactcctttgacatctctccatacttcgcccgccacggaatgttcacccatcggccagagtccgcatctcttcctctagcacattccacctcgctcagcatctcgacatcagcggagcattggcacggaagcttctgtacttttcttttatgtttgcatgtcaggattacactctgatttccaatcacggctctggcgtttcgcgttttttcggtatgagggtaatgagggatcaggataggctgggatcacagatttcatgttttgagctctgattttagcttaatgagtgaacgaccaatcaacatggcatttgtagtctgctggcactcgtaattgactgtctaaattgtcgtgctacatattagttttaccgtctatgtcagtcttg

SEQ ID NO: 17956 - DNA, 1749 bp, Muscodor strobelii
  misc_feature: SGI cDNA ID NO. 566009
  misc_feature: Encodes the peptide sequence at SEQ ID NO 17957
atgccggaatcagcacctgctgctggcgagggccagccgacaggatggacacccgatgccgagaacgaagcactatctcattatctcctcttgatatgcggcatcgttggagcactcctgctcatctggagactatccacaggcataactagatacgttcgtaccgttgccagcctacaaaatgacacacaacgattttttgctcggccatcgatgcggtttgcatggatcaagaagcatctcatatactcacctctcttccgcaaaagacataaccgcgaattccagcttagtagtgctgttaatgttggcaccttgccgactcggttccagaccttcttcatcctggcctatttcgctacaaatgttgcattcgccgtcatcgatatccctttcgccgaggactatgtggatggattgaaacagttgagaaatcgaagtggaactctggcaacagttaacatggtaccattattccttttggccgccagaaacaacccgcttatccctctcctgggaatctctttcgacacattcaacttgcttcatcgatggtttggccgtattgtagctatcgagtctgtggttcacgtccttgccttttatgctgcctccgcggctaagtcagactggggttcagcgttcttgagcagcttcgcagctccgttcctgctgtatggattcatctcggctgcggctttcgtcgtgatattctttcaggctgcaagcatctcgagacacgccttttatgagtgcttcaaggttcttcacattgcccttgccattgttgcagttgttggcctctggtaccaccttgatctgaagaagctcccccaattgaagtggctgattgctgcgattcccctgtgggccctcgaacgatttatccgattcgcccgactattctatcacaacgtcggcaaaggtggcacaaagacgcttgtcgaggctcttccgggaaatgctgtgcgagtcacagtcaacatggctcgcccctggtctttccagcctggccagcacgcatacttgtacatgccgaccgttagcttctggcaatcacatccattctcgttggcatggagcgaggaagcagaaaatctgaacgccgataagttggctatgaaccgacacgacattttggagatgcgcaagaccagcatgtcatttattatccgagctcgtacaggcatgaccagcactctataccagcgagctgcggcaagccccgatggacgccttatcacgcgatgcctagtcgagggaccttatggaggcgagcacatgttcgactcatatggcaccgtgatgctgtttgctggtggagtgggcattacgcatgccgtgccccatgttcgtcacctcgtggcgggctttgctaacggcacggttgcaacacggaaagtggttttggtgtggatcatccagagtcccgagcatctcgaatggattcggccatggatgacacagattctcgccatggacagacgccgggagatactgcgcatcatgctgtttgtcagccggcctcggtccacgaaagagatccactcaccatcagcgacagtacaaatgttccccggacgtcccaatattaacacactcatgggtatggagatggagaaccaagtaggcatgatgggagtaagtgtgtgcggaccaggaacgctcagcgacgaggtccgcctggctgtgcgccagaagcaatacgaggggtccatcgacttcatagaagaggccttttcgtggtaa

SEQ ID NO: 17957 - protein, 582 aa, Muscodor strobelii
  misc_feature: SGI Peptide ID NO. 566009
  misc_feature (147)..(268): Pfam Id: PF01794 Pfam Desc: Ferric reductase like transmembrane component
  misc_feature (307)..(427): Pfam Id: PF08022 Pfam Desc: FAD-binding domain
  misc_feature (432)..(565): Pfam Id: PF08030 Pfam Desc: Ferric reductase NAD binding domain
  misc_feature (307)..(359): Pfam Id: PF08022 Pfam Desc: FAD-binding domain
  misc_feature (432)..(499): Pfam Id: PF08030 Pfam Desc: Ferric reductase NAD binding domain
  misc_feature (22)..(582): NCBI GI: 171685960 Blast Desc: protein product [Podospora anserina] gi|170942941|emb|CAP68594.1| protein product [Podospora anserina]
  misc_feature (22)..(582): NCBI GI: 85082903 Blast Desc: NCU00023 [Neurospora crassa OR74A] gi|28918093|gb|EAA27774.1| NCU00023 [Neurospora crassa OR74A]
  misc_feature (22)..(582): NCBI GI: 154299178 Blast Desc: BC1G_11767 [Botryotinia fuckeliana B05.10] gi|150857470|gb|EDN32662.1| BC1G_11767 [Botryotinia fuckeliana B05.10]
  misc_feature (22)..(582): NCBI GI: 156051162 Blast Desc: SS1G_06988 [Sclerotinia sclerotiorum 1980] gi|154704766|gb|EDO04505.1| SS1G_06988 [Sclerotinia sclerotiorum 1980]
  misc_feature (19)..(582): NCBI GI: 116207418 Blast Desc: CHGG_03002 [Chaetomium globosum CBS 148.51] gi|88183599|gb|EAQ91067.1| CHGG_03002 [Chaetomium globosum CBS 148.51]
  misc_feature (22)..(582): NCBI GI: 256729770 Blast Desc: [Nectria haematococca mpVI 77-13-4]
  misc_feature (19)..(582): NCBI GI: 46122015 Blast Desc: FG05385.1 [Gibberella zeae PH-1]
  misc_feature (8)..(582): NCBI GI: 121705646 Blast Desc: ferric-chelate reductase, [Aspergillus clavatus NRRL 1] gi|119399232|gb|EAW09660.1| ferric-chelate reductase, [Aspergillus clavatus NRRL 1]
  misc_feature (79)..(567): NCBI GI: 261358432 Blast Desc: ferric reductase transmembrane component 3 [Verticillium albo-atrum VaMs.102]
  misc_feature (22)..(582): NCBI GI: 169770641 Blast Desc: [Aspergillus oryzae RIB40] gi|83767649|dbj|BAE57788.1| protein product [Aspergillus oryzae]
  misc_feature (78)..(566): SWISSPROT Homolog: EC 1.16.1.7 Ferric-chelate reductase
MPESAPAAGEGQPTGWTPDAENEALSHYLLLICGIVGALLLIWRLSTGITRYVRTVASLQNDTQRFFARPSMRFAWIKKHLIYSPLFRKRHNREFQLSSAVNVGTLPTRFQTFFILAYFATNVAFAVIDIPFAEDYVDGLKQLRNRSGTLATVNMVPLFLLAARNNPLIPLLGISFDTFNLLHRWFGRIVAIESVVHVLAFYAASAAKSDWGSAFLSSFAAPFLLYGFISAAAFVVIFFQAASISRHAFYECFKVLHIALAIVAVVGLWYHLDLKKLPQLKWLIAAIPLWALERFIRFARLFYHNVGKGGTKTLVEALPGNAVRVTVNMARPWSFQPGQHAYLYMPTVSFWQSHPFSLAWSEEAENLNADKLAMNRHDILEMRKTSMSFIIRARTGMTSTLYQRAAASPDGRLITRCLVEGPYGGEHMFDSYGTVMLFAGGVGITHAVPHVRHLVAGFANGTVATRKVVLVWIIQSPEHLEWIRPWMTQILAMDRRREILRIMLFVSRPRSTKEIHSPSATVQMFPGRPNINTLMGMEMENQVGMMGVSVCGPGTLSDEVRLAVRQKQYEGSIDFIEEAFSW

SEQ ID NO: 17958 - DNA, 3141 bp, Muscodor strobelii
  misc_feature: SGI EST ID NO. CUFF.42369.0
  misc_feature: Variant of the nucleotide sequence at SEQ ID NO 17956
gtagactacgagtcgcatccaaataataagatcagccaagctttgatctcacaggcccagcgcttcttgcatgcccccctattatctttctttcaagcggtaaacccacaaaataacggacctcattaggttgaccctggtcgccgtgtgccattcttccaagcccactcgagcgcctcaagccctcaaaggcccttcattactcaaactccctcacactgacgacctcgacgatctctcaccctcccctccccaaccccgtccgaagtccccatcaacctcagtccgttgtcgtcagaaatctcgcttttcgtagcggcttccctttcgttctttactacctactcccttcttttccccttgccactccgggttacgtattcttgtacatacgcgggttatttacatctcataggacacgactggaactcctccactcttttattaggttcccttgtccgagtatctatcagcccttgtgttgtacatagacgtcttccctgctcaaactcgagaggaaacaactacatagcagttgtgttccttacgccatccatcctctggattctgtctttgtctggcacatacactttgttgccaacaaagtcttccatatctcgacactctttgatgttgtggcgaggatctgcaaataagcaaacccaatatctgacctcgacttggtcataacgatctctaactcgacttcgacgacaaacgcttaacgaattacctcacatcttgggacagctggctgtcaccgcgctttcacttaaggctatttcatgccacttgagttgaactcatcctcacataacgaacttttcgaagctgtcagcattagattcgagacacttctttgtgtttcgtacaattggattgttgcagcaacgtgttaaatcataatacgtttaaggttttaactataatcgaaacacacaacgatagaatgccggaatcagcacctgctgctggcgagggccagccgacaggatggacacccgatgccgagaacgaagcactatctcattatctcctcttgatatgcggcatcgttggagcactcctgctcatctggagactatccacaggcataactagatacgttcgtaccgttgccagcctacaaaatgacacacaacgattttttgctcggccatcgatgcggtttgcatggatcaagaagcatctcatatactcacctctcttccgcaaaagacataaccgcgaattccagcttagtagtgctgttaatgttggcaccttgccgactcggttccagaccttcttcatcctggcctatttcgctacaaatgttgcattcgccgtcatcgatatccctttcgccgaggactatgtggatggattgaaacagttgagaaatcgaagtggaactctggcaacagttaacatggtaccattattccttttggccgccagaaacaacccgcttatccctctcctgggaatctctttcgacacattcaacttgcttcatcgatggtttggccgtattgtagctatcgagtctgtggttcacgtccttgccttttatgctgcctccgcggctaagtcagactggggttcagcgttcttgagcagcttcgcagctccgttcctgctgtatggattcatctcggctgcggctttcgtcgtgatattctttcaggctgcaagcatctcgagacacgccttttatgagtgcttcaaggttcttcacattgcccttgccattgttgcagttgttggcctctggtaccaccttgatctgaagaagctcccccaattgaagtggctgattgctgcgattcccctgtgggccctcgaacgatttatccgattcgcccgactattctatcacaacgtcggcaaaggtggcacaaagacgcttgtcgaggctcttccgggaaatgctgtgcgagtcacagtcaacatggctcgcccctggtctttccagcctggccagcacgcatacttgtacatgccgaccgttagcttctggcaatcacatccattctcgttggcatggagcgaggaagcagaaaatctgaacgccgataagttggctatgaaccgacacgacattttggagatgcgcaagaccagcatgtcatttattatccgagctcgtacaggcatgaccagcactctataccagcgagctgcggcaagccccgatggacgccttatcacgcgatgcctagtcgagggaccttatggaggcgagcacatgttcgactcatatggcaccgtgatgctgtttgctggtggagtgggcattacgcatgccgtgccccatgttcgtcacctcgtggcgggctttgctaacggcacggttgcaacacggaaagtggttttggtgtggatcatccagagtcccgagcatctcgaatggattcggccatggatgacacagattctcgccatggacagacgccgggagatactgcgcatcatgctgtttgtcagccggcctcggtccacgaaagagatccactcaccatcagcgacagtacaaatgttccccggacgtcccaatattaacacactcatgggtatggagatggagaaccaagtaggcatgatgggagtaagtgtgtgcggaccaggaacgctcagcgacgaggtccgcctggctgtgcgccagaagcaatacgaggggtccatcgacttcatagaagaggccttttcgtggtaaagaaaaagatcacgttgcgaaaagcactgtctttacagtatggcgctcggcttggtgtttcgttgtgcatatttattcccttggctcgtgtcaatgtccgtcacgcacttctgtttgtacatagttcactcttttctgtcacgcatatcggatctggataagatactggggagcgcatccgcccgggtacatgacttctatttttgcgagaatcgcaatgtacaaatgagaagccatctatttgaagtaccaactatattttgcataccggtgaaacttgtgtgtgatccagacagaacaaagatgtagtgagtcttatgtagaacagaactttccctcacttatgcgtctctaaccagcgttcatctccattgtcccaagccaaacatatagaatgcacgtgatgaatctcatgtatcaaagcacacattcgttaatgagac

SEQ ID NO: 17959 - DNA, 3774 bp, Muscodor strobelii
  misc_feature: SGI cDNA ID NO. 566010
  misc_feature: Reduced expression when VOC is produced
  misc_feature: Encodes the peptide sequence at SEQ ID NO 17960
atggccgacaagcaggagcctaagaccgtcccagctgagactgccgtggcagactccaagcccgccaatggcgagactcgcacggagaacaacgaggaggaggccgaagaggatgcgactgaagccctcttcgctctgacgataactcttccccaagagcctaaacaaattaacataatggtatcgccccaagagcagatccacgaacttcgccagtccgtcatcgagctgccacaggctttccaatactcctgcttccacttcgagtacgctggcgagcgtatcaacgacttcgtgcaagtctccgacgtcaatggtctgggacccgaggccgagatccgcttggtcgaggacccctacaccgagaaagaggccagaatacacgtcatgaggattcgcgatcttgttggcgcatccggtgaccgcactgatactctgcacggagtcatccctggagcttctgtttttgactcgatcaccgccgcggccaaggatgtcgacaacgtccaggccagtgcctacaaattcgaggcacccgcagacacctcgactttgatccccaaagaggaggagccggccccaaagacagtcaaatctgtctccttgtctccgtggaacccacctccctaccacctgcgacagaagggtcacctgctatacctcattgtcacaaccaacgaaggcgagcaataccagatcacttctcatgtcggagggttcttcgtcaacaaatcttcaaacagcaaatttgaccctttgccacgctctgctcccaaggcgtactcggcgcactccctgttgacgctacttggccagatctcgccatcatttgccgagtcctttgagcaacttttgcagttcaacaaccgcaaagatccccttgcaaccttccagatgaccaacgccatccctgccgccccctggctcgtgccctctcaatcctcgacattgtgcgctcatagttccgacatcaccagaacccaagagggctatctgatctccggcgtcgataacacggacactttgcgcgattggaatgaggaatttcagtctgcccgtgaactacccaaggagactgtccaagaccgcgtgttccgagagcgcttcatctctaagctctttgcggactacaccgatgcggctgctcgtggagccattctggtagctcgtggcgaggtcacccctttgaatccgaccgagagccgggacgcccagatttttgtctataacaatgtattcttctcgttcggtgcggatggtgtaggcaccttcacttctgagggtggagatgatgctgcgcgggtcgcaactggaaaggatgtcaatggtgtacgaatcgtaaaccagctagacattgatgggctgtacagccctgcgactgtcgtcgtggactatcttggcaagcgtatcgtcggccaaacagttgttccaggtattttcaagcagcgggaacccggagagaactcgattgattacggcgctgtggagggcaaagatgttgttgctgcggatgagcgtttcgtcgagacattcgagaagctttcaaaggccttgcgtgtcaaaaagcacgcggtttgggacaaagatggtaagagattcgatctggaagcaagtgtcgagacgaaaggtttgatgggcacagacggccggaagtacgttttggatctttatcgaatcactcctctcgatgttttgtggctcgaagagaacgagcccgaggaggaagactcggacgattcggaggaagaagatgatgagcagtatcctcaccgtatgaccgtactgcgaccagagcttgttgagattattcgacaccagaaatggacagaatgggccaatgccgaaattgctcgcataaaggaaggctccgccaaagagaggaaatccgatgacgatgattcagaggagtctaaagaggccaaggctgcagagaatgcagagatcgaggacaaattcgacgcctccgccttttctttcagtctcaaccctgatgcgttcagcggccaagtaccgcagaccgaagaagagaaaaaggagatggcagcggatgaagaggatgttcgcaatgcatgcaagcatctgcgagagaccgcgattccagacttcgttaacgacatcaagaattctgatttgcctttccctatggatggcgcatctcttaccaagatgatgcataagcgcggtatcaacatgagatatctaggcaaagtcgcatccctatgcgagggcccaagattattacgccttcgagctctctgtgcgcaggaggtggtttcacgagccttcaaacacgttgccggcagctatcttcgccatcttccgatgcccttaacatcagcttgtattgctcatttattaaattgtctcttgggagccggattcaacagccagcccactgccgagattgatgagtatttgaaatcgttgtaccccgaggccgacttagacttcgcgactctcacaccagagggtctgcgcgaggaaattgagacagaaaccgcacggcgctttaagtggacactgcctgccgattggcacaataaagtcaagcacatgcagctcctgcgtgaagtttcgttgaagcttggcctccaactgcaagctaagaaattcctattcactcgcgactctaccgatgcgcccgccgcaccagaaagtaacggaacgaatgggcatgcaaacggtgatgccgagaagagcaagaaaaagaaaaagaaggccagagagggctctcccgcttctattgcttcttccaatgttcctcaaacgaccttcacagcagatgacgtcgtcaatgtagtgcccatcgtcaaagactctgccccgaagagtgcgatttctgacgaagctttggaaggtggccgtcactcaatcatgcaaggcaatcgtaagattggccaagagctgctcttagagtcgctgactctacatgagcaaatctatggtattcttcatcccgaggttgcccgagcttactcaaatctggctcaaatttattatcagctggatgagaaagaaggcgcagtagatctcgctcgcaaagccgtcattgtctcggagcggacgctcggtcttgactccgcagagacgctgctttactatctgaacctgggtctttatatgcatggctctggagatagcaagactgcgctgatctacgtcaagcatgctctcgacttgtggaaagtgatctatggtgccgatcaccccgactctataacaaccctcaacaatgcggcagttatgctccagcacatgcaggcatatcatgaatctcgcctctggttcgagcaagcggtcaccgtgtgtgaacgcgtcatcggtccccagtccctccaatctgctagtctgctgttccagctcgcacaagctcttgccctcgacaacgagtctaaggcagcgcttggaaagatgagggactgttataacatattcttacacgagctcggccccgagaatggcaacaccaaagaagctgagtcgtggcttgaacaactcacgcagaacgctgtcgccatcgcgaagcgcgacaaagatgcccaatcccgtcgtcttcgtgccggcatccgattcccaacacgcaacatagctggcagcgcatcaccctcggctgcaactgcggcgctcaaccccaaaccacgatccggtggacccgatgctagaagcatcgacgacttgatcaagttcatcgagggtagcggcgctcaaaagaagagcacaaagaagaggcccgcgaggggtggacccaagacccgtgttggagctgccgcataa

SEQ ID NO: 17960 - protein, 1257 aa, Muscodor strobelii
  misc_feature: SGI Peptide ID NO. 566010
  misc_feature (11)..(1252): NCBI GI: 156051170 Blast Desc: SS1G_06992 [Sclerotinia sclerotiorum 1980] gi|229557990|sp|A7ENU3.1|TIF31_SCLS1 RecName: Full=Protein TIF31 homolog gi|154704770|gb|EDO04509.1| SS1G_06992 [Sclerotinia 1980]
  misc_feature (43)..(1257): NCBI GI: 154299184 Blast Desc: BC1G_11770 [Botryotinia fuckeliana B05.10] gi|229557986|sp|A6SFG0.1|TIF31_BOTFB RecName: Full=Protein TIF31 homolog gi|150857473|gb|EDN32665.1| BC1G_11770 [Botryotinia
  misc_feature (41)..(1257): NCBI GI: 256729957 Blast Desc: [Nectria haematococca mpVI 77-13-4]
  misc_feature (42)..(1252): NCBI GI: 70999644 Blast Desc: eukaryotic translation initiation factor 3 subunit CLU1/TIF31, [Aspergillus fumigatus Af293] gi|74674336|sp|Q4WXV2.1|TIF31_ASPFU RecName: Full=Protein TIF31 3
  misc_feature (26)..(1252): NCBI GI: 145232832 Blast Desc: An02g06530 [Aspergillus niger] gi|229557985|sp|A2QDB9.1|TIF31_ASPNC RecName: Full=Protein TIF31 homolog gi|134056709|emb|CAL00651.1| protein product [Aspergillus
  misc_feature (42)..(1252): NCBI GI: 119491767 Blast Desc: eukaryotic translation initiation factor 3 subunit CLU1/TIF31, [Neosartorya fischeri NRRL 181] gi|229557989|sp|A1D6Y7.1|TIF31_NEOFI RecName: Full=Protein TIF31
  misc_feature (16)..(1252): NCBI GI: 242784424 Blast Desc: eukaryotic translation initiation factor 3 subunit CLU1/TIF31, [Talaromyces stipitatus ATCC 10500] gi|218720531|gb|EED19950.1| eukaryotic translation initiation 3
  misc_feature (19)..(1252): NCBI GI: 119187429 Blast Desc: CIMG_03762 [Coccidioides immitis RS] gi|121927018|sp|Q1E101.1|TIF31_COCIM RecName: Full=Protein TIF31 homolog
  misc_feature (43)..(1252): NCBI GI: 121705642 Blast Desc: eukaryotic translation initiation factor 3 subunit CLU1/TIF31, [Aspergillus clavatus NRRL 1] gi|229557983|sp|A1CKI4.1|TIF31_ASPCL RecName: Full=Protein TIF31
  misc_feature (19)..(1252): NCBI GI: 240108199 Blast Desc: tetratricopeptide repeat containing protein [Coccidioides posadasii C735 delta SOWgp]
  misc_feature: Useful for introducing or modulating the production of volatile compounds
MADKQEPKTVPAETAVADSKPANGETRTENNEEEAEEDATEALFALTITLPQEPKQINIMVSPQEQIHELRQSVIELPQAFQYSCFHFEYAGERINDFVQVSDVNGLGPEAEIRLVEDPYTEKEARIHVMRIRDLVGASGDRTDTLHGVIPGASVFDSITAAAKDVDNVQASAYKFEAPADTSTLIPKEEEPAPKTVKSVSLSPWNPPPYHLRQKGHLLYLIVTTNEGEQYQITSHVGGFFVNKSSNSKFDPLPRSAPKAYSAHSLLTLLGQISPSFAESFEQLLQFNNRKDPLATFQMTNAIPAAPWLVPSQSSTLCAHSSDITRTQEGYLISGVDNTDTLRDWNEEFQSARELPKETVQDRVFRERFISKLFADYTDAAARGAILVARGEVTPLNPTESRDAQIFVYNNVFFSFGADGVGTFTSEGGDDAARVATGKDVNGVRIVNQLDIDGLYSPATVVVDYLGKRIVGQTVVPGIFKQREPGENSIDYGAVEGKDVVAADERFVETFEKLSKALRVKKHAVWDKDGKRFDLEASVETKGLMGTDGRKYVLDLYRITPLDVLWLEENEPEEEDSDDSEEEDDEQYPHRMTVLRPELVEIIRHQKWTEWANAEIARIKEGSAKERKSDDDDSEESKEAKAAENAEIEDKFDASAFSFSLNPDAFSGQVPQTEEEKKEMAADEEDVRNACKHLRETAIPDFVNDIKNSDLPFPMDGASLTKMMHKRGINMRYLGKVASLCEGPRLLRLRALCAQEVVSRAFKHVAGSYLRHLPMPLTSACIAHLLNCLLGAGFNSQPTAEIDEYLKSLYPEADLDFATLTPEGLREEIETETARRFKWTLPADWHNKVKHMQLLREVSLKLGLQLQAKKFLFTRDSTDAPAAPESNGTNGHANGDAEKSKKKKKKAREGSPASIASSNVPQTTFTADDVVNVVPIVKDSAPKSAISDEALEGGRHSIMQGNRKIGQELLLESLTLHEQIYGILHPEVARAYSNLAQIYYQLDEKEGAVDLARKAVIVSERTLGLDSAETLLYYLNLGLYMHGSGDSKTALIYVKHALDLWKVIYGADHPDSITTLNNAAVMLQHMQAYHESRLWFEQAVTVCERVIGPQSLQSASLLFQLAQALALDNESKAALGKMRDCYNIFLHELGPENGNTKEAESWLEQLTQNAVAIAKRDKDAQSRRLRAGIRFPTRNIAGSASPSAATAALNPKPRSGGPDARSIDDLIKFIEGSGAQKKSTKKRPARGGPKTRVGAAA

SEQ ID NO: 17961 - DNA, 4430 bp, Muscodor strobelii
  misc_feature: SGI EST ID NO. CUFF.42462.2
  misc_feature: Variant of the nucleotide sequence at SEQ ID NO 17959
tatgaacagtcctctttcaacctatcaacacacacaacacgcataaaactataccttccaacccgacgtcacaccggggagcgacctatccaattgtcgtttcctcacttttactcgcttgtataatactctcttcacctttccctccctcttctcgggctctatttggtgggagtctgcattttccctagtattgatagatttcctgcgttttctggtattgcaccgcacactccattgtaaaacagcactcacgacccggaacgagccaaaggatttttaccgcttagcactggattgcatctcaagctttatttcttgatctacaacattgtaatcccgggtttctgcaatcatggccgacaagcaggagcctaagaccgtcccagctgagactgccgtggcagactccaagcccgccaatggcgagactcgcacggagaacaacgaggaggaggccgaagaggatgcgactgaagccctcttcgctctgacgataactcttccccaagagcctaaacaaattaacataatggtatcgccccaagagcagatccacgaacttcgccagtccgtcatcgagctgccacaggctttccaatactcctgcttccacttcgagtacgctggcgagcgtatcaacgacttcgtgcaagtctccgacgtcaatggtctgggacccgaggccgagatccgcttggtcgaggacccctacaccgagaaagaggccagaatacacgtcatgaggattcgcgatcttgttggcgcatccggtgaccgcactgatactctgcacggagtcatccctggagcttctgtttttgactcgatcaccgccgcggccaaggatgtcgacaacgtccaggccagtgcctacaaattcgaggcacccgcagacacctcgactttgatccccaaagaggaggagccggccccaaagacagtcaaatctgtctccttgtctccgtggaacccacctccctaccacctgcgacagaagggtcacctgctatacctcattgtcacaaccaacgaaggcgagcaataccagatcacttctcatgtcggagggttcttcgtcaacaaatcttcaaacagcaaatttgaccctttgccacgctctgctcccaaggcgtactcggcgcactccctgttgacgctacttggccagatctcgccatcatttgccgagtcctttgagcaacttttgcagttcaacaaccgcaaagatccccttgcaaccttccagatgaccaacgccatccctgccgccccctggctcgtgccctctcaatcctcgacattgtgcgctcatagttccgacatcaccagaacccaagagggctatctgatctccggcgtcgataacacggacactttgcgcgattggaatgaggaatttcagtctgcccgtgaactacccaaggagactgtccaagaccgcgtgttccgagagcgcttcatctctaagctctttgcggactacaccgatgcggctgctcgtggagccattctggtagctcgtggcgaggtcacccctttgaatccgaccgagagccgggacgcccagatttttgtctataacaatgtattcttctcgttcggtgcggatggtgtaggcaccttcacttctgagggtggagatgatgctgcgcgggtcgcaactggaaaggatgtcaatggtgtacgaatcgtaaaccagctagacattgatgggctgtacagccctgcgactgtcgtcgtggactatcttggcaagcgtatcgtcggccaaacagttgttccaggtattttcaagcagcgggaacccggagagaactcgattgattacggcgctgtggagggcaaagatgttgttgctgcggatgagcgtttcgtcgagacattcgagaagctttcaaaggccttgcgtgtcaaaaagcacgcggtttgggacaaagatggtaagagattcgatctggaagcaagtgtcgagacgaaaggtttgatgggcacagacggccggaagtacgttttggatctttatcgaatcactcctctcgatgttttgtggctcgaagagaacgagcccgaggaggaagactcggacgattcggaggaagaagatgatgagcagtatcctcaccgtatgaccgtactgcgaccagagcttgttgagattattcgacaccagaaatggacagaatgggccaatgccgaaattgctcgcataaaggaaggctccgccaaagagaggaaatccgatgacgatgattcagaggagtctaaagaggccaaggctgcagagaatgcagagatcgaggacaaattcgacgcctccgccttttctttcagtctcaaccctgatgcgttcagcggccaagtaccgcagaccgaagaagagaaaaaggagatggcagcggatgaagaggatgttcgcaatgcatgcaagcatctgcgagagaccgcgattccagacttcgttaacgacatcaagaattctgatttgcctttccctatggatggcgcatctcttaccaagatgatgcataagcgcggtatcaacatgagatatctaggcaaagtcgcatccctatgcgagggcccaagattattacgccttcgagctctctgtgcgcaggaggtggtttcacgagccttcaaacacgttgccggcagctatcttcgccatcttccgatgcccttaacatcagcttgtattgctcatttattaaattgtctcttgggagccggattcaacagccagcccactgccgagattgatgagtatttgaaatcgttgtaccccgaggccgacttagacttcgcgactctcacaccagagggtctgcgcgaggaaattgagacagaaaccgcacggcgctttaagtggacactgcctgccgattggcacaataaagtcaagcacatgcagctcctgcgtgaagtttcgttgaagcttggcctccaactgcaagctaagaaattcctattcactcgcgactctaccgatgcgcccgccgcaccagaaagtaacggaacgaatgggcatgcaaacggtgatgccgagaagagcaagaaaaagaaaaagaaggccagagagggctctcccgcttctattgcttcttccaatgttcctcaaacgaccttcacagcagatgacgtcgtcaatgtagtgcccatcgtcaaagactctgccccgaagagtgcgatttctgacgaagctttggaaggtggccgtcactcaatcatgcaaggcaatcgtaagattggccaagagctgctcttagagtcgctgactctacatgagcaaatctatggtattcttcatcccgaggttgcccgagcttactcaaatctggctcaaatttattatcagctggatgagaaagaaggcgcagtagatctcgctcgcaaagccgtcattgtctcggagcggacgctcggtcttgactccgcagagacgctgctttactatctgaacctgggtctttatatgcatggctctggagatagcaagactgcgctgatctacgtcaagcatgctctcgacttgtggaaagtgatctatggtgccgatcaccccgactctataacaaccctcaacaatgcggcagttatgctccagcacatgcaggcatatcatgaatctcgcctctggttcgagcaagcggtcaccgtgtgtgaacgcgtcatcggtccccagtccctccaatctgctagtctgctgttccagctcgcacaagctcttgccctcgacaacgagtctaaggcagcgcttggaaagatgagggactgttataacatattcttacacgagctcggccccgagaatggcaacaccaaagaagctgagtcgtggcttgaacaactcacgcagaacgctgtcgccatcgcgaagcgcgacaaagatgcccaatcccgtcgtcttcgtgccggcatccgattcccaacacgcaacatagctggcagcgcatcaccctcggctgcaactgcggcgctcaaccccaaaccacgatccggtggacccgatgctagaagcatcgacgacttgatcaagttcatcgagggtagcggcgctcaaaagaagagcacaaagaagaggcccgcgaggggtggacccaagacccgtgttggagctgccgcataagcaccctttcatcgcaaaccgaccaactaatgagttctggggaataaaatacacttgaaggacaaaaatctcgtccagtgtacatgtacataatcaaatctcatgtcaacgaaaagcattgtcattgcacatatagtcagatcgcaactcatatcatagaagaggggctgcatggatgggcggggagaaaggaaaaagaaaagcctaatgtcgatctgatgatgcatgctaaataataacaaacaaacaattcttcactcccatgctgatactatgctgatcgagtcttgttgtctctctg

SEQ ID NO: 17962 - DNA, 792 bp, Muscodor strobelii
  misc_feature: SGI cDNA ID NO. 566011
  misc_feature: Reduced expression when VOC is produced
  misc_feature: Encodes the peptide sequence at SEQ ID NO 17963
atgctgttcctcttgctcgtgaacgcagcgcctgagatgtgctgggcacctgacccgcaaggagatggaaaatacttcaactgtaacgatatcaattcacctcgacgcatatggattgagatcggttcccagatccttaatgcacttttcagcgttacggggtttggattagcaccatggcgaatacgcgacctgtatctacttctccggtaccgacttcgcaaagatcaaaacgccttgcgacgcatcgcgggagtcggggtccatcgaggttggctgcgtctaccaggttccgatctgttaccaccaactctgggaccgaagaatatcgaagagacaaccgtcccgtacgatgtagatagcgttccttacccggtagagatgatacccaactctccgccaacgggtgtacgcgctccgcctaccaaactatggaagctcgatttcattgtgtggttcaatgtttggaacacgatatttcaaggcttcttagcgggattcatgtgggcgttaaatcgatacgatagaccgtcatggacaacgggcctctttgtcgctcttgctttgattgcttcgtcggccgctggcattatgcaggcgatacaacagaataatgtcaagaaagtggagggcgtgccgttaacgaagaaagaccaccagcgactacttcgcgataggcagatgggcataccccattataataacttcaaggacaaagatcctgctgtcgtcaaggagaagaagaagaaaagtctgtttagacgagggaaggaagcagagagtgttgtatga

SEQ ID NO: 17963 - protein, 263 aa, Muscodor strobelii
  misc_feature: SGI Peptide ID NO. 566011
  misc_feature (1)..(241): NCBI GI: 156051188 Blast Desc: SS1G_07001 [Sclerotinia sclerotiorum 1980] gi|154704779|gb|EDO04518.1| SS1G_07001 [Sclerotinia sclerotiorum 1980]
  misc_feature (1)..(236): NCBI GI: 154299202 Blast Desc: BC1G_11779 [Botryotinia fuckeliana B05.10] gi|150857482|gb|EDN32674.1| BC1G_11779 [Botryotinia fuckeliana B05.10]
  misc_feature (2)..(235): NCBI GI: 261358429 Blast Desc: conserved [Verticillium albo-atrum VaMs.102]
  misc_feature (1)..(238): NCBI GI: 85082915 Blast Desc: NCU00026 [Neurospora crassa OR74A] gi|28918096|gb|EAA27777.1| conserved [Neurospora crassa OR74A]
  misc_feature (1)..(235): NCBI GI: 171685912 Blast Desc: protein product [Podospora anserina] gi|170942917|emb|CAP68570.1| protein product [Podospora anserina]
  misc_feature (45)..(240): NCBI GI: 256729958 Blast Desc: NECHADRAFT_47150 [Nectria haematococca mpVI 77-13-4]
  misc_feature (1)..(236): NCBI GI: 116207412 Blast Desc: CHGG_02999 [Chaetomium globosum CBS 148.51] gi|88183596|gb|EAQ91064.1| CHGG_02999 [Chaetomium globosum CBS 148.51]
  misc_feature (1)..(262): NCBI GI: 39976857 Blast Desc: MGG_06331 [Magnaporthe grisea 70-15] gi|145016270|gb|EDK00760.1| MGG_06331 [Magnaporthe grisea 70-15]
  misc_feature (1)..(214): NCBI GI: 189195122 Blast Desc: conserved [Pyrenophora tritici-repentis Pt-1C-BFP] gi|187979778|gb|EDU46404.1| conserved [Pyrenophora tritici-repentis Pt-1C-BFP]
  misc_feature (55)..(243): NCBI GI: 46122011 Blast Desc: FG05383.1 [Gibberella zeae PH-1]
  misc_feature: Useful for introducing or modulating the production of volatile compounds
MLFLLLVNAAPEMCWAPDPQGDGKYFNCNDINSPRRIWIEIGSQILNALFSVTGFGLAPWRIRDLYLLLRYRLRKDQNALRRIAGVGVHRGWLRLPGSDLLPPTLGPKNIEETTVPYDVDSVPYPVEMIPNSPPTGVRAPPTKLWKLDFIVWFNVWNTIFQGFLAGFMWALNRYDRPSWTTGLFVALALIASSAAGIMQAIQQNNVKKVEGVPLTKKDHQRLLRDRQMGIPHYNNFKDKDPAVVKEKKKKSLFRRGKEAESVV

SEQ ID NO: 17964 - DNA, 3400 bp, Muscodor strobelii
  misc_feature: SGI EST ID NO. CUFF.42401.1
  misc_feature: Variant of the nucleotide sequence at SEQ ID NO 17962
gttctatatatacctaatgtcaagtggtcaacttagcatcgttcttcttgcacctgttcttctccggtattaatcacgtgtgaggcatgtcggcagaacctcaagatccaagggcctctacgggttcgctcgagaacaacaatggcgccctcctcacgaaacgaactcacacgaaccaaactcaggacccggagttgactgatagtacactctatcccaatggctaccacttcccacccaggtatcccgtaaaagaacagattgagatgggtctaatttcattttggaattttttacaacaccgggttcggtttctttctcacgatctacggcctactcgttgttggctggggtggcatgctgttcctcttgctcgtgaacgcagcgcctgagatgtgctgggcacctgacccgcaaggagatggaaaatacttcaactgtaacgatatcaattcacctcgacgcatatggattgagatcggttcccagatccttaatgcacttttcagcgttacggggtttggattagcaccatggcgaatacgcgacctgtatctacttctccggtaccgacttcgcaaagatcaaaacgccttgcgacgcatcgcgggagtcggggtccatcgaggttggctgcgtctaccaggttccgatctgttaccaccaactctgggaccgaagaatatcgaagagacaaccgtcccgtacgatgtagatagcgttccttacccggtagagatgatacccaactctccgccaacgggtgtacgcgctccgcctaccaaactatggaagctcgatttcattgtgtggttcaatgtttggaacacgatatttcaaggcttcttagcgggattcatgtgggcgttaaatcgatacgatagaccgtcatggacaacgggcctctttgtcgctcttgctttgattgcttcgtcggccgctggcattatgcaggcgatacaacagaataatgtcaagaaagtggagggcgtgccgttaacgaagaaagaccaccagcgactacttcgcgataggcagatgggcataccccattataataacttcaaggacaaagatcctgctgtcgtcaaggagaagaagaagaaaagtctgtttagacgagggaaggaagcagagagtgttgtatgatcgctgctcatgttactaatgtattagataaagttaataaactgtcggataacactccgaataacctccgattatatgtcggactaatcagtgacttcaatagaggtaaaagcctgcggatcacgcttttgatagtctgtggtttagttacgtgacatcggacataatcaattttcagttcaatctcaaacatgtgcatttagattcgctgtggatgcaagttcgaatcgcctaggtctcaagccgtacctaaggtactggacacaacttcaccttagggtggtgctattcatactacctagtacctcctgaatagcggccagaggctacctggtagtgagcaataccattctccacctggactcccaacattataccagaatccactgcacacccctaaagaaatcctcttcacaatataccaacacatccatcgcacgttaccacgtcacgtcatatcatgttgcaagacagcacatccgtcacggctgggactgatgacacggccgatcttgctcgcatcgtgctggacaacctgcagtggcagcatgattggacacagctgcaaatacttacacattcacccacagatgggatacagttcccacggccaatagtcttcggcctgccacctcgccgcctgtatgttcatccagatgatcaagtggctttagtgaaatccggcgaagactctgataaaacgcttctcgagacacctgagtttgaatgggttttgccgacttacttggcagagaaatggagtaccaaggcgtttgcagaggtctttgattccctaccaccacaagtatcgaatcacccagatcgtccaaagcgcatggtattcgcccctatacatagtgattctactgtcacgtactacatcatgcatgatggtattgtgaaaccccgccagaattgaaatgcactccagccatacaactcgttggactacgcctctcagagctggaagatcactttctgtacttccatcctattaaacttgtcatatcctgataaggcatctgcaagtggcattacgttctgaaacatgaagctttgcagcgaaggttaacacttttctctgggctgtgagaaaatcgaagaggaatcttcctacctgaaaagatgctgctgcttcgcaagcaccttgagagcatctgggaagacagacctgaccggacatcgacccatttgcaatcgaatattcttgctataacatgatgccatcagtcaagtacttctacatcagcgaggcgaacgtactcgtatccatctgtggcagtgaaaggcatcttgcagtcaagtcagaaaggcagacgacaaagcttgatgggggtggtacctgatcgttgtgcacgccaatactgctgataaagccgaatggtcgcaccagacgatatgcagtttcaagagccgattttaatccaacgacttcaactactaggtctgctccacgtccgtctgtcacttccatctttggattcgcatcatttgttagcattcacaggcataggccacatgcccaaatgacttcacatactggaaagtcaaccattagcaacgcatgatctacagacgaaccatgcattccataccgattcttcttgtcgtgccttctggatctttcttgaaattgagaggctcagctcctagcttctgggcaatttcgaggcgactatcgatggcatcgatggcaaacagatgcttgggtttatactcaagtgccgagatgagagcacatagaccgacaggtccacagcctactatgacggctgtggcttccgagggggggtccactgcatcgagagcgttgaaagcatttctcgcgccaaagaagccagttggaaatatatcagccataagcagcaatgccttgtcatcaatctccgagggtgctttgaccagagttccgtctgcaaagggcactcgtacgtaatccgcctgcgcgccatccaacttctctgagccaaatagcatgctgtgaatacagcgcgacgaatatccatttttacaataaaagcaatttagactacatcagttagcttgtcgatcaatgcattccctgcgatcgtgatatgtaatgcataccaggaaacggtaaaggggcatacaactttgtcaccgaccttaacggtagtgacagctgctccgacctctgcaacgattcccgtgaattcgtgtcccattatcttgtgtatacacaagtgttaattaggctactccagctgttgccacgagttttcctctaaac

SEQ ID NO: 17965 - DNA, 729 bp, Muscodor strobelii
  misc_feature: SGI cDNA ID NO. 566012
  misc_feature: Encodes the peptide sequence at SEQ ID NO 17966
atgggcctcccgagcgagatgaacgccgtcgtatttgatggtccccgaagagagcagtaccaaaacttcaacatgaaagcgatgctattgtcaaagttaatatcgctggcctatgcggctcagagcttcacacgttcagagggcatgaaccagcttcaccaggttttgataatgggacacgaattcacgggaatcgttgcagaggtcggagcagctgtcactaccgttaaggtcggtgacaaagttgtatgcccctttaccgtttcctgtctaaattgcttttattgtaaaaatggatattcgtcgcgctgtattcacagcatgctatttggctcagagaagttggatggcgcgcaggcggattacgtacgagtgccctttgcagacggaactctggtcaaagcaccctcggagattgatgacaaggcattgctgcttatggctgatatatttccaactggcttctttggcgcgagaaatgctttcaacgctctcgatgcagtggaccccccctcggaagccacagccgtcatagtaggctgtggacctgtcggtctatgtgctctcatctcggcacttgagtataaacccaagcatctgtttgccatcgatgccatcgatagtcgcctcgaaattgcccagaagctaggagctgagcctctcaatttcaagaaagatccagaaggcacgacaagaagaatcggtatggaatgcatggttcgtctgtag

SEQ ID NO: 17966 - protein, 242 aa, Muscodor strobelii
  misc_feature: SGI Peptide ID NO. 566012
  misc_feature (33)..(135): Pfam Id: PF08240 Pfam Desc: Alcohol dehydrogenase GroES-like domain
  misc_feature (56)..(135): Pfam Id: PF08240 Pfam Desc: Alcohol dehydrogenase GroES-like domain
  misc_feature (172)..(219): Pfam Id: PF00107 Pfam Desc: Zinc-binding dehydrogenase
  misc_feature (7)..(234): NCBI GI: 256726612 Blast Desc: NECHADRAFT_93146 [Nectria haematococca mpVI 77-13-4]
  misc_feature (1)..(234): NCBI GI: 256729959 Blast Desc: [Nectria haematococca mpVI 77-13-4]
  misc_feature (1)..(234): NCBI GI: 46122009 Blast Desc: FG05382.1 [Gibberella zeae PH-1]
  misc_feature (3)..(234): NCBI GI: 171685994 Blast Desc: protein product [Podospora anserina] gi|170942958|emb|CAP68611.1| protein product [Podospora anserina]
  misc_feature (1)..(234): NCBI GI: 261197391 Blast Desc: alcohol dehydrogenase [Ajellomyces dermatitidis SLH14081] gi|239595728|gb|EEQ78309.1| alcohol dehydrogenase [Ajellomyces dermatitidis SLH14081]
  misc_feature (1)..(234): NCBI GI: 239606719 Blast Desc: alcohol dehydrogenase [Ajellomyces dermatitidis ER-3]
  misc_feature (1)..(234): NCBI GI: 119195159 Blast Desc: alcohol dehydrogenase, [Coccidioides immitis RS]
  misc_feature (1)..(234): NCBI GI: 240105007 Blast Desc: alcohol dehydrogenase, [Coccidioides posadasii C735 delta SOWgp]
  misc_feature (7)..(234): NCBI GI: 225682424 Blast Desc: alcohol dehydrogenase [Paracoccidioides brasiliensis Pb03]
  misc_feature (1)..(234): NCBI GI: 242785365 Blast Desc: alcohol dehydrogenase, zinc-containing, [Talaromyces stipitatus ATCC 10500] gi|218720726|gb|EED20145.1| alcohol dehydrogenase, zinc-containing, [Talaromyces stipitatus ATCC
  misc_feature (57)..(226): SWISSPROT Homolog: EC 1.1.1.284 S-(hydroxymethyl)glutathione dehydrogenase
MGLPSEMNAVVFDGPRREQYQNFNMKAMLLSKLISLAYAAQSFTRSEGMNQLHQVLIMGHEFTGIVAEVGAAVTTVKVGDKVVCPFTVSCLNCFYCKNGYSSRCIHSMLFGSEKLDGAQADYVRVPFADGTLVKAPSEIDDKALLLMADIFPTGFFGARNAFNALDAVDPPSEATAVIVGCGPVGLCALISALEYKPKHLFAIDAIDSRLEIAQKLGAEPLNFKKDPEGTTRRIGMECMVRL

SEQ ID NO: 17967 - DNA, 6143 bp, Muscodor strobelii
  misc_feature: SGI EST ID NO. CUFF.42402.2
  misc_feature: Variant of the nucleotide sequence at SEQ ID NO 17965
ggtatcggcacgtctacctacctcttctgagatgcggagtcttgtagccgaatcacaattcgttagccgctagccgcagttacgtagtttgtgaaagcttgcaattttggactatcctggtcgaagaaagtgcatcatgcaacttgcatctcggccgtcatcttcgattgcgcggaaacaaaagagtggagcctaagaattgttgcagattcacctccaactctgctccaacccccgggaagctctccgcaacatgctcgtaatagcgtgaagacgggtgtggaatgtgcaaggtctagtagacttttgaaagcattacgagttatgatcaatgcagcggttagcttgtatacagatgcttcacagcgcacggttaaaactttgcatattccaaatcgagcaaaatagtcttgtacgtgtgttatgcgaactggctgagaacattcgttaggcaaaggtaaggcaaaggcagaacggttgaaggagggattccggcgactgcggattttggtagcttatgtgggatcgacatttgcttgacaagtcggaacactccacctccatgccctgggtatgatctgacttgtcttccgtccacgtcctacatattgaaggtaaccatgtcagcaataatgacctcgcctacagtacatggcccgcctagcccacgcagccttcgcgacgaggcatatcctcatcagaactcccttaataaagaccgagaaaccgtgtatgcaaatgattcttctaatttacatgatggttgtattttccagttatttactatcaatagtgtattctccggccacttcaataacatcaataagatcaaatatgtttcggcgtcattttgttcatgctactcgctgcagtgcggtattacttgggcggtggaggcctcacatgccacgagtgctttgcccagaggatgctccaaagtccctcggctgggtggatcgacattcatagcatgattaggtcaaaagtacgaatacatcagtgataaaaccagttgtaacaatgtccaatggcgtgtacttgtacctgacgtggtccgtcgtcattacacatcatcgtttcagccgcttcggtttgcagtatgtgtcgtcggataggagccgctgagccgcctttcgagccgcatcttgtttcccgttgggactttcgacaacacctgatgaccgtgctggacagagcaaaccagtcacaggacatctaacaatgaaacaaaaggatttaggtatcaacaattgtgaaaagttgagtgaagcaattcttaggttgttgcaattcaattaacctcggaatttccatcgcagaaccccaaatcttaatgtaccaaatcggcatgtccttgttatgtgtatgtaggataggcctggggaatcgagaccatacctcatgcgagcatcgctgactttgttgccgtagcttgtgtacaccgcttttccttccgctgtggggcatgtactctgtcccatcgtgagaagcgcttcttggatgattgagaatgtatgcccggattcattgtatacataatcatcggcaagtgacccatcgcctagcgatactccttatagtcagggctgaggcttgctgtcattgtgtggcacaccgccaaagccaattacacaaaatgccagccttacaggacacatgcccagggcggccaagttcagaatcaagttggacaaactggttgggctggagacatggcgttgattaaaactctccgatgtgatatgcccccactccgtcaatgtgatgaatgtagaagaacacaagtgagcaatgcatcaggccgcttcaagtgttagatatcatcccgacccggaattcgcatccagtgttcttcggctctccgataatatggtaaatgagatcaatccgcccaatgctccaagacgaagctccagtgataaggacaatgaaaaagtctctccaatgtagcaggctataaagtgttcatcccttacgttcaatcgggtgccttcgagcgaaggcgctaacgtaaaatcaacttcacgctaccaacgtattccgacatcgctggctcaagacccatttgatatcgattgattaaaagtagctgtagcaaaaatacatcacaatttataagatgacaatttcaatatcagtaacagtgaaccactaagagtgacgcaaattagccatagtctcagttgaaatgggcctcccgagcgagatgaacgccgtcgtatttgatggtccccgtacgtaaattgcctttgaggtgaatattgtggagcaggcatccttcagttgttttcgctaggtaaaaggagttgaggaactgatgtgatctacggttgcgccaaatagacaaagtctcgttgcagaagagagcagtaccaaaacttcaacatgaaagcgatgctattgtcaaagttaatatcgctggcctatgcggctcagagcttcacacgttcagagggcatgaaccagcttcaccaggttttgtgagtagtttcaggtttagaggaaaactcgtggcaacagctggagtagcctaattaacacttgtgtatacacaagataatgggacacgaattcacgggaatcgttgcagaggtcggagcagctgtcactaccgttaaggtcggtgacaaagttgtatgcccctttaccgtttcctgtctaaattgcttttattgtaaaaatggatattcgtcgcgctgtattcacagcatgctatttggctcagagaagttggatggcgcgcaggcggattacgtacgagtgccctttgcagacggaactctggtcaaagcaccctcggagattgatgacaaggcattgctgcttatggctgatatatttccaactggcttctttggcgcgagaaatgctttcaacgctctcgatgcagtggaccccccctcggaagccacagccgtcatagtaggctgtggacctgtcggtctatgtgctctcatctcggcacttgagtataaacccaagcatctgtttgccatcgatgccatcgatagtcgcctcgaaattgcccagaagctaggagctgagcctctcaatttcaagaaagatccagaaggcacgacaagaagaatcggtatggaatgcatggttcgtctgtagatcatgcgttgctaatggttgactttccagtatgtgaagtcatttgggcatgtggcctatgcctgtgaatgctaacaaatgatgcgaatccaaagatggaagtgacagacggacgtggagcagacctagtagttgaagtcgttggattaaaatcggctcttgaaactgcatatcgtctggtgcgaccattcggctttatcagcagtattggcgtgcacaacgatcagatgcctttcactgccacagatggatacgagtacgttcgcctcgctgatgtagaagtacttgactgatggcatcatgttatagcaagaatattcgattgcaaatgggtcgatgtccggtcaggtctgtcttcccagatgctctcaaggtgcttgcgaagcagcagcatcttttcagcttcatgtttcagaacgtaatgccacttgcagatgccttatcaggatatgacaagtttaataggatggaagtacagaaagtgatcttccagctctgagaggcgtagtccaacgagttgtatggctggagtgcatttcaattctggcggggtttcacaataccatcatgcatgatgtagtacgtgacagtagaatcactatgtataggggcgaataccatgcgctttggacgatctgggtgattcgatacttgtggtggtagggaatcaaagacctctgcaaacgccttggtactccatttctctgccaagtaagtcggcaaaacccattcaaactcaggtgtctcgagaagcgttttatcagagtcttcgccggatttcactaaagccacttgatcatctggatgaacatacaggcggcgaggtggcaggccgaagactattggccgtgggaactgtatcccatctgtgggtgaatgtgtaagtatttgcagctgtgtccaatcatgctgccactgcaggttgtccagcacgatgcgagcaagatcggccgtgtcatcagtcccagccgtgacggatgtgctgtcttgcaacatgatatgacgtgacgtggtaacgtgcgatggatgtgttggtatattgtgaagaggatttctttaggggtgtgcagtggattctggtataatgttgggagtccaggtggagaatggtattgctcactaccaggtagcctctggccgctattcaggaggtactaggtagtatgaatagcaccaccctaaggtgaagttgtgtccagtaccttaggtacggcttgagacctaggcgattcgaacttgcatccacagcgaatctaaatgcacatgtttgagattgaactgaaaattgattatgtccgatgtcacgtaactaaaccacagactatcaaaagcgtgatccgcaggcttttacctctattgaagtcactgattagtccgacatataatcggaggttattcggagtgttatccgacagtttattaactttatctaatacattagtaacatgagcagcgatcatacaacactctctgcttccttccctcgtctaaacagacttttcttcttcttctccttgacgacagcaggatctttgtccttgaagttattataatggggtatgcccatctgcctatcgcgaagtagtcgctggtggtctttcttcgttaacggcacgccctatgacacaatcagagtcagtcactgctctccttgattgggtttggggttgatctcgagttcctggtcgtcttgggagaggaataagaataccagcatccgggactcgttccgctgtggttacttacctccactttcttgacattattctgttgtatcgcctgcataatgccagcggccgacgaagcaatcaaagcaagagcgacaaagaggcccgttgtcctaaaatgaaattagccttatggtcacgtcgcaaatcgtcgacttcccacgaggatcgacgcccttcccctgcaaaagggagcagattctggctatctcgtaaggtacgatgtctgctctagtacatccaagagattcatctggccggttaaacaagtcggccaggctcaacagatcctgttcataagatccttagatgtactagagagtaaatcgcacccagatggatcaaaacaagagaatgccgccacgaatcatggggtacaatgtgttgggtctgggttgttgcttaccatgacggtctatcgtatcgatttaacgcccacatgaatcccgctaagaagccttgaaatatcgtgttccaaacattgaaccacacaatgaaatcgagcttccatagtttggtaggcggagcgcgtacacccgttggcggagagttgggtatcatctctaccgggtaaggaacgctatctacatcgtacgggacggttgtctcttcgatattcttcggtcccagagttggtggtaacagatcggaacctggtagacgcagccaacctcgatggaccccgactcccgcgatgcgtcgcaaggcgttttgatctttgcgaagtcggtaccggagaagtagatacaggtcgcgtattcgccatggtgctaatccaaaccccgtaacgctgaaaagtgcattaaggatctgggaaccgatctcaatccatatgcgtcgaggtgaattgatatcgttacagttgaagtattttccatctccttgcgggtcaggtgcccagcacatctcaggcgctgcgttcacgagcaagaggaacagcatgccaccccagccaacaacgagtaggccgtagatcgtgagaaagaaaccgaacccggtgttgtaaaaaattccaaaatgaaattagacccatctcaatctgttcttttacgggatacctgggtgggaagtggtagccattgggatagagtgtactatcagtcaactccgggtcctgagtttggttcgtgtgagttcgtttcgtgaggagggcgccattgttgttctcgagcgaacccgtagaggcccttggatcttgaggttctgccgacatgcctcacacgtgattaataccggagaagaacaggtgcaagaagaacgatgctaagttgaccacttgacattaggtatatatagaac

SEQ ID NO: 17968 - DNA, 1068 bp, Muscodor strobelii
  misc_feature: SGI cDNA ID NO. 566013
  misc_feature: Encodes the peptide sequence at SEQ ID NO 17969
atgggcctcccgagcgagatgaacgccgtcgtatttgatggtccccgaagagagcagtaccaaaacttcaacatgaaagcgatgctattgtcaaagttaatatcgctggcctatgcggctcagagcttcacacgttcagagggcatgaaccagcttcaccaggttttgataatgggacacgaattcacgggaatcgttgcagaggtcggagcagctgtcactaccgttaaggtcggtgacaaagttgtatgcccctttaccgtttcctgtctaaattgcttttattgtaaaaatggatattcgtcgcgctgtattcacagcatgctatttggctcagagaagttggatggcgcgcaggcggattacgtacgagtgccctttgcagacggaactctggtcaaagcaccctcggagattgatgacaaggcattgctgcttatggctgatatatttccaactggcttctttggcgcgagaaatgctttcaacgctctcgatgcagtggaccccccctcggaagccacagccgtcatagtaggctgtggacctgtcggtctatgtgctctcatctcggcacttgagtataaacccaagcatctgtttgccatcgatgccatcgatagtcgcctcgaaattgcccagaagctaggagctgagcctctcaatttcaagaaagatccagaaggcacgacaagaagaatcggtatggaatgcatgatggaagtgacagacggacgtggagcagacctagtagttgaagtcgttggattaaaatcggctcttgaaactgcatatcgtctggtgcgaccattcggctttatcagcagtattggcgtgcacaacgatcagatgcctttcactgccacagatggatacgacaagaatattcgattgcaaatgggtcgatgtccggtcaggtctgtcttcccagatgctctcaaggtgcttgcgaagcagcagcatcttttcagcttcatgtttcagaacgtaatgccacttgcagatgccttatcaggatatgacaagtttaataggatggaagtacagaaagtgatcttccagctctga

SEQ ID NO: 17969 - protein, 355 aa, Muscodor strobelii
  misc_feature: SGI Peptide ID NO. 566013
  misc_feature (33)..(135): Pfam Id: PF08240 Pfam Desc: Alcohol dehydrogenase GroES-like domain
  misc_feature (172)..(318): Pfam Id: PF00107 Pfam Desc: Zinc-binding dehydrogenase
  misc_feature (56)..(135): Pfam Id: PF08240 Pfam Desc: Alcohol dehydrogenase GroES-like domain
  misc_feature (7)..(354): NCBI GI: 256726612 Blast Desc: NECHADRAFT_93146 [Nectria haematococca mpVI 77-13-4]
  misc_feature (1)..(353): NCBI GI: 256729959 Blast Desc: [Nectria haematococca mpVI 77-13-4]
  misc_feature (1)..(354): NCBI GI: 239606719 Blast Desc: alcohol dehydrogenase [Ajellomyces dermatitidis ER-3]
  misc_feature (1)..(354): NCBI GI: 261197391 Blast Desc: alcohol dehydrogenase [Ajellomyces dermatitidis SLH14081] gi|239595728|gb|EEQ78309.1| alcohol dehydrogenase [Ajellomyces dermatitidis SLH14081]
  misc_feature (1)..(354): NCBI GI: 242785365 Blast Desc: alcohol dehydrogenase, zinc-containing, [Talaromyces stipitatus ATCC 10500] gi|218720726|gb|EED20145.1| alcohol dehydrogenase, zinc-containing, [Talaromyces stipitatus ATCC
  misc_feature (1)..(353): NCBI GI: 240105007 Blast Desc: alcohol dehydrogenase, [Coccidioides posadasii C735 delta SOWgp]
  misc_feature (1)..(354): NCBI GI: 212542981 Blast Desc: alcohol dehydrogenase, zinc-containing, [Penicillium marneffei ATCC 18224] gi|210066552|gb|EEA20645.1| alcohol dehydrogenase, zinc-containing, [Penicillium marneffei ATCC
  misc_feature (1)..(353): NCBI GI: 119195159 Blast Desc: alcohol dehydrogenase, [Coccidioides immitis RS]
  misc_feature (3)..(354): NCBI GI: 171685994 Blast Desc: protein product [Podospora anserina] gi|170942958|emb|CAP68611.1| protein product [Podospora anserina]
  misc_feature (1)..(355): NCBI GI: 46122009 Blast Desc: FG05382.1 [Gibberella zeae PH-1]
  misc_feature (57)..(347): SWISSPROT Homolog: EC 1.1.1.284 S-(hydroxymethyl)glutathione dehydrogenase
MGLPSEMNAVVFDGPRREQYQNFNMKAMLLSKLISLAYAAQSFTRSEGMNQLHQVLIMGHEFTGIVAEVGAAVTTVKVGDKVVCPFTVSCLNCFYCKNGYSSRCIHSMLFGSEKLDGAQADYVRVPFADGTLVKAPSEIDDKALLLMADIFPTGFFGARNAFNALDAVDPPSEATAVIVGCGPVGLCALISALEYKPKHLFAIDAIDSRLEIAQKLGAEPLNFKKDPEGTTRRIGMECMMEVTDGRGADLVVEVVGLKSALETAYRLVRPFGFISSIGVHNDQMPFTATDGYDKNIRLQMGRCPVRSVFPDALKVLAKQQHLFSFMFQNVMPLADALSGYDKFNRMEVQKVIFQL

SEQ ID NO: 17970 - DNA, 6143 bp, Muscodor strobelii; identical to SEQ ID NO: 17967
  misc_feature: SGI EST ID NO. CUFF.42402.2
  misc_feature: Variant of the nucleotide sequence at SEQ ID NO 17968

SEQ ID NO: 17971 - DNA, 1692 bp, Muscodor strobelii
  misc_feature: SGI cDNA ID NO. 566014
  misc_feature: Reduced expression when VOC is produced
  misc_feature: Encodes the peptide sequence at SEQ ID NO 17972
atgtcgtcgcctaccggtgtagcatcggctcatgacccttcagctagcgacgtatatgatccggatgaggtactgccgcaaaatagccccttaatgaagccctatcgccccaaactcaaaccatcaccatctcctccggagatccccttacctctagtcagtcaatcacccagttttggtgaaaaagcatctaatcgtcggcgtaagatacaacctagccatggtgacgcgatattaatttaccaccttgacggtgggaaacatcccgatatttctcgagaagctggaaaagagccccttgacagctccgaagaggagagcggctgcgagtcagaagacaccatggacgaatctgaggaggaggatggcattcggagcaacgatatgtcaccagcaccgatgatgagtcgattctctagacctaccgcggaaatattagcaccaaacgctgcgtcgaatgcagaatcagcgtccgttgatttacagtccattgcgacaaatgtcttagcaccccctcaagctgcttcaaaacccacaggtatggacgacttacggcttcttgctacaagtgccctgggggcttaccaggccgccgccccagaaccaatggatatggaggatacgcaagatctggagaatcgagagaaaatggaacgccggccaagtgttattaaaagtccattggcaaatgaattacgagacccgactttgcaacctacgacccgacctgtacttgccccgccgcagtcaccctatactgcacatagcccaccagaaatgtactcgccacggcaacacacaccgggccaagtattaatgcatccgaataatgttcgctcgccttcaagcactattcgttccccttctagtattggcggagaacttgcccctattcaggtgtcttctccaaagtcggagtctgttggccacgaaaccctgccgtcgattcggtcacaattctatgaacaactacagggctcaccgaatgacccaaatgtgcgttcaccctcccagtttccccattctccggcttctcggcccactcgactcggtagtataacggggacccaattgtctccaccgatttctccaaatgattaccggaatagtatgccatcacctgcgagtacgttacttggtggtctaagtcctcacccatatggaagctcaaccggcaacagccatcgactgtcaggaggaccagattaccactccaatgctggtaagatagagcggccattggacattttaactcctcccacagataggattgcagataggatgagtattgacagcatgaccaatccacaggttggtcaatttgtatgcacattccaaggttgcaatgcgccaccgtttcagacgcaatatttgttaaattctcacgccaatgtgcattcgtcggctcgcccccactattgtcctgtaaaagggtgtccccggagcgagggcgggaaaggctttaaacgcaaaaatgagatgataaggcatggccttgtacacgattcgcctgggtatgtgtgcccgttctgcccagaccgggaacacaaatatcctaggccagataatttacagagacatgttcgcgttcatcatgtcgataaagacaaagatgacccggcattgcgagatgtgcttgcacagcgtccagatggaccgaatcgaggtcggcggcgtcgcggcgcgccttga

SEQ ID NO: 17972 - protein, 563 aa, Muscodor strobelii
  misc_feature: SGI Peptide ID NO. 566014
  misc_feature (1)..(551): NCBI GI: 85083485 Blast Desc: NCU06487 [Neurospora crassa OR74A] gi|28918213|gb|EAA27891.1| [Neurospora crassa OR74A]
  misc_feature (16)..(551): NCBI GI: 171685992 Blast Desc: protein product [Podospora anserina] gi|170942957|emb|CAP68610.1| protein product [Podospora anserina]
  misc_feature (311)..(551): NCBI GI: 256729772 Blast Desc: NECHADRAFT_47170 [Nectria haematococca mpVI 77-13-4]
  misc_feature (293)..(553): NCBI GI: 156051178 Blast Desc: SS1G_06996 [Sclerotinia sclerotiorum 1980] gi|154704774|gb|EDO04513.1| SS1G_06996 [Sclerotinia sclerotiorum 1980]
  misc_feature (291)..(551): NCBI GI: 46122007 Blast Desc: FG05381.1 [Gibberella zeae PH-1]
  misc_feature (424)..(554): NCBI GI: 261358426 Blast Desc: C2H2 type zinc finger domain-containing protein [Verticillium albo-atrum VaMs.102]
  misc_feature (413)..(561): NCBI GI: 115388387 Blast Desc: [Aspergillus terreus NIH2624] gi|114195783|gb|EAU37483.1| [Aspergillus terreus NIH2624]
  misc_feature (424)..(560): NCBI GI: 255951352 Blast Desc: Pc22g25580 [Penicillium chrysogenum Wisconsin 54-1255] gi|211593460|emb|CAP99846.1| Pc22g25580 [Penicillium chrysogenum Wisconsin 54-1255]
  misc_feature (439)..(563): NCBI GI: 169766658 Blast Desc: [Aspergillus oryzae RIB40] gi|83765655|dbj|BAE55798.1| protein product [Aspergillus oryzae]
  misc_feature (438)..(551): NCBI GI: 189202138 Blast Desc: conserved [Pyrenophora tritici-repentis Pt-1C-BFP] gi|187984504|gb|EDU49992.1| conserved [Pyrenophora tritici-repentis Pt-1C-BFP]
  misc_feature: Useful for introducing or modulating the production of volatile compounds
MSSPTGVASAHDPSASDVYDPDEVLPQNSPLMKPYRPKLKPSPSPPEIPLPLVSQSPSFGEKASNRRRKIQPSHGDAILIYHLDGGKHPDISREAGKEPLDSSEEESGCESEDTMDESEEEDGIRSNDMSPAPMMSRFSRPTAEILAPNAASNAESASVDLQSIATNVLAPPQAASKPTGMDDLRLLATSALGAYQAAAPEPMDMEDTQDLENREKMERRPSVIKSPLANELRDPTLQPTTRPVLAPPQSPYTAHSPPEMYSPRQHTPGQVLMHPNNVRSPSSTIRSPSSIGGELAPIQVSSPKSESVGHETLPSIRSQFYEQLQGSPNDPNVRSPSQFPHSPASRPTRLGSITGTQLSPPISPNDYRNSMPSPASTLLGGLSPHPYGSSTGNSHRLSGGPDYHSNAGKIERPLDILTPPTDRIADRMSIDSMTNPQVGQFVCTFQGCNAPPFQTQYLLNSHANVHSSARPHYCPVKGCPRSEGGKGFKRKNEMIRHGLVHDSPGYVCPFCPDREHKYPRPDNLQRHVRVHHVDKDKDDPALRDVLAQRPDGPNRGRRRRGAP

SEQ ID NO: 17973 - DNA, 8409 bp, Muscodor strobelii
  misc_feature: SGI EST ID NO. CUFF.42397.1
  misc_feature: Variant of the nucleotide sequence at SEQ ID NO 17971
cccaaatccagatatgcactgctacctaaccaccaataagcagtcagcactccaattcttgtacctatgcatcataaggtgcatgagatgttgctgatgaacagaccgctgttgtcattgacaagcgctggacgatattgggcgttgtaatgacagtgccgttctagtgatttcccctcactagaaacccacatcaagatacctctactcccatagtcaactaggcgcttttcagacacattatggaagtaaagtgctagtcatttaaagtgcacacaaatgcaagactcttttactttgtgtctctacgtatagagtcattcagtatagggaagacgtaaggacgcggtaccaatctcgagcacggctgttccatgtttacttttctatcattatcagttccaggcgcttccgagaggtgattggtagaagatgtatgtactatggctggccgctcatcttcgttgaatctgaaatgactgcccgacgttgcatgttgggcgttatgatataagatcagttatgcgagtactttgacggttagtcctagaccaagacacgacaggctgttggcctctgtctgccgtcataaggaaggcagacctaggtagctcgcgacctgaacgcagctgagaaatggtaggcaccatagcagaaaaaagaaagcagccactcagcaatcatatctgcctcaaatctgtggtcgccttgcttcagtctactctcgtctttcttcagccatttgcctcgcagcttcctgtgacgttctattctcgagcatataatccagccaattgcattaggtggaccagcaaactgccagcaactcgtccacgacgatctcatatctggtgtcgatagattcaaggctaggctcattgttggccatccagcgacggtccaggttgtctctgcaattgtcattgctctctattccctcgaatattgctgctgctccggggcacaattactgccgagtattgtttcgagagaatttcaaacgacattcatgctacattagtatttagcaaccactgatctggttcactccgccatcaatcttccgagtctgaaatgcatcgcatttcattgtatgctacaagtttcgtctaaatggtgtagtcttctctagctggagaccgcagaatttagctagcgagctcaacaagttgctagaaccacgagggtcgacctcagtgcgtcgaactcatttcaacccacctccactgttgtgcgagttggctttggatagcgaacagaacaagctcctgaaacggtcaacagcacgacaacgtgtcggcaaaatctcttcaagaaagtggccgattattaaatggttcgcgagcgggttttgcacgattgagtgctattacctgcctgcttctgctagagctttcgaggctgagaggggctgcccactgatccgctcaaacaccgatgcatcgtcttgtacgcccctggctggcctggtctgcactatcatcaagcctagcagggctgtgaggagttgcaattctacctgagagacgataagcgaagaagaaaaacctggactgagcgcaacgtttggttttctgctcagtgtcagttcaggttcgtcgtcttacctgtcattaatgacggctgaattgatatttcaagtcaagtaaagaagacacgacctgacgacatagagtggcatcgaaagtctttgtccactagtcatccaagctgacatattgctcttgattacccacgatacgccgcctggacagtgctcggtactcggcagatattgtacaagtactaagacgcaggcgatcatctgcgcggttaccattctgtcgccaaatatcacctttatcagtcttcgcacagtctacaattattacttgcatcgggaactgagagccccagactccagagccagagattttatcagggacatctccagacggtcggctacccacataaccccggacgatttcctaaacccagccgcacgtctcttgctgaccgttgggttcttggcaatcccaccttctgtcgtctcgggcggactggaagtacgcggatttgtactggtacaagatacaaattcagatcattgcattgccttctttcgttaccataccaggtgggcttctccttgaagtgggccaaccatccatttttgaggggaaactgacacctaaacactacgctctcgcggacaagattgaactcatcgctaccatatcaagagtattcatttgggttgggcgcgggtgcaaacctcccaatgggtttcgagtcatagttcgccttatctgcccacatacatacttgtagggtggtcgttcagagatccattgtcgttgttgcgtacctgcggtcatctgtacatctacataccagtgtatatgcgcatgcatgccttcatgtatgtgctgtatgtacgtggttactgacatcctaagcccaacctggcctgacgatcctgacctggccggccgtctgacattggacagtggatgggctgcatggtgtttctatctgtgctcttatacgcacatgcctgcatatcgctctggcgatttggcaatgcacattccgcccacgctcgcatcatcgctgccagcgtcctcgttttctcccctccatcagctccacttaaacccctgctggtaaccaccaattatcgcctcgcgaactcaagagtccaagcaggccgccaatccgctactggttttcactagccccagtagcaccagagaacgcaccacgcgagaagaggctccgcgacacccacactttcaccccgctttattgataaatatcgacgccaaaccttgctctttgcggcagcggctggtctgcagcggctccagttgaagctggagtcgaagtagccccagagcgatcagaaacaaagagatcaagcgagaaaacgtcctcaccggcgtctagagacggccacctttgctctacccattgtgagctaattaggtcacgagctgcttttcgtctctatctgtctagacactggggctaagggttcgattgaatattcatccagccagaggaaaaactcactgtccaaagaaagacattgtgaccatattggagtgctgtaccaatttctgttcccctccgaactcattaatacacgtacaaccttgggcgcttcaaggctctagctatattatatcgtgatcccctggtctcacgttccttgctcacgctctccgggtacctatttcactcctgcctacacacacctgtacaacctgtttcccgtctgtcgtcgcgttagtagcccgccttggaaatagcattcataggtacctcatcgctgcccctccggcctccagtttcaaacaaattcactgccatccttacgtttattttaagatcctgggatcctggtccgcagtagctttcctttacaaataccgctgttggtcttgtcttccccggatcttcgttggattgaccggctaccttttttgtccgacgtcccccatatcaggagcgcgttcgacttctttcatcagtccacgccttgtgagatcttgattgcgcggttttcaccgcgccactgggatttccaaggtgtgtgaggttatcttattcaattcgtccatcagcatcagcgtccaccagtagcgatttgtacttgcagcgatagctttacgccacgatcagatatcccagacagttgcagacggcagtacgcatgagttcatcagattatgtgaacgattttgttcttaattaccgaagactcaacctgcacttctgatgatgccctgaattcacagatgcgtgagtaacggccactccatgccatcgaccgagaacatgtcgtcgcctaccggtgtagcatcggctcatgacccttcagctagcgacgtatatgatccggatgaggtactgccgcaaaatagccccttaatgaagccctatcgccccaaactcaaaccatcaccatctcctccggagatccccttacctctaatacaacctagccatggtgacgcgatattaatttaccaccttgacggtgggaaacatcccgatatttctcgagaagctggaaaagagccccttgacagctccgaagaggagagcggctgcgagtcagaagacaccatggacgaatctgaggaggaggatggcattcggagcaacgatatgtcaccagcaccgatgatgagtcgattctctagacctaccgcggaaatattagcaccaaacgctgcgtcgaatgcagaatcagcgtccgttgatttacagtccattgcgacaaatgtcttagcaccccctcaagctgcttcaaaacccacaggtatggacgacttacggcttcttgctacaagtgccctgggggcttaccaggccgccgccccagaaccaatggatatggaggatacgcaagatctggagaatcgagagaaaatggaacgccggccaagtgttattaaaagtccattggcaaatgaattacgagacccgactttgcaacctacgacccgacctgtacttgccccgccgcagtcaccctatactgcacatagcccaccagaaatgtactcgccacggcaacacacaccgggccaagtattaatgcatccgaataatgttcgctcgccttcaagcactattcgttccccttctagtattggcggagaacttgcccctattcaggtgtcttctccaaagtcggagtctgttggccacgaaaccctgccgtcgattcggtcacaattctatgaacaactacagggctcaccgaatgacccaaatgtgcgttcaccctcccagtttccccattctccggcttctcggcccactcgactcggtagtataacggggacccaattgtctccaccgatttctccaaatgattaccggaatagtatgccatcacctgcgagtacgttacttggtggtctaagtcctcacccatatggaagctcaaccggcaacagccatcgactgtcaggaggaccagattaccactccaatgctggtaagatagagcggccattggacattttaactcctcccacagataggattgcagataggatgagtattgacagcatgaccaatccacaggttggtcaatttgtatgcacattccaaggttgcaatgcgccaccgtttcagacgcaatatttgttaaattctcacgccaatgtgcattcgtcggctcgcccccactattgtcctgtaaaagggtgtccccggagcgagggcgggaaaggctttaaacgcaaaaatgagatgataaggcatggccttgtacacgattcgcctgggtatgtgtgcccgttctgcccagaccgggaacacaaatatcctaggccagataatttacagagacatgttcgcgttcatcatgtcgataaagacaaagatgacccggcattgcgagatgtgcttgcacagcgtccagatggaccgaatcgaggtcggcggcgtcgcggcgcgccttgaaacaggttcaatacgtgtcgtggacacaaggagcagctccaagagggcctgctggtcaatgtacgatgtctccagtattacctttttgtttcatatccagcatcagatgtatgtattgctggcaaggaggattaagagaaggaagcctccccacctacgcgctatgagagatgagcgacgagcgacgagaaacgactcttatatgaatttcgtccctgaagcgcaatataccctttgacagatttcgttgacacaaagcttctgtcaccatgaactgcaacgtcttctcggagcgattagacaatgacgtgacataaatattacacaaatctcgagtatttcttgaattctgggcgttgagtagctaggtttcctcctatgctagcaactgtgacgtatttggcagctatatctacctactcatcgacaatttcccacgcgcccacagttataagtccatcactcagcaactcgacctgaaaactactactttgtaacagggaactactcatctgctcaacaactagccagaacatccttgcttgagagactcgggggtcaagatcacactccgaagtccgcaaccccaaaccaacttcctcgaactcccccatgcccgttgaaataagtacatcacgatgtgacccgctcccgctctcaattgctgcgcgcactgctgaatgtgatcggggtgttccgtgtgaactcttgctatggccgctcgacgcagtatctctcgtcatgatcatgctgacacgtgtaaggcggttgaccgagacgcgagcacgcatcttgtgctgatcgcggccaaatgctgcgggaggaggcctggtccgtagaagacccgcagcatcagcaagaactggagtaatatcacagtagacatcacagccaacgcgcaacgtgaagtcggccatttggcctgcttcaaaagttgaacagacaatagtgtaggtaccggcatccaccatagggaggaacgcgagagcgcaacctcggcgataatcgccggaatgtccaactaggtcacgaaccgtcactgcagtgacgcgttgcccatcagcccatacaagatccacatgcacgggaagatcatccttggcggtcgatagcaggatcgagaggggtccggcctgtgtaattgcgatgctgaattggggattcgtcagatatgtgggtgaggcggaattgccgccgcttgtgcgacgtgtccagctgctgtgtaactcggaataatgtttcaaggcatcttgtgccggagctacggtgagacttgtgcgggagaagaatgtgagcgtgaacgaatagcttggaagaggcaaatcctggactgcaacgacaactgtgtattttacccccttctttgactcgaaggaagcgagtgtttgaggcgagtctacaaagggcccccggtaaattgacttgtcacttagctctactcgtttcccttggttgtcgaatatgtaaatgctcatgaagccgagcaaatttgaaacagctgccatagaggtggcacgcgttcgagcaatttccaattcgccatcttggaaatgacgggttagcagtacccacgtttgatcatcgcgttctgccatcatagagtattgtgggttttttgcgaatgagccgaccagatttgcttccggcagttcccaggtgaaatggtagtcttggcgttgagtgaacagacttggattccaattcaagtagagtgactcaaaatgctgtgtcatgtcgtcgaacgaaatccaaaaagacccgggcttcaacttcacaggtcgatcataagttttgggagttgatggactagatccaccccctttccagacaagcccctcgcaccaagggttcttaactaaaagcatcctgctatctttgtcttgatcttcaaacatatcgagcaccgcgtaatcgtgctcgcctgccaggcctagaatctcttcttcgtcaggcgatagccgccccgtaccgagagtgatgacaacatctccatagtcataggcttttttaatccttctccaagtcgcgttcaagtccagctcatcactccggaggattagttgttgagggatccagcctgtcaagatggacagatctgtacccgaattgctgcctggaaagtcatatcccccgcgaatcttaagataagctttctcaatgagagcaggccacagcaggtttggattccgccgatcgacaacatataatgttcgatcactgaatgaagccgggagacgatcatcaatgactactttgcggaagcagccgttgaagaacatacgaaagatgtagcgtccgttcttggcgactgtgggttgaccattccttgtatctgttggaaacataagagccgggaggatggagctagaacctggacgtagatgcctcatactggcacataggctagctacgactgagcaatctgttgttatgtcctgtactagatcgtaatcatcttcagccaccagatcgttgcctccccaagcattggcgggcccaaattcttcgctaataatctcattaggccgtttccaaccagcgaaaacagcttgctgcttagacgatagagtaaataaggaggggtcgcttgaggtaattagcaacacaaacgtcggcatctattgtggtgcgtattacctatatatatcaccatgaaaactatctggctcgggatccgattcccagggcgggaatgtgttaccgtgaagacgcgaactgcgatataatatgtttttttcgctagtcggtatctttcgcacttgaggtggcagcttgagccgcctttctacgtcagcaatgctatctgttgatcgtgcagacttcttgagcttttcagctgtctgtattagctgctcgcacttctttttgagacgtgctttgtcctggggagtattagacttatggacagctttcatgtaatactctgccgccgcaatgacatggtcg

SEQ ID NO: 17974 - DNA, 1641 bp, Muscodor strobelii
  misc_feature: SGI cDNA ID NO. 566015
  misc_feature: Elevated expression when VOC is produced
  misc_feature: Encodes the peptide sequence at SEQ ID NO 17975
atgtcgtcgcctaccggtgtagcatcggctcatgacccttcagctagcgacgtatatgatccggatgaggtactgccgcaaaatagccccttaatgaagccctatcgccccaaactcaaaccatcaccatctcctccggagatccccttacctctaatacaacctagccatggtgacgcgatattaatttaccaccttgacggtgggaaacatcccgatatttctcgagaagctggaaaagagccccttgacagctccgaagaggagagcggctgcgagtcagaagacaccatggacgaatctgaggaggaggatggcattcggagcaacgatatgtcaccagcaccgatgatgagtcgattctctagacctaccgcggaaatattagcaccaaacgctgcgtcgaatgcagaatcagcgtccgttgatttacagtccattgcgacaaatgtcttagcaccccctcaagctgcttcaaaacccacaggtatggacgacttacggcttcttgctacaagtgccctgggggcttaccaggccgccgccccagaaccaatggatatggaggatacgcaagatctggagaatcgagagaaaatggaacgccggccaagtgttattaaaagtccattggcaaatgaattacgagacccgactttgcaacctacgacccgacctgtacttgccccgccgcagtcaccctatactgcacatagcccaccagaaatgtactcgccacggcaacacacaccgggccaagtattaatgcatccgaataatgttcgctcgccttcaagcactattcgttccccttctagtattggcggagaacttgcccctattcaggtgtcttctccaaagtcggagtctgttggccacgaaaccctgccgtcgattcggtcacaattctatgaacaactacagggctcaccgaatgacccaaatgtgcgttcaccctcccagtttccccattctccggcttctcggcccactcgactcggtagtataacggggacccaattgtctccaccgatttctccaaatgattaccggaatagtatgccatcacctgcgagtacgttacttggtggtctaagtcctcacccatatggaagctcaaccggcaacagccatcgactgtcaggaggaccagattaccactccaatgctggtaagatagagcggccattggacattttaactcctcccacagataggattgcagataggatgagtattgacagcatgaccaatccacaggttggtcaatttgtatgcacattccaaggttgcaatgcgccaccgtttcagacgcaatatttgttaaattctcacgccaatgtgcattcgtcggctcgcccccactattgtcctgtaaaagggtgtccccggagcgagggcgggaaaggctttaaacgcaaaaatgagatgataaggcatggccttgtacacgattcgcctgggtatgtgtgcccgttctgcccagaccgggaacacaaatatcctaggccagataatttacagagacatgttcgcgttcatcatgtcgataaagacaaagatgacccggcattgcgagatgtgcttgcacagcgtccagatggaccgaatcgaggtcggcggcgtcgcggcgcgccttga

SEQ ID NO: 17975 - protein, 546 aa, Muscodor strobelii
  misc_feature: SGI Peptide ID NO. 566015
  misc_feature (1)..(534): NCBI GI: 85083485 Blast Desc: NCU06487 [Neurospora crassa OR74A] gi|28918213|gb|EAA27891.1| [Neurospora crassa OR74A]
  misc_feature (16)..(534): NCBI GI: 171685992 Blast Desc: protein product [Podospora anserina] gi|170942957|emb|CAP68610.1| protein product [Podospora anserina]
  misc_feature (294)..(534): NCBI GI: 256729772 Blast Desc: NECHADRAFT_47170 [Nectria haematococca mpVI 77-13-4]
  misc_feature (276)..(536): NCBI GI: 156051178 Blast Desc: SS1G_06996 [Sclerotinia sclerotiorum 1980] gi|154704774|gb|EDO04513.1| SS1G_06996 [Sclerotinia sclerotiorum 1980]
  misc_feature (274)..(534): NCBI GI: 46122007 Blast Desc: FG05381.1 [Gibberella zeae PH-1]
  misc_feature (407)..(537): NCBI GI: 261358426 Blast Desc: C2H2 type zinc finger domain-containing protein [Verticillium albo-atrum VaMs.102]
  misc_feature (407)..(543): NCBI GI: 255951352 Blast Desc: Pc22g25580 [Penicillium chrysogenum Wisconsin 54-1255] gi|211593460|emb|CAP99846.1| Pc22g25580 [Penicillium chrysogenum Wisconsin 54-1255]
  misc_feature (396)..(544): NCBI GI: 115388387 Blast Desc: [Aspergillus terreus NIH2624] gi|114195783|gb|EAU37483.1| [Aspergillus terreus NIH2624]
  misc_feature (422)..(546): NCBI GI: 169766658 Blast Desc: [Aspergillus oryzae RIB40] gi|83765655|dbj|BAE55798.1| protein product [Aspergillus oryzae]
  misc_feature (421)..(534): NCBI GI: 189202138 Blast Desc: conserved [Pyrenophora tritici-repentis Pt-1C-BFP] gi|187984504|gb|EDU49992.1| conserved [Pyrenophora tritici-repentis Pt-1C-BFP]
  misc_feature: Useful for introducing or modulating the production of volatile compounds
MSSPTGVASAHDPSASDVYDPDEVLPQNSPLMKPYRPKLKPSPSPPEIPLPLIQPSHGDAILIYHLDGGKHPDISREAGKEPLDSSEEESGCESEDTMDESEEEDGIRSNDMSPAPMMSRFSRPTAEILAPNAASNAESASVDLQSIATNVLAPPQAASKPTGMDDLRLLATSALGAYQAAAPEPMDMEDTQDLENREKMERRPSVIKSPLANELRDPTLQPTTRPVLAPPQSPYTAHSPPEMYSPRQHTPGQVLMHPNNVRSPSSTIRSPSSIGGELAPIQVSSPKSESVGHETLPSIRSQFYEQLQGSPNDPNVRSPSQFPHSPASRPTRLGSITGTQLSPPISPNDYRNSMPSPASTLLGGLSPHPYGSSTGNSHRLSGGPDYHSNAGKIERPLDILTPPTDRIADRMSIDSMTNPQVGQFVCTFQGCNAPPFQTQYLLNSHANVHSSARPHYCPVKGCPRSEGGKGFKRKNEMIRHGLVHDSPGYVCPFCPDREHKYPRPDNLQRHVRVHHVDKDKDDPALRDVLAQRPDGPNRGRRRRGAP

SEQ ID NO: 17976 - DNA, 8409 bp, Muscodor strobelii; identical to SEQ ID NO: 17973
  misc_feature: SGI EST ID NO. CUFF.42397.1
  misc_feature: Variant of the nucleotide sequence at SEQ ID NO 17974

SEQ ID NO: 17977 - DNA, 2541 bp, Muscodor strobelii
  misc_feature: SGI cDNA ID NO. 566016
  misc_feature: Encodes the peptide sequence at SEQ ID NO 17978
atggaggccacagccaaggaacatgagcgactggcttcgagttgctccggcaaggaagctctcgaccatgtcattgcggcggcagagtattacatgaaagctgtccataagtctaatactccccaggacaaagcacgtctcaaaaagaagtgcgagcagctaatacagacagctgaaaagctcaagaagtctgcacgatcaacagatagcattgctgacgtagaaaggcggctcaagctgccacctcaagtgcgaaagataccgactagcgaaaaaaacatattatatcgcagttcgcgtcttcacggtaacacattcccgccctgggaatcggatcccgagccagatagttttcatggtgatatatatagcgacccctccttatttactctatcgtctaagcagcaagctgttttcgctggttggaaacggcctaatgagattattagcgaagaatttgggcccgccaatgcttggggaggcaacgatctggtggctgaagatgattacgatctagtacaggacataacaacagattgctcagtcgtagctagcctatgtgccagtatgaggcatctacgtccaggttctagctccatcctcccggctcttatgtttccaacagatacaaggaatggtcaacccacagtcgccaagaacggacgctacatctttcgtatgttcttcaacggctgcttccgcaaagtagtcattgatgatcgtctcccggcttcattcagtgatcgaacattatatgttgtcgatcggcggaatccaaacctgctgtggcctgctctcattgagaaagcttatcttaagattcgcgggggatatgactttccaggcagcaattcgggtacagatctgtccatcttgacaggctggatccctcaacaactaatcctccggagtgatgagctggacttgaacgcgacttggagaaggattaaaaaagcctatgactatggagatgttgtcatcactctcggtacggggcggctatcgcctgacgaagaagagattctaggcctggcaggcgagcacgattacgcggtgctcgatatgtttgaagatcaagacaaagatagcaggatgcttttagttaagaacccttggtgcgaggggcttgtctggaaagggggtggatctagtccatcaactcccaaaacttatgatcgacctgtgaagttgaagcccgggtctttttggatttcgttcgacgacatgacacagcattttgagtcactctacttgaattggaatccaagtctgttcactcaacgccaagactaccatttcacctgggaactgccggaagcaaatctggtcggctcattcgcaaaaaacccacaatactctatgatggcagaacgcgatgatcaaacgtgggtactgctaacccgtcatttccaagatggcgaattggaaattgctcgaacgcgtgccacctctatggcagctgtttcaaatttgctcggcttcatgagcatttacatattcgacaaccaagggaaacgagtagagctaagtgacaagtcaatttaccgggggccctttgtagactcgcctcaaacactcgcttccttcgagtcaaagaagggggtaaaatacacagttgtcgttgcagtccaggatttgcctcttccaagctattcgttcacgctcacattcttctcccgcacaagtctcaccgtagctccggcacaagatgccttgaaacattattccgagttacacagcagctggacacgtcgcacaagcggcggcaattccgcctcacccacatatctgacgaatccccaattcagcatcgcaattacacaggccggacccctctcgatcctgctatcgaccgccaaggatgatcttcccgtgcatgtggatcttgtatgggctgatgggcaacgcgtcactgcagtgacggttcgtgacctagttggacattccggcgattatcgccgaggttgcgctctcgcgttcctccctatggtggatgccggtacctacactattgtctgttcaacttttgaagcaggccaaatggccgacttcacgttgcgcgttggctgtgatgtctactgtgatattactccagttcttgctgatgctgcgggtcttctacggaccaggcctcctcccgcagcatttggccgcgatcagcacaagatgcgtgctcgcgtctcggtcaaccgccttacacgtgtcagcatgatcatgacgagagatactgcgtcgagcggccatagcaagagttcacacggaacaccccgatcacattcagcagtgcgcgcagcaattgagagcgggagcgggtcacatcgtgatgtacttatttcaacgggcatgggggagttcgaggaagttggtttggggttgcggacttcggagtgtgatcttgacccccgagtctctcaagcaaggatgttctggctagttgttgagcagatgagtagttccctgttacaaagtagtagttttcaggtcgagttgctgagtgatggacttataactgtgggcgcgtgggaaattgtcgatgagtag

SEQ ID NO: 17978 - protein, 846 aa, Muscodor strobelii
  misc_feature: SGI Peptide ID NO. 566016
  misc_feature (122)..(419): Pfam Id: PF00648 Pfam Desc: Calpain family cysteine protease
  misc_feature (236)..(278): Pfam Id: PF00648 Pfam Desc: Calpain family cysteine protease
  misc_feature (1)..(840): NCBI GI: 256729960 Blast Desc: NECHADRAFT_95654 [Nectria haematococca mpVI 77-13-4]
  misc_feature (1)..(801): NCBI GI: 46122005 Blast Desc: FG05380.1 [Gibberella zeae PH-1]
  misc_feature (7)..(846): NCBI GI: 73921587 Blast Desc: FG05380.1 [Gibberella zeae PH-1]
  misc_feature (6)..(846): NCBI GI: 39976865 Blast Desc: MGG_06335 [Magnaporthe grisea 70-15] gi|145016266|gb|EDK00756.1| MGG_06335 [Magnaporthe grisea 70-15]
  misc_feature (7)..(846): NCBI GI: 85086932 Blast Desc: NCU00317 [Neurospora crassa OR74A] gi|28918883|gb|EAA28552.1| NCU00317 [Neurospora crassa OR74A]
  misc_feature (1)..(841): NCBI GI: 154299194 Blast Desc: BC1G_11775 [Botryotinia fuckeliana B05.10] gi|150857478|gb|EDN32670.1| BC1G_11775 [Botryotinia fuckeliana B05.10]
  misc_feature (18)..(738): NCBI GI: 171685982 Blast Desc: protein product [Podospora anserina] gi|170942952|emb|CAP68605.1| protein product [Podospora anserina]
  misc_feature (1)..(841): NCBI GI: 239609386 Blast Desc: calpain-like protease palB [Ajellomyces dermatitidis ER-3]
  misc_feature (1)..(843): NCBI GI: 225562961 Blast Desc: cysteine protease PalB [Ajellomyces capsulatus G186AR]
  misc_feature (1)..(843): NCBI GI: 240279782 Blast Desc: cysteine protease PalB [Ajellomyces capsulatus H143]
MEATAKEHERLASSCSGKEALDHVIAAAEYYMKAVHKSNTPQDKARLKKKCEQLIQTAEKLKKSARSTDSIADVERRLKLPPQVRKIPTSEKNILYRSSRLHGNTFPPWESDPEPDSFHGDIYSDPSLFTLSSKQQAVFAGWKRPNEIISEEFGPANAWGGNDLVAEDDYDLVQDITTDCSVVASLCASMRHLRPGSSSILPALMFPTDTRNGQPTVAKNGRYIFRMFFNGCFRKVVIDDRLPASFSDRTLYVVDRRNPNLLWPALIEKAYLKIRGGYDFPGSNSGTDLSILTGWIPQQLILRSDELDLNATWRRIKKAYDYGDVVITLGTGRLSPDEEEILGLAGEHDYAVLDMFEDQDKDSRMLLVKNPWCEGLVWKGGGSSPSTPKTYDRPVKLKPGSFWISFDDMTQHFESLYLNWNPSLFTQRQDYHFTWELPEANLVGSFAKNPQYSMMAERDDQTWVLLTRHFQDGELEIARTRATSMAAVSNLLGFMSIYIFDNQGKRVELSDKSIYRGPFVDSPQTLASFESKKGVKYTVVVAVQDLPLPSYSFTLTFFSRTSLTVAPAQDALKHYSELHSSWTRRTSGGNSASPTYLTNPQFSIAITQAGPLSILLSTAKDDLPVHVDLVWADGQRVTAVTVRDLVGHSGDYRRGCALAFLPMVDAGTYTIVCSTFEAGQMADFTLRVGCDVYCDITPVLADAAGLLRTRPPPAAFGRDQHKMRARVSVNRLTRVSMIMTRDTASSGHSKSSHGTPRSHSAVRAAIESGSGSHRDVLISTGMGEFEEVGLGLRTSECDLDPRVSQARMFWLVVEQMSSSLLQSSSFQVELLSDGLITVGAWEIVDE

SEQ ID NO: 17979 - DNA, 3623 bp, Muscodor strobelii
  misc_feature: SGI EST ID NO. CUFF.42398.3
  misc_feature: Variant of the nucleotide sequence at SEQ ID NO 17977
gactggttggacttcatctattccttcacctggtgccagttggcctggtctcggaatattccatcgccaatcacagcttacgctttggctcctgtacggccagaagatgatgtatgctcgagtgaccagcaaatccgataagccagctctttttcgctggcgtctattcttacaaacaaactgaccactgctaatactgtggtgtatgctcacctcatggccgagtcggcgggcctgaaaccgcaccgccaccatcacgaaacgctaagaggtatctcgtagttactgttcagtcaaaccgcgcacaaactttccatctcactatccgatcttctactattgcggttaccataggctcaatggaattattggccgtactctccaccggctctttgctttacccaaatgcaccaatccgcgatgcgatttaatgatccaattatcgacttaaaagaccacaacaatcaggggcttcatcgtgctcatgacaagggtacacactgaggtgtcaggcatgccgtgattgagtatagtaaataagtcacttcacgaaaggggtttcgtcatggaggccacagccaaggaacatgagcgactggcttcgagttgctccggcaaggaagctctcgaccatgtcattgcggcggcagagtattacatgaaagctgtccataagtctaatactccccaggacaaagcacgtctcaaaaagaagtgcgagcagctaatacagacagctgaaaagctcaagaagtctgcacgatcaacagatagcattgctgacgtagaaaggcggctcaagctgccacctcaagtgcgaaagataccgactagcgaaaaaaacatattatatcgcagttcgcgtcttcacggtaacacattcccgccctgggaatcggatcccgagccagatagttttcatggtgatatatatagcgacccctccttatttactctatcgtctaagcagcaagctgttttcgctggttggaaacggcctaatgagattattagcgaagaatttgggcccgccaatgcttggggaggcaacgatctggtggctgaagatgattacgatctagtacaggacataacaacagattgctcagtcgtagctagcctatgtgccagtatgaggcatctacgtccaggttctagctccatcctcccggctcttatgtttccaacagatacaaggaatggtcaacccacagtcgccaagaacggacgctacatctttcgtatgttcttcaacggctgcttccgcaaagtagtcattgatgatcgtctcccggcttcattcagtgatcgaacattatatgttgtcgatcggcggaatccaaacctgctgtggcctgctctcattgagaaagcttatcttaagattcgcgggggatatgactttccaggcagcaattcgggtacagatctgtccatcttgacaggctggatccctcaacaactaatcctccggagtgatgagctggacttgaacgcgacttggagaaggattaaaaaagcctatgactatggagatgttgtcatcactctcggtacggggcggctatcgcctgacgaagaagagattctaggcctggcaggcgagcacgattacgcggtgctcgatatgtttgaagatcaagacaaagatagcaggatgcttttagttaagaacccttggtgcgaggggcttgtctggaaagggggtggatctagtccatcaactcccaaaacttatgatcgacctgtgaagttgaagcccgggtctttttggatttcgttcgacgacatgacacagcattttgagtcactctacttgaattggaatccaagtctgttcactcaacgccaagactaccatttcacctgggaactgccggaagcaaatctggtcggctcattcgcaaaaaacccacaatactctatgatggcagaacgcgatgatcaaacgtgggtactgctaacccgtcatttccaagatggcgaattggaaattgctcgaacgcgtgccacctctatggcagctgtttcaaatttgctcggcttcatgagcatttacatattcgacaaccaagggaaacgagtagagctaagtgacaagtcaatttaccgggggccctttgtagactcgcctcaaacactcgcttccttcgagtcaaagaagggggtaaaatacacagttgtcgttgcagtccaggatttgcctcttccaagctattcgttcacgctcacattcttctcccgcacaagtctcaccgtagctccggcacaagatgccttgaaacattattccgagttacacagcagctggacacgtcgcacaagcggcggcaattccgcctcacccacatatctgacgaatccccaattcagcatcgcaattacacaggccggacccctctcgatcctgctatcgaccgccaaggatgatcttcccgtgcatgtggatcttgtatgggctgatgggcaacgcgtcactgcagtgacggttcgtgacctagttggacattccggcgattatcgccgaggttgcgctctcgcgttcctccctatggtggatgccggtacctacactattgtctgttcaacttttgaagcaggccaaatggccgacttcacgttgcgcgttggctgtgatgtctactgtgatattactccagttcttgctgatgctgcgggtcttctacggaccaggcctcctcccgcagcatttggccgcgatcagcacaagatgcgtgctcgcgtctcggtcaaccgccttacacgtgtcagcatgatcatgacgagagatactgcgtcgagcggccatagcaagagttcacacggaacaccccgatcacattcagcagtgcgcgcagcaattgagagcgggagcgggtcacatcgtgatgtacttatttcaacgggcatgggggagttcgaggaagttggtttggggttgcggacttcggagtgtgatcttgacccccgagtctctcaagcaaggatgttctggctagttgttgagcagatgagtagttccctgttacaaagtagtagttttcaggtcgagttgctgagtgatggacttataactgtgggcgcgtgggaaattgtcgatgagtaggtagatatagctgccaaatacgtcacagttgctagcataggaggaaacctagctactcaacgcccagaattcaagaaatactcgagatttgtgtaatatttatgtcacgtcattgtctaatcgctccgagaagacgttgcagttcatggtgacagaagctttgtgtcaacgaaatctgtcaaagggtatattgcgcttcagggacgaaattcatataagagtcgtttctcgtcgctcgtcgctcatctctcatagcgcgtaggtggggaggcttccttctcttaatcctccttgccagcaatacatacatctgatgctggatatgaaacaaaaaggtaatactggagacatcgtacattgaccagcaggccctcttggagctgctccttgtgtccacgacacgtattgaacctgtttcaaggcgcgccgcgacgccgccgacctcgattcggtccatctggacgctgtgcaagcacatctcgcaatgccgggtcatctttgtctttatcgacatgat

SEQ ID NO: 17980 - DNA, 1002 bp, Muscodor strobelii
  misc_feature: SGI cDNA ID NO. 566017
  misc_feature: Encodes the peptide sequence at SEQ ID NO 17981
atgcctgtccagtcaaagcctcttccgccttggggctctgctgtcgctggtgccactggcgctgttctagccaatgccttggtttaccctttggatatagtcaagacccgtcttcaagtccaagtaaagcagaccgcaggccaagtacacccaggttcagagccgcactacacgtcgacatgggatgcgatcactaaaatggtagcggaggatggtgtcatggggctctacgccggtatgcacggttcgttgatcggagtcgcatcgaccaattttgcctatttctactggtacaccattgtgcgcgaactttataacaagtctaagagattttcgcatccgccatcaacagcaacggagctggcactgggggctatcgctggtgcaattgcccaggtcttcacaatccctgtggctgtcgttacaacgaggcaacagacccagagcaaagcggacaggaaaggactgttggccacggctcgcgaagtgatcgatagtgaggatggaccatcgggtctttggcgagggttgaaggccagcttggtgcttgttgtgaacccagctattacctacggtgcttatgagcgcttaaagacggtcatgtttccagacaaggctcggttgacacctggggaagcattcttacttggtgctatgtcaaaggcattggctaccttcgtaacccagcccctcatcgttgccaaagtcggtctgcagtctaagcctccaccacaccgacaaggcaagcctttcaagggtttcatcgaagttatgcaattcattatcaagcatgagggtgttttaagcttgttcaagggtattggtccccaactcatgaagggtcttctggtgcagggcatccttatgatgacgaaagaaagaatggaactcatcttcgttcttctgttcagatatgtccggcaacttcgatcacaacagctggcgaaggcggccgaactagcagctaaagccaaggctactatgcctgtggttaccaaatag

SEQ ID NO: 17981 - protein, 333 aa, Muscodor strobelii
  misc_feature: SGI Peptide ID NO. 566017
  misc_feature (9)..(109): Pfam Id: PF00153 Pfam Desc: Mitochondrial carrier protein
  misc_feature (209)..(303): Pfam Id: PF00153 Pfam Desc: Mitochondrial carrier protein
  misc_feature (116)..(205): Pfam Id: PF00153 Pfam Desc: Mitochondrial carrier protein
  misc_feature (1)..(333): NCBI GI: 156051182 Blast Desc: SS1G_06998 [Sclerotinia sclerotiorum 1980] gi|154704776|gb|EDO04515.1| SS1G_06998 [Sclerotinia sclerotiorum 1980]
  misc_feature (1)..(333): NCBI GI: 154299196 Blast Desc: BC1G_11776 [Botryotinia fuckeliana B05.10] gi|150857479|gb|EDN32671.1| BC1G_11776 [Botryotinia fuckeliana B05.10]
  misc_feature (1)..(316): NCBI GI: 46122003 Blast Desc: FG05379.1 [Gibberella zeae PH-1]
  misc_feature (1)..(333): NCBI GI: 242803178 Blast Desc: peroxisomal carrier protein, [Talaromyces stipitatus ATCC 10500] gi|218717466|gb|EED16887.1| peroxisomal carrier protein, [Talaromyces stipitatus ATCC 10500]
  misc_feature (1)..(333): NCBI GI: 67515951 Blast Desc: AN0257.2 [Aspergillus nidulans FGSC A4] gi|40746974|gb|EAA66130.1| AN0257.2 [Aspergillus nidulans FGSC A4] gi|259489525|tpe|CBF89867.1| TPA: peroxisomal carrier FGSC
  misc_feature (1)..(333): NCBI GI: 145229175 Blast Desc: An01g04690 [Aspergillus niger] gi|134054996|emb|CAK37004.1| protein product [Aspergillus niger]
  misc_feature (1)..(333): NCBI GI: 255935499 Blast Desc: Pc13g03380 [Penicillium chrysogenum Wisconsin 54-1255] gi|211583396|emb|CAP91407.1| Pc13g03380 [Penicillium chrysogenum Wisconsin 54-1255]
  misc_feature (1)..(333): NCBI GI: 115388439 Blast Desc: conserved [Aspergillus terreus NIH2624] gi|114195809|gb|EAU37509.1| conserved [Aspergillus terreus NIH2624]
  misc_feature (1)..(333): NCBI GI: 119497085 Blast Desc: peroxisomal carrier protein, [Neosartorya fischeri NRRL 181] gi|119413472|gb|EAW23413.1| peroxisomal carrier protein, [Neosartorya fischeri NRRL 181]
  misc_feature (8)..(333): NCBI GI: 212539974 Blast Desc: peroxisomal carrier protein, [Penicillium marneffei ATCC 18224] gi|210067441|gb|EEA21533.1| peroxisomal carrier protein, [Penicillium marneffei ATCC 18224]
MPVQSKPLPPWGSAVAGATGAVLANALVYPLDIVKTRLQVQVKQTAGQVHPGSEPHYTSTWDAITKMVAEDGVMGLYAGMHGSLIGVASTNFAYFYWYTIVRELYNKSKRFSHPPSTATELALGAIAGAIAQVFTIPVAVVTTRQQTQSKADRKGLLATAREVIDSEDGPSGLWRGLKASLVLVVNPAITYGAYERLKTVMFPDKARLTPGEAFLLGAMSKALATFVTQPLIVAKVGLQSKPPPHRQGKPFKGFIEVMQFIIKHEGVLSLFKGIGPQLMKGLLVQGILMMTKERMELIFVLLFRYVRQLRSQQLAKAAELAAKAKATMPVVTK

SEQ ID NO: 17982 - DNA, 1695 bp, Muscodor strobelii
  misc_feature: SGI EST ID NO. CUFF.42456.1
  misc_feature: Variant of the nucleotide sequence at SEQ ID NO 17980
cagattgcctatgtctacgaccccccgtcgggtaaaccgacctcgcactcaaggtcacatcatcgcgacatgactttattgcggccctctgcaccgcgagacatcatttacaatttctagtgtgctttgtcgaggatctgggcaatcttcgcgcccccgagctcttaattttcttgccattgctgagcagttgttacctttcccagcagctcctcgagagaaacgcaccaacaaagtcagctttacgtccttcgctccgagtcacgcatattggtcgctggggtttatcctttgttaatgcttgagaatactcgagacattgttaaacgtacctatagtatcttgcctacaatcgtcgtaatttgtacttgctcgctgaacattgagtaaaatgcctgtccagtcaaagcctcttccgccttggggctctgctgtcgctggtgccactggcgctgttctagccaatgccttggtttaccctttggatatagtcaagacccgtcttcaagtccaagtaaagcagaccgcaggccaagtacacccaggttcagagccgcactacacgtcgacatgggatgcgatcactaaaatggtagcggaggatggtgtcatggggctctacgccggtatgcacggttcgttgatcggagtcgcatcgaccaattttgcctatttctactggtacaccattgtgcgcgaactttataacaagtctaagagattttcgcatccgccatcaacagcaacggagctggcactgggggctatcgctggtgcaattgcccaggtcttcacaatccctgtggctgtcgttacaacgaggcaacagacccagagcaaagcggacaggaaaggactgttggccacggctcgcgaagtgatcgatagtgaggatggaccatcgggtctttggcgagggttgaaggccagcttggtgcttgttgtgaacccagctattacctacggtgcttatgagcgcttaaagacggtcatgtttccagacaaggctcggttgacacctggggaagcattcttacttggtgctatgtcaaaggcattggctaccttcgtaacccagcccctcatcgttgccaaagtcggtctgcagtctaagcctccaccacaccgacaaggcaagcctttcaagggtttcatcgaagttatgcaattcattatcaagcatgagggtgttttaagcttgttcaagggtattggtccccaactcatgaagggtcttctggtgcagggcatccttatgatgacgaaagaaagaatggaactcatcttcgttcttctgttcagatatgtccggcaacttcgatcacaacagctggcgaaggcggccgaactagcagctaaagccaaggctactatgcctgtggttaccaaatagagaatcattatcgtgagctcttttaattgttctcggcagggaaatgggggaatacttgacatataagcactatttgtcttcatctgtgagaagagatgcgggaatagagatatccagatgtactcgagccacagcacgaccctgatcatttgtacataggccatgaaagtggggaccataggcgatagtgttgcattgcacatagaatcatttgcatgtttattacacttccaggagagagaaataaaccagaaacaataacgacgggacaacggcaaattaaaacttttgagagagtgtgc

SEQ ID NO: 17983 - DNA, 1830 bp, Muscodor strobelii
  misc_feature: SGI cDNA ID NO. 566018
  misc_feature: Encodes the peptide sequence at SEQ ID NO 17984
atgatgaatcgcaacagcacccccgaggcgggcactgcgtcctcgcttcgtccgccctcgtctcgtactatcggaagcgggtcagccctgcgtgcgtcggccgatatggctaacctcggcggtccttcagccgcgagtcgtatccgtccctcctccgacttctatggccagcaagggcaagctcaaggcggcgccgaggtcgactcgcaagacaagatgactcaacaatggattgcggacatcgaccagtacgagacaactttggaagagatggcagcagctactctcgaccaagacttcaaggatgagctcagtgctatcgaacagtggttccgggtcttgtccgaggccgagcggactgcttctctttatgccttacttcaacagacaacgcacgtccaaattcgttttttcattcaagttctccagcagatgggcaaaaaccatcccatgtcgggagtcttgtcgcccgccaattttgacaaagatccgatgtcaaaccgcctgagcgatgcgatgaataagctgaacgtcggatctgcacgtaactcgttatcgcagccccagccagccacgaagagacactcaggtcttgacccgtctgcgatcaactccatgtttcccgacgccgctgctgccattgcaaccgaaaagactagattcacgcagcaaactgggaagcagccgccgtcaaatcgtaacagcgccgcagttgatcctcgtaattctctgatcgcgcccacaatctccggcccgtctgatggcatcgatcccaacggccagaatccagcgtctccgtggggtaacaaccatgatcaaggcgcttcacgaccgaagtcttcatcatccggacaaccgcctatgggtcagttcgttcagccgacgccttccgctggcttgagatcaccacgaccccaactcggtggcaatggcaacattcaaaatacgacattgaacgcacctgacaagtcgggatcagatctccctctgctctccccttatggggctggaagtggcaattgggcgtccatggtgaacacacctatgacttcgacctttgccccaggcaccgccccaaatcaagccgacatggtggccaacgccacagcaatgaagcttgctgcgctctctaccgttaataatcgcttcgctctcgatgatgttcgcaaataccgccgggctcgatctaacgacacaaacgcacagaatcaggttggcatttcggcaggtcctcaaatgcccaacattcctggaacaaattttgtgatggtcaatgaacacgggcaattattgaacagagaccaaatgatggctctgcaaaaccaacaggcgatgggcaactttggggcgcatcgatcccgacctaattcgcccgggattgcgcttcaacccaccggattctcacaacagatgccctttacgtcccctcagaacaatgggttcttgagcgcatatgacggtcagaatccgctcctgggtgggttcggagctctcaatatggctcagcttggtgttggcgtcccggaaggatatctttccgaccactccgatatgaatcgcgggcggtcgccgcgagggcgccgtggcacctcgaaacccccggaggatcccactgatcctactttgcttcaggatataccagcgtggctgcggagtcttcgtctgcacaaatataccgatgtcctcaaggatatgaagtggaccgatctagttgagctagacgatgaggctttggagaagcgaggcgtcaacgcgttgggtgcccgtagaaagatgctcaaggtattcgaacaagtcaaagaggccaaagcagaaggcaagctgaactga

SEQ ID NO: 17984 - protein, 609 aa, Muscodor strobelii
  misc_feature: SGI Peptide ID NO. 566018
  misc_feature (538)..(602): Pfam Id: PF07647 Pfam Desc: SAM domain (Sterile alpha motif)
  misc_feature (539)..(600): Pfam Id: PF00536 Pfam Desc: SAM domain (Sterile alpha motif)
  misc_feature (3)..(608): NCBI GI: 46121999 Blast Desc: FG05377.1 [Gibberella zeae PH-1] gi|83308969|sp|Q4IBN1.1|VTS1_GIBZE RecName: Full=Protein VTS1
  misc_feature (3)..(608): NCBI GI: 256729774 Blast Desc: [Nectria haematococca mpVI 77-13-4]
  misc_feature (1)..(608): NCBI GI: 116207392 Blast Desc: conserved [Chaetomium globosum CBS 148.51] gi|88183586|gb|EAQ91054.1| conserved [Chaetomium globosum CBS 148.51]
  misc_feature (1)..(608): NCBI GI: 171685988 Blast Desc: protein product [Podospora anserina] gi|170942955|emb|CAP68608.1| protein product [Podospora anserina]
  misc_feature (3)..(608): NCBI GI: 156051186 Blast Desc: SS1G_07000 [Sclerotinia sclerotiorum 1980] gi|154704778|gb|EDO04517.1| SS1G_07000 [Sclerotinia sclerotiorum 1980]
  misc_feature (1)..(608): NCBI GI: 164429005 Blast Desc: protein VTS1 [Neurospora crassa OR74A] gi|161789043|sp|Q7RZQ3.2|VTS1_NEUCR RecName: Full=Protein VTS1 gi|157072371|gb|EAA28546.2| protein VTS1 [Neurospora crassa
  misc_feature (3)..(608): NCBI GI: 154299200 Blast Desc: BC1G_11778 [Botryotinia fuckeliana B05.10] gi|150857481|gb|EDN32673.1| BC1G_11778 [Botryotinia fuckeliana B05.10]
  misc_feature (3)..(600): NCBI GI: 39976863 Blast Desc: MGG_06334 [Magnaporthe grisea 70-15] gi|145016267|gb|EDK00757.1| MGG_06334 [Magnaporthe grisea 70-15]
  misc_feature (3)..(609): NCBI GI: 225563011 Blast Desc: SAM domain-containing protein [Ajellomyces capsulatus G186AR] gi|240279830|gb|EER43335.1| SAM domain-containing protein [Ajellomyces capsulatus H143]
  misc_feature (3)..(609): NCBI GI: 261188356 Blast Desc: protein vts1 [Ajellomyces dermatitidis SLH14081] gi|239593193|gb|EEQ75774.1| protein vts1 [Ajellomyces dermatitidis SLH14081] gi|239609337|gb|EEQ86324.1| protein vts1
MMNRNSTPEAGTASSLRPPSSRTIGSGSALRASADMANLGGPSAASRIRPSSDFYGQQGQAQGGAEVDSQDKMTQQWIADIDQYETTLEEMAAATLDQDFKDELSAIEQWFRVLSEAERTASLYALLQQTTHVQIRFFIQVLQQMGKNHPMSGVLSPANFDKDPMSNRLSDAMNKLNVGSARNSLSQPQPATKRHSGLDPSAINSMFPDAAAAIATEKTRFTQQTGKQPPSNRNSAAVDPRNSLIAPTISGPSDGIDPNGQNPASPWGNNHDQGASRPKSSSSGQPPMGQFVQPTPSAGLRSPRPQLGGNGNIQNTTLNAPDKSGSDLPLLSPYGAGSGNWASMVNTPMTSTFAPGTAPNQADMVANATAMKLAALSTVNNRFALDDVRKYRRARSNDTNAQNQVGISAGPQMPNIPGTNFVMVNEHGQLLNRDQMMALQNQQAMGNFGAHRSRPNSPGIALQPTGFSQQMPFTSPQNNGFLSAYDGQNPLLGGFGALNMAQLGVGVPEGYLSDHSDMNRGRSPRGRRGTSKPPEDPTDPTLLQDIPAWLRSLRLHKYTDVLKDMKWTDLVELDDEALEKRGVNALGARRKMLKVFEQVKEAKAEGKLN

SEQ ID NO: 17985 - DNA, 2981 bp, Muscodor strobelii
  misc_feature: SGI EST ID NO. CUFF.42423.0
  misc_feature: Variant of the nucleotide sequence at SEQ ID NO 17983
caaatatgtaccgtaccgctttctccaacgcctgggatccttcacacctccccgtccaccgccggttgccctccctcctcatctcaggccttcggtctgtatgacttcacttcctgtcttgctctctttctcccggcgtgccctgccttgagcctattaggccgaactgcgacctgcgctgttatcgcttcaatcagctgctccgacagacttgtctgccgagcttcgttttaggatataagcttattaatatctcaacgataccgataattccaccattcagcccctgcctcttcttcgacaactcctttgaggtcagcaggtcactgcaggagttctcgagacgatattaaccctccgccctctgccatacccgtgcttcgcaacccgtttggccaacacttacgaaacagcagctcgtcgcattctacggatcttcagggaattcaacgtctatggttattcacggtgttgacgatctgcttgaccatcctgctgtcgagcctcagtccatcggtagaccttgagagccatcgagcatcgcccccttcccacgttttatgccataaatatttggagtgctttgtacagagccagtggccgattattttccagcgactcgctattctagttattgtgcacaccaggaaactcgtgtgtatcatcggtcaacgtctgtcgtttttggaaaaccatctttgattttggatacatcccacctttttttacccatgatgaatcgcaacagcacccccgaggcgggcactgcgtcctcgcttcgtccgccctcgtctcgtactatcggaagcgggtcagccctgcgtgcgtcggccgatatggctaacctcggcggtccttcagccgcgagtcgtatccgtccctcctccgacttctatggccagcaagggcaagctcaaggcggcgccgaggtcgactcgcaagacaagatgactcaacaatggattgcggacatcgaccagtacgagacaactttggaagagatggcagcagctactctcgaccaagacttcaaggatgagctcagtgctatcgaacagtggttccgggtcttgtccgaggccgagcggactgcttctctttatgccttacttcaacagacaacgcacgtccaaattcgttttttcattcaagttctccagcagatgggcaaaaaccatcccatgtcgggagtcttgtcgcccgccaattttgacaaagatccgatgtcaaaccgcctgagcgatgcgatgaataagctgaacgtcggatctgcacgtaactcgttatcgcagccccagccagccacgaagagacactcaggtcttgacccgtctgcgatcaactccatgtttcccgacgccgctgctgccattgcaaccgaaaagactagattcacgcagcaaactgggaagcagccgccgtcaaatcgtaacagcgccgcagttgatcctcgtaattctctgatcgcgcccacaatctccggcccgtctgatggcatcgatcccaacggccagaatccagcgtctccgtggggtaacaaccatgatcaaggcgcttcacgaccgaagtcttcatcatccggacaaccgcctatgggtcagttcgttcagccgacgccttccgctggcttgagatcaccacgaccccaactcggtggcaatggcaacattcaaaatacgacattgaacgcacctgacaagtcgggatcagatctccctctgctctccccttatggggctggaagtggcaattgggcgtccatggtgaacacacctatgacttcgacctttgccccaggcaccgccccaaatcaagccgacatggtggccaacgccacagcaatgaagcttgctgcgctctctaccgttaataatcgcttcgctctcgatgatgttcgcaaataccgccgggctcgatctaacgacacaaacgcacagaatcaggttggcatttcggcaggtcctcaaatgcccaacattcctggaacaaattttgtgatggtcaatgaacacgggcaattattgaacagagaccaaatgatggctctgcaaaaccaacaggcgatgggcaactttggggcgcatcgatcccgacctaattcgcccgggattgcgcttcaacccaccggattctcacaacagatgccctttacgtcccctcagaacaatgggttcttgagcgcatatgacggtcagaatccgctcctgggtgggttcggagctctcaatatggctcagcttggtgttggcgtcccggaaggatatctttccgaccactccgatatgaatcgcgggcggtcgccgcgagggcgccgtggcacctcgaaacccccggaggatcccactgatcctactttgcttcaggatataccagcgtggctgcggagtcttcgtctgcacaaatataccgatgtcctcaaggatatgaagtggaccgatctagttgagctagacgatgaggctttggagaagcgaggcgtcaacgcgttgggtgcccgtagaaagatgctcaaggtattcgaacaagtcaaagaggccaaagcagaaggcaagctgaactgaatgatttcatccaaatctgtacactaggccggcattattagtagggtggttgtgctcttattgtgcatatgacctctcttgtgccaggttattggcagaggcccgagtctagaaatgccgctccgccagtggcgaagggtttatcgtttaagatatctgggagggatttactgacaatctccaatttcatggctagaagcaacacctaagaatagcagatattctatcaatgtaagcatatatgtaccggtcagagagtgatgattatacgtgaggtcttattggtctatggtgttaaacaataggaaaagcttgtcatcaacttcgagaaaaagaagaatatccacctgcgctatgcacccgttgtgaatgaaattcaatgcgaaccggatttgtttgatagcttgaacttgaaccccg

SEQ ID NO: 17986 - DNA, 3843 bp, Muscodor strobelii
  misc_feature: SGI cDNA ID NO. 566019
  misc_feature: Encodes the peptide sequence at SEQ ID NO 17987
atgagtggacagcagccatcatcaacgctcggtgctctgcagaagcacttcaaacagcagcagcaccaacagcagtctcttcatcgtgcagcggagcaaagagagtttcaggctgatcctcaagcgaccaagagacaagtgtatccaactggccctaacaccacgaactcgacaagtttcaccaatatacatggaacggcacagggtaccgaagactcaaatgctatctcgatcccagattggagatattactcacggccgatagcatcgaatggggcggttcatttctctcagcactcattttcaccgcactcgcctcactacctaagcagtaggaacttgcctagtaatgcgcctgtgccgcagtcatcgagctaccctgctccgcgtccagttaattataattatacgggttataatcaacagagtgattatcctttggatcattcagcgcgatacgcacggctctacgttccgccgggcactggaggatcagatgttttagggcaacaatcccagaggtcgatattgccgaggccaccgcctattggtcaagtgcaactcaactcttctgcatcatcatggaatgtccataacactcctacggtggagagaaatacagaataccgccgagatataccaagacccggtgagggagtagggggaaatgccatcgaactagctcaacaatcacggcaaactcttcataccaatctccaatttgcaccaggcgtcacaaatcaccatggccagccactcgccaaaggcaccactccagctgtctcgcaagatatcgccaataaggatatcaacttccattcagtcctccattctgctccagaaccccccaatggccggaatgatgtcactacagtgacgtctccggaaaatgatactatcgcacttgatacaggtaccgatgccctcctagaaagccaaatcgcaaatcgtgacgactcgggctcggaaaatgaaatacacagcagaccaccgcgacaaagtcgccgcggccacgggcgtcggggaggcaagcagccccgaggtgggaaacgtggtccgcgacaagctgccgagccaacaggtgatgtcaaaatgcgcattaatttggcagtgaatgcgtacacagaaggccggttcgaggaagccatcgattgggtacaggatgctatacgcatcaacgctgagatacaccgcgcttggacgctgcttgccacctgtctcgaagagattggagaactaaaacacagtttcatggcgaaagtctttgcttgtcatcttcagccaaaaattgtcgatagctggatggagtgtgcagaacgtggtgttggccttctgagccaacttcctgatgatgaagaggaggaggcggagaagggggagagggagaagatcactgcggaggttcttatctgctataataaggcactcagcgccgagcctcagcatcggcttgcccgccaatatagggccgctttgcacatggacgcggggcggatgcgagcagccgctagagactatatgtaccttcttgaccactgcgagtatgatatacacgctaccagagtctatgctgaaatatgtatggctcttgccagcaggggaaaacgcgataccgacaagccaaacagcgctgcattatactatcgtcgcgctatttcccaccttcagagtaacggcgtggatgatgacaatgcattccagtggcaagacgtgaatacgttcgttggattattgcttgaagccgggaaacccaaagaagctttatacgaactcaaatcccgggcaagatggttccttgggaggactagcgaagatttttgggacgactggcaagacgacgaccgtgaatgggatgttggagatgtacgccgaggagacgttgaagattatcaggagggcaactttccgccctcatcctatggttctagtcttccagcgggacttcgtgctaaattggtagtatgccggttgaaattaggtgatctggacgaagcacaggtgaacctcagacatatagagcccgagagcccacattggcaagacctgttgttagaggatccaagagctctcgtagacgttgctatggcattgtatacgtcggatcttcatccctctgcactacgtttcttcgagccaattctacagattcctgattccgacatccttgaacctcctaatctacttgcagcgggacgttgttacttggaggtagggaataagcgtcaagctgaagagtgtttcaccagcgcaatagatgaggaaaaggagaatagcgaggcttccatcgatgcacgctatgaattggcaaagatgtatgaggatgcgagagaggaccgcgaggcttatatccttgtcaacgaagctatcaagctacagcaagactacgatgaggccgcagatggttacgatgaagatagcgatcgtgagtaccagttccggcggagcgtaagagccatgaagaggcttccgggacgtcctccgcgtggacttcggccgatcagaccgaagcctagcaagtcgaatactgtccgtcgtgaacctcggagaccacggccgaagtattttgccgagaccgaagaactggagcgtgaaggcaggcaaaaagcaaacaatctcagcggagcgtgggaaacagttcgtgctgcccggattgccagccaagaagctagagtcgcagccaacggtccctcagattcgttcatggctgcggctaaggaacttatcgatgacttccgatcttacaaagccttctattcttgggagaaatatcttgccaacctgggtatcaatgagggcgagacggagttgacaatctcacgaaaccctaggctcctcgagatgaaggaacgactatcccataatctggatccccatgaatcaattcaagctagtagttggcgagcggccgtcagttatcgaggtgtccccttcggggaatggctcgaactcttcctcgaatacgccatcgcccttgctcatctagacaggtttcaggaagcctataaaatctgcgagtctgcgcgtgacgctgaagtctttgcgaagtccaaagaggacatgtttcttgttcatactacttgggcctcttgtgctttgcgcgctcgagacgaagagacatgtgtcgctgctgcacgatatatcatgagagacaggcagttcgaaacagatccattccgcatattctctgcactgtgcagactctgcccgtctcccgcctcgtggtacgcttccggcccggtccagaagtacatgatgcgccagatcaagctcatggaccatgcattgaggtcaggagagggcgaagccatagaggaggatgagccaaatatcggtggtgtagtaaaaacatatccaagtaaggagttggatgtgacactgctagtactatatggacacattttgtttgtgtccaatagcttcacatacgcattgaactattttctccgagcgtacagtatcgaccccgaaaatcagatgatcttgctcagcattggccaatgctacatacactatgcccttaaaagacaatcagaaaaccggcagtatcttctcgttcagggtttcgtgtttctgcaccgctactacgacatgaaagtcgcgtcggaagaccctattgaacgccaggaggctcactacaacatggctcgtagttatcacgcggtggggattccccattttgccgctgacttctaccagcgcacgctaagagatggcaaagacttgaacatcgatggggacgacgatctgtctcacgaggctgcgtataacttgcagcagatatgctatgccagtggtgatatggacgcagtgaagaagttgggcgagaaatatctgactgtctga

SEQ ID NO: 17987 - protein, 1280 aa, Muscodor strobelii
  misc_feature: SGI Peptide ID NO. 566019
  misc_feature (296)..(1280): NCBI GI: 171685990 Blast Desc: protein product [Podospora anserina] gi|170942956|emb|CAP68609.1| protein product [Podospora anserina]
  misc_feature (330)..(1233): NCBI GI: 46121997 Blast Desc: FG05376.1 [Gibberella zeae PH-1]
  misc_feature (310)..(1233): NCBI GI: 256729775 Blast Desc: NECHADRAFT_95657 [Nectria haematococca mpVI 77-13-4]
  misc_feature (318)..(1280): NCBI GI: 39976823 Blast Desc: MGG_06314 [Magnaporthe grisea 70-15] gi|145016289|gb|EDK00779.1| MGG_06314 [Magnaporthe grisea 70-15]
  misc_feature (355)..(1280): NCBI GI: 154299172 Blast Desc: BC1G_11764 [Botryotinia fuckeliana B05.10] gi|150857467|gb|EDN32659.1| BC1G_11764 [Botryotinia fuckeliana B05.10]
  misc_feature (318)..(1261): NCBI GI: 156051156 Blast Desc: SS1G_06985 [Sclerotinia sclerotiorum 1980] gi|154704763|gb|EDO04502.1| SS1G_06985 [Sclerotinia sclerotiorum 1980]
  misc_feature (350)..(1280): NCBI GI: 85086903 Blast Desc: NCU00310 [Neurospora crassa OR74A] gi|28918876|gb|EAA28545.1| [Neurospora crassa OR74A]
  misc_feature (330)..(1280): NCBI GI: 116207390 Blast Desc: CHGG_02988 [Chaetomium globosum CBS 148.51] gi|88183585|gb|EAQ91053.1| CHGG_02988 [Chaetomium globosum CBS 148.51]
  misc_feature (339)..(1280): NCBI GI: 121702795 Blast Desc: RNA polymerase III transcription factor TFIIIC subunit (Tfc4), [Aspergillus clavatus NRRL 1] gi|119397805|gb|EAW08236.1| RNA polymerase III transcription factor TFIIIC subunit (Tfc4), 1]
  misc_feature (339)..(1280): NCBI GI: 70990796 Blast Desc: RNA polymerase III transcription factor TFIIIC subunit (Tfc4), [Aspergillus fumigatus Af293] gi|66847879|gb|EAL88209.1| RNA polymerase III transcription factor TFIIIC subunit (Tfc4),
MSGQQPSSTLGALQKHFKQQQHQQQSLHRAAEQREFQADPQATKRQVYPTGPNTTNSTSFTNIHGTAQGTEDSNAISIPDWRYYSRPIASNGAVHFSQHSFSPHSPHYLSSRNLPSNAPVPQSSSYPAPRPVNYNYTGYNQQSDYPLDHSARYARLYVPPGTGGSDVLGQQSQRSILPRPPPIGQVQLNSSASSWNVHNTPTVERNTEYRRDIPRPGEGVGGNAIELAQQSRQTLHTNLQFAPGVTNHHGQPLAKGTTPAVSQDIANKDINFHSVLHSAPEPPNGRNDVTTVTSPENDTIALDTGTDALLESQIANRDDSGSENEIHSRPPRQSRRGHGRRGGKQPRGGKRGPRQAAEPTGDVKMRINLAVNAYTEGRFEEAIDWVQDAIRINAEIHRAWTLLATCLEEIGELKHSFMAKVFACHLQPKIVDSWMECAERGVGLLSQLPDDEEEEAEKGEREKITAEVLICYNKALSAEPQHRLARQYRAALHMDAGRMRAAARDYMYLLDHCEYDIHATRVYAEICMALASRGKRDTDKPNSAALYYRRAISHLQSNGVDDDNAFQWQDVNTFVGLLLEAGKPKEALYELKSRARWFLGRTSEDFWDDWQDDDREWDVGDVRRGDVEDYQEGNFPPSSYGSSLPAGLRAKLVVCRLKLGDLDEAQVNLRHIEPESPHWQDLLLEDPRALVDVAMALYTSDLHPSALRFFEPILQIPDSDILEPPNLLAAGRCYLEVGNKRQAEECFTSAIDEEKENSEASIDARYELAKMYEDAREDREAYILVNEAIKLQQDYDEAADGYDEDSDREYQFRRSVRAMKRLPGRPPRGLRPIRPKPSKSNTVRREPRRPRPKYFAETEELEREGRQKANNLSGAWETVRAARIASQEARVAANGPSDSFMAAAKELIDDFRSYKAFYSWEKYLANLGINEGETELTISRNPRLLEMKERLSHNLDPHESIQASSWRAAVSYRGVPFGEWLELFLEYAIALAHLDRFQEAYKICESARDAEVFAKSKEDMFLVHTTWASCALRARDEETCVAAARYIMRDRQFETDPFRIFSALCRLCPSPASWYASGPVQKYMMRQIKLMDHALRSGEGEAIEEDEPNIGGVVKTYPSKELDVTLLVLYGHILFVSNSFTYALNYFLRAYSIDPENQMILLSIGQCYIHYALKRQSENRQYLLVQGFVFLHRYYDMKVASEDPIERQEAHYNMARSYHAVGIPHFAADFYQRTLRDGKDLNIDGDDDLSHEAAYNLQQICYASGDMDAVKKLGEKYLTV

SEQ ID NO: 17988 - DNA, 4282 bp, Muscodor strobelii
  misc_feature: SGI EST ID NO. CUFF.42414.0
  misc_feature: Variant of the nucleotide sequence at SEQ ID NO 17986
attgttgaacatgacttccgactgaagtggtttctttttgtagaaatgtgaactccggaccggcagatacagatgatgattgacgatgacccactcatgacatagaatcgctgatccctggatacgttaaaaagaacatcattgcggctggcagttcatcgatcatcctccagcatggttctcacctgccatcgcaaatcgtgagcctgttcagaatgagtggacagcagccatcatcaacgctcggtgctctgcagaagcacttcaaacagcagcagcaccaacagcagtctcttcatcgtgcagcggagcaaagagagtttcaggctgatcctcaagcgaccaagagacaagtgtatccaactggccctaacaccacgaactcgacaagtttcaccaatatacatggaacggcacagggtaccgaagactcaaatgctatctcgatcccagattggagatattactcacggccgatagcatcgaatggggcggttcatttctctcagcactcattttcaccgcactcgcctcactacctaagcagtaggaacttgcctagtaatgcgcctgtgccgcagtcatcgagctaccctgctccgcgtccagttaattataattatacgggttataatcaacagagtgattatcctttggatcattcagcgcgatacgcacggctctacgttccgccgggcactggaggatcagatgttttagggcaacaatcccagaggtcgatattgccgaggccaccgcctattggtcaagtgcaactcaactcttctgcatcatcatggaatgtccataacactcctacggtggagagaaatacagaataccgccgagatataccaagacccggtgagggagtagggggaaatgccatcgaactagctcaacaatcacggcaaactcttcataccaatctccaatttgcaccaggcgtcacaaatcaccatggccagccactcgccaaaggcaccactccagctgtctcgcaagatatcgccaataaggatatcaacttccattcagtcctccattctgctccagaaccccccaatggccggaatgatgtcactacagtgacgtctccggaaaatgatactatcgcacttgatacaggtaccgatgccctcctagaaagccaaatcgcaaatcgtgacgactcgggctcggaaaatgaaatacacagcagaccaccgcgacaaagtcgccgcggccacgggcgtcggggaggcaagcagccccgaggtgggaaacgtggtccgcgacaagctgccgagccaacaggtgatgtcaaaatgcgcattaatttggcagtgaatgcgtacacagaaggccggttcgaggaagccatcgattgggtacaggatgctatacgcatcaacgctgagatacaccgcgcttggacgctgcttgccacctgtctcgaagagattggagaactaaaacacagtttcatggcgaaagtctttgcttgtcatcttcagccaaaaattgtcgatagctggatggagtgtgcagaacgtggtgttggccttctgagccaacttcctgatgatgaagaggaggaggcggagaagggggagagggagaagatcactgcggaggttcttatctgctataataaggcactcagcgccgagcctcagcatcggcttgcccgccaatatagggccgctttgcacatggacgcggggcggatgcgagcagccgctagagactatatgtaccttcttgaccactgcgagtatgatatacacgctaccagagtctatgctgaaatatgtatggctcttgccagcaggggaaaacgcgataccgacaagccaaacagcgctgcattatactatcgtcgcgctatttcccaccttcagagtaacggcgtggatgatgacaatgcattccagtggcaagacgtgaatacgttcgttggattattgcttgaagccgggaaacccaaagaagctttatacgaactcaaatcccgggcaagatggttccttgggaggactagcgaagatttttgggacgactggcaagacgacgaccgtgaatgggatgttggagatgtacgccgaggagacgttgaagattatcaggagggcaactttccgccctcatcctatggttctagtcttccagcgggacttcgtgctaaattggtagtatgccggttgaaattaggtgatctggacgaagcacaggtgaacctcagacatatagagcccgagagcccacattggcaagacctgttgttagaggatccaagagctctcgtagacgttgctatggcattgtatacgtcggatcttcatccctctgcactacgtttcttcgagccaattctacagattcctgattccgacatccttgaacctcctaatctacttgcagcgggacgttgttacttggaggtagggaataagcgtcaagctgaagagtgtttcaccagcgcaatagatgaggaaaaggagaatagcgaggcttccatcgatgcacgctatgaattggcaaagatgtatgaggatgcgagagaggaccgcgaggcttatatccttgtcaacgaagctatcaagctacagcaagactacgatgaggccgcagatggttacgatgaagatagcgatcgtgagtaccagttccggcggagcgtaagagccatgaagaggcttccgggacgtcctccgcgtggacttcggccgatcagaccgaagcctagcaagtcgaatactgtccgtcgtgaacctcggagaccacggccgaagtattttgccgagaccgaagaactggagcgtgaaggcaggcaaaaagcaaacaatctcagcggagcgtgggaaacagttcgtgctgcccggattgccagccaagaagctagagtcgcagccaacggtccctcagattcgttcatggctgcggctaaggaacttatcgatgacttccgatcttacaaagccttctattcttgggagaaatatcttgccaacctgggtatcaatgagggcgagacggagttgacaatctcacgaaaccctaggctcctcgagatgaaggaacgactatcccataatctggatccccatgaatcaattcaagctagtagttggcgagcggccgtcagttatcgaggtgtccccttcggggaatggctcgaactcttcctcgaatacgccatcgcccttgctcatctagacaggtttcaggaagcctataaaatctgcgagtctgcgcgtgacgctgaagtctttgcgaagtccaaagaggacatgtttcttgttcatactacttgggcctcttgtgctttgcgcgctcgagacgaagagacatgtgtcgctgctgcacgatatatcatgagagacaggcagttcgaaacagatccattccgcatattctctgcactgtgcagactctgcccgtctcccgcctcgtggtacgcttccggcccggtccagaagtacatgatgcgccagatcaagctcatggaccatgcattgaggtcaggagagggcgaagccatagaggaggatgagccaaatatcggtggtgtagtaaaaacatatccaagtaaggagttggatgtgacactgctagtactatatggacacattttgtttgtgtccaatagcttcacatacgcattgaactattttctccgagcgtacagtatcgaccccgaaaatcagatgatcttgctcagcattggccaatgctacatacactatgcccttaaaagacaatcagaaaaccggcagtatcttctcgttcagggtttcgtgtttctgcaccgctactacgacatgaaagtcgcgtcggaagaccctattgaacgccaggaggctcactacaacatggctcgtagttatcacgcggtggggattccccattttgccgctgacttctaccagcgcacgctaagagatggcaaagacttgaacatcgatggggacgacgatctgtctcacgaggctgcgtataacttgcagcagatatgctatgccagtggtgatatggacgcagtgaagaagttgggcgagaaatatctgactgtctgatggcaagacatgcggttctttcagaggtcaagatagtgtatattgtgtatactatgtatgaaatcacgaaagagacagcatatttacagttaatggctcttgaggctcttgactgttgtagatgaagacaagacgccaagggtacctgagataatgcaaatctaacagcagaccccagatgagaatagtcctgtgactctctaacttgtgtttggtctctgaag

SEQ ID NO: 17989 - DNA, 2625 bp, Muscodor strobelii
  misc_feature: SGI cDNA ID NO. 566020
  misc_feature: Encodes the peptide sequence at SEQ ID NO 17990
atggacgacgtctcgccagaggaggtccgtccctcccaggactcgtacctgtccatcccctcctcccccaccgcccgccgaaagcggtccaggagaagcaggcgcaactcgttgtccgacccgcccgacgagaccacctctctgctgcgctcctcgcgctcccacgtccgtattgccgacgcctctggccgccccggctttttgtcgagaaaccaaagcttcaccggcggccactcgaggcatcacagccgccacgagtcctggggccaccgcctgatccaggccctgggcgaccggacagaccccatgaccgagtccaagctgtccatcgccccggacgagcgcatctggtacgatcagttcacctccaccgactgggtccacgacggcatcgccgattcctaccgcgtcaagcagctccgggcccgtcgtggctggtggggcaagctcgccgtcactttcgacagcgcccagggctggatcctgagtggtctggtcggctttctcgtagccgtcgtggcctattgcgtcgacgtggccgagaccaccatcttcgactacaaagacggctactgcgccaggggctggtatcttagagagaagcgatgttgccctcacgggccctgtacggattggcggtcttggtccgacgtcttaggtggacatccttttggcgacaagtggaccgagttcaccgtctatctcctcgccgttctggcgctctctgttatagcctgtctcttgactttgaccaccaagaccgttgtgccctccgcttaccgcatgtcgacgctggacgagaacctcgctgctgaccactctcgccccatcgacccagatcatgaagatgaagacggctcgataagtccgagacaaagacaccctccgcgagaggaggtggttgatcctcccatggtctactactcggctgccggcagcggagtagccgaggtccgtgtcattctcagtggttttgttcttcacggttttctcggcctcaagactctcattattaagtccgtcggcctgatcgtgagtgtggcctcgggcctcagcctaggtaaagagggcccatacgtccatatcgctacgtgtattggcaatatttgctgccgtctgttcactaagtatgatggaaatgatgcaaagcgacgtgaagttctctctgccgcggccgcggctggtgtagttgtcgcattcggtgctcctcttggcggcgtcctcttcggacttgaagaggtggcgtacttcttccctgccaaaactctattcagaaccttcttttgctgcattgtcgcagccttatccctgaaattcctcaatccctacggtacacacaagattgtcatgttcgaagttcgctacaagatcgattgggaatggttcgaactcgtcggtttcatgcttgttggtgtgcttggcggagcagctggggcctatttcattaaagcctcccgtcgttgggctctgacttttcgcaagatcaacgttatcaagaggtacccccttgttgaggtcgtgttagtggcattggtgacagggctgatcgggtactggaatacgctcaccaagctcccggtggccaaacttctactgaatctcgcagctccctgtgatgatgagacgagggatgatgatctagggctgtgcgcccagaccatcgacgatgtccccggcattctcaagatgctcctggccgcatttgtgatcaaaggattccttaccgtggtgacgttcggtattaaagtgcctgctggcatttacgtcccgtccatggtagtcggaggtttgatgggccgcatcgttggtcatattgttcaatggacagtcctcaaatttccccattggggaatctttggatcttgcgcattgttgcagcagtctacatgtgtgcagcctggagtgtacggtctcatagctgccgggtcaacaatgtgtggcgtgacgcggctctctgtcactcttgctgttatcctatttgagctgactgggagcttggactacgttctgcctttctcgttggcgattctggtggccaagtggacggcagatgcgatagagcccttgagcatttacgatcttctaacgaacatgaactcttacccatacctggataacaaacacaaaccaatatttactgaacagctcgcggaccttgtaccacgcgttcgtcgggagcgaaccatcgacatcactaactcgccacttgtgccagccactgagcttagggcgaagttagaaatccttcacagagctggagagttagatggcgggctcccaattctccgaaatggtgttttggtcggtcttattcctgctccagacctcgagtttgcactggatagcctggaggacgagaacacggctctctgtctgatggccgatatcccaagcatagacgaagaagaagacgacgctcatcatgatcctacggacttcacacgttacatcgacccggcgccagttgctttagacatcaaatctcctatggatttggtgtacgaatgtttcgctaaattgggtctgcgttacatctgcgttctgaaaaatggacgctatgcaggcatgacccataagaaacgattcgtaaagtatgtgcgggagttggaagaagaagggcattag

SEQ ID NO: 17990 - protein, 874 aa, Muscodor strobelii
  misc_feature: SGI Peptide ID NO. 566020
  misc_feature (305)..(685): Pfam Id: PF00654 Pfam Desc: Voltage gated chloride channel
  misc_feature (310)..(685): Pfam Id: PF00654 Pfam Desc: Voltage gated chloride channel
  misc_feature (11)..(872): NCBI GI: 164428859 Blast Desc: NCU00121 [Neurospora crassa OR74A] gi|157072311|gb|EAA28009.2| NCU00121 [Neurospora crassa OR74A]
  misc_feature (33)..(874): NCBI GI: 171686950 Blast Desc: protein product [Podospora anserina] gi|170943436|emb|CAP69089.1| protein product [Podospora anserina]
  misc_feature (18)..(871): NCBI GI: 256729873 Blast Desc: [Nectria haematococca mpVI 77-13-4]
  misc_feature (18)..(872): NCBI GI: 46122355 Blast Desc: FG05555.1 [Gibberella zeae PH-1]
  misc_feature (13)..(872): NCBI GI: 145614422 Blast Desc: MGG_11357 [Magnaporthe grisea 70-15] gi|145021348|gb|EDK05477.1| MGG_11357 [Magnaporthe grisea 70-15]
  misc_feature (48)..(843): NCBI GI: 156032967 Blast Desc: SS1G_13559 [Sclerotinia sclerotiorum 1980] gi|154698962|gb|EDN98700.1| SS1G_13559 [Sclerotinia sclerotiorum 1980]
  misc_feature (3)..(819): NCBI GI: 154301513 Blast Desc: BC1G_10426 [Botryotinia fuckeliana B05.10] gi|150856166|gb|EDN31358.1| BC1G_10426 [Botryotinia fuckeliana B05.10]
  misc_feature (8)..(874): NCBI GI: 169619307 Blast Desc: SNOG_12848 [Phaeosphaeria nodorum SN15] gi|111058528|gb|EAT79648.1| SNOG_12848 [Phaeosphaeria nodorum SN15]
  misc_feature (27)..(872): NCBI GI: 189207222 Blast Desc: chloride channel protein 3 [Pyrenophora tritici-repentis Pt-1C-BFP] gi|187976038|gb|EDU42664.1| chloride channel protein 3 [Pyrenophora tritici-repentis Pt-1C-BFP]
  misc_feature (20)..(871): NCBI GI: 238841939 Blast Desc: chloride channel protein 3 [Microsporum canis CBS 113480]
MDDVSPEEVRPSQDSYLSIPSSPTARRKRSRRSRRNSLSDPPDETTSLLRSSRSHVRIADASGRPGFLSRNQSFTGGHSRHHSRHESWGHRLIQALGDRTDPMTESKLSIAPDERIWYDQFTSTDWVHDGIADSYRVKQLRARRGWWGKLAVTFDSAQGWILSGLVGFLVAVVAYCVDVAETTIFDYKDGYCARGWYLREKRCCPHGPCTDWRSWSDVLGGHPFGDKWTEFTVYLLAVLALSVIACLLTLTTKTVVPSAYRMSTLDENLAADHSRPIDPDHEDEDGSISPRQRHPPREEVVDPPMVYYSAAGSGVAEVRVILSGFVLHGFLGLKTLIIKSVGLIVSVASGLSLGKEGPYVHIATCIGNICCRLFTKYDGNDAKRREVLSAAAAAGVVVAFGAPLGGVLFGLEEVAYFFPAKTLFRTFFCCIVAALSLKFLNPYGTHKIVMFEVRYKIDWEWFELVGFMLVGVLGGAAGAYFIKASRRWALTFRKINVIKRYPLVEVVLVALVTGLIGYWNTLTKLPVAKLLLNLAAPCDDETRDDDLGLCAQTIDDVPGILKMLLAAFVIKGFLTVVTFGIKVPAGIYVPSMVVGGLMGRIVGHIVQWTVLKFPHWGIFGSCALLQQSTCVQPGVYGLIAAGSTMCGVTRLSVTLAVILFELTGSLDYVLPFSLAILVAKWTADAIEPLSIYDLLTNMNSYPYLDNKHKPIFTEQLADLVPRVRRERTIDITNSPLVPATELRAKLEILHRAGELDGGLPILRNGVLVGLIPAPDLEFALDSLEDENTALCLMADIPSIDEEEDDAHHDPTDFTRYIDPAPVALDIKSPMDLVYECFAKLGLRYICVLKNGRYAGMTHKKRFVKYVRELEEEGH

SEQ ID NO: 17991 - DNA, 3483 bp, Muscodor strobelii
  misc_feature: SGI EST ID NO. CUFF.42418.0
  misc_feature: Variant of the nucleotide sequence at SEQ ID NO 17989
ctaagtggcaggaaacaccggtgacgttaggctagcgagctaggacctaccgtatttgcatggatgagctctatgtttacaccacctggttgaacaccttatttccaaccctccttcctccagatagaagtgtattctgtattgcatagaagcaagcaggctgcccttagtcgtggcgacatggctgctgctgttgccactactctctcgttgactattaatccaaaaacccgtcgtttgtttcatcggcacgcccgcttgactcgtcgcccgagcctcgttccccacgaagaccccagataatacccacgtccctacccacggcgacatccacgcacagcggccacggaagattgtagtgcttgcctcccgctgagccagtcattcaccagcacacgagactcgtatatcatagaataatactcgtgtgtgcccggtcggcctcgcctcaaagagggaaaccgtcgtggcaccgcacacaaaatcagatttcgtcccaactgctgacgagcttcgagcgtttgccgtttgttgtttgccaggtcttgttcggccgcaggttgggcctgcattcgagtctgtatcacgacaccaccacgacaccaccacgatacccgcagcccggctggcaacatggacgacgtctcgccagaggaggtccgtccctcccaggactcgtacctgtccatcccctcctcccccaccgcccgccgaaagcggtccaggagaagcaggcgcaactcgttgtccgacccgcccgacgagaccacctctctgctgcgctcctcgcgctcccacgtccgtattgccgacgcctctggccgccccggctttttgtcgagaaaccaaagcttcaccggcggccactcgaggcatcacagccgccacgagtcctggggccaccgcctgatccaggccctgggcgaccggacagaccccatgaccgagtccaagctgtccatcgccccggacgagcgcatctggtacgatcagttcacctccaccgactgggtccacgacggcatcgccgattcctaccgcgtcaagcagctccgggcccgtcgtggctggtggggcaagctcgccgtcactttcgacagcgcccagggctggatcctgagtggtctggtcggctttctcgtagccgtcgtggcctattgcgtcgacgtggccgagaccaccatcttcgactacaaagacggctactgcgccaggggctggtatcttagagagaagcgatgttgccctcacgggccctgtacggattggcggtcttggtccgacgtcttaggtggacatccttttggcgacaagtggaccgagttcaccgtctatctcctcgccgttctggcgctctctgttatagcctgtctcttgactttgaccaccaagaccgttgtgccctccgcttaccgcatgtcgacgctggacgagaacctcgctgctgaccactctcgccccatcgacccagatcatgaagatgaagacggctcgataagtccgagacaaagacaccctccgcgagaggaggtggttgatcctcccatggtctactactcggctgccggcagcggagtagccgaggtccgtgtcattctcagtggttttgttcttcacggttttctcggcctcaagactctcattattaagtccgtcggcctgatcgtgagtgtggcctcgggcctcagcctaggtaaagagggcccatacgtccatatcgctacgtgtattggcaatatttgctgccgtctgttcactaagtatgatggaaatgatgcaaagcgacgtgaagttctctctgccgcggccgcggctggtgtagttgtcgcattcggtgctcctcttggcggcgtcctcttcggacttgaagaggtggcgtacttcttccctgccaaaactctattcagaaccttcttttgctgcattgtcgcagccttatccctgaaattcctcaatccctacggtacacacaagattgtcatgttcgaagttcgctacaagatcgattgggaatggttcgaactcgtcggtttcatgcttgttggtgtgcttggcggagcagctggggcctatttcattaaagcctcccgtcgttgggctctgacttttcgcaagatcaacgttatcaagaggtacccccttgttgaggtcgtgttagtggcattggtgacagggctgatcgggtactggaatacgctcaccaagctcccggtggccaaacttctactgaatctcgcagctccctgtgatgatgagacgagggatgatgatctagggctgtgcgcccagaccatcgacgatgtccccggcattctcaagatgctcctggccgcatttgtgatcaaaggattccttaccgtggtgacgttcggtattaaagtgcctgctggcatttacgtcccgtccatggtagtcggaggtttgatgggccgcatcgttggtcatattgttcaatggacagtcctcaaatttccccattggggaatctttggatcttgcgcattgttgcagcagtctacatgtgtgcagcctggagtgtacggtctcatagctgccgggtcaacaatgtgtggcgtgacgcggctctctgtcactcttgctgttatcctatttgagctgactgggagcttggactacgttctgcctttctcgttggcgattctggtggccaagtggacggcagatgcgatagagcccttgagcatttacgatcttctaacgaacatgaactcttacccatacctggataacaaacacaaaccaatatttactgaacagctcgcggaccttgtaccacgcgttcgtcgggagcgaaccatcgacatcactaactcgccacttgtgccagccactgagcttagggcgaagttagaaatccttcacagagctggagagttagatggcgggctcccaattctccgaaatggtgttttggtcggtcttattcctgctccagacctcgagtttgcactggatagcctggaggacgagaacacggctctctgtctgatggccgatatcccaagcatagacgaagaagaagacgacgctcatcatgatcctacggacttcacacgttacatcgacccggcgccagttgctttagacatcaaatctcctatggatttggtgtacgaatgtttcgctaaattgggtctgcgttacatctgcgttctgaaaaatggacgctatgcaggcatgacccataagaaacgattcgtaaagtatgtgcgggagttggaagaagaagggcattaggaccagacagcttaacccaagcgtcatgggttttttcatggaatacttgccgtcgttcattgtttatagagggtcactcgacagcatggtatactgcatattggcgttttggcgttatcatcattggtagattgctcatcatagcccaagagcatctgggccaagcatttaaggagtataatgattaggatagcattttggtctaggcaattttgagaaccgact

SEQ ID NO: 17992 - DNA, 3228 bp, Muscodor strobelii
  misc_feature: SGI cDNA ID NO. 566021
  misc_feature: Encodes the peptide sequence at SEQ ID NO 17993
atgccgtctcacgagaagaagaagaagtcgattgtccctagtttctcatctttcaaaaagccaacatcttctagtcaagacccaagcaactctaacgctgctcgtccccacttgacctcacatcactctccagcctcattgcctcctgctcgcaactcatcagactcgtcatctcggcttcgctcacctgcagcccagccaacttcatcatctttatatgtcgtcgataagcgaggcgatgctcttatccgccgttatggcgccaatgaccggaatgatgtccctagctaccggcggataggaaatggccacgtcttgggagtcgatggcttcatgcgtatcgaaagagtcggcaatcacgatgagttctctatgcgtacttactacgagccacggcctgtccttagtagcgacaaaaagactctcttagcaaagggcattagcactgcttctcggcctgtctacattcggcaaaagtctgaaaaccaagtcccagaggaagcttacgtgtcactgaacaattccaaaaagcgcaaacgtgacgacgaagcatttgttgacgaagacgacaaaggggtcccctatagagatatacatggaaaaagcaaggcacatgaacaatctgaaagtgatggacagtcagagagcgagcattctggcgatgaagccgttgctagaaccgatccgatgacccttcggtctatcgaactgtcaagacgaacacgagaaaagccgaaggagctaacacaagcccataaagacgtattactccaggcttcatgtggtgctcgtgcgcctaccgcggccgaagtcaagagcttttcggatatcaagctatctttacttaatcaagctttatcgcacatcgaagatggcgatgagcgtcgcaaattagttgtcaagagaatgaaagagggtatgaaagtatgggacacacagacggccttaaaacagttttcagacgttatgcacaaatatccggaggattttgagctttggcgcttgcatctaactttccaacagtctactccgtcattgttcacatttagtgagatcaaacagcaatatgtggacaagctgagatccctgagagcagacgtgcttggcgtagatggtttacaggcaatagaagtatttctacgcctgacaatatttctctcagatgcaggtttcgcagatcttgcctctgcggcatggtcggccactctagacataaactttgcgagacctcattctccatcgcaagatatgctcagcgactatttgggtcctttgaacttacagaagttttgggaggctgaggtcccacgaataggagaagatcagtggcaaggctgtgtcgctttttcgaaagatccggatagccaacaaccaccggacccaaatccctcgattacgactccatcaaaaatgcctgagactcgtgatgggtatagagcatggtattctgttgagcaacacagagcttctatcgccacactccccgctcgaacgttagatgacggagcagaagatgacccgtttcgagtcgtaatgtacacagatatccaagattttgtctttgacttaccatcaggagaattcaccgatcattgggagcggctcatcgacgcctttctgatattttgcgagctttcgcctgtctataggccagaacctttatcgcgaccggaattgagaggcgtcgccctggatcatcttaatgcccgttgtaatcagatggatcttataattgatacgaatgttgccaatggagaaaacgtgggcgatggccaaaggagggcacccgtgtttcctcccaaattgcatcaagtgcagcctttgccggaagttatctttccttcacaaaattggcagtgctacctaatcaagatacgaaacaagatacctgcggacagatatcgttggatttcaacagtcttgaaacagcttacccgcttggaagccccctactgcaacttaacatcattaagatcctatctactcgccttcgagatgacgaacgaacccgaaaatgtgaaaaagactgccaagtcactcctgaagcaggatcctttgaatattggtctttacctaggttatgccacagccgagagcgagcaaggcaagcaagctgccgctctaaatgtattgtcggcggcaatgagcttgcctcagaatgacttgagtgatgataacttgatgaatcgatttcggctggtagtgtccgcagcatggctaaaattggtcagcggagacctaaacggagcagttttggagttttgtcgattcagaagagacaaagtccaggctggaccagaaggcttaccagaatccgagctcacggaagccactccatccgaaattctgaagaccaggcgatacttgctgggggccgcacctcgacacagtggtctatggcgtggagcgttctgctttcaactcgttcacgacgagggctgcgtccttttcgaatacctcactggacgaagtgaaaaggagcctaggtccgctagacaaggcgacatctcatctgcaattgtaaggatcaatgaaaggaccgaacactacgtcagaaggccccaataccaaggcgcgcctctagagagtttcctccagttcgcggctcgcttgctatattaccacgcttgtcacggggctttccgtcctagcctcttccgcgaacaactaactaaatacctgaacatatttccctccaacagcatcttcctcgctctattcgcctggcaagaacaacgcctaagcgtgaacgaccgcgtgcgatcactcctccaatcgcacgtgcttacgcgtgaaaacgagacactgtccagccacgtcttcgccatcaactacgagatccaaaccggaaacgtacactcgacccgcgcagcgtatgagcgtgccctggcctcagatgtctgtgcgcaccagcccgggctgtggatcgcttatatccggttctgccacgacagaaaggaactcaggaagaaagcgaaaggcgtcttcgctagggctatccaggcttgtccttggtccaaggatgtctacatggaggcgtttggcacgctgtgcagggatatggattcgtcggagctgaaggcggtgtataataccatgtatgataaggggttgaggatctttgttgatctgcatgagtttgtggaggggtggaggaaggatcatgggagtagggagaaggataaggataaggggaaggggaaggggaaggaggagaagaggcggtag

SEQ ID NO: 17993 - protein, 1075 aa, Muscodor strobelii
  misc_feature: SGI Peptide ID NO. 566021
  misc_feature (208)..(452): Pfam Id: PF08424 Pfam Desc: Domain of function (DUF1740)
  misc_feature (59)..(1052): NCBI GI: 256732818 Blast Desc: NECHADRAFT_38628 [Nectria haematococca mpVI 77-13-4]
  misc_feature (50)..(1049): NCBI GI: 46124633 Blast Desc: FG06694.1 [Gibberella zeae PH-1]
  misc_feature (49)..(1064): NCBI GI: 85084053 Blast Desc: NCU00120 [Neurospora crassa OR74A] gi|28918332|gb|EAA28008.1| [Neurospora crassa OR74A]
  misc_feature (69)..(1053): NCBI GI: 39945612 Blast Desc: MGG_04788 [Magnaporthe grisea 70-15] gi|145021350|gb|EDK05479.1| MGG_04788 [Magnaporthe grisea 70-15]
  misc_feature (61)..(1024): NCBI GI: 171686948 Blast Desc: protein product [Podospora anserina] gi|170943435|emb|CAP69088.1| protein product [Podospora anserina]
  misc_feature (69)..(1044): NCBI GI: 238840689 Blast Desc: conserved [Microsporum canis CBS 113480]
  misc_feature (61)..(908): NCBI GI: 156037676 Blast Desc: SS1G_12552 [Sclerotinia sclerotiorum 1980] gi|154697960|gb|EDN97698.1| SS1G_12552 [Sclerotinia sclerotiorum 1980]
  misc_feature (1)..(1049): NCBI GI: 240111867 Blast Desc: CPC735_013300 [Coccidioides posadasii C735 delta SOWgp]
  misc_feature (1)..(1049): NCBI GI: 119173590 Blast Desc: CIMG_10235 [Coccidioides immitis RS]
  misc_feature (1)..(1058): NCBI GI: 225683912 Blast Desc: conserved [Paracoccidioides brasiliensis Pb03]
MPSHEKKKKSIVPSFSSFKKPTSSSQDPSNSNAARPHLTSHHSPASLPPARNSSDSSSRLRSPAAQPTSSSLYVVDKRGDALIRRYGANDRNDVPSYRRIGNGHVLGVDGFMRIERVGNHDEFSMRTYYEPRPVLSSDKKTLLAKGISTASRPVYIRQKSENQVPEEAYVSLNNSKKRKRDDEAFVDEDDKGVPYRDIHGKSKAHEQSESDGQSESEHSGDEAVARTDPMTLRSIELSRRTREKPKELTQAHKDVLLQASCGARAPTAAEVKSFSDIKLSLLNQALSHIEDGDERRKLVVKRMKEGMKVWDTQTALKQFSDVMHKYPEDFELWRLHLTFQQSTPSLFTFSEIKQQYVDKLRSLRADVLGVDGLQAIEVFLRLTIFLSDAGFADLASAAWSATLDINFARPHSPSQDMLSDYLGPLNLQKFWEAEVPRIGEDQWQGCVAFSKDPDSQQPPDPNPSITTPSKMPETRDGYRAWYSVEQHRASIATLPARTLDDGAEDDPFRVVMYTDIQDFVFDLPSGEFTDHWERLIDAFLIFCELSPVYRPEPLSRPELRGVALDHLNARCNQMDLIIDTNVANGENVGDGQRRAPVFPPKLHQVQPLPEVIFPSQNWQCYLIKIRNKIPADRYRWISTVLKQLTRLEAPYCNLTSLRSYLLAFEMTNEPENVKKTAKSLLKQDPLNIGLYLGYATAESEQGKQAAALNVLSAAMSLPQNDLSDDNLMNRFRLVVSAAWLKLVSGDLNGAVLEFCRFRRDKVQAGPEGLPESELTEATPSEILKTRRYLLGAAPRHSGLWRGAFCFQLVHDEGCVLFEYLTGRSEKEPRSARQGDISSAIVRINERTEHYVRRPQYQGAPLESFLQFAARLLYYHACHGAFRPSLFREQLTKYLNIFPSNSIFLALFAWQEQRLSVNDRVRSLLQSHVLTRENETLSSHVFAINYEIQTGNVHSTRAAYERALASDVCAHQPGLWIAYIRFCHDRKELRKKAKGVFARAIQACPWSKDVYMEAFGTLCRDMDSSELKAVYNTMYDKGLRIFVDLHEFVEGWRKDHGSREKDKDKGKGKGKEEKRR

SEQ ID NO: 17994 - DNA, 4199 bp, Muscodor strobelii
  misc_feature: SGI EST ID NO. CUFF.42569.0
  misc_feature: Variant of the nucleotide sequence at SEQ ID NO 17992
gacgtattactccaggcttcatgtggtgctcgtgcgcctaccgcggccgaagtcaagagcttttcggatatcaagctatctttacttaatcaagctttatcgcacatcgaagatggcgatgagcgtcgcaaattagttgtcaagagaatgaaagagggtatgaaagtatgggacacacagacggccttaaaacagttttcagacgttatgcacaaatatccggaggattttgagctttggcgcttgcatctaactttccaacagtctactccgtcattgttcacatttagtgagatcaaacagcaatatgtggacaagctgagatccctgagagcagacgtgcttggcgtagatggtttacaggcaatagaagtatttctacgcctgacaatatttctctcagatgcaggtttcgcagatcttgcctctgcggcatggtcggccactctagacataaactttgcgagacctcattctccatcgcaagatatgctcagcgactatttgggtcctttgaacttacagaagttttgggaggctgaggtcccacgaataggagaagatcagtggcaaggctgtgtcgctttttcgaaagatccggatagccaacaaccaccggacccaaatccctcgattacgactccatcaaaaatgcctgagactcgtgatgggtatagagcatggtattctgttgagcaacacagagcttctatcgccacactccccgctcgaacgttagatgacggagcagaagatgacccgtttcgagtcgtaatgtacacagatatccaagattttgtctttgacttaccatcaggagaattcaccgatcattgggagcggctcatcgacgcctttctgatattttgcgagctttcgcctgtctataggccagaacctttatcgcgaccggaattgagaggcgtcgccctggatcatcttaatgcccgttgtaatcagatggatcttataattgatacgaatgttgccaatggagaaaacgtgggcgatggccaaaggagggcacccgtgtttcctcccaaattgcatcaagtgcagcctttgccggaagttatctttccttcacaaaattggcagtgctacctaatcaagatacgaaacaagatacctgcggacagatatcgttggatttcaacagtcttgaaacagcttacccgcttggaagccccctactgcaacttaacatcattaagatcctatctactcgccttcgagatgacgaacgaacccgaaaatgtgaaaaagactgccaagtcactcctgaagcaggatcctttgaatattggtctttacctaggttatgccacagccgagagcgagcaaggcaagcaagctgccgctctaaatgtattgtcggcggcaatgagcttgcctcagaatgacttgagtgatgataacttgatgaatcgatttcggctggtagtgtccgcagcatggctaaaattggtcagcggagacctaaacggagcagttttggagttttgtcgattcagaagagacaaagtccaggctggaccagaaggcttaccagaatccgagctcacggaagccactccatccgaaattctgaagaccaggcgatacttgctgggggccgcacctcgacacagtggtctatggcgtggagcgttctgctttcaactcgttcacgacgagggctgcgtccttttcgaatacctcactggacgaagtgaaaaggagcctaggtccgctagacaaggcgacatctcatctgcaattgtaaggatcaatgaaaggaccgaacactacgtcagaaggccccaataccaaggcgcgcctctagagagtttcctccagttcgcggctcgcttgctatattaccacgcttgtcacggggctttccgtcctagcctcttccgcgaacaactaactaaatacctgaacatatttccctccaacagcatcttcctcgctctattcgcctggcaagaacaacgcctaagcgtgaacgaccgcgtgcgatcactcctccaatcgcacgtgcttacgcgtgaaaacgagacactgtccagccacgtcttcgccatcaactacgagatccaaaccggaaacgtacactcgacccgcgcagcgtatgagcgtgccctggcctcagatgtctgtgcgcaccagcccgggctgtggatcgcttatatccggttctgccacgacagaaaggaactcaggaagaaagcgaaaggcgtcttcgctagggctatccaggcttgtccttggtccaaggatgtctacatggaggcgtttggcacgctgtgcagggatatggattcgtcggagctgaaggcggtgtataataccatgtatgataaggggttgaggatctttgttgatctgcatgagtttgtggaggggtggaggaaggatcatgggagtagggagaaggataaggataaggggaaggggaaggggaaggaggagaagaggcggtagattgaaacctgacctggagaacaatctaggagggtcggtcagtgatctggtgaacataattgtatgataccgataggccagtccgcggtacataccagtattgatatatgaattcacgggagatacattgataaatgaagggtatctatatgtgatcacatttccatctatctcatctaccaccatattaaatctacaatacaaccctttcaaacacctttccacttgccaaacttgcgatactcagcaaacagcgccctaaacacagctcttccactagcgtccagactctcattgataactcttctccgcccctcagaagtgatatcgaggacagaataaacgcccacttcgagcgcctttcgcatttccttcgagacctcgacttcgagttgtagcttaatgtatacttcgaggattaggtacatatactgccccgcagcgcgtttcgccacatcacgagcagagtctaactcagaccgcgcggaggatcgcgcgacggaggcagcgcttggctcgcagattagtgttaagaggcgtgtgaagcgctccccatgccgtggttggagacgtgtgtgaagccaagggggtaattggtactgagctgatccgcgacttgcccgcttggagacgggtgtgctgggatcggcgagcagaacgttgagtagtgccttgagtgctgtgaggaggattgggaagtgaccgtttagacgcagacgatgacgcttgatgataagtgccacgagcttgaagaggttggcgaagatttctcccgcggattttggaccctggatctggggtccggattgtgaacatacttcgacgacgctgcatagtgtgacttcgatgttgagttgtgacatggcgtgagcgtgtttatcgaggaggagaagcgcaatgtttgttatttcccggaaatgtgaaagtgatggggcctgggcgagcaatgccacaaattgacagtggatcttagctaggtcaatatcctctgcgctatcatcttcaggactgtcaatatccatagtaacctgagtttcacctttttgatttcgtatagtgctggtgcgaagttcaagcaggcgtttcgccgcaaggaggcgtcctattccactcgatacgagatgattactttccattaacagatgcagaagctgatctctatcatgttgtgattttcgccgcacgaaggcgtcgactaagtcatatatcagtacctcatccatcgcatgagtgccttggtccaaaagtgcacagaacgattctagcgtatggcgctctgcatcgttccttacgagaaacgccaatagcctccaacctagatcagcgtctctcgatataagagtgctgctgatggtctgtagtttggcatatttcttgtcttttagttggattttgattgaagatccggcgtcgcttgcggctcgtgcagcatccagaattactgacaacgagtggaatgtgacgtcgtctaaaggtgtgactgatatgtcctgcttttgtagggccgagtcgccaagcgccgcttcaatcatctttgcaagtacttggctgaatgcagtgagatcagttccgatacgtccaagaatggcatgtgcagcctcgtggcgagtgagaccagtcacaagattcttcaacaagacgacttgggcgtcagtggcaggctgcttctgggattttaaccccttgacatagtcaaatgcgctttgcagataaggctgggtagcttcgtt

SEQ ID NO: 17995 - DNA, 4104 bp, Muscodor strobelii
  misc_feature: SGI cDNA ID NO. 566022
  misc_feature: Encodes the peptide sequence at SEQ ID NO 17996
atgggagctatggacgtagacgttgatgagccccaactgtcttccagacttgcactttaccggtacgcaagagcgccggatgatgacacctcacggtcaatcccggagagaattcacagactatggctgttgatcaccagcgcgagccacaccagactacatggtgttgaggaatctattttgcgatggttactgaaacaaatggccggtaacgacgatactgccgagcatgttcgtcgataccctcttacttggtctattcttgcccatgtcttctccaagattcccgcccagagtttgggaaggtccttggcctatctccgattcgtctcccttttgaacaagacattgggtgatgcaacaaccttacaggatcaaaccaatggtgtttctactaagaggaagagagacgatccgctgcctgagacactcgatcaactgaagtccccagagggctgcctgaaaacagcctccgaagttttcaaagctttggctatcctgctggaacagggcaatgcacatcttggtagcctgactccagaaaaaagggttggtgccgagcatatcaagtctcttttctcgtcttcacgcgatgacactagagatattgcaacgaagctcttggttctgtgtgataggtcgctggatatcatcgagactggcgtgctaggggatcggacctcttgggtcaattccctcgcagctctctggaatcttcgactccatagcaaaggggatagtattgagtttgctctgtacccatttggcccggcttcgtcattacttgctagattaaagcatgactcaccttcgcacatggccagtaattgctgggacacgtggacaagacagctggaacgattcctgagcacctacttcatccgaccagccaggcaacaattcgctgttgatgagacattagcccccttggaaacggcgcttcctggcaaaaacgtaactgcttccgttgctgctatatggaacgtcgcggcaaaggtcccctgggatgccagccatgcaaagtcgaagactgagcatgccgcttggaccgagaagatttttgatatgttgatggaaacgttgaagcccctcaaagtccaacgtcagaatgaggttctcggtccattgctagacatcgcgctgaagaccaaatcgatgcccagtcatgaaacactttccaagctataccggacacatgcactaatatcggacaacgaaacggactggtccatggtctctaagatcattgcttgcgaccctgatgttttcctgctaggtcaattctcagaaagcatatttcagagaatcagcagatgctcaatagaaagtcttgaggcgagaaatcaggtcatcagtgatgttatcatccctcttttaaatgcctttgcgactgcgcgcgacatttctgggttcgtaacacagtggtatcagaccttatgctcatgtccatcagctgaggcggtgagttcgtcgatatggtttgattcaaggatccgcgaccatctggctagtacgttagaaactgcaatttctactagcatgcagctctcgcgactctttgagaatctagatccctcaaacagccaagcaggagaacttctgattatccttgacggtatatctgctggccttagcgaggagagtctcgttacagaggcgaaacccaagatattttctttggcattagaagaccaaaaatacgaagatgttgcgccagatgtcattgccttgaggtggcgagtggctggtcgtctagcttcctggggaacctcggacgaatgcaagcgattgtggaaagtgcttaaatcggacttgaaaccgatactcaaaaggtgtccttcagctgatgttagtgccgtggaggcatttgcttgttgctatcagctttgtctctccaatcatgttggaggcaaatacgaggaggacctaatggagatggtggcctcggtcgccaaaaggttgcttaagaaccttaaggctgaagaagagccggtatttcaaccgtttctgaatattatcttcagcgacctccccagactcgttgaacaggcgccagaaaccagccctctgttacaacacatcaccaatatcctgtggcatgtaagccaagtgtcagcaacgcaagatagatcacagctcctgggccttgtgaggtcctttattcagaactacgacgtactagataatgagtcgttatgtgacgctctcatgactcgcttcttggacgcactcgacggcgaacagaactcggatggatggacgcggccgcaatctctgaccaaccttcttgtcttgctggagtgtcctactgaaatttggactcgaggccggcgaaaacgcatcatgggatcgtggaagaagcaccagtctaaagtcagttcctatgcagctacggattctgcctatgaaatgacaatctatcggctgctcgtgaaggtgatgcagcagccgactttctacgaaaacatggaatttgcggacctggttttcctatgttcaaacatggcaacgcaaaacgatgtttcgctggctctagtcgatagagtgatcgaatctaccattaagcaaattctgacgaacatcaacgaagctacccagccttatctgcaaagcgcatttgactatgtcaaggggttaaaatcccagaagcagcctgccactgacgcccaagtcgtcttgttgaagaatcttgtgactggtctcactcgccacgaggctgcacatgccattcttggacgtatcggaactgatctcactgcattcagccaagtacttgcaaagatgattgaagcggcgcttggcgactcggccctacaaaagcaggacatatcagtcacacctttagacgacgtcacattccactcgttgtcagtaattctggatgctgcacgagccgcaagcgacgccggatcttcaatcaaaatccaactaaaagacaagaaatatgccaaactacagaccatcagcagcactcttatatcgagagacgctgatctaggttggaggctattggcgtttctcgtaaggaacgatgcagagcgccatacgctagaatcgttctgtgcacttttggaccaaggcactcatgcgatggatgaggtactgatatatgacttagtcgacgccttcgtgcggcgaaaatcacaacatgatagagatcagcttctgcatctgttaatggaaagtaatcatctcgtatcgagtggaataggacgcctccttgcggcgaaacgcctgcttgaacttcgcaccagcactatacgaaatcaaaaaggtgaaactcaggttactatggatattgacagtcctgaagatgatagcgcagaggatattgacctagctaagatccactgtcaatttgtggcattgctcgcccaggccccatcactttcacatttccgggaaataacaaacattgcgcttctcctcctcgataaacacgctcacgccatgtcacaactcaacatcgaagtcacactatgcagcgtcgtcgaagtatgttcacaatccggaccccagatccagggtccaaaatccgcgggagaaatcttcgccaacctcttcaagctcgtggcacttatcatcaagcgtcatcgtctgcgtctaaacggtcacttcccaatcctcctcacagcactcaaggcactactcaacgttctgctcgccgatcccagcacacccgtctccaagcgggcaagtcgcggatcagctcagtaccaattacccccttggcttcacacacgtctccaaccacggcatggggagcgcttcacacgcctcttaacactaatctgcgagccaagcgctgcctccgtcgcgcgatcctccgcgcggtctgagttagactctgctcgtgatgtggcgaaacgcgctgcggggcagtatatgtacctaatcctcgaagtatacattaagctacaactcgaagtcgaggtctcgaaggaaatgcgaaaggcgctcgaagtgggcgtttattctgtcctcgatatcacttctgaggggcggagaagagttatcaatgagagtctggacgctagtggaagagctgtgtttagggcgctgtttgctgagtatcgcaagtttggcaagtggaaaggtgtttga

SEQ ID NO: 17996 - protein, 1367 aa, Muscodor strobelii
  misc_feature: SGI Peptide ID NO. 566022
  misc_feature (19)..(1367): NCBI GI: 256732817 Blast Desc: NECHADRAFT_38720 [Nectria haematococca mpVI 77-13-4]
  misc_feature (16)..(1367): NCBI GI: 46124637 Blast Desc: FG06696.1 [Gibberella zeae PH-1]
  misc_feature (14)..(828): NCBI GI: 85083522 Blast Desc: NCU06496 [Neurospora crassa OR74A] gi|28918222|gb|EAA27900.1| [Neurospora crassa OR74A]
  misc_feature (19)..(610): NCBI GI: 116208064 Blast Desc: CHGG_03325 [Chaetomium globosum CBS 148.51] gi|88183922|gb|EAQ91390.1| CHGG_03325 [Chaetomium globosum CBS 148.51]
  misc_feature (19)..(829): NCBI GI: 39974981 Blast Desc: MGG_00363 [Magnaporthe grisea 70-15] gi|145018747|gb|EDK03026.1| MGG_00363 [Magnaporthe grisea 70-15]
  misc_feature (19)..(425): NCBI GI: 261358364 Blast Desc: conserved [Verticillium albo-atrum VaMs.102]
  misc_feature (545)..(1367): NCBI GI: 261358364 Blast Desc: conserved [Verticillium albo-atrum VaMs.102]
  misc_feature (1098)..(1366): NCBI GI: 39974981 Blast Desc: MGG_00363 [Magnaporthe grisea 70-15] gi|145018747|gb|EDK03026.1| MGG_00363 [Magnaporthe grisea 70-15]
  misc_feature (1025)..(1367): NCBI GI: 116208064 Blast Desc: CHGG_03325 [Chaetomium globosum CBS 148.51] gi|88183922|gb|EAQ91390.1| CHGG_03325 [Chaetomium globosum CBS 148.51]
  misc_feature (1104)..(1367): NCBI GI: 85083522 Blast Desc: NCU06496 [Neurospora crassa OR74A] gi|28918222|gb|EAA27900.1| [Neurospora crassa OR74A]
MGAMDVDVDEPQLSSRLALYRYARAPDDDTSRSIPERIHRLWLLITSASHTRLHGVEESILRWLLKQMAGNDDTAEHVRRYPLTWSILAHVFSKIPAQSLGRSLAYLRFVSLLNKTLGDATTLQDQTNGVSTKRKRDDPLPETLDQLKSPEGCLKTASEVFKALAILLEQGNAHLGSLTPEKRVGAEHIKSLFSSSRDDTRDIATKLLVLCDRSLDIIETGVLGDRTSWVNSLAALWNLRLHSKGDSIEFALYPFGPASSLLARLKHDSPSHMASNCWDTWTRQLERFLSTYFIRPARQQFAVDETLAPLETALPGKNVTASVAAIWNVAAKVPWDASHAKSKTEHAAWTEKIFDMLMETLKPLKVQRQNEVLGPLLDIALKTKSMPSHETLSKLYRTHALISDNETDWSMVSKIIACDPDVFLLGQFSESIFQRISRCSIESLEARNQVISDVIIPLLNAFATARDISGFVTQWYQTLCSCPSAEAVSSSIWFDSRIRDHLASTLETAISTSMQLSRLFENLDPSNSQAGELLIILDGISAGLSEESLVTEAKPKIFSLALEDQKYEDVAPDVIALRWRVAGRLASWGTSDECKRLWKVLKSDLKPILKRCPSADVSAVEAFACCYQLCLSNHVGGKYEEDLMEMVASVAKRLLKNLKAEEEPVFQPFLNIIFSDLPRLVEQAPETSPLLQHITNILWHVSQVSATQDRSQLLGLVRSFIQNYDVLDNESLCDALMTRFLDALDGEQNSDGWTRPQSLTNLLVLLECPTEIWTRGRRKRIMGSWKKHQSKVSSYAATDSAYEMTIYRLLVKVMQQPTFYENMEFADLVFLCSNMATQNDVSLALVDRVIESTIKQILTNINEATQPYLQSAFDYVKGLKSQKQPATDAQVVLLKNLVTGLTRHEAAHAILGRIGTDLTAFSQVLAKMIEAALGDSALQKQDISVTPLDDVTFHSLSVILDAARAASDAGSSIKIQLKDKKYAKLQTISSTLISRDADLGWRLLAFLVRNDAERHTLESFCALLDQGTHAMDEVLIYDLVDAFVRRKSQHDRDQLLHLLMESNHLVSSGIGRLLAAKRLLELRTSTIRNQKGETQVTMDIDSPEDDSAEDIDLAKIHCQFVALLAQAPSLSHFREITNIALLLLDKHAHAMSQLNIEVTLCSVVEVCSQSGPQIQGPKSAGEIFANLFKLVALIIKRHRLRLNGHFPILLTALKALLNVLLADPSTPVSKRASRGSAQYQLPPWLHTRLQPRHGERFTRLLTLICEPSAASVARSSARSELDSARDVAKRAAGQYMYLILEVYIKLQLEVEVSKEMRKALEVGVYSVLDITSEGRRRVINESLDASGRAVFRALFAEYRKFGKWKGV

SEQ ID NO: 17997 - DNA, 6850 bp, Muscodor strobelii
  misc_feature: SGI EST ID NO. CUFF.42570.1
  misc_feature: Variant of the nucleotide sequence at SEQ ID NO 17995
gagaaatatgaacgcttctcattttcaattttttccttaattgtgtaagatatcttatatatgttagaataaagcctttgaaatcgttactgctcaggctgccacacagcgcagcccagcgcaacgacaggtctaagacaggcttctgcgatgcccattcgttcgctgtgattttcacaatgggagctatggacgtagacgttgatgagccccaactgtcttccagacttgcactttaccggtacgcaagagcgccggatgatgacacctcacggtcaatcccggagagaattcacagactatggctgttgatcaccagcgcgagccacaccagactacatggtgttgaggaatctattttgcgatggttactgaaacaaatggccggtaacgacgatactgccgagcatgttcgtcgataccctcttacttggtctattcttgcccatgtcttctccaagattcccgcccagagtttgggaaggtccttggcctatctccgattcgtctcccttttgaacaagacattgggtgatgcaacaaccttacaggatcaaaccaatggtgtttctactaagaggaagagagacgatccgctgcctgagacactcgatcaactgaagtccccagagggctgcctgaaaacagcctccgaagttttcaaagctttggctatcctgctggaacagggcaatgcacatcttggtagcctgactccagaaaaaagggttggtgccgagcatatcaagtctcttttctcgtcttcacgcgatgacactagagatattgcaacgaagctcttggttctgtgtgataggtcgctggatatcatcgagactggcgtgctaggggatcggacctcttgggtcaattccctcgcagctctctggaatcttcgactccatagcaaaggggatagtattgagtttgctctgtacccatttggcccggcttcgtcattacttgctagattaaagcatgactcaccttcgcacatggccagtaattgctgggacacgtggacaagacagctggaacgattcctgagcacctacttcatccgaccagccaggcaacaattcgctgttgatgagacattagcccccttggaaacggcgcttcctggcaaaaacgtaactgcttccgttgctgctatatggaacgtcgcggcaaaggtcccctgggatgccagccatgcaaagtcgaagactgagcatgccgcttggaccgagaagatttttgatatgttgatggaaacgttgaagcccctcaaagtccaacgtcagaatgaggttctcggtccattgctagacatcgcgctgaagaccaaatcgatgcccagtcatgaaacactttccaagctataccggacacatgcactaatatcggacaacgaaacggactggtccatggtctctaagatcattgcttgcgaccctgatgttttcctgctaggtcaattctcagaaagcatatttcagagaatcagcagatgctcaatagaaagtcttgaggcgagaaatcaggtcatcagtgatgttatcatccctcttttaaatgcctttgcgactgcgcgcgacatttctgggttcgtaacacagtggtatcagaccttatgctcatgtccatcagctgaggcggtgagttcgtcgatatggtttgattcaaggatccgcgaccatctggctagtacgttagaaactgcaatttctactagcatgcagctctcgcgactctttgagaatctagatccctcaaacagccaagcaggagaacttctgattatccttgacggtatatctgctggccttagcgaggagagtctcgttacagaggcgaaacccaagatattttctttggcattagaagaccaaaaatacgaagatgttgcgccagatgtcattgccttgaggtggcgagtggctggtcgtctagcttcctggggaacctcggacgaatgcaagcgattgtggaaagtgcttaaatcggacttgaaaccgatactcaaaaggtgtccttcagctgatgttagtgccgtggaggcatttgcttgttgctatcagctttgtctctccaatcatgttggaggcaaatacgaggaggacctaatggagatggtggcctcggtcgccaaaaggttgcttaagaaccttaaggctgaagaagagccggtatttcaaccgtttctgaatattatcttcagcgacctccccagactcgttgaacaggcgccagaaaccagccctctgttacaacacatcaccaatatcctgtggcatgtaagccaagtgtcagcaacgcaagatagatcacagctcctgggccttgtgaggtcctttattcagaactacgacgtactagataatgagtcgttatgtgacgctctcatgactcgcttcttggacgcactcgacggcgaacagaactcggatggatggacgcggccgcaatctctgaccaaccttcttgtcttgctggagtgtcctactgaaatttggactcgaggccggcgaaaacgcatcatgggatcgtggaagaagcaccagtctaaagtcagttcctatgcagctacggattctgcctatgaaatgacaatctatcggctgctcgtgaaggtgatgcagcagccgactttctacgaaaacatggaatttgcggacctggttttcctatgttcaaacatggcaacgcaaaacgatgtttcgctggctctagtcgatagagtgatcgaatctaccattaagcaaattctgacgaacatcaacgaagctacccagccttatctgcaaagcgcatttgactatgtcaaggggttaaaatcccagaagcagcctgccactgacgcccaagtcgtcttgttgaagaatcttgtgactggtctcactcgccacgaggctgcacatgccattcttggacgtatcggaactgatctcactgcattcagccaagtacttgcaaagatgattgaagcggcgcttggcgactcggccctacaaaagcaggacatatcagtcacacctttagacgacgtcacattccactcgttgtcagtaattctggatgctgcacgagccgcaagcgacgccggatcttcaatcaaaatccaactaaaagacaagaaatatgccaaactacagaccatcagcagcactcttatatcgagagacgctgatctaggttggaggctattggcgtttctcgtaaggaacgatgcagagcgccatacgctagaatcgttctgtgcacttttggaccaaggcactcatgcgatggatgaggtactgatatatgacttagtcgacgccttcgtgcggcgaaaatcacaacatgatagagatcagcttctgcatctgttaatggaaagtaatcatctcgtatcgagtggaataggacgcctccttgcggcgaaacgcctgcttgaacttcgcaccagcactatacgaaatcaaaaaggtgaaactcaggttactatggatattgacagtcctgaagatgatagcgcagaggatattgacctagctaagatccactgtcaatttgtggcattgctcgcccaggccccatcactttcacatttccgggaaataacaaacattgcgcttctcctcctcgataaacacgctcacgccatgtcacaactcaacatcgaagtcacactatgcagcgtcgtcgaagtatgttcacaatccggaccccagatccagggtccaaaatccgcgggagaaatcttcgccaacctcttcaagctcgtggcacttatcatcaagcgtcatcgtctgcgtctaaacggtcacttcccaatcctcctcacagcactcaaggcactactcaacgttctgctcgccgatcccagcacacccgtctccaagcgggcaagtcgcggatcagctcagtaccaattacccccttggcttcacacacgtctccaaccacggcatggggagcgcttcacacgcctcttaacactaatctgcgagccaagcgctgcctccgtcgcgcgatcctccgcgcggtctgagttagactctgctcgtgatgtggcgaaacgcgctgcggggcagtatatgtacctaatcctcgaagtatacattaagctacaactcgaagtcgaggtctcgaaggaaatgcgaaaggcgctcgaagtgggcgtttattctgtcctcgatatcacttctgaggggcggagaagagttatcaatgagagtctggacgctagtggaagagctgtgtttagggcgctgtttgctgagtatcgcaagtttggcaagtggaaaggtgtttgaaagggttgtattgtagatttaatatggtggtagatgagatagatggaaatgtgatcacatatagatacccttcatttatcaatgtatctcccgtgaattcatatatcaatactggtatgtaccgcggactggcctatcggtatcatacaattatgttcaccagatcactgaccgaccctcctagattgttctccaggtcaggtttcaatctaccgcctcttctcctccttccccttccccttccccttatccttatccttctccctactcccatgatccttcctccacccctccacaaactcatgcagatcaacaaagatcctcaaccccttatcatacatggtattatacaccgccttcagctccgacgaatccatatccctgcacagcgtgccaaacgcctccatgtagacatccttggaccaaggacaagcctggatagccctagcgaagacgcctttcgctttcttcctgagttcctttctgtcgtggcagaaccggatataagcgatccacagcccgggctggtgcgcacagacatctgaggccagggcacgctcatacgctgcgcgggtcgagtgtacgtttccggtttggatctcgtagttgatggcgaagacgtggctggacagtgtctcgttttcacgcgtaagcacgtgcgattggaggagtgatcgcacgcggtcgttcacgcttaggcgttgttcttgccaggcgaatagagcgaggaagatgctgttggagggaaatatgttcaggtatttagttagttgttcgcggaagaggctaggacggaaagccctaagataaccaattagtggtgtggagatgagtgttgtgtaagaaaggggacgtacccgtgacaagcgtggtaatatagcaagcgagccgcgaactggaggaaactctctagaggcgcgccttggtattggggccttctgacgtagtgttcggtcctttcattgatccttacaattgcagatgagatgtcgccttgtctagcggacctaggctccttttcacttcgtccagtgaggtattcgaaaaggacgcagccctcgtcgtgaacgagttgaaagcagaacgctccacgccatagaccactgtgtcgaggtgcggcccccagcaagtatcgcctggtcttcagaatttcggatggagtggcttccgtgagctcggattctggtaagccttctggtccagcctggactttgtctcttctgaatcgacaaaactccaaaactgctccgtttaggtctccgctgaccaattttagccatgctgcggacactaccagccgaaatcgattcatcaagttatcatcactcaagtcattctgaggcaagctcattgccgccgacaatacatttagagcggcagcttgcttgccttgctcgctctcggctgtggcataacctaggtaaagaccaatattcaaaggatcctgcttcaggagtgacttggcagtctttttcacattttcgggttcgttcgtcatctcgaaggcgagtagataggatcttaatgatgttaagttgcagtagggggcttccaagcgggtaagctgtttcaagactgttgaaatccaacgatatctgtccgcaggtatcttgtttcgtatcttgattaggtagcactgccaattttgtgaaggaaagataacttccggcaaaggctgcacttgatgcaatttgggaggaaacacgggtgccctcctttggccatcgcccacgttttctccattggcaacattcgtatcaattataagatccatctgattacaacgggcattaagatgatccagggcgacgcctctcaattccggtcgcgataaaggttctggcctatagacaggcgaaagctcgcaaaatatcagaaaggcgtcgatgagccgctcccaatgatcggtgaattctcctgatggtaagtcaaagacaaaatcttggatatctgtgtacattacgactcgaaacgggtcatcttctgctccgtcatctaacgttcgagcggggagtgtggcgatagaagctctgtgttgctcaacagaataccatgctctatacccatcacgagtctcaggcatttttgatggagtcgtaatcgagggatttgggtccggtggttgttggctatccggatctttcgaaaaagcgacacagccttgccactgatcttctcctattcgtgggacctcagcctcccaaaacttctgtaagttcaaaggacccaaatagtcgctgagcatatcttgcgatggagaatgaggtctcgcaaagtttatgtctagagtggccgaccatgccgcagaggcaagatctgcgaaacctgcatctgagagaaatattgtcaggcgtagaaatacttctattgcctgtaaaccatctacgccaagcacgtctgctctcagggatctcagcttgtccacatattgctgtttgatctcactaaatgtgaacaatgacggagtagactgttggaaagttagatgcaagcgccaaagctcaaaatcctccggatatttgtgcataacgtctgaaaactgttttaaggccgtctgtgtgtcccat

SEQ ID NO: 17998 - DNA, 489 bp, Muscodor strobelii
  misc_feature: SGI cDNA ID NO. 566023
  misc_feature: Encodes the peptide sequence at SEQ ID NO 17999
atgctcgagaagccggaatctccaaaaattaaaaaatactgccgctgggcgctaacttggaccagggcgtctactcctcgattcttctgcttgcgccaacatcgagaccttggatttctgtgcgtcaattactttaaactcgagaccaatctctgcttcgacttagccccgttttacagcccatcgcgaccaaaggaaagaaaagacgacgacaagatgcctgagacgtcggctcccgctcccatcatctcccgcccagcgcggcccgtgagtgaggcgctcctcgaggaaaagtgggaccgctgcctctccaacatgctcatcaagtccactctcggtctcggctttggcgtcgttttctccgtccttctgttcaagcgccgcgcctggcccgccttcgttggtgttggtttcggcgctggtcgtgcatacgaggagtgcaactggagtctgaagcaggcctctcgcgatcttaagaccaaggcatag

SEQ ID NO: 17999 - protein, 162 aa, Muscodor strobelii
  misc_feature: SGI Peptide ID NO. 566023
  misc_feature (84)..(152): Pfam Id: PF04418 Pfam Desc: Domain of function (DUF543)
  misc_feature (69)..(162): NCBI GI: 85083518 Blast Desc: NCU06495 [Neurospora crassa OR74A] gi|51701989|sp|Q7RYI0.1|U327_NEUCR RecName: Full=UPF0327 protein NCU06495 gi|28918221|gb|EAA27899.1| NCU06495 [Neurospora crassa
  misc_feature (73)..(162): NCBI GI: 116208062 Blast Desc: CHGG_03324 [Chaetomium globosum CBS 148.51] gi|88183921|gb|EAQ91389.1| CHGG_03324 [Chaetomium globosum CBS 148.51]
  misc_feature (73)..(161): NCBI GI: 46124639 Blast Desc: FG06697.1 [Gibberella zeae PH-1]
  misc_feature (77)..(162): NCBI GI: 261358365 Blast Desc: conserved [Verticillium albo-atrum VaMs.102]
  misc_feature (73)..(157): NCBI GI: 154320414 Blast Desc: BC1G_01679 [Botryotinia fuckeliana B05.10] gi|150853368|gb|EDN28560.1| BC1G_01679 [Botryotinia fuckeliana B05.10]
  misc_feature (70)..(162): NCBI GI: 145611472 Blast Desc: [Magnaporthe grisea 70-15] gi|145018746|gb|EDK03025.1| [Magnaporthe grisea 70-15]
  misc_feature (87)..(162): NCBI GI: 171686426 Blast Desc: protein product [Podospora anserina] gi|170943174|emb|CAP68827.1| protein product [Podospora anserina]
  misc_feature (73)..(157): NCBI GI: 156040649 Blast Desc: SS1G_12341 [Sclerotinia sclerotiorum 1980] gi|154696397|gb|EDN96135.1| SS1G_12341 [Sclerotinia sclerotiorum 1980]
  misc_feature (71)..(155): NCBI GI: 169614457 Blast Desc: SNOG_10371 [Phaeosphaeria nodorum SN15] gi|111061586|gb|EAT82706.1| SNOG_10371 [Phaeosphaeria nodorum SN15]
  misc_feature (79)..(155): NCBI GI: 189199838 Blast Desc: PTRG_05923 [Pyrenophora tritici-repentis Pt-1C-BFP] gi|187983355|gb|EDU48843.1| PTRG_05923 [Pyrenophora tritici-repentis Pt-1C-BFP]
MLEKPESPKIKKYCRWALTWTRASTPRFFCLRQHRDLGFLCVNYFKLETNLCFDLAPFYSPSRPKERKDDDKMPETSAPAPIISRPARPVSEALLEEKWDRCLSNMLIKSTLGLGFGVVFSVLLFKRRAWPAFVGVGFGAGRAYEECNWSLKQASRDLKTKA

SEQ ID NO: 18000 - DNA, 861 bp, Muscodor strobelii
  misc_feature: SGI EST ID NO. CUFF.42521.0
  misc_feature: Variant of the nucleotide sequence at SEQ ID NO 17998
gcggacggcacatcgaagctattgaagctccaatcggcattccgtccatccagcgtctactcctcgattcttctgcttgcgccaacatcgagaccttggatttctgtgcgtcaattactttaaactcgagaccaatctctgcttcgacttagccccgttttacagcccatcgcgaccaaaggaaagaaaagacgacgacaagatgcctgagacgtcggctcccgctcccatcatctcccgcccagcgcggcccgtgagtgaggcgctcctcgaggaaaagtgggaccgctgcctctccaacatgctcatcaagtccactctcggtctcggctttggcgtcgttttctccgtccttctgttcaagcgccgcgcctggcccgccttcgttggtgttggtttcggcgctggtcgtgcatacgaggagtgcaactggagtctgaagcaggcctctcgcgatcttaagaccaaggcatagccagaattttaatcaccatcaacatatccaacttctcctttgtttagacagctgcgagcgctcatatctgtctccaacatcagccgcgacgaatgcatgggcttgtaagaaagggaactacgaggcaatccggtcgattgtataaagcgagctaatggaagcaagcttgggtggccgggacctgacatgacacaaaaagttccgtggccctctgtacaacaaaaactcgatagacaagacgagagatgagaggcatagagatacattgaaaacatcatttactccaaaacattagtaaaagtagcctatctaactgggcctaacgggcctgtaacggtgaagatcttcatacattcgtctaagtctcaatacatatgccattaatt

SEQ ID NO: 18001 - DNA, 999 bp, Muscodor strobelii
  misc_feature: SGI cDNA ID NO. 566024
  misc_feature: Encodes the peptide sequence at SEQ ID NO 18002
atgacggcgagagcaagacatggggtagtaacaaatcatctactccgacaggctcgcctcgtcacaataagcagtcgcatcggagtatctcgtcgactgttctcgaaatatcagacgacgcttcaaaatcccaagaacaatctcgtaccgatggggcaatggccccagccgagttaccaattaaactatgttctaccaccaccgccgcgcagcaggacaaaagatatgatctatggtgccgtcgggtgcgttatacttttgctcgccttgggggttccgtctgcctattggctcgttaaaaagtcgatgattgccggagcatctatcaaaatggataaggcgaaggatacattcgaaaaggcctttttggcggctaaatacagagataagaacgaacaagctatatctcgggcccttttcgagtacgcacaggcaatgttattttggcaccttgtcattcatgtgcaggtcaactcgcagcaagaaaccctcaagaacctcggcccgttgccaggctctctagcagatgatcaagaacatggtgccgatcatgacaccttcgagaatgccgagtcattggtcttcttgtcttctgagacctatcaggggcaggtcgggacaggcaatgctgtggaaggcatcaccactgttgatgtaggataccgcgtcctttacgccgtcttgaacagagacgttagtgacctcggcgagaccataacagaccgggaccttcccgatacgactgcggcggccaacaaagaactaaggcgggtgcaagctaagatcgaaatcctcagagagacacagagagtagagaaagacgaaccatggctggtgttcttattgcttcgagatgggtacatgggattcatcctagacgagaaatcctcagtgtacataagaccagcagggccatctattgtattgccattcccatggggcgaagagaacaatcctttggattattataagaagctttataacctacctaccttttaa

SEQ ID NO: 18002 - protein, 332 aa, Muscodor strobelii
  misc_feature: SGI Peptide ID NO. 566024
MTARARHGVVTNHLLRQARLVTISSRIGVSRRLFSKYQTTLQNPKNNLVPMGQWPQPSYQLNYVLPPPPRSRTKDMIYGAVGCVILLLALGVPSAYWLVKKSMIAGASIKMDKAKDTFEKAFLAAKYRDKNEQAISRALFEYAQAMLFWHLVIHVQVNSQQETLKNLGPLPGSLADDQEHGADHDTFENAESLVFLSSETYQGQVGTGNAVEGITTVDVGYRVLYAVLNRDVSDLGETITDRDLPDTTAAANKELRRVQAKIEILRETQRVEKDEPWLVFLLLRDGYMGFILDEKSSVYIRPAGPSIVLPFPWGEENNPLDYYKKLYNLPTF

SEQ ID NO: 18003 - DNA, 2028 bp, Muscodor strobelii
  misc_feature: SGI cDNA ID NO. 566025
  misc_feature: Encodes the peptide sequence at SEQ ID NO 18004
atgagcgaggcacgcgtaatatactggtttagaaccgatcttcgtcttcacgactcaccggcgttgaaagcggcgctcgacttgaacccgaacttgctctggccaatttttacggcaactgacgctcgctttggctacagatgggaccctcattatgtgagtagttatatccgccaatcaaatggccaggcagcgatcgatcggaacattgcaaggcatgagaatttagagctgactgacacgctttccatacaacaggtatatcgagcaaagggaggagttaacagatggcaatacctgctcgattgtcagaatgatctctcggagtctatccgcaaactcaaccccaagtcaaagctcttcgtcctccgtgaagcacctcagtcgctcttccctaagcttttcaaagcctggaaagtcacacatctcgtgttcgaaaaagacacagattcttatgcccgtgagagagataacgtagtgactgaagctgcgaaggaagctggggttgaagtcataactcgatctggcagaacgctctgggatagcgatgaaatcgtagcaaagcacgggggcaagccaacaatgtccatcactcaactcgaagctgtcgggaagaagcttggagacattgcaaagcccatttctgcgcccaagcatctcccagatcccggagaaatgcccgtagactttgaccaggacaagcccacgacagatcccgatctcaataagccacagcgcaccaaggctgacgaggagtacaacagtatcgcgggacctaagggcgactttgctatagaaacgctagaagagttaggttttgcaccagcaacgacacctcaccgaggcggtgaaacacaagcactgaaacagttggacaaggtcatggcaaatgtgaaatacgcagcgacttttcagaagccgaaaacaagcccagcagctttcgatcctccatctactactctgctctccgcccatatgcactttggttcactttcatcaaggctcttctactggcgggcctgcgaggcagctgagaaatatggaaagggagcagcaactccgccggagtcgctgacaggacagctgttattccgtgatatgtatttcgctgctcaagcagctatcgggtcgccttttcatcagacgctgaacaacgaatatgtgcgattcatcccctggcatttgccctcgaagtacgatgaaacagaaacaggcaagaatgctattagtggcgagtaccacgttgactctacgcatgctgagaagtggttcaagagatggtcggctggcgtcactggcttccctttcatcgatgctctgatgcgtcagcttcgaactgagggatggatacaccatctcggtcgtcacatgttagcatgcttcttgaccagaggcggttgctatgtgcattgggagcgaggggctgatgtttttgaggagcttcttatagatcacgaaccagcttgcaacgccggtaattggcaatggctcagttgcacggcatttttcgcacaatactataggtgctatagtccgattgcattcggacagaaatgggacaaaaatggcgacttgatcagaagatgggtaccggagctcaaagatctcgacgcgaagttcatctacgagccctggaaagcaaacaaggcagcgctcgataaggccggagtcaaaattgaaggagatggtatgagcactagtaaaaaggacggtatttacccagagcccatgttcgactttagtgagaggagaaagatatgcatctctgcaatgaagagcgcgtacgaagttggactacatggcggtgataaggaggttttggatggaagttggaaaggattgtttcagaaagcgggagagacggagatggaaggactgtccgaaggctcagacgatgatggagaacatgctgacgacgcacaaaacgagtcgcataaggggacgaagcattcgaggagtgggagtggtgctgtcaaagagggcccgatggatagacatgtcaagaaacagaagaaggcgtcagattga

SEQ ID NO: 18004 - protein, 675 aa, Muscodor strobelii
  misc_feature: SGI Peptide ID NO. 566025
  misc_feature (4)..(221): Pfam Id: PF00875 Pfam Desc: DNA photolyase
  misc_feature (281)..(595): Pfam Id: PF03441 Pfam Desc: FAD binding domain of DNA photolyase
  misc_feature (4)..(193): Pfam Id: PF00875 Pfam Desc: DNA photolyase
  misc_feature (424)..(595): Pfam Id: PF03441 Pfam Desc: FAD binding domain of DNA photolyase
  misc_feature (281)..(393): Pfam Id: PF03441 Pfam Desc: FAD binding domain of DNA photolyase
  misc_feature (5)..(660): NCBI GI: 46124775 Blast Desc: FG06765.1 [Gibberella zeae PH-1]
  misc_feature (1)..(674): NCBI GI: 261354030 Blast Desc: cryptochrome-1 [Verticillium albo-atrum VaMs.102]
  misc_feature (1)..(669): NCBI GI: 189188250 Blast Desc: cryptochrome-2 [Pyrenophora tritici-repentis Pt-1C-BFP] gi|187972070|gb|EDU39569.1| cryptochrome-2 [Pyrenophora tritici-repentis Pt-1C-BFP]
  misc_feature (12)..(649): NCBI GI: 169617021 Blast Desc: SNOG_11687 [Phaeosphaeria nodorum SN15] gi|160703316|gb|EAT80731.2| SNOG_11687 [Phaeosphaeria nodorum SN15]
  misc_feature (1)..(650): NCBI GI: 170878123 Blast Desc: 6-4 photolyase [Cercospora zeae-maydis]
  misc_feature (1)..(674): NCBI GI: 145605082 Blast Desc: MGG_02071 [Magnaporthe grisea 70-15] gi|145012947|gb|EDJ97588.1| MGG_02071 [Magnaporthe grisea 70-15]
  misc_feature (6)..(619): NCBI GI: 121705010 Blast Desc: DNA photolyase, [Aspergillus clavatus NRRL 1] gi|119398914|gb|EAW09342.1| DNA photolyase, [Aspergillus clavatus NRRL 1]
  misc_feature (2)..(647): NCBI GI: 145251890 Blast Desc: An16g01450 [Aspergillus niger] gi|134082999|emb|CAK42762.1| protein product [Aspergillus niger]
  misc_feature (4)..(617): NCBI GI: 71009567 Blast Desc: UM02144.1 [Ustilago maydis 521] gi|46098033|gb|EAK83266.1| UM02144.1 [Ustilago maydis 521]
  misc_feature (7)..(582): NCBI GI: 47217864 Blast Desc: protein product [Tetraodon nigroviridis]
MSEARVIYWFRTDLRLHDSPALKAALDLNPNLLWPIFTATDARFGYRWDPHYVSSYIRQSNGQAAIDRNIARHENLELTDTLSIQQVYRAKGGVNRWQYLLDCQNDLSESIRKLNPKSKLFVLREAPQSLFPKLFKAWKVTHLVFEKDTDSYARERDNVVTEAAKEAGVEVITRSGRTLWDSDEIVAKHGGKPTMSITQLEAVGKKLGDIAKPISAPKHLPDPGEMPVDFDQDKPTTDPDLNKPQRTKADEEYNSIAGPKGDFAIETLEELGFAPATTPHRGGETQALKQLDKVMANVKYAATFQKPKTSPAAFDPPSTTLLSAHMHFGSLSSRLFYWRACEAAEKYGKGAATPPESLTGQLLFRDMYFAAQAAIGSPFHQTLNNEYVRFIPWHLPSKYDETETGKNAISGEYHVDSTHAEKWFKRWSAGVTGFPFIDALMRQLRTEGWIHHLGRHMLACFLTRGGCYVHWERGADVFEELLIDHEPACNAGNWQWLSCTAFFAQYYRCYSPIAFGQKWDKNGDLIRRWVPELKDLDAKFIYEPWKANKAALDKAGVKIEGDGMSTSKKDGIYPEPMFDFSERRKICISAMKSAYEVGLHGGDKEVLDGSWKGLFQKAGETEMEGLSEGSDDDGEHADDAQNESHKGTKHSRSGSGAVKEGPMDRHVKKQKKASD

SEQ ID NO: 18005 - DNA, 1314 bp, Muscodor strobelii
  misc_feature: SGI cDNA ID NO. 566026
  misc_feature: Reduced expression when VOC is produced
  misc_feature: Encodes the peptide sequence at SEQ ID NO 18006
atggcaaccgtagctgcgcggccgattgtgccgtccaacgctgtccagatccctgtgaggcagaggcacaagaaccgccaaaatagagacgtgcatcgagtgcgctcttcgtccacacttggggctcgagatgtccaccaacccgaggccataccgccggctgtcgccgccttgcttgctattactaacatcccgccaccaagtcggaaacgaagcctgcgacggaacaaagatggcagaatgacggttgactctattgtaccacgttcacgagtttccgagaaagatctcagccaagaactgagcctggatttcagtgagcagctaggctttgaaactttcgagcgcagccctttggaagtacttctcagcccgccggatgaacttgaggaagatgtggtgtcactaccaagcgacagcggattcgcatctccctattctacccgtacggggtccttcgacagtcttccctccttaggagattcaacatcaaacagcgctcttctgtccgcagactttccgattacgcctcgaggaggcaaattgcgctctcccaggcgatctcttgagcctgtgcattctccacccggcgaagagccatcagacccattatcgaaagtatctaacgagacagatggactggatttcagtgttttcagcaccaaatctacatcgccaactgagaaacagccacagagcctgatgccattcaaatctgtgttcaaatcgaatctcacagcgtccctccgcgcattgcggtccgccgctaggtcaatatcgacgttcaccgcttcatctacgccgcctgatgattttttaactcgttcgatacttactattgatccccgggtccctttcaccgatgagaggaggcctcctgttctagaggaagaacctagcgaggctatgcgccgatatctgaatcccaccactaccacaaggccagatacacgtggttcaatgtctattcgggcttacactgcatccatccagatgcagacttacaaggtgcaaagatcacgagccgtacctaaaacctctcgaccctcttcccagagctcaactaccagcaaggcatccgaagtggcagtattccctccgggtccgcgacaacgcgaaatgcgtgaaaattcagatttcattcgtattgcactaatggagcatttgatgcgaaagcaagggaaattggatgatcagcgcgaggggcatgcaagatggctccttccacccagaaaagccattaccaaagcctacgagatcggtttggacggtgttccgacccggtggacctcgatatcgcaaactgagatctag

SEQ ID NO: 18006 - protein, 437 aa, Muscodor strobelii
  misc_feature: SGI Peptide ID NO. 566026
  misc_feature (12)..(434): NCBI GI: 116207586 Blast Desc: CHGG_03086 [Chaetomium globosum CBS 148.51] gi|88183683|gb|EAQ91151.1| CHGG_03086 [Chaetomium globosum CBS 148.51]
  misc_feature (16)..(433): NCBI GI: 171686422 Blast Desc: protein product [Podospora anserina] gi|170943172|emb|CAP68825.1| protein product [Podospora anserina]
  misc_feature (10)..(435): NCBI GI: 85109356 Blast Desc: NCU06273 [Neurospora crassa OR74A] gi|28924518|gb|EAA33641.1| [Neurospora crassa OR74A]
  misc_feature (2)..(432): NCBI GI: 46111399 Blast Desc: FG02581.1 [Gibberella zeae PH-1]
  misc_feature (12)..(433): NCBI GI: 156058664 Blast Desc: SS1G_03344 [Sclerotinia sclerotiorum 1980] gi|154701131|gb|EDO00870.1| SS1G_03344 [Sclerotinia sclerotiorum 1980]
  misc_feature (7)..(435): NCBI GI: 145602005 Blast Desc: MGG_05261 [Magnaporthe grisea 70-15] gi|145010458|gb|EDJ95114.1| MGG_05261 [Magnaporthe grisea 70-15]
  misc_feature (12)..(433): NCBI GI: 154303126 Blast Desc: BC1G_09583 [Botryotinia fuckeliana B05.10] gi|150855046|gb|EDN30238.1| BC1G_09583 [Botryotinia fuckeliana B05.10]
  misc_feature (11)..(433): NCBI GI: 256725769 Blast Desc: NECHADRAFT_14395 [Nectria haematococca mpVI 77-13-4]
  misc_feature (234)..(418): NCBI GI: 261358395 Blast Desc: conserved [Verticillium albo-atrum VaMs.102]
  misc_feature (45)..(433): NCBI GI: 169614429 Blast Desc: SNOG_10355 [Phaeosphaeria nodorum SN15] gi|160707344|gb|EAT82690.2| SNOG_10355 [Phaeosphaeria nodorum SN15]
  misc_feature: Useful for introducing or modulating the production of volatile compounds
MATVAARPIVPSNAVQIPVRQRHKNRQNRDVHRVRSSSTLGARDVHQPEAIPPAVAALLAITNIPPPSRKRSLRRNKDGRMTVDSIVPRSRVSEKDLSQELSLDFSEQLGFETFERSPLEVLLSPPDELEEDVVSLPSDSGFASPYSTRTGSFDSLPSLGDSTSNSALLSADFPITPRGGKLRSPRRSLEPVHSPPGEEPSDPLSKVSNETDGLDFSVFSTKSTSPTEKQPQSLMPFKSVFKSNLTASLRALRSAARSISTFTASSTPPDDFLTRSILTIDPRVPFTDERRPPVLEEEPSEAMRRYLNPTTTTRPDTRGSMSIRAYTASIQMQTYKVQRSRAVPKTSRPSSQSSTTSKASEVAVFPPGPRQREMRENSDFIRIALMEHLMRKQGKLDDQREGHARWLLPPRKAITKAYEIGLDGVPTRWTSISQTEI

SEQ ID NO: 18007 - DNA, 3662 bp, Muscodor strobelii
  misc_feature: SGI EST ID NO. CUFF.42450.0
  misc_feature: Variant of the nucleotide sequence at SEQ ID NO 18005
aacagcttccttgtcattgccacaccgattcaagtactctccgcacctagatctcgatgccgactaggctcacagccagacgccgtggccttgatacatctattcacaaaaacaaatgacttgaattttcggcatttgaatcgcaatcagtctctcgatttcgcccttggagacggtctcgccgttgcttcttttcttgtcgcacaggttgcttttcttgcctcaattgcgtagcccacccgatcgaatcaatccgctgggctgcacgcgaccggttcactgggacctgcagcgtccacgttgacggaactcttgacagggtctcttacgtacaagaatctctcaataccctggttgtctgatcgcatcgacacctgtgtcagccaaaccattcttctcttggcattgtcagcaaaagaaggcagagagaagaaaggggatcagaagcacgagactggcaagtggaaacagtagaatgccactagtgcacagcatatcatcattgatgacacagggcaaacattcctagaggcgcccgactcatatcacgtcgagtaaaggtgcctgcagttgcctattgcactctagaacgggcagctccgcgcagtgccacttgttcgttcatttattccattgttcagctaaaaagagaaacggcgtggacccttgtagcccccgggtcaggccgggcagtgggtgtcattacatggaccatgataaatccaagatccttcctttactcacaacatccacaatctctaccacgacgttctcctagttctcctcttgcgacaccctcaataagttcatcaccgcccagaaaggatgattcagtatcaggccgcaacatacccacctcaagctctgcagatataaaccgactacgctcatcgaccataccgattaagtcgagggcttcacacaccatttctcccccgagtagcagtccaccatcaacaactatggcaaccgtagctgcgcggccgattgtgccgtccaacgctgtccagatccctgtgaggcagaggcacaagaaccgccaaaatagagacgtgcatcgagtgcgctcttcgtccacacttggggctcgagatgtccaccaacccgaggccataccgccggctgtcgccgccttgcttgctattactaacatcccgccaccaagtcggaaacgaagcctgcgacggaacaaagatggcagaatgacggttgactctattgtaccacgttcacgagtttccgagaaagatctcagccaagaactgagcctggatttcagtgagcagctaggctttgaaactttcgagcgcagccctttggaagtacttctcagcccgccggatgaacttgaggaagatgtggtgtcactaccaagcgacagcggattcgcatctccctattctacccgtacggggtccttcgacagtcttccctccttaggagattcaacatcaaacagcgctcttctgtccgcagactttccgattacgcctcgaggaggcaaattgcgctctcccaggcgatctcttgagcctgtgcattctccacccggcgaagagccatcagacccattatcgaaagtatctaacgagacagatggactggatttcagtgttttcagcaccaaatctacatcgccaactgagaaacagccacagagcctgatgccattcaaatctgtgttcaaatcgaatctcacagcgtccctccgcgcattgcggtccgccgctaggtcaatatcgacgttcaccgcttcatctacgccgcctgatgattttttaactcgttcgatacttactattgatccccgggtccctttcaccgatgagaggaggcctcctgttctagaggaagaacctagcgaggctatgcgccgatatctgaatcccaccactaccacaaggccagatacacgtggttcaatgtctattcgggcttacactgcatccatccagatgcagacttacaaggtgcaaagatcacgagccgtacctaaaacctctcgaccctcttcccagagctcaactaccagcaaggcatccgaagtggcagtattccctccgggtccgcgacaacgcgaaatgcgtgaaaattcagatttcattcgtattgcactaatggagcatttgatgcgaaagcaagggaaattggatgatcagcgcgaggggcatgcaagatggctccttccacccagaaaagccattaccaaagcctacgagatcggtttggacggtgttccgacccggtggacctcgatatcgcaaactgagatctagaattgcgcccaatctctagtaatcgccagttcgcggttgcatccgctccactatcgaagtgttctatggtggtcgcgtgccgtagcggaacccacgatttttcaattatctcatattatgaagaaacaaggccaaaggcgaacctattaccaaatactgacagaacattggagacatgaaccaaccgcgcattcctgaatcatggtgaccgcggagaaatgccgaccccataccttaccctcgttcaacgccgcaccaactaccgatatcgcaactatcgggcggtccgccaaaaaaatgattctagaaagaaactacctagtcgcgaatgtggggattcacaaaatcctagaattaccaagaactagaagcccgttgattatttggatcacctttatgatttccagggtcctgccagtcccggtatagctttaagaggctctaatttgggaagaaacaacagtgccttaagcgatattccgaagagcacaaacgcatataggcggaacacaaagcccgcgaaagttactccatgctatttcgcgcaatcagcaggaagacaacatcaaacacacagtacagactacttggtcttggtatgatgagttggcatactggacccatcggaaatctagctcattaggtcgctatgttctggtgaatgccgagttatgtgcttgttgacaggctgcagaactagagttgtcggtgtcataatactctgcacaagacatcatactgcatcctcgcaagcccggaagacagtgccgctgggttcgggcatacctgccaacgcacaaatttcacaacactaacaagagccattgcatcgagatatgcgaagtcctgcttcccatgcatctgtcccatttacatcatcattacaatcattgccaccgtgtagctttaaagttatcgatacccttatttcaagtttccagcggtcagcggccatagtacatacagcataggcagatccgctcatattgatctcagctgttcatagttgggtgcgactgcaccttcgagcgatgcgtttgctttatgcataagggtgggagtctctcggtttcttgaccgatgcattgggaaggtgttactagcatttgttagacgctcgtaaatacttttcttcctttgtttcaataactaaatattactgtgctcatctagaagtgattattttgaccctaatggcggctgccagcctgtctatctccatctgctcctttctaagtggcctaacattgtggattaccaaggttcgctgcccttatggactgccaacccatagccctgaatgagagatctttaatgtaagtcacccctgcttttctgaatatttcgggccgaattagtatacaagatgaaccagcagagcttgtt

SEQ ID NO: 18008 - DNA, 555 bp, Muscodor strobelii
  misc_feature: SGI cDNA ID NO. 566027
  misc_feature: Encodes the peptide sequence at SEQ ID NO 18009
atgctcatattggggctgccactcaagatatttttggagctgaagatcccaaggcgtacgaagatcgctttactggtagtatttttactcggattccttacgactatcacaagcatcgtccgtcttgtcctacttgttcaaggattgttcatgctcaaaacaaccatcaacccagatgccaatatcggattcgtcacatcagctatcgagacaaatctcgcgctgataacagcgtcggcacccgctttacggccactacttcgttcatggttcccaagtctattcggtgtgggccgcgacgaagtcgttggcaataccgagcgcagagtcctcggcactgcagcaacacggatgacgcgactcaagtcacagacgcaactacaaagtcagacgccgcgcgaaagtgaagaggccatcatgacattcaatggcatcatcagaagtagtgatatcatcatacaataccaaccaggggcagataagtcgcagaataggcgcgagttgttgcctgatctaccagatatcgaaagccagtcagcagagaagtggatatga

SEQ ID NO: 18009 - protein, 184 aa, Muscodor strobelii
  misc_feature: SGI Peptide ID NO. 566027
  misc_feature (1)..(91): NCBI GI: 116207584 Blast Desc: CHGG_03085 [Chaetomium globosum CBS 148.51] gi|88183682|gb|EAQ91150.1| CHGG_03085 [Chaetomium globosum CBS 148.51]
  misc_feature (1)..(167): NCBI GI: 256726624 Blast Desc: NECHADRAFT_33527 [Nectria haematococca mpVI 77-13-4]
  misc_feature (1)..(155): NCBI GI: 256731403 Blast Desc: NECHADRAFT_84827 [Nectria haematococca mpVI 77-13-4]
  misc_feature (1)..(151): NCBI GI: 171686420 Blast Desc: protein product [Podospora anserina] gi|170943171|emb|CAP68824.1| protein product [Podospora anserina]
  misc_feature (1)..(166): NCBI GI: 154302889 Blast Desc: BC1G_09188 [Botryotinia fuckeliana B05.10] gi|150855112|gb|EDN30304.1| BC1G_09188 [Botryotinia fuckeliana B05.10]
  misc_feature (1)..(156): NCBI GI: 171676642 Blast Desc: protein product [Podospora anserina] gi|170936388|emb|CAP61045.1| protein product [Podospora anserina]
  misc_feature (3)..(169): NCBI GI: 116197242 Blast Desc: CHGG_05219 [Chaetomium globosum CBS 148.51] gi|88181132|gb|EAQ88600.1| CHGG_05219 [Chaetomium globosum CBS 148.51]
  misc_feature (1)..(156): NCBI GI: 256727897 Blast Desc: NECHADRAFT_83482 [Nectria haematococca mpVI 77-13-4]
  misc_feature (1)..(162): NCBI GI: 256728289 Blast Desc: NECHADRAFT_87571 [Nectria haematococca mpVI 77-13-4]
  misc_feature (1)..(151): NCBI GI: 256724573 Blast Desc: NECHADRAFT_15726 [Nectria haematococca mpVI 77-13-4]
MLILGLPLKIFLELKIPRRTKIALLVVFLLGFLTTITSIVRLVLLVQGLFMLKTTINPDANIGFVTSAIETNLALITASAPALRPLLRSWFPSLFGVGRDEVVGNTERRVLGTAATRMTRLKSQTQLQSQTPRESEEAIMTFNGIIRSSDIIIQYQPGADKSQNRRELLPDLPDIESQSAEKWI

SEQ ID NO: 18010 - DNA, 4904 bp, Muscodor strobelii
  misc_feature: SGI EST ID NO. CUFF.42491.1
  misc_feature: Variant of the nucleotide sequence at SEQ ID NO 18008
cggaaccccaggtagaacggccagaggaagatgtatgcatccaacctctagcttgaggtgattatcaggccagtcttcgtggttagctgcatttgacgcgcgacatcgacagagtccctggcaagaaacatataacctaccatacataaggtattctgataacatgacacaagcagattcaccgaatgaataggtagattcacctcgaacttatgatgaagagcaagtcgaccagtccgagcagaattataaaatcatgattctcgccgtcatccgatgtcagtcgcggcagaatgacacgagggtgcagtagaccctgccgtcccgaggcacgcactgacgatcaggggtttccaagatatccttctccaaccgtcaccaattgatcgggagcattcatcaccggcaagactccgtctaacctcgagaccaaatggctagacacaactcagacattcgctctacgaggactttttaacgcccttatctgaactcaggaacgccgtaaactaatcaaacacatttttattgcggtttcgtcactatcatgtagagaggtgcacaacgccagcccaccgccaatcttcgcatgagagatcgtgattaaactgtctacaccgagctcgaaatctacgcgagtctatcccccagatctacacgcatcatggtctgtgtcatgagcatggcgtcgcatttgccatcgttgccactgtataatctcatcagcgagttgtgatatggtggccaaaattcatgtctgtggggtgatttgcgtgagatgcacacccgattcatgcttcatgcgagcagtcctgttgtcgcctgcgcacggatggggacaaagcaaatcagatcttcttttgcccgtacccgcagacatgcgacagtcgagactattctaccgatgtcaacttagtcacaggctaagagattcggcttgcggctcgtgccggaccacgcttcttttcaacatttcttctcgggttgcgcttttgtttcatacttcaagcttgttcctcgggaccagaggcattgagacaacctttggcttctctatggttttcgtctgatcttcatcattaggcttttaccaccttcgaaccatggggtgctcatccaatagactgtgttgccactccggttgtgatgaacccaggcaaccatatgtctccaaggtcatcatcagttgaactgatcatggtaactagcattatcaacgcttgatgcgtgatacgttggcttgctacgatatgacaagacttgcagccaaacttgtctcgaagtcccgagatcatatcactcaagtggtcgtacaagtttccagtgattcatagtccagatgatgaaaatcaacgtgagtcgtactggaaaatctttcgattggcgagctgtctgtgatcttggcggcatatcgctcatgcccgcctggtggcgatcggacataatccatctgatgatacaagatgatttatccggcgacggacccctatgccgtccacaaacttcaccttctccagtaccaggcgtcgatcattctcaagcgagtgaagacgtacgtcttgtgcacgatgacgatgcaatgtaatcttatatttgtcagggctcatcccgtctctcggtgtgtctacgatggtagcgattttcccttcatttcttctcaatcctctcgttgtagagcgcctggctagcacacagcctgttcgcatgtcactcattatgtctcttctacccaccctagaggttatgggcttgggaaattcgacggcggcagcggtccagtctccagactcatttcaatattcaagtactgagcagaatatcgcaatagccgtcatcgtcgcatttccggtgctcgcttttgtagtgctctgtacacgagtagctggaagattatcgtcacatcagtttggtctagatgataccttagtatgcgtagcgatggtacggcatgagacatccagaaatctggtcgaatcgttgtgttgatagtgtaaacttttaggttttgtctatcttggagacggcagcaagttatatgttcatcagaacgaattttattgggatcaggactgaagacattccaccgcatgacccagtgccaggattaatatggaattacgccattgagatactatataaccctattttggccttggtgaaatcctcgatactactcttccttttgcgtctcttcggtcagaagcctggcgttcgacggttcattatttgggtaaatgcagccaacattggtaatatgatcggtgtgttcttcgcaactatttttcaatgcatacccattgaaaagaattggagaccatttttggaaggcacatgcatcgatcgtaggataatgttcactacgtcgtccgcgttcaacatcctaacagatatgctcatattggggctgccactcaagatatttttggagctgaagatcccaaggcgtacgaagatcgctttactggtagtatttttactcggattccttacgactatcacaagcatcgtccgtcttgtcctacttgttcaaggattgttcatgctcaaaacaaccatcaacccagatgccaatatcggattcgtcacatcagctatcgagacaaatctcgcgctgataacagcgtcggcacccgctttacggccactacttcgttcatggttcccaagtctattcggtgtgggccgcgacgaagtcgttggcaataccgagcgcagagtcctcggcactgcagcaacacggatgacgcgactcaagtcacagacgcaactacaaagtcagacgccgcgcgaaagtgaagaggccatcatgacattcaatggcatcatcagaagtagtgatatcatcatacaataccaaccaggggcagataagtcgcagaataggcgcgagttgttgcctgatctaccagatatcgaaagccagtcagcagagaagtggatatgatgattgaactttatgggcaaggtgcttgaattctacattggagttttataaccatcatcatcataaatggcgttaaaattttgttgctggtctcgcatgtgtggttcctcaacctggttggtgttcgggcataggcatttggcgttgtgtggttggttattcaaatttggtttatgaagcgcaaaataggcacaatacccagctgaatttacaagaagtagtaattatatcttaacttcaacaacagttcgtctatattacgccgtaagggacacgattcgcgaccagtgtctgctagcaagctttcgttgaaattgtacacaacaatttgaactatttcatccctctaccacttcatacagacgtgatacgacgacacatacaataacccagtcaaataaccagcaatttcaagtctcaattatttagcgcaaaatcacttcatctcacagtcaactcggccttgaaatgtggttcgcgggcagctaagaagtttctccgcagatccaggagtcaatccatactattgacaggaatactctccgagttctttgcttcatgtatcggcgggcttctgctcgcgaaaaaacgatctcgatcagatgtggcgaatacttgtattcatcgtagacgcattgcgtgcgattaaatgcaatcgaggcagtcttcaacagttccaaggtcgtgctcgatgaccttttgacccctgatggattgctccattgtatcagtacttcacgacgcaaattgatagcacgctgagctatgaatgttattagtaaaaaaagacatcgccaatagtgttagtaatgttcattctggttcagttcctaccatcctctcactcgcttcagttgagcttcgcatttgctttctcatgctttccccgcattcgtgtgttgcgactgacttgaataggtttaaatgatattcaaccagctctatcgtgtacaatctcgtcccatcctttggtcgcagatctcacttggctccacgtcgttgtctccacgtacgtggccaacgacccgaggaacgaacctatccatggctccgctatgtaagccagagcagggcagatagcggagaccactctcgaacccctttcgagttgcacatgcaacctgacgcgcaaaacccgagattgctgctgctgctgcttcaaaaattcaatacctccagagctgtactcatttgggctgccaaacaacgagacatcccggtgatctgcagtgtggagatgacggctgtctacccggcggtagtcaaagtttcgcctgtcttcttgagctctagccttgcggcactactgtacgtcgtgaaaggcaaaaatttcagcatcgtgcttgatcccgcttgacacagcaaatgtctcattttcaccgccgtgtagtcccacattacccacatagtagatgcagggactgcgcagcgtgttcgacaaattgcattgattactctgctctcttggttgtgcatcgtgaactagtcaaatgcgacgtttcgtacgtcgtggaccatctgttgaacgaacgaagcgggtaggtggaagcgacttgtgagggaaaaaagcgagccaattgtgtcaagattggcgtggagtaaggtggtgatgacctaaggatgtattctgccagcgctctgcgcggcaaatcatttattagtcgccggtgggaggtgattacctaattgtaaacgaaatgaatatagcatggtgcaaacccgatagcggaaaaactctattcgatctttttttcttggaatcttatttagcacaactgacagagaagagacatacgtcaatgctggggaaggttcgagggtccgaggtcgcgtgggctattggtcctctggcagagatggtgtatcccatgcacgcgacacccacgtcacgtatccccataatatgcaccccaacaccaatttagaaggatgctttgtgagaacttggcaagttggaaat

SEQ ID NO: 18011 - DNA, 2373 bp, Muscodor strobelii
  misc_feature: SGI cDNA ID NO. 566028
  misc_feature: Encodes the peptide sequence at SEQ ID NO 18012
atggccgcccgcgacgcagagctgacaagctcagcgcaaatcttcacaactcacaccttgccgcatatccgcactcttcacaaaagcttgcatacccagatcgatgagaagtctgcccgtcttcgcacgcaagtcggcaatagctatcgccagcttctcggcacagccgacaccatcgtccacatgcgccaggatatgctatgcgcccaggacatcctgggtcgtatgggcggtcactgcagccgtactgccattgaagacaagatcacaggctcgagccggttcgtccacagtcacaacaccgacgccgacctggcccatacggcgcgtctccgcctcttgggggcttgtgccttggccgtgggcaggctgctgaagacgagcggaagtaaaagtacccaagtagacaagggcgagcgattgctccttgccgcaaaggttctcgtacttagccgcttgctcgtacccggcttcggcagtctgaagaccctggacgacgagatgaagcttgctgtcgaggctgcgagaagaaacctagatgccttgagacgaaagctgataagggcggttgagaaagtgctacagagagccggggaagaaacagacatcactgtcatactcagagccctgtctgcctatagtcttgcgtcaagctccggtgcaaaggacatcctgcggctttttttgaacatcagggcccaggccaccacggatgaattcgaacaaacgggcatagataatgttctgagaggtctcaagctatatacgaggaccgtagtggacgtgcagatgcttgctccgactcggcttcgtgaggcgttactggaactcaagaagaacccgcttctagcggatgaatcgttacgttccatcgaagatcttcgattagatgtcttcgagccgtggtgtggagatgagatccgctacttcacccctttcatcaatcatgacgagctggatggcaagcaagctaaagatatgctgacgagctgggccaagaagggtggggaagccgttcttgacggcttgaccaagacactcgagcaaatgtccgactttaagacagttctggacttacgcacaagcgttttgcaacaatggatcaaggacggtgggaaggcaagaggctttgatccatctatcatgcttgataacctacgcaaggctttaaatgaacatctcttacagctcatagagactaaagttatgaaattgaagctggtcagttccgaggtctctgctacgcttgatgcatggcagtctggaatcatggatcttcagcaaagcctttgggatgcgagtttgctggagatggatttgtctatcggagctactcgggtgacaaacgagatagtatctcgagtgtctggaagaaacgatacagtcgcgcgagccgtcactggcttcgaatcgtggcatcaaatcatcgacattgtcagtgatctgattgagcaactcaaaggacagcggtgggagaatgacgtggacgagatcgaggatgaggaggttatcaacgagcgtcaacagctgttaagcaaagacgaccctcaacttctacacgcacgattagactccactttggctcatgctttcaaagagctagattcgcaactgacggccttatggcaaagccgaagcgaaggtgcggacaatggacctatagccatgtatattctacgggtcgtaagacatattcgaaatcatttacctcaattcgaaggcgtgcggtctttcggcctgggaaatgttcccagtcttcacgagaagcttgccttacacgtgtcaatgtctccaatcgaggagtttgtttctacggccctaaccctgaaacgagttgctggccgagcattatgggaaggcgagccacccttgcctacgcagctctctcctggcactttcaaattgttacgaaacttgactatgagtatgggcgatgctggtatcgatctatggacacccactgcggtcaacgagctcagaatcatctttgcccgccaacttgctgatgtttggcgcaaagagctcgccgccgacgcgattgagacgcatgctccagagcctacacccagctcagctaaggacatggaagacaacctatcctcagaagcggacgccgagaagaaggacatgcctgaggaatccacaaaaactccagaacgcagcgaggacgtttatatccaatgggtttttgacattcgtgtattagatcactacctcgcccttgacaatgcttcatcagaagacatcatgaaaactctcgcttcagaaataccaataaagggagcactaggaagcgaggcggagcaacgactcgcgaaggctgcgcaagagtactggaagaggacaagtctactctttggtttgctcacgtga

SEQ ID NO: 18012 - protein, 790 aa, Muscodor strobelii
  misc_feature: SGI Peptide ID NO. 566028
  misc_feature (4)..(86): Pfam Id: PF08700 Pfam Desc: Vps51/Vps67
  misc_feature (6)..(789): NCBI GI: 46122359 Blast Desc: FG05557.1 [Gibberella zeae PH-1]
  misc_feature (6)..(789): NCBI GI: 256729685 Blast Desc: [Nectria haematococca mpVI 77-13-4]
  misc_feature (9)..(790): NCBI GI: 171685914 Blast Desc: protein product [Podospora anserina] gi|170942918|emb|CAP68571.1| protein product [Podospora anserina]
  misc_feature (18)..(790): NCBI GI: 156048594 Blast Desc: SS1G_09028 [Sclerotinia sclerotiorum 1980] gi|154693425|gb|EDN93163.1| SS1G_09028 [Sclerotinia sclerotiorum 1980]
  misc_feature (8)..(790): NCBI GI: 85086777 Blast Desc: NCU00280 [Neurospora crassa OR74A] gi|28918846|gb|EAA28515.1| [Neurospora crassa OR74A]
  misc_feature (10)..(789): NCBI GI: 154300857 Blast Desc: BC1G_10728 [Botryotinia fuckeliana B05.10] gi|150856476|gb|EDN31668.1| BC1G_10728 [Botryotinia fuckeliana B05.10]
  misc_feature (6)..(553): NCBI GI: 261358362 Blast Desc: sphingolipid C9-methyltransferase [Verticillium albo-atrum VaMs.102]
  misc_feature (8)..(467): NCBI GI: 145611476 Blast Desc: MGG_00360 [Magnaporthe grisea 70-15] gi|145018750|gb|EDK03029.1| MGG_00360 [Magnaporthe grisea 70-15]
  misc_feature (5)..(789): NCBI GI: 261196191 Blast Desc: conserved [Ajellomyces dermatitidis SLH14081] gi|239587632|gb|EEQ70275.1| conserved [Ajellomyces dermatitidis SLH14081]
  misc_feature (5)..(789): NCBI GI: 239614591 Blast Desc: conserved [Ajellomyces dermatitidis ER-3]
MAARDAELTSSAQIFTTHTLPHIRTLHKSLHTQIDEKSARLRTQVGNSYRQLLGTADTIVHMRQDMLCAQDILGRMGGHCSRTAIEDKITGSSRFVHSHNTDADLAHTARLRLLGACALAVGRLLKTSGSKSTQVDKGERLLLAAKVLVLSRLLVPGFGSLKTLDDEMKLAVEAARRNLDALRRKLIRAVEKVLQRAGEETDITVILRALSAYSLASSSGAKDILRLFLNIRAQATTDEFEQTGIDNVLRGLKLYTRTVVDVQMLAPTRLREALLELKKNPLLADESLRSIEDLRLDVFEPWCGDEIRYFTPFINHDELDGKQAKDMLTSWAKKGGEAVLDGLTKTLEQMSDFKTVLDLRTSVLQQWIKDGGKARGFDPSIMLDNLRKALNEHLLQLIETKVMKLKLVSSEVSATLDAWQSGIMDLQQSLWDASLLEMDLSIGATRVTNEIVSRVSGRNDTVARAVTGFESWHQIIDIVSDLIEQLKGQRWENDVDEIEDEEVINERQQLLSKDDPQLLHARLDSTLAHAFKELDSQLTALWQSRSEGADNGPIAMYILRVVRHIRNHLPQFEGVRSFGLGNVPSLHEKLALHVSMSPIEEFVSTALTLKRVAGRALWEGEPPLPTQLSPGTFKLLRNLTMSMGDAGIDLWTPTAVNELRIIFARQLADVWRKELAADAIETHAPEPTPSSAKDMEDNLSSEADAEKKDMPEESTKTPERSEDVYIQWVFDIRVLDHYLALDNASSEDIMKTLASEIPIKGALGSEAEQRLAKAAQEYWKRTSLLFGLLT

SEQ ID NO: 18013 - DNA, 810 bp, Muscodor strobelii
  misc_feature: SGI cDNA ID NO. 566029
  misc_feature: Encodes the peptide sequence at SEQ ID NO 18014
atggccgacgttgtcaaagtctcgtactcaggccgtatcgccaccatcactctcgacaatgacaagaagctaaatgcccttggtcaggagggttactatgccatctcccaggccttacgcgaaatcgctaagcgcgatgatatctatatcacgatcctgactggaaaaggtcgatacttttcagccggcgccgacgtttccattggtcggacactacctgagggcacggatttatataaagagtggctgaagagcttcgttgcaaataatctcaacgtgacacaagccttctacacgcaccccaagatcctaatcgccgctctcaacgggcccgcagtcggcctctcagcagctttgacggcattcgcagattttgtctacgcagcaccacacacatttctcctaacgccattctcatctctcggccttgtagctgaaggcggcgcgtcccacgccctcgtgcagcgcctcggtatctctaaagcgaacgaggcgctcataatgagcaagcggatccccattgatgatctagtgtccacgggatacgtaaataaggtcttccagtgcgaaaaaggcgacgacaagacatttatgaagcaagtattagctgaggtggacgataggctaggcgagcatttggtaggcgacagtcttaccggcatcaaggcactgattcgcaagcccgaacgcgatgtacttgataaacagaatgtcgaggaggttttcgctgggcttggacggtttctcagtggtgtgccgcaggaggagttcatgaagatcgctacgggcaagaagaagcataagttgtaa

SEQ ID NO: 18014 - protein, 269 aa, Muscodor strobelii
  misc_feature: SGI Peptide ID NO. 566029
  misc_feature (14)..(188): Pfam Id: PF00378 Pfam Desc: Enoyl-CoA hydratase/isomerase family
  misc_feature (1)..(269): NCBI GI: 116207882 Blast Desc: CHGG_03234 [Chaetomium globosum CBS 148.51] gi|88183831|gb|EAQ91299.1| CHGG_03234 [Chaetomium globosum CBS 148.51]
  misc_feature (2)..(269): NCBI GI: 225683889 Blast Desc: peroxisomal D3,D2-enoyl-CoA isomerase [Paracoccidioides brasiliensis Pb03]
  misc_feature (2)..(269): NCBI GI: 226277999 Blast Desc: 3,2-trans-enoyl-CoA isomerase ,Delta(2)-enoyl-CoA isomerase [Paracoccidioides brasiliensis Pb01]
  misc_feature (2)..(269): NCBI GI: 226293275 Blast Desc: 3,2-trans-enoyl-CoA isomerase [Paracoccidioides brasiliensis Pb18]
  misc_feature (1)..(269): NCBI GI: 39974989 Blast Desc: MGG_00359 [Magnaporthe grisea 70-15] gi|145018751|gb|EDK03030.1| MGG_00359 [Magnaporthe grisea 70-15]
  misc_feature (2)..(269): NCBI GI: 239614589 Blast Desc: peroxisomal D3,D2-enoyl-CoA isomerase [Ajellomyces dermatitidis ER-3]
  misc_feature (2)..(269): NCBI GI: 261196187 Blast Desc: peroxisomal D3,D2-enoyl-CoA isomerase [Ajellomyces dermatitidis SLH14081] gi|239587630|gb|EEQ70273.1| peroxisomal D3,D2-enoyl-CoA isomerase [Ajellomyces dermatitidis SLH14081]
  misc_feature (2)..(269): NCBI GI: 240280454 Blast Desc: peroxisomal D3,D2-enoyl-CoA isomerase [Ajellomyces capsulatus H143]
  misc_feature (2)..(269): NCBI GI: 119173491 Blast Desc: CIMG_10208 [Coccidioides immitis RS]
  misc_feature (2)..(269): NCBI GI: 240111844 Blast Desc: 3,2-trans-enoyl-CoA isomerase, [Coccidioides posadasii C735 delta SOWgp]
  misc_feature (6)..(269): SWISSPROT Homolog: EC 5.3.3.8 Dodecenoyl-CoA isomerase
MADVVKVSYSGRIATITLDNDKKLNALGQEGYYAISQALREIAKRDDIYITILTGKGRYFSAGADVSIGRTLPEGTDLYKEWLKSFVANNLNVTQAFYTHPKILIAALNGPAVGLSAALTAFADFVYAAPHTFLLTPFSSLGLVAEGGASHALVQRLGISKANEALIMSKRIPIDDLVSTGYVNKVFQCEKGDDKTFMKQVLAEVDDRLGEHLVGDSLTGIKALIRKPERDVLDKQNVEEVFAGLGRFLSGVPQEEFMKIATGKKKHKL

SEQ ID NO: 18015 - DNA, 3699 bp, Muscodor strobelii
  misc_feature: SGI EST ID NO. CUFF.42472.0
  misc_feature: Variant of the nucleotide sequence at SEQ ID NO 18013
cgggtatcgagagcctcggttggtctagcggggccgagctcaccttgcctaccagaatataggtaccggaactctgtatttttcgccgagaaggattatttctcaattgtagttacacattacttattagaactcgggcctctttacggaagacctaccgcacccgtgccagaaacattgagcacaaatagaggcattatcaaacaccatggccgacgttgtcaaagtctcgtactcaggccgtatcgccaccatcactctcgacaatgacaagaagctaaatgcccttggtcaggagggttactatgccatctcccaggccttacgcgaaatcgctaagcgcgatgatatctatatcacgatcctgactggaaaaggtcgatacttttcagccggcgccgacgtttccattggtcggacactacctgagggcacggatttatataaagagtggctgaagagcttcgttgcaaataatctcaacgtgacacaagccttctacacgcaccccaagatcctaatcgccgctctcaacgggcccgcagtcggcctctcagcagctttgacggcattcgcagattttgtctacgcagcaccacacacatttctcctaacgccattctcatctctcggccttgtagctgaaggcggcgcgtcccacgccctcgtgcagcgcctcggtatctctaaagcgaacgaggcgctcataatgagcaagcggatccccattgatgatctagtgtccacgggatacgtaaataaggtcttccagtgcgaaaaaggcgacgacaagacatttatgaagcaagtattagctgaggtggacgataggctaggcgagcatttggtaggcgacagtcttaccggcatcaaggcactgattcgcaagcccgaacgcgatgtacttgataaacagaatgtcgaggaggttttcgctgggcttggacggtttctcagtggtgtgccgcaggaggagttcatgaagatcgctacgggcaagaagaagcataagttgtaatatcagaagagattttctcgatcgagcgagggagcggacacatagacacatatcgggcatagatgtgcaattctttcaaggttgatcacagttatatgtgcatagattttattgacatggagggtatctcacgtgagcaaaccaaagagtagacttgtcctcttccagtactcttgcgcagccttcgcgagtcgttgctccgcctcgcttcctagtgctccctttattggtatttctgaagcgagagttttcatgatgtcttctgatgaagcattgtcaagggcgaggtagtgatctaatacacgaatgtcaaaaacccattggatataaacgtcctcgctgcgttctggagtttttgtggattcctcaggcatgtccttcttctcggcgtccgcttctgaggataggttgtcttccatgtccttagctgagctgggtgtaggctctggagcatgcgtctcaatcgcgtcggcggcgagctctttgcgccaaacatcagcaagttggcgggcaaagatgattctgagctcgttgaccgcagtgggtgtccatagatcgataccagcatcgcccatactcatagtcaagtttcgtaacaatttgaaagtgccaggagagagctgcgtaggcaagggtggctcgccttcccataatgctcggccagcaactcgtttcagggttagggccgtagaaacaaactcctcgattggagacattgacacgtgtaaggcaagcttctcgtgaagactgggaacatttcccaggccgaaagaccgcacgccttcgaattgaggtaaatgatttcgaatatgtcttacgacccgtagaatatacatggctataggtccattgtccgcaccttcgcttcggctttgccataaggccgtcagttgcgaatctagctctttgaaagcatgagccaaagtggagtctaatcgtgcgtgtagaagttgagggtcgtctttgcttaacagctgttgacgctcgttgataacctcctcatcctcgatctcgtccacgtcattctcccaccgctgtcctttgagttgctcaatcagatcactgacaatgtcgatgatttgatgccacgattcgaagccagtgacggctcgcgcgactgtatcgtttcttccagacactcgagatactatctcgtttgtcacccgagtagctccgatagacaaatccatctccagcaaactcgcatcccaaaggctttgctgaagatccatgattccagactgccatgcatcaagcgtagcagagacctcggaactgaccagcttcaatttcataactttagtctctatgagctgtaagagatgttcatttaaagccttgcgtaggttatcaagcatgatagatggatcaaagcctcttgccttcccaccgtccttgatccattgttgcaaaacgcttgtgcgtaagtccagaactgtcttaaagtcggacatttgctcgagtgtcttggtcaagccgtcaagaacggcttccccacccttcttggcccagctcgtcagcatatctttagcttgcttgccatccagctcgtcatgattgatgaaaggggtgaagtagcggatctcatctccacaccacggctcgaagacatctaatcgaagatcttcgatggaacgtaacgattcatccgctagaagcgggttcttcttgagttccagtaacgcctcacgaagccgagtcggagcaagcatctgcacgtccactacggtcctcgtatatagcttgagacctctcagaacattatctatgcccgtttgttcgaattcatccgtggtggcctgggccctgatgttcaaaaaaagccgcaggatgtcctttgcaccggagcttgacgcaagactataggcagacagggctctgagtatgacagtgatgtctgtttcttccccggctctctgtagcactttctcaaccgcccttatcagctttcgtctcaaggcatctaggtttcttctcgcagcctcgacagcaagcttcatctcgtcgtccagggtcttcagactgccgaagccgggtacgagcaagcggctaagtacgagaacctttgcggcaaggagcaatcgctcgcccttgtctacttgggtacttttacttccgctcgtcttcagcagcctgcccacggccaaggcacaagcccccaagaggcggagacgcgccgtatgggccaggtcggcgtcggtgttgtgactgtggacgaaccggctcgagcctgtgatcttgtcttcaatggcagtacggctgcagtgaccgcccatacgacccaggatgtcctgggcgcatagcatatcctggcgcatgtggacgatggtgtcggctgtgccgagaagctggcgatagctattgccgacttgcgtgcgaagacgggcagacttctcatcgatctgggtatgcaagcttttgtgaagagtgcggatatgcggcaaggtgtgagttgtgaagatttgcgctgagcttgtcagctctgcgtcgcgggcggccatggtgggcgaacggggcaccgcaaggcttgttgagagatcgtattatcgtgtcaagtgcatgtggtcggtgtctgtcgcgtgcgacgtgaaagatggagaaaatggcgtgtcgggcgagtgagatatccgctgcgagctagctgtcgtgtaggatcatggtaatgttgttttctgtcttca

SEQ ID NO: 18016 - DNA, 1485 bp, Muscodor strobelii
  misc_feature: SGI cDNA ID NO. 566030
  misc_feature: Encodes the peptide sequence at SEQ ID NO 18017
atgctgtctcgtcatctcatccgctcacggccacggccgcggacctatcgacttcaggcacctcaatctcgattttcaagcagtcagtcagactcaccaagccgtaaagttctcagagttgcatggggagcggcgtgcatcgcgactggcgcttttctgcacgataagtacaattctgcactagccgccaacagatcgcgtgatctcgtgatcaacgacaccacgcagacgccggatctcaacaaattaggactatcaacccaaatcaagtacacaacaccacctacatcggtagaagtcacagaacgacttaacgagcacgcattcacgattcgcgatgctccaggtggtgtagggcgatacgacggcgtccaagtagcctctaactctccctgcgaagactcctacgtacacggaagttttgacagtccactcagcaagtcttctggaaaatggctggcatgggctgtgtttgatggtcattgcggctggcagttgtcgagcttactcacgacgcagctaatgccatttgttcgcaagtctctccaagaagctcagacaaatgacgatgaggctgtacataatgcgttgaagactgcgttcacgacgttagatgacgctatcgtgaagtccgccacaagcatcatcgagagcgacctcccattcgcggagaaagcccgacgtctcgagcccgcttacgctggagcttgtgctctgctcacactctatgacccatcgtcgcgaaagctccgcgtagcttcaacgggtgactgccgtgctgtactgggcaagaagacagtggatgggaaatgggaggctacggacttgtctgaggactgcacgggcgccactccatcagaagcagcacgaatcaaagcgcagttcccagatgaacctgatatcgtccaaggtggtcgggtctggggtttacaaccttctagaacttttggtgacgggatgtggaagtggacgagtgagctgaagaagaatctccgccatcactttaatggtcagagtctgccgtctagtgtgcggtataagaactacaaagacggaccttacgtgactgcggaaccgctcgtcactacgacgcaaatccctgacgtcaaagagtgtcccagcttcgtaatcttagcgactgatggcctgtgggacaccatgtcaagcgagcaagccgtcgatctcgtgggaagatggtgggagcgtcaacagaaaggaatctcggctcaggaaaccgaagagccatcatctgactacggtccggttgttctcggctggaaacagcagtgtaagtacgaagagagcaaggccaccttccgtgacgacaatgccgctgtccatctagcgcggaatggtctgggaggcgctcacgaggagatggtgcgcggtgctctggctttccgctaccccaacagcagagacattcgagacgacatcaccatacaggttgtgttctttgggcccgagatcagtagcaaggcgtaa

SEQ ID NO: 18017 - protein, 494 aa, Muscodor strobelii
  misc_feature: SGI Peptide ID NO. 566030
  misc_feature (126)..(425): Pfam Id: PF00481 Pfam Desc: Protein phosphatase 2C
  misc_feature (156)..(396): Pfam Id: PF00481 Pfam Desc: Protein phosphatase 2C
  misc_feature (95)..(486): NCBI GI: 255936831 Blast Desc: Pc13g10200 [Penicillium chrysogenum Wisconsin 54-1255] gi|211584062|emb|CAP92089.1| Pc13g10200 [Penicillium chrysogenum Wisconsin 54-1255]
  misc_feature (99)..(486): NCBI GI: 145231431 Blast Desc: An02g00580 [Aspergillus niger] gi|134056098|emb|CAK96273.1| protein product [Aspergillus niger]
  misc_feature (95)..(486): NCBI GI: 238494804 Blast Desc: pyruvate dehydrogenase, [Aspergillus flavus NRRL3357] gi|220695288|gb|EED51631.1| pyruvate dehydrogenase, [Aspergillus flavus NRRL3357]
  misc_feature (95)..(486): NCBI GI: 169777625 Blast Desc: [Aspergillus oryzae RIB40] gi|83772015|dbj|BAE62145.1| protein product [Aspergillus oryzae]
  misc_feature (93)..(486): NCBI GI: 115391097 Blast Desc: [Aspergillus terreus NIH2624] gi|114193977|gb|EAU35677.1| [Aspergillus terreus NIH2624]
  misc_feature (83)..(486): NCBI GI: 256727177 Blast Desc: NECHADRAFT_33073 [Nectria haematococca mpVI 77-13-4]
  misc_feature (89)..(487): NCBI GI: 256732514 Blast Desc: [Nectria haematococca mpVI 77-13-4]
  misc_feature (103)..(487): NCBI GI: 169769064 Blast Desc: [Aspergillus oryzae RIB40] gi|83766860|dbj|BAE57000.1| protein product [Aspergillus oryzae]
  misc_feature (103)..(487): NCBI GI: 145255671 Blast Desc: An18g05890 [Aspergillus niger] gi|134084632|emb|CAK97508.1| protein product [Aspergillus niger]
  misc_feature (89)..(487): NCBI GI: 258576491 Blast Desc: [Uncinocarpus reesii 1704] gi|237902693|gb|EEP77094.1| [Uncinocarpus reesii 1704]
  misc_feature (90)..(486): SWISSPROT Homolog: EC 3.1.3.16 Phosphoprotein phosphatase
MLSRHLIRSRPRPRTYRLQAPQSRFSSSQSDSPSRKVLRVAWGAACIATGAFLHDKYNSALAANRSRDLVINDTTQTPDLNKLGLSTQIKYTTPPTSVEVTERLNEHAFTIRDAPGGVGRYDGVQVASNSPCEDSYVHGSFDSPLSKSSGKWLAWAVFDGHCGWQLSSLLTTQLMPFVRKSLQEAQTNDDEAVHNALKTAFTTLDDAIVKSATSIIESDLPFAEKARRLEPAYAGACALLTLYDPSSRKLRVASTGDCRAVLGKKTVDGKWEATDLSEDCTGATPSEAARIKAQFPDEPDIVQGGRVWGLQPSRTFGDGMWKWTSELKKNLRHHFNGQSLPSSVRYKNYKDGPYVTAEPLVTTTQIPDVKECPSFVILATDGLWDTMSSEQAVDLVGRWWERQQKGISAQETEEPSSDYGPVVLGWKQQCKYEESKATFRDDNAAVHLARNGLGGAHEEMVRGALAFRYPNSRDIRDDITIQVVFFGPEISSKA

SEQ ID NO: 18018 - DNA, 1865 bp, Muscodor strobelii
  misc_feature: SGI EST ID NO. CUFF.42465.0
  misc_feature: Variant of the nucleotide sequence at SEQ ID NO 18016
cagagctaaatatcaccatatgagcaagtcaagcagcatgaaatcacaaccgggcatgactggctggtcagatctgcctgcatatgtgcacttagtcctcgacacgcccaattcgatttcgtaaccccctgcacattaccttacttatgtgcaggacttgaccaagatggtccgagctcagtaagtcaaccctcacgacagacctcacatgtgcacgcaggttcacttctcacggcgtccccaaaataccgtttaagatgctgtctcgtcatctcatccgctcacggccacggccgcggacctatcgacttcaggcacctcaatctcgattttcaagcagtcagtcagactcaccaagccgtaaagttctcagagttgcatggggagcggcgtgcatcgcgactggcgcttttctgcacgataagtacaattctgcactagccgccaacagatcgcgtgatctcgtgatcaacgacaccacgcagacgccggatctcaacaaattaggactatcaacccaaatcaagtacacaacaccacctacatcggtagaagtcacagaacgacttaacgagcacgcattcacgattcgcgatgctccaggtggtgtagggcgatacgacggcgtccaagtagcctctaactctccctgcgaagactcctacgtacacggaagttttgacagtccactcagcaagtcttctggaaaatggctggcatgggctgtgtttgatggtcattgcggctggcagttgtcgagcttactcacgacgcagctaatgccatttgttcgcaagtctctccaagaagctcagacaaatgacgatgaggctgtacataatgcgttgaagactgcgttcacgacgttagatgacgctatcgtgaagtccgccacaagcatcatcgagagcgacctcccattcgcggagaaagcccgacgtctcgagcccgcttacgctggagcttgtgctctgctcacactctatgacccatcgtcgcgaaagctccgcgtagcttcaacgggtgactgccgtgctgtactgggcaagaagacagtggatgggaaatgggaggctacggacttgtctgaggactgcacgggcgccactccatcagaagcagcacgaatcaaagcgcagttcccagatgaacctgatatcgtccaaggtggtcgggtctggggtttacaaccttctagaacttttggtgacgggatgtggaagtggacgagtgagctgaagaagaatctccgccatcactttaatggtcagagtctgccgtctagtgtgcggtataagaactacaaagacggaccttacgtgactgcggaaccgctcgtcactacgacgcaaatccctgacgtcaaagagtgtcccagcttcgtaatcttagcgactgatggcctgtgggacaccatgtcaagcgagcaagccgtcgatctcgtgggaagatggtgggagcgtcaacagaaaggaatctcggctcaggaaaccgaagagccatcatctgactacggtccggttgttctcggctggaaacagcagtgtaagtacgaagagagcaaggccaccttccgtgacgacaatgccgctgtccatctagcgcggaatggtctgggaggcgctcacgaggagatggtgcgcggtgctctggctttccgctaccccaacagcagagacattcgagacgacatcaccatacaggttgtgttctttgggcccgagatcagtagcaaggcgtaaaggttattcggatatcatcaatgaactatagcatcagtagttacatattgccacggctcaatggccgagtcgcttctcccaaagcgcgaaataacagagactgaaaaagtcatttaaccacca

SEQ ID NO: 18019 - DNA, 2682 bp, Muscodor strobelii
  misc_feature: SGI cDNA ID NO. 566031
  misc_feature: Encodes the peptide sequence at SEQ ID NO 18020
atgccgggctctagtaataaaaccacacagcctccgaatccgtacggctcccaaccgtggtcgtccaatggcattcacaatatttggagcatcgggggctccctcagcacgcaccgtgaagcagcaagctcgagaggatctgacgagctttcaccaactgcgccttcgggctctgcccaactgaacccgtcttctgaaccggcaccgtggggctcgagggcgatatggtcgcagtcgaattcgagtcccagcaatgcctctccgacgctcaccagagacactttcgtcaatggatatgaaaacggcaatgctcctatatacccaccccgccagtctataagccagggcacgtcgggcggctcaaatcgaaccgtgcccccaggaccaccggacaattcgagatacacctcggctgttggggcacgcatgaatgacgaaacgatggcccccagtgccttcagcgctctggggaacacgtctgcttttagtatggagtcatctggatcgtaccgacgcaattcagcagaccctagcttcctcggccttgggcagaatcgaacagcacctttcaagagtagacaatctgagatggaacccgtgcgcgggacacggctgggagatgtgtctactcatccgttcggaaacggagcagcgcacacccagtttcaagctcagcgtccatcaatttctggtccatcgatttcccaacctaacgaggcggccaaccgttcccaggcttttgcttttcaacgtgatgcaaatcatacggacttgaacgagagcttcgcgcgaagtctcaacatggacgatgcaagtgagcccttgggcggtagattccccaatagtggtggctatctgaacccagcaagtcaaccatttcagttcaacccgggatctcagtcgtggcaacagcacgattcgaccaacggcgcaagaacatcaaaccaagggcatcaacttgactcttgggccaatgcggcacatcaatactccggtcacaagaggccctctgttgatcggagttcacaagttggcacatcgtaccgggccaatgtcaacagcccaaagtctgcatttcctagctcacgaggcgatccatggagccgggcggcgccacgacaccaaagtttgtctctcgaatcagaccgccagccaaatggttcacattatatgcatcagtctaacgggtactactctaattcatacttcaactcgcctgctctgcaatctaaccccatgcaattcactcccgcctacgaccagtattcgtcgacggcgaattttcgtctcccaatgacgccaacgggatatcccatgcctatgaactacatggctacgcagaaccgccaaggccgtggctcagatttaagcaccggcatgaggagttcactcttggaagagtaccggaataataagcaaaactttcgccccgaactgaagcaaatctacggtcacatcaacgagttctgtggagatcagcatgggtcacgtctcatacaggagaagcttcacactgctaacagtgatgagaaggaccaggtattcagagaaattgagcccaatattctccaactcacaaaggacctttttggcaattacgtcattcagaagttcttcgagcatggtaaccaagtccagaagaaaattatggctctcacaatgaaagggatgataccagagctttcgattcagatgtattcctgccgcgttgtacaaaaggcactcgagcatgttctcgtggagcagcaagcggagattgtcgaggaactcaaacctcatatcatcaggatctcaaaagacaccaacggcaaccatgtgatccagaaaatcgtcgagctggtcccaagactatgcgtgccatttataatggataccattcgcggagatgtctacgcctgggcgactcattcttttgcttgccgtatcattcaacgccttatggaaaggggcgacgaagacgaggtgcagagtttgatgaatgatcttcatgcgcacgctccaagactggtgaccgatcagtatggcaattatgtcattcaacatattatcgagaaaggcaagccagaagatcgagccaaaatcattagatacgtcatccagagactggtgcctctttccaaacacaaatatgcctccaacgtagtcgagaaatgcatcaaattcggaacaaatgaggacaaaaagaccttcaggaccattctcaccacaaatcctgatgaggggccaaccgttcttcaaatgatgttgaaagatcaattcggcaactatgtgatccagaaactgatcgagtgtctcaatggccatgacaaagatgcatttatggcaagtgtggaacccgattacgcactgattaaaaaacagggtgctcgtcagattacggctctggacaaactgatagccgagtaccataatacgcccttacctggcacaacccctgctcctggcgttaatggtgcctcatccgtgaccgctgcggcttccccgactcccaacctaacggttgaagtcagttcaggagcacctacgccacctcttacaacagagcaaaatagcccacagagcatcagcccaccaagcactaacatcggatccactgatgaacctgctgttgtggagtctaaggaaactcaggacgcggaaattagcactacgtcttcgcccattaccgtacaggagcggtaa

SEQ ID NO: 18020 - protein, 893 aa, Muscodor strobelii
  misc_feature: SGI Peptide ID NO. 566031
  misc_feature (517)..(551): Pfam Id: PF00806 Pfam Desc: Pumilio-family RNA binding repeat
  misc_feature (661)..(695): Pfam Id: PF00806 Pfam Desc: Pumilio-family RNA binding repeat
  misc_feature (697)..(730): Pfam Id: PF00806 Pfam Desc: Pumilio-family RNA binding repeat
  misc_feature (553)..(587): Pfam Id: PF00806 Pfam Desc: Pumilio-family RNA binding repeat
  misc_feature (589)..(622): Pfam Id: PF00806 Pfam Desc: Pumilio-family RNA binding repeat
  misc_feature (739)..(774): Pfam Id: PF00806 Pfam Desc: Pumilio-family RNA binding repeat
  misc_feature (481)..(515): Pfam Id: PF00806 Pfam Desc: Pumilio-family RNA binding repeat
  misc_feature (42)..(891): NCBI GI: 261358308 Blast Desc: pumilio domain-containing protein [Verticillium albo-atrum VaMs.102]
  misc_feature (20)..(867): NCBI GI: 156064143 Blast Desc: SS1G_00079 [Sclerotinia sclerotiorum 1980] gi|154690941|gb|EDN90679.1| SS1G_00079 [Sclerotinia sclerotiorum 1980]
  misc_feature (22)..(890): NCBI GI: 154298974 Blast Desc: BC1G_11734 [Botryotinia fuckeliana B05.10] gi|150857639|gb|EDN32831.1| BC1G_11734 [Botryotinia fuckeliana B05.10]
  misc_feature (102)..(893): NCBI GI: 171686492 Blast Desc: protein product [Podospora anserina] gi|170943207|emb|CAP68860.1| protein product [Podospora anserina]
  misc_feature (27)..(853): NCBI GI: 39940510 Blast Desc: MGG_04985 [Magnaporthe grisea 70-15] gi|145010777|gb|EDJ95433.1| MGG_04985 [Magnaporthe grisea 70-15]
  misc_feature (267)..(848): NCBI GI: 116207968 Blast Desc: CHGG_03277 [Chaetomium globosum CBS 148.51] gi|88183874|gb|EAQ91342.1| CHGG_03277 [Chaetomium globosum CBS 148.51]
  misc_feature (413)..(889): NCBI GI: 255945903 Blast Desc: Pc20g12340 [Penicillium chrysogenum Wisconsin 54-1255] gi|211588454|emb|CAP86563.1| Pc20g12340 [Penicillium chrysogenum Wisconsin 54-1255]
  misc_feature (431)..(861): NCBI GI: 239614575 Blast Desc: mRNA binding protein Pumilio 2 [Ajellomyces dermatitidis ER-3]
  misc_feature (431)..(861): NCBI GI: 261196167 Blast Desc: mRNA binding protein Pumilio 2 [Ajellomyces dermatitidis SLH14081] gi|239587620|gb|EEQ70263.1| mRNA binding protein Pumilio 2 [Ajellomyces dermatitidis SLH14081]
  misc_feature (429)..(812): NCBI GI: 169777073 Blast Desc: [Aspergillus oryzae RIB40] gi|83771739|dbj|BAE61869.1| protein product [Aspergillus oryzae]
MPGSSNKTTQPPNPYGSQPWSSNGIHNIWSIGGSLSTHREAASSRGSDELSPTAPSGSAQLNPSSEPAPWGSRAIWSQSNSSPSNASPTLTRDTFVNGYENGNAPIYPPRQSISQGTSGGSNRTVPPGPPDNSRYTSAVGARMNDETMAPSAFSALGNTSAFSMESSGSYRRNSADPSFLGLGQNRTAPFKSRQSEMEPVRGTRLGDVSTHPFGNGAAHTQFQAQRPSISGPSISQPNEAANRSQAFAFQRDANHTDLNESFARSLNMDDASEPLGGRFPNSGGYLNPASQPFQFNPGSQSWQQHDSTNGARTSNQGHQLDSWANAAHQYSGHKRPSVDRSSQVGTSYRANVNSPKSAFPSSRGDPWSRAAPRHQSLSLESDRQPNGSHYMHQSNGYYSNSYFNSPALQSNPMQFTPAYDQYSSTANFRLPMTPTGYPMPMNYMATQNRQGRGSDLSTGMRSSLLEEYRNNKQNFRPELKQIYGHINEFCGDQHGSRLIQEKLHTANSDEKDQVFREIEPNILQLTKDLFGNYVIQKFFEHGNQVQKKIMALTMKGMIPELSIQMYSCRVVQKALEHVLVEQQAEIVEELKPHIIRISKDTNGNHVIQKIVELVPRLCVPFIMDTIRGDVYAWATHSFACRIIQRLMERGDEDEVQSLMNDLHAHAPRLVTDQYGNYVIQHIIEKGKPEDRAKIIRYVIQRLVPLSKHKYASNVVEKCIKFGTNEDKKTFRTILTTNPDEGPTVLQMMLKDQFGNYVIQKLIECLNGHDKDAFMASVEPDYALIKKQGARQITALDKLIAEYHNTPLPGTTPAPGVNGASSVTAAASPTPNLTVEVSSGAPTPPLTTEQNSPQSISPPSTNIGSTDEPAVVESKETQDAEISTTSSPITVQER

SEQ ID NO: 18021 - DNA, 4408 bp, Muscodor strobelii
  misc_feature: SGI EST ID NO. CUFF.42808.1
  misc_feature: Variant of the nucleotide sequence at SEQ ID NO 18019
cccagagccaggctgggcatttcacgtctaacccaccctcaccttatcaggactcgcgccatcgtcgccatcgtccgccatccacaatccaacgcccaaccgacgatcgagacgagcgtgcgcagctgcaattgccgtcctcgtcgccgccgtcggcatcgtcacgctcgcccaggactgttggcctcgttgacgcagctgtcaacaagaccaacgtccggttccgcaccgtgcacgccgccgtatcagcacgcccaggccctggcatcgagtccggaaacgttcgtgcaacatcactaccgtcctccctccccactgcgcacgtcggcgcaactctacgcttcctcccttcatgccaaccagcccagcgacacctctccgtccgcagctgccccgttgaccatctcggattcctcaactcctccatccatccgctgtgcttctcgaccacttgacttggccgccttcgtagagtttcttgtcatattccaaccatctctcctgtgcacgcgagcggacaacgacgacatccaccatccatctgtagagtatcatcattactctgaataccgtgatccgtacatcacggcttaataatttacatcaccttcttgtcgtaggataccggcttgcgctggatatagcctgcggttacgactcaaggccaccgcatattgctacagactactcgtcttcgcgcggaatcttacaattccttacaaaccatttaccttgtgtatatatttccgattgttcataatcgtcacgagcccgacttctccacccgcgaacagcgttggtcgtgccgccaagtaagtctgcgacgtgcgttataaccgagcgacatacatcattctgtcctatcctgtccatactggagttgggttagcaataagcgaactagagctatgactactactacgcgacccaacgggttcccggctctcaccatgccgggctctagtaataaaaccacacagcctccgaatccgtacggctcccaaccgtggtcgtccaatggcattcacaatatttggagcatcgggggctccctcagcacgcaccgtgaagcagcaagctcgagaggatctgacgagctttcaccaactgcgccttcgggctctgcccaactgaacccgtcttctgaaccggcaccgtggggctcgagggcgatatggtcgcagtcgaattcgagtcccagcaatgcctctccgacgctcaccagagacactttcgtcaatggatatgaaaacggcaatgctcctatatacccaccccgccagtctataagccagggcacgtcgggcggctcaaatcgaaccgtgcccccaggaccaccggacaattcgagatacacctcggctgttggggcacgcatgaatgacgaaacgatggcccccagtgccttcagcgctctggggaacacgtctgcttttagtatggagtcatctggatcgtaccgacgcaattcagcagaccctagcttcctcggccttgggcagaatcgaacagcacctttcaagagtagacaatctgagatggaacccgtgcgcgggacacggctgggagatgtgtctactcatccgttcggaaacggagcagcgcacacccagtttcaagctcagcgtccatcaatttctggtccatcgatttcccaacctaacgaggcggccaaccgttcccaggcttttgcttttcaacgtgatgcaaatcatacggacttgaacgagagcttcgcgcgaagtctcaacatggacgatgcaagtgagcccttgggcggtagattccccaatagtggtggctatctgaacccagcaagtcaaccatttcagttcaacccgggatctcagtcgtggcaacagcacgattcgaccaacggcgcaagaacatcaaaccaagggcatcaacttgactcttgggccaatgcggcacatcaatactccggtcacaagaggccctctgttgatcggagttcacaagttggcacatcgtaccgggccaatgtcaacagcccaaagtctgcatttcctagctcacgaggcgatccatggagccgggcggcgccacgacaccaaagtttgtctctcgaatcagaccgccagccaaatggttcacattatatgcatcagtctaacgggtactactctaattcatacttcaactcgcctgctctgcaatctaaccccatgcaattcactcccgcctacgaccagtattcgtcgacggcgaattttcgtctcccaatgacgccaacgggatatcccatgcctatgaactacatggctacgcagaaccgccaaggccgtggctcagatttaagcaccggcatgaggagttcactcttggaagagtaccggaataataagcaaaactttcgccccgaactgaagcaaatctacggtcacatcaacgagttctgtggagatcagcatgggtcacgtctcatacaggagaagcttcacactgctaacagtgatgagaaggaccaggtattcagagaaattgagcccaatattctccaactcacaaaggacctttttggcaattacgtcattcagaagttcttcgagcatggtaaccaagtccagaagaaaattatggctctcacaatgaaagggatgataccagagctttcgattcagatgtattcctgccgcgttgtacaaaaggcactcgagcatgttctcgtggagcagcaagcggagattgtcgaggaactcaaacctcatatcatcaggatctcaaaagacaccaacggcaaccatgtgatccagaaaatcgtcgagctggtcccaagactatgcgtgccatttataatggataccattcgcggagatgtctacgcctgggcgactcattcttttgcttgccgtatcattcaacgccttatggaaaggggcgacgaagacgaggtgcagagtttgatgaatgatcttcatgcgcacgctccaagactggtgaccgatcagtatggcaattatgtcattcaacatattatcgagaaaggcaagccagaagatcgagccaaaatcattagatacgtcatccagagactggtgcctctttccaaacacaaatatgcctccaacgtagtcgagaaatgcatcaaattcggaacaaatgaggacaaaaagaccttcaggaccattctcaccacaaatcctgatgaggggccaaccgttcttcaaatgatgttgaaagatcaattcggcaactatgtgatccagaaactgatcgagtgtctcaatggccatgacaaagatgcatttatggcaagtgtggaacccgattacgcactgattaaaaaacagggtgctcgtcagattacggctctggacaaactgatagccgagtaccataatacgcccttacctggcacaacccctgctcctggcgttaatggtgcctcatccgtgaccgctgcggcttccccgactcccaacctaacggttgaagtcagttcaggagcacctacgccacctcttacaacagagcaaaatagcccacagagcatcagcccaccaagcactaacatcggatccactgatgaacctgctgttgtggagtctaaggaaactcaggacgcggaaattagcactacgtcttcgcccattaccgtacaggagcggtaaggttggggctggctctgaaaagcatccattgtttgcggaacagcctcatattttgccatgtgtctatcgatttggaagccagaagtctttcaaatcgacgatgggaacatgcaagatattatgcaaatactaaactttcgattcgacacaacaacatccaacatgaattctacacaatgggtttacagtcgcaattgggctgttgactaatcgataaactctctatatttcacaatacataatgggtttcgggaatcgcctttcgtacatgatggaagcatcgtcagaaacactggttttctactaccacggacagtttctctaatggagtttgagtgggtcgggagttggtgcctcctactcatgctggggctgacattccacggcgtcgtgcaagtagcatcggggaacgaacaaaatcttcatattcattttcctctcacttgtatttacacggataacaggattgtctggctatcggtggccgagacatggtcactgaatgaagcttgtagggacatccggagcgtttgcatttccaccaggagtcttcgcaattcagcgatgttgattagtagacagacagacagacagcgaaaggagctgggctgatagacgatctgacctggacggatcagtccgtaactcatgagttttcacgaacacggattatcaagcggtatgggacgtttgggatatagctaggtatctagtaggtaacacgagatataaaggcagaattgatgaacatgaattagcttcgggacatgataata

SEQ ID NO: 18022 - DNA, 570 bp, Muscodor strobelii
  misc_feature: SGI cDNA ID NO. 566032
  misc_feature: Reduced expression when VOC is produced
  misc_feature: Encodes the peptide sequence at SEQ ID NO 18023
atgtctcccatcagcactgtcctgctgcgaggcagatctgcactggccggccgcgatatgaccgacgatgactcggcgtccaccctcgacgccatgatcattgttcttgctcttgttttgtctggcctttctcttgttgggcttctcttcatgctccgccgcgtcaagagacagcaacagatgcgtgacacgggcctccccaagtacgacgatgtagaacacgacgcgggcagaaatcacaaccgtctgaccatatcaacccctcacggcaaatccaacatcgttgtagtcaatggccgcccgatgctcgctgaccccaactcgccgcctcactcgcccagcaacatccccgagatccacatcacattccccgacgagcatgacgagcagggccgtcaaaagggcggccgtgtcctcgttgtccgcgtcggcgagactagcgtcggcctcgagccgctgcaagacgagcagcttcctgcctatgagaaggacagcaagaacagcttttactcaattgacatcgatactatcgggggcctgaaggaaaaagactcccgccactttgcatga

SEQ ID NO: 18023 - protein, 189 aa, Muscodor strobelii
  misc_feature: SGI Peptide ID NO. 566032
  misc_feature (46)..(188): NCBI GI: 46124667 Blast Desc: FG06711.1 [Gibberella zeae PH-1]
  misc_feature (4)..(184): NCBI GI: 39940508 Blast Desc: MGG_04986 [Magnaporthe grisea 70-15] gi|145010774|gb|EDJ95430.1| MGG_04986 [Magnaporthe grisea 70-15]
  misc_feature (46)..(188): NCBI GI: 256733270 Blast Desc: NECHADRAFT_79391 [Nectria haematococca mpVI 77-13-4]
  misc_feature (18)..(186): NCBI GI: 171686494 Blast Desc: protein product [Podospora anserina] gi|170943208|emb|CAP68861.1| protein product [Podospora anserina]
  misc_feature (17)..(186): NCBI GI: 164425097 Blast Desc: NCU06509 [Neurospora crassa OR74A] gi|157070788|gb|EAA27913.2| conserved [Neurospora crassa OR74A]
  misc_feature (61)..(184): NCBI GI: 116207970 Blast Desc: CHGG_03278 [Chaetomium globosum CBS 148.51] gi|88183875|gb|EAQ91343.1| CHGG_03278 [Chaetomium globosum CBS 148.51]
  misc_feature (9)..(186): NCBI GI: 261358309 Blast Desc: conserved [Verticillium albo-atrum VaMs.102]
  misc_feature (1)..(185): NCBI GI: 156064135 Blast Desc: SS1G_00075 [Sclerotinia sclerotiorum 1980] gi|154690937|gb|EDN90675.1| SS1G_00075 [Sclerotinia sclerotiorum 1980]
  misc_feature (25)..(185): NCBI GI: 154298966 Blast Desc: BC1G_11730 [Botryotinia fuckeliana B05.10] gi|150857635|gb|EDN32827.1| BC1G_11730 [Botryotinia fuckeliana B05.10]
  misc_feature (12)..(189): NCBI GI: 119173529 Blast Desc: CIMG_10217 [Coccidioides immitis RS]
  misc_feature: Useful for introducing or modulating the production of volatile compounds
MSPISTVLLRGRSALAGRDMTDDDSASTLDAMIIVLALVLSGLSLVGLLFMLRRVKRQQQMRDTGLPKYDDVEHDAGRNHNRLTISTPHGKSNIVVVNGRPMLADPNSPPHSPSNIPEIHITFPDEHDEQGRQKGGRVLVVRVGETSVGLEPLQDEQLPAYEKDSKNSFYSIDIDTIGGLKEKDSRHFA

SEQ ID NO: 18024 - DNA, 399 bp, Muscodor strobelii
  misc_feature: SGI cDNA ID NO. 566033
  misc_feature: Reduced expression when VOC is produced
  misc_feature: Encodes the peptide sequence at SEQ ID NO 18025
atgttctccatcaccaagatcgtactcgcccttgcggccaccaccactctcgtctctgccgtccccgtcaaggagacgcgccagatctccggcaccttcagcggtgatctgacctactatgcccctggcctcggtgcttgcggtgtcaccaactcggagatcgtcgcgatctccaagctcctctacgaccagtacacaccgggctccaacccgaacctgaacaccctctgcggcaagcagatccaaatcaccatcggcgataaatccaccgtcgtcaccgtcgaggaccgatgcgaggcctgtgccatcgacgatctcgatgtccccgttgccgtcttctcccagctcgccgaccccaacgctggtcgtgtccagatgagctgggtctggctttcttaa

SEQ ID NO: 18025 - protein, 132 aa, Muscodor strobelii
  misc_feature: SGI Peptide ID NO. 566033
  misc_feature (54)..(128): Pfam Id: PF03330 Pfam Desc: Rare lipoprotein A (RlpA)-like double-psi beta-barrel
  misc_feature (87)..(128): Pfam Id: PF03330 Pfam Desc: Rare lipoprotein A (RlpA)-like double-psi beta-barrel
  misc_feature (28)..(131): NCBI GI: 149237018 Blast Desc: conserved [Lodderomyces elongisporus NRRL YB-4239] gi|146451921|gb|EDK46177.1| conserved [Lodderomyces elongisporus NRRL YB-4239]
  misc_feature (31)..(131): NCBI GI: 240111698 Blast Desc: CPC735_011610 [Coccidioides posadasii C735 delta SOWgp]
  misc_feature (31)..(131): NCBI GI: 226279489 Blast Desc: riboflavin aldehyde-forming enzyme [Paracoccidioides brasiliensis Pb01]
  misc_feature (31)..(132): NCBI GI: 169786027 Blast Desc: [Aspergillus oryzae RIB40] gi|83776222|dbj|BAE66341.1| protein product [Aspergillus oryzae]
  misc_feature (31)..(131): NCBI GI: 225678183 Blast Desc: PABG_06554 [Paracoccidioides brasiliensis Pb03]
  misc_feature (36)..(130): NCBI GI: 260943472 Blast Desc: CLUG_03275 [Clavispora lusitaniae ATCC 42720] gi|238849683|gb|EEQ39147.1| CLUG_03275 [Clavispora lusitaniae ATCC 42720]
  misc_feature (31)..(131): NCBI GI: 121713458 Blast Desc: riboflavin aldehyde-forming enzyme [Aspergillus clavatus NRRL 1] gi|119402493|gb|EAW12914.1| riboflavin aldehyde-forming enzyme [Aspergillus clavatus NRRL 1]
  misc_feature (31)..(131): NCBI GI: 156054592 Blast Desc: SS1G_06144 [Sclerotinia sclerotiorum 1980] gi|154703924|gb|EDO03663.1| SS1G_06144 [Sclerotinia sclerotiorum 1980]
  misc_feature (31)..(131): NCBI GI: 226287681 Blast Desc: riboflavin aldehyde-forming enzyme [Paracoccidioides brasiliensis Pb18]
  misc_feature (4)..(131): NCBI GI: 119479229 Blast Desc: riboflavin aldehyde-forming enzyme [Neosartorya fischeri NRRL 181] gi|119407797|gb|EAW17746.1| riboflavin aldehyde-forming enzyme [Neosartorya fischeri NRRL 181]
  misc_feature: Useful for introducing or modulating the production of volatile compounds
MFSITKIVLALAATTTLVSAVPVKETRQISGTFSGDLTYYAPGLGACGVTNSEIVAISKLLYDQYTPGSNPNLNTLCGKQIQITIGDKSTVVTVEDRCEACAIDDLDVPVAVFSQLADPNAGRVQMSWVWLS

SEQ ID NO: 18026 - DNA, 882 bp, Muscodor strobelii
  misc_feature: SGI cDNA ID NO. 566034
  misc_feature: Encodes the peptide sequence at SEQ ID NO 18027
atggctaacactcctgctgctaaccttgaagccgttaagggcttctgcaagactcacgcagacacatatccttttatatcgccagacaagtgcgacttcgccggaaaatctgtgttcgtcgctggcgcatccaaaggcattgctgagacggccctttcatttgcgaaagcgggctgcagcaagattgccatcggcgcgaggtccgacctttccagcttggtgggggagatgaaaaaggtagcgggtgggagtgcgccgcatatcgtctcgctgaagctggacgtgacatcagaggacagcgtacaggaagcagcgaagactattggtcaagagtttggcggggcgcttgatgttttaatctgtaacgctgcgcaactagaggaatggcttcctgtggcagagtcgaagccggacgagtggtggaggacatacgaggttaatgtcaaagggacatatcttctgaaccgatacttcataccactactggtgaagagcgaggtgaagacgagcatcatcacgtcgagttacggtgcactcatggtgacgccgacggcttcagcataccagagctcgaaatttgtggtcacaaggcttgccgagtatatcgcagcggagaatgagaaggatgggctcgtctgctatgccatccaccctggatcagtcaaaacggaactcgcacataacatgccagaggcgttccacgcgatcttggtcgatgagcctgaactgccagctcacactatcgtttggctgagccaggaacatcggccatggcttagtgggagattcgttcctatcaattgggatatggaggaacttgaaactaagaaaagcaagattgtagaggacaatctcttcaagtttcgagttactacttcctag

SEQ ID NO: 18027 - protein, 293 aa, Muscodor strobelii
  misc_feature: SGI Peptide ID NO. 566034
  misc_feature (36)..(207): Pfam Id: PF00106 Pfam Desc: short chain dehydrogenase
  misc_feature (8)..(290): NCBI GI: 145248836 Blast Desc: An14g01280 [Aspergillus niger] gi|134081428|emb|CAK41910.1| protein product [Aspergillus niger]
  misc_feature (6)..(290): NCBI GI: 46127635 Blast Desc: FG08195.1 [Gibberella zeae PH-1]
  misc_feature (8)..(291): NCBI GI: 171680478 Blast Desc: protein product [Podospora anserina] gi|170939866|emb|CAP65092.1| protein product [Podospora anserina]
  misc_feature (12)..(290): NCBI GI: 242778830 Blast Desc: oxidoreductase, short chain dehydrogenase/reductase family, [Talaromyces stipitatus ATCC 10500] gi|218722937|gb|EED22355.1| oxidoreductase, short chain family,
  misc_feature (12)..(290): NCBI GI: 212533777 Blast Desc: oxidoreductase, short chain dehydrogenase/reductase family, [Penicillium marneffei ATCC 18224] gi|210072409|gb|EEA26498.1| oxidoreductase, short chain family,
  misc_feature (23)..(290): NCBI GI: 168830921 Blast Desc: CtnE [Monascus aurantiacus]
  misc_feature (17)..(290): NCBI GI: 212529264 Blast Desc: conserved [Penicillium marneffei ATCC 18224] gi|210074187|gb|EEA28274.1| conserved [Penicillium marneffei ATCC 18224]
  misc_feature (5)..(290): NCBI GI: 156056737 Blast Desc: SS1G_04099 [Sclerotinia sclerotiorum 1980] gi|154701885|gb|EDO01624.1| SS1G_04099 [Sclerotinia sclerotiorum 1980]
  misc_feature (19)..(290): NCBI GI: 154319931 Blast Desc: BC1G_01946 [Botryotinia fuckeliana B05.10] gi|150854685|gb|EDN29877.1| BC1G_01946 [Botryotinia fuckeliana B05.10]
  misc_feature (10)..(290): NCBI GI: 154322737 Blast Desc: BC1G_00711 [Botryotinia fuckeliana B05.10] gi|150848045|gb|EDN23238.1| BC1G_00711 [Botryotinia fuckeliana B05.10]
  misc_feature (33)..(270): SWISSPROT Homolog: EC 1.1.1.100 3-oxoacyl-[acyl-carrier-protein] reductase
MANTPAANLEAVKGFCKTHADTYPFISPDKCDFAGKSVFVAGASKGIAETALSFAKAGCSKIAIGARSDLSSLVGEMKKVAGGSAPHIVSLKLDVTSEDSVQEAAKTIGQEFGGALDVLICNAAQLEEWLPVAESKPDEWWRTYEVNVKGTYLLNRYFIPLLVKSEVKTSIITSSYGALMVTPTASAYQSSKFVVTRLAEYIAAENEKDGLVCYAIHPGSVKTELAHNMPEAFHAILVDEPELPAHTIVWLSQEHRPWLSGRFVPINWDMEELETKKSKIVEDNLFKFRVTTS

SEQ ID NO: 18028 - DNA, 831 bp, Muscodor strobelii
  misc_feature: SGI EST ID NO. CUFF.42506.0
  misc_feature: Variant of the nucleotide sequence at SEQ ID NO 18026
ctttcatttgcgaaagcgggctgcagcaagattgccatcggcgcgaggtccgacctttccagcttggtgggggagatgaaaaaggtagcgggtgggagtgcgccgcatatcgtctcgctgaagctggacgtgacatcagaggacagcgtacaggaagcagcgaagactattggtcaagagtttggcggggcgcttgatgttttaatctgtaacgctgcgcaactagaggaatggcttcctgtggcagagtcgaagccggacgagtggtggaggacatacgaggttaatgtcaaagggacatatcttctgaaccgatacttcataccactactggtgaagagcgaggtgaagacgagcatcatcacgtcgagttacggtgcactcatggtgacgccgacggcttcagcataccagagctcgaaatttgtggtcacaaggcttgccgagtatatcgcagcggagaatgagaaggatgggctcgtctgctatgccatccaccctggatcagtcaaaacggaactcgcacataacatgccagaggcgttccacgcgatcttggtcgatgagcctgaactgccagctcacactatcgtttggctgagccaggaacatcggccatggcttagtgggagattcgttcctatcaattgggatatggaggaacttgaaactaagaaaagcaagattgtagaggacaatctcttcaagtttcgagttactacttcctagacaattgaaatgatacccctgaatctgggtgacagttctgctcggaagacgtatcgcgggagaaacataatgttggaatcaggacatgattaccatgaattt

SEQ ID NO: 18029 - DNA, 3201 bp, Muscodor strobelii
  misc_feature: SGI cDNA ID NO. 566035
  misc_feature: Encodes the peptide sequence at SEQ ID NO 18030
atggcgccctcagcagcccaaaatgcccaatcgaagtcgtcagctgagttccaggctataactgcccaatgggccaacgcaaagcgtgtcaaagagctccaggatgccgttaacaaaccccagagaccatcccggcccagctcagcccctgccggcgactcacaacgcgccgctctcgaggctcgccgaaagtccgccttcgagcgccatgcttcctggactctcgctttctggttctggctgctctgcatgcatgcctttggcattgtcttgttcaccagtggcttcctcttgactcgacttgtcctcgaccaacattccgaatgcgccttgcctcctaccgaacccctattgaaatgggacggcagtggaaccatcgacggtggctgctggcatcccaagaccttcgacaaggctgttgttgttataatcgatgcgttgcgatacgacttcaccatccccgtcggaggcgattctacgcccgagatataccacaacgccttcccctttctccacgagtctgcctcccagtcgccccataatgcatttctccgccccttcattgccgaccctcctacgagcactctgcagagaataaaaggtttaacgaccggcaccttgccgaccttcatcgatgttggttccagctttggcggcaccgctatcgaggaagacaatctcctgatgcagtggcgtaatcacgggaagcgcatcgcacaccttggagatgacacctggaccgccttgttcccaggctatttcgagcccaacatcagcagggcctacgatagcttcaatgtctgggatctgcacaccgtcgataacggtgtcatggaacacatcttcccgctcatgcagtccccgcaagaggccgagtgggatatcgtcatcggccatttgcttggcgttgaccatgctggccaccggtacggacccaaccacccagccatgacctcgaagctggagcagatggacgctttcattcgtcagcttgccgacagcatcgacgacaacacgttgttggttgtcatgggcgatcatggaatggacgaaaaaggcgatcacggcggcgaaagcgatgacgaagtccaggccgcgctatggatgtactcgaaacgacctgtttttggccggacccaaccagactttgtgaacccgccagccaatgccaaagaacggccagtcaaccaaatcgatctggtcccgactctagcactacttctggggatacccattccctacaacaacctaggacgtccaattgaggaagcatttgctggcaccaagggcaccgcctgggatcatcttgcggctgcatcaaaggtagcttcagccggcatcatgaaataccaagaatcgtatttccaagctagagggttgcggcagagttctgggactggatcccctgcggcattttggaagatagctgagaatctgcctaaaactgacgtaaaggcacagtatctcgcctacactacctatcaggaggtcacccttgggatctgtaaggacctttgggcgcggttcgatgtgcccaaaatggtattgggagttgccaccatggctcttggtgtagtcgtcttgctactctacgtatcacgggatgaggacgacgattttgcagagctcgaaaatgaagagttagacttcgccgaaaaaagcctggagatgatgtctggatcaagtgatgctgagatgactactcacaagaccttggcaaagtctttagttctgtcgggagtgtatggtgctgtgacagctggcctcgtgagcttcgccctggtcggtctcttaggcttgggagaatggctgtggggaatagcagctattgcgattgtcagtatgagcgccgtgacattctctcttctgacatccggtagcaagagcattcttaaccttcttccgaatacctattgggggtggctgtcagtttgtttcacagccagccagtccgtcggctttgcctcgaactcgtacactatctgggaagattccatctccctattcttccttgctacttttggtatcagcagtgctgtagctgcacttcgacactcgactgttaacgggagaattatgggcacataccactctctcctatttgtggtactcacccgggctgcttccttttcgaaactttgtcgtgaagagcagatgccatactgtcagtcgacctactatgcatctgccaactcgtcaacttcagcgccatggcagctggtgattccatttgcagtgttcctcatcctcccgtccatcttcaaatcatatttgcaaagctcgcgatcctacgagggatttgcgccgatttggatcggctatatcatccgtgcagccctcctgctctccgctggttactggaccctggatgctgctggtaatggcaactggctgcagtccattccagaagcaaccttcaaactgattcacgtatcggtcgcccagatcgtgctagcactagccttagtagctggcacgacagctttcatttgggcacccccttgtgtttccatttcaactacatcaactagtagccgtagagctcaggtcactgtgcttggctacggaaacgccaacggcgcccgttatctcctcctacccatcaacattgcgtgtgcctgcatattactctcaaaaccaatgggcagcggtgccatcgccatcatgctctggcagatccttgccctcgcagagatattggacatcaattccatttcgtccgaaactattggtcctgtgacacttgcattacttggaaattatcactacttcaagaccggtcaccaagcagcactctcctctattcaatgggactcagcattcatcccgctcgtcaccattcgttatccttggagtgcgcttgccgtcatgttcaatcacttcgctggacagataatagcctgcgttgcgctgccgcttttagtgatgtggaagacaactccaaagcgcaaaggcgttctcgagagcgtgagccgcgcacttggcattttcgtggcgtattatgctgtcgagagtctggcaacgatggcttggactggacatctccgccgccatctcatgctttaccgagtcttcaacccaaggttcatgatggctgctgctatcttaatcatcgttgacttgatcgggatactcgtcacgcttgttggtgttaggacgaatatcctggctatcagtgatgtgtttggatttgcggattag

SEQ ID NO: 18030 - protein, 1066 aa, Muscodor strobelii
  misc_feature: SGI Peptide ID NO. 566035
  misc_feature (303)..(349): Pfam Id: PF01663 Pfam Desc: Type I phosphodiesterase / nucleotide pyrophosphatase
  misc_feature (3)..(1063): NCBI GI: 115386332 Blast Desc: conserved [Aspergillus terreus NIH2624] gi|114190705|gb|EAU32405.1| conserved [Aspergillus terreus NIH2624]
  misc_feature (40)..(1065): NCBI GI: 169597453 Blast Desc: SNOG_01512 [Phaeosphaeria nodorum SN15] gi|111070041|gb|EAT91161.1| SNOG_01512 [Phaeosphaeria nodorum SN15]
  misc_feature (67)..(1065): NCBI GI: 189195546 Blast Desc: GPI ethanolamine phosphate transferase 3 [Pyrenophora tritici-repentis Pt-1C-BFP] gi|187979990|gb|EDU46616.1| GPI ethanolamine phosphate transferase 3 [Pyrenophora Pt-1C-BFP]
  misc_feature (25)..(1063): NCBI GI: 169777077 Blast Desc: [Aspergillus oryzae RIB40] gi|83771741|dbj|BAE61871.1| protein product [Aspergillus oryzae]
  misc_feature (38)..(1063): NCBI GI: 159122435 Blast Desc: phosphoethanolamine N-methyltransferase, [Aspergillus fumigatus A1163]
  misc_feature (11)..(1063): NCBI GI: 212526548 Blast Desc: phosphoethanolamine N-methyltransferase, [Penicillium marneffei ATCC 18224] gi|210072829|gb|EEA26916.1| phosphoethanolamine N-methyltransferase, [Penicillium marneffei
  misc_feature (38)..(1063): NCBI GI: 90018757 Blast Desc: phosphoethanolamine transferase class O [Aspergillus fumigatus]
  misc_feature (38)..(1063): NCBI GI: 70984266 Blast Desc: phosphoethanolamine N-methyltransferase [Aspergillus fumigatus Af293] gi|66845276|gb|EAL85611.1| phosphoethanolamine N-methyltransferase, [Aspergillus fumigatus Af293]
  misc_feature (84)..(1063): NCBI GI: 238494172 Blast Desc: phosphoethanolamine N-methyltransferase, [Aspergillus flavus NRRL3357] gi|220694972|gb|EED51315.1| phosphoethanolamine N-methyltransferase, [Aspergillus flavus NRRL3357]
  misc_feature (95)..(1063): NCBI GI: 145241896 Blast Desc: An09g02800 [Aspergillus niger] gi|134078136|emb|CAK40217.1| protein product [Aspergillus niger]
MAPSAAQNAQSKSSAEFQAITAQWANAKRVKELQDAVNKPQRPSRPSSAPAGDSQRAALEARRKSAFERHASWTLAFWFWLLCMHAFGIVLFTSGFLLTRLVLDQHSECALPPTEPLLKWDGSGTIDGGCWHPKTFDKAVVVIIDALRYDFTIPVGGDSTPEIYHNAFPFLHESASQSPHNAFLRPFIADPPTSTLQRIKGLTTGTLPTFIDVGSSFGGTAIEEDNLLMQWRNHGKRIAHLGDDTWTALFPGYFEPNISRAYDSFNVWDLHTVDNGVMEHIFPLMQSPQEAEWDIVIGHLLGVDHAGHRYGPNHPAMTSKLEQMDAFIRQLADSIDDNTLLVVMGDHGMDEKGDHGGESDDEVQAALWMYSKRPVFGRTQPDFVNPPANAKERPVNQIDLVPTLALLLGIPIPYNNLGRPIEEAFAGTKGTAWDHLAAASKVASAGIMKYQESYFQARGLRQSSGTGSPAAFWKIAENLPKTDVKAQYLAYTTYQEVTLGICKDLWARFDVPKMVLGVATMALGVVVLLLYVSRDEDDDFAELENEELDFAEKSLEMMSGSSDAEMTTHKTLAKSLVLSGVYGAVTAGLVSFALVGLLGLGEWLWGIAAIAIVSMSAVTFSLLTSGSKSILNLLPNTYWGWLSVCFTASQSVGFASNSYTIWEDSISLFFLATFGISSAVAALRHSTVNGRIMGTYHSLLFVVLTRAASFSKLCREEQMPYCQSTYYASANSSTSAPWQLVIPFAVFLILPSIFKSYLQSSRSYEGFAPIWIGYIIRAALLLSAGYWTLDAAGNGNWLQSIPEATFKLIHVSVAQIVLALALVAGTTAFIWAPPCVSISTTSTSSRRAQVTVLGYGNANGARYLLLPINIACACILLSKPMGSGAIAIMLWQILALAEILDINSISSETIGPVTLALLGNYHYFKTGHQAALSSIQWDSAFIPLVTIRYPWSALAVMFNHFAGQIIACVALPLLVMWKTTPKRKGVLESVSRALGIFVAYYAVESLATMAWTGHLRRHLMLYRVFNPRFMMAAAILIIVDLIGILVTLVGVRTNILAISDVFGFAD

SEQ ID NO: 18031 - DNA, 3589 bp, Muscodor strobelii
  misc_feature: SGI EST ID NO. CUFF.42509.0
  misc_feature: Variant of the nucleotide sequence at SEQ ID NO 18029
taaaagcacagaataccctccatgctcttcctttcacgaccttccttcgactatgttctctgactagactctcattctcctccgctctaggcttgtttcccttttttgtattttcccactcttattatattgttccaatggctgcatactaggtgtttactgtctgcttgaattccttccctctaccttcaaccccgccatcccccttcccatcacactctcctactactcaccatggcgccctcagcagcccaaaatgcccaatcgaagtcgtcagctgagttccaggctataactgcccaatgggccaacgcaaagcgtgtcaaagagctccaggatgccgttaacaaaccccagagaccatcccggcccagctcagcccctgccggcgactcacaacgcgccgctctcgaggctcgccgaaagtccgccttcgagcgccatgcttcctggactctcgctttctggttctggctgctctgcatgcatgcctttggcattgtcttgttcaccagtggcttcctcttgactcgacttgtcctcgaccaacattccgaatgcgccttgcctcctaccgaacccctattgaaatgggacggcagtggaaccatcgacggtggctgctggcatcccaagaccttcgacaaggctgttgttgttataatcgatgcgttgcgatacgacttcaccatccccgtcggaggcgattctacgcccgagatataccacaacgccttcccctttctccacgagtctgcctcccagtcgccccataatgcatttctccgccccttcattgccgaccctcctacgagcactctgcagagaataaaaggtttaacgaccggcaccttgccgaccttcatcgatgttggttccagctttggcggcaccgctatcgaggaagacaatctcctgatgcagtggcgtaatcacgggaagcgcatcgcacaccttggagatgacacctggaccgccttgttcccaggctatttcgagcccaacatcagcagggcctacgatagcttcaatgtctgggatctgcacaccgtcgataacggtgtcatggaacacatcttcccgctcatgcagtccccgcaagaggccgagtgggatatcgtcatcggccatttgcttggcgttgaccatgctggccaccggtacggacccaaccacccagccatgacctcgaagctggagcagatggacgctttcattcgtcagcttgccgacagcatcgacgacaacacgttgttggttgtcatgggcgatcatggaatggacgaaaaaggcgatcacggcggcgaaagcgatgacgaagtccaggccgcgctatggatgtactcgaaacgacctgtttttggccggacccaaccagactttgtgaacccgccagccaatgccaaagaacggccagtcaaccaaatcgatctggtcccgactctagcactacttctggggatacccattccctacaacaacctaggacgtccaattgaggaagcatttgctggcaccaagggcaccgcctgggatcatcttgcggctgcatcaaaggtagcttcagccggcatcatgaaataccaagaatcgtatttccaagctagagggttgcggcagagttctgggactggatcccctgcggcattttggaagatagctgagaatctgcctaaaactgacgtaaaggcacagtatctcgcctacactacctatcaggaggtcacccttgggatctgtaaggacctttgggcgcggttcgatgtgcccaaaatggtattgggagttgccaccatggctcttggtgtagtcgtcttgctactctacgtatcacgggatgaggacgacgattttgcagagctcgaaaatgaagagttagacttcgccgaaaaaagcctggagatgatgtctggatcaagtgatgctgagatgactactcacaagaccttggcaaagtctttagttctgtcgggagtgtatggtgctgtgacagctggcctcgtgagcttcgccctggtcggtctcttaggcttgggagaatggctgtggggaatagcagctattgcgattgtcagtatgagcgccgtgacattctctcttctgacatccggtagcaagagcattcttaaccttcttccgaatacctattgggggtggctgtcagtttgtttcacagccagccagtccgtcggctttgcctcgaactcgtacactatctgggaagattccatctccctattcttccttgctacttttggtatcagcagtgctgtagctgcacttcgacactcgactgttaacgggagaattatgggcacataccactctctcctatttgtggtactcacccgggctgcttccttttcgaaactttgtcgtgaagagcagatgccatactgtcagtcgacctactatgcatctgccaactcgtcaacttcagcgccatggcagctggtgattccatttgcagtgttcctcatcctcccgtccatcttcaaatcatatttgcaaagctcgcgatcctacgagggatttgcgccgatttggatcggctatatcatccgtgcagccctcctgctctccgctggttactggaccctggatgctgctggtaatggcaactggctgcagtccattccagaagcaaccttcaaactgattcacgtatcggtcgcccagatcgtgctagcactagccttagtagctggcacgacagctttcatttgggcacccccttgtgtttccatttcaactacatcaactagtagccgtagagctcaggtcactgtgcttggctacggaaacgccaacggcgcccgttatctcctcctacccatcaacattgcgtgtgcctgcatattactctcaaaaccaatgggcagcggtgccatcgccatcatgctctggcagatccttgccctcgcagagatattggacatcaattccatttcgtccgaaactattggtcctgtgacacttgcattacttggaaattatcactacttcaagaccggtcaccaagcagcactctcctctattcaatgggactcagcattcatcccgctcgtcaccattcgttatccttggagtgcgcttgccgtcatgttcaatcacttcgctggacagataatagcctgcgttgcgctgccgcttttagtgatgtggaagacaactccaaagcgcaaaggcgttctcgagagcgtgagccgcgcacttggcattttcgtggcgtattatgctgtcgagagtctggcaacgatggcttggactggacatctccgccgccatctcatgctttaccgagtcttcaacccaaggttcatgatggctgctgctatcttaatcatcgttgacttgatcgggatactcgtcacgcttgttggtgttaggacgaatatcctggctatcagtgatgtgtttggatttgcggattaggcattggaatgatgtatatagtgttgtaagatgagatggatacaaaaacaaaccaaaagattctaataccaaaatttgtgtctatataaagtgagaataggaacaagcacgctgtgctgacggagatcgactactgccgagacaggaacttcga

SEQ ID NO: 18032 - DNA, 1860 bp, Muscodor strobelii
  misc_feature: SGI cDNA ID NO. 566036
  misc_feature: Encodes the peptide sequence at SEQ ID NO 18033
atgaaataccaagaatcgtatttccaagctagagggttgcggcagagttctgggactggatcccctgcggcattttggaagatagctgagaatctgcctaaaactgacgtaaaggcacagtatctcgcctacactacctatcaggaggtcacccttgggatctgtaaggacctttgggcgcggttcgatgtgcccaaaatggtattgggagttgccaccatggctcttggtgtagtcgtcttgctactctacgtatcacgggatgaggacgacgattttgcagagctcgaaaatgaagagttagacttcgccgaaaaaagcctggagatgatgtctggatcaagtgatgctgagatgactactcacaagaccttggcaaagtctttagttctgtcgggagtgtatggtgctgtgacagctggcctcgtgagcttcgccctggtcggtctcttaggcttgggagaatggctgtggggaatagcagctattgcgattgtcagtatgagcgccgtgacattctctcttctgacatccggtagcaagagcattcttaaccttcttccgaatacctattgggggtggctgtcagtttgtttcacagccagccagtccgtcggctttgcctcgaactcgtacactatctgggaagattccatctccctattcttccttgctacttttggtatcagcagtgctgtagctgcacttcgacactcgactgttaacgggagaattatgggcacataccactctctcctatttgtggtactcacccgggctgcttccttttcgaaactttgtcgtgaagagcagatgccatactgtcagtcgacctactatgcatctgccaactcgtcaacttcagcgccatggcagctggtgattccatttgcagtgttcctcatcctcccgtccatcttcaaatcatatttgcaaagctcgcgatcctacgagggatttgcgccgatttggatcggctatatcatccgtgcagccctcctgctctccgctggttactggaccctggatgctgctggtaatggcaactggctgcagtccattccagaagcaaccttcaaactgattcacgtatcggtcgcccagatcgtgctagcactagccttagtagctggcacgacagctttcatttgggcacccccttgtgtttccatttcaactacatcaactagtagccgtagagctcaggtcactgtgcttggctacggaaacgccaacggcgcccgttatctcctcctacccatcaacattgcgtgtgcctgcatattactctcaaaaccaatgggcagcggtgccatcgccatcatgctctggcagatccttgccctcgcagagatattggacatcaattccatttcgtccgaaactattggtcctgtgacacttgcattacttggaaattatcactacttcaagaccggtcaccaagcagcactctcctctattcaatgggactcagcattcatcccgctcgtcaccattcgttatccttggagtgcgcttgccgtcatgttcaatcacttcgctggacagataatagcctgcgttgcgctgccgcttttagtgatgtggaagacaactccaaagcgcaaaggcgttctcgagagcgtgagccgcgcacttggcattttcgtggcgtattatgctgtcgagagtctggcaacgatggcttggactggacatctccgccgccatctcatgctttaccgagtcttcaacccaaggttcatgatggctgctgctatcttaatcatcgttgacttgatcgggatactcgtcacgcttgttggtgttaggacgaatatcctggctatcagtgatgtgtttggatttgcggattag

SEQ ID NO: 18033 - protein, 619 aa, Muscodor strobelii
  misc_feature: SGI Peptide ID NO. 566036
  misc_feature (2)..(619): NCBI GI: 116207972 Blast Desc: CHGG_03279 [Chaetomium globosum CBS 148.51] gi|88183876|gb|EAQ91344.1| CHGG_03279 [Chaetomium globosum CBS 148.51]
  misc_feature (2)..(619): NCBI GI: 256729852 Blast Desc: [Nectria haematococca mpVI 77-13-4]
  misc_feature (1)..(619): NCBI GI: 261358331 Blast Desc: GPI ethanolamine phosphate transferase [Verticillium albo-atrum VaMs.102]
  misc_feature (2)..(619): NCBI GI: 171686496 Blast Desc: protein product [Podospora anserina] gi|170943209|emb|CAP68862.1| protein product [Podospora anserina]
  misc_feature (2)..(619): NCBI GI: 85083569 Blast Desc: NCU06508 [Neurospora crassa OR74A] gi|28918234|gb|EAA27912.1| conserved [Neurospora crassa OR74A]
  misc_feature (2)..(619): NCBI GI: 39940506 Blast Desc: MGG_04987 [Magnaporthe grisea 70-15] gi|145010773|gb|EDJ95429.1| MGG_04987 [Magnaporthe grisea 70-15]
  misc_feature (2)..(619): NCBI GI: 46122427 Blast Desc: FG05591.1 [Gibberella zeae PH-1]
  misc_feature (2)..(616): NCBI GI: 154305946 Blast Desc: BC1G_08204 [Botryotinia fuckeliana B05.10] gi|150853089|gb|EDN28281.1| BC1G_08204 [Botryotinia fuckeliana B05.10]
  misc_feature (37)..(616): NCBI GI: 156048022 Blast Desc: SS1G_08742 [Sclerotinia sclerotiorum 1980] gi|154693139|gb|EDN92877.1| SS1G_08742 [Sclerotinia sclerotiorum 1980]
  misc_feature (2)..(618): NCBI GI: 119173534 Blast Desc: CIMG_10218 [Coccidioides immitis RS]
MKYQESYFQARGLRQSSGTGSPAAFWKIAENLPKTDVKAQYLAYTTYQEVTLGICKDLWARFDVPKMVLGVATMALGVVVLLLYVSRDEDDDFAELENEELDFAEKSLEMMSGSSDAEMTTHKTLAKSLVLSGVYGAVTAGLVSFALVGLLGLGEWLWGIAAIAIVSMSAVTFSLLTSGSKSILNLLPNTYWGWLSVCFTASQSVGFASNSYTIWEDSISLFFLATFGISSAVAALRHSTVNGRIMGTYHSLLFVVLTRAASFSKLCREEQMPYCQSTYYASANSSTSAPWQLVIPFAVFLILPSIFKSYLQSSRSYEGFAPIWIGYIIRAALLLSAGYWTLDAAGNGNWLQSIPEATFKLIHVSVAQIVLALALVAGTTAFIWAPPCVSISTTSTSSRRAQVTVLGYGNANGARYLLLPINIACACILLSKPMGSGAIAIMLWQILALAEILDINSISSETIGPVTLALLGNYHYFKTGHQAALSSIQWDSAFIPLVTIRYPWSALAVMFNHFAGQIIACVALPLLVMWKTTPKRKGVLESVSRALGIFVAYYAVESLATMAWTGHLRRHLMLYRVFNPRFMMAAAILIIVDLIGILVTLVGVRTNILAISDVFGFAD

SEQ ID NO: 18034 - DNA, 3589 bp, Muscodor strobelii; identical to SEQ ID NO: 18031
  misc_feature: SGI EST ID NO. CUFF.42509.0
  misc_feature: Variant of the nucleotide sequence at SEQ ID NO 18032

SEQ ID NO: 18035 - DNA, 1071 bp, Muscodor strobelii
  misc_feature: SGI cDNA ID NO. 566037
  misc_feature: Encodes the peptide sequence at SEQ ID NO 18036
atgcagacgggtcctgtttctagttggcgtgggaggacgatccatacagcgtttcataccacttgggcaatgatcttccttctcttggcctccgccgctctcaccacagctatttcagtccccgagcctgcggcaccaacaaccttgctgatcgatactcgcattcccgtcttgatcgacggtcgctggcacatcatgtcggccgaagagcatcgtgacctgcgcaagcgcgagctggcagagcggaagcacaaacacaccactaccaccaccacgttcgaagtcaccgtctcgaccgtcacggccagtgcgaccacgacaaccaccactgccgctgcgagccctctgccgagccccttcgacggtgctctagccgccaacttctcgtcggatacgtgtccgactttcatcaatgcattcctgtccagcgaggagttcaaggcctgttatccggtctcactgcttctacagggctccaactcgttcttcgaggccgaaaaggagttgaccagcataacgcaggtgctcgacgccgcctgcgcagccaacgtcacatcttgcaccgattatttacatgacctcgccagccagctcatcgcgtctgacaattgcggcaaggattataaagaccaaaatgcgatcgttgtagaggcgtatcagggcatgagaacatacaagacggtatacgaagcgacctgtctcatggcaaactcgaccacctactgttttgcgagtgctgtgacgaacgtgacgacagcgtccaattcatacctctattatctacccctcaatcaatcactccccgaaactgccgtacccgcctgcaacttatgcactaggcaaacaatggagatataccaggcagcgacgagcgaccggaaagccgacatttcgcacacatacgaggccgctgctcagcagatcgactcgatatgcggcggaaatttcgtcaataccagtttgtcattagaagtagccgagtccggtgccaacacgatacgacactctgcatcgccctctttgatcatgctatctttattattcatgacagtatcgcgttggcttctctaa

SEQ ID NO: 18036 - protein, 356 aa, Muscodor strobelii
  misc_feature: SGI Peptide ID NO. 566037
  misc_feature (35)..(356): NCBI GI: 145611758 Blast Desc: MGG_11657 [Magnaporthe grisea 70-15] gi|145019011|gb|EDK03290.1| MGG_11657 [Magnaporthe grisea 70-15]
  misc_feature (49)..(328): NCBI GI: 85086736 Blast Desc: NCU00270 [Neurospora crassa OR74A] gi|28918836|gb|EAA28505.1| [Neurospora crassa OR74A]
  misc_feature (25)..(331): NCBI GI: 171685924 Blast Desc: protein product [Podospora anserina] gi|170942923|emb|CAP68576.1| protein product [Podospora anserina]
  misc_feature (81)..(344): NCBI GI: 256733187 Blast Desc: NECHADRAFT_60277 [Nectria haematococca mpVI 77-13-4]
  misc_feature (22)..(356): NCBI GI: 116207876 Blast Desc: CHGG_03231 [Chaetomium globosum CBS 148.51] gi|88183828|gb|EAQ91296.1| CHGG_03231 [Chaetomium globosum CBS 148.51]
  misc_feature (64)..(352): NCBI GI: 46124789 Blast Desc: FG06772.1 [Gibberella zeae PH-1]
  misc_feature (96)..(356): NCBI GI: 154316141 Blast Desc: BC1G_03655 [Botryotinia fuckeliana B05.10] gi|150846442|gb|EDN21635.1| BC1G_03655 [Botryotinia fuckeliana B05.10]
  misc_feature (85)..(356): NCBI GI: 225677816 Blast Desc: conserved [Paracoccidioides brasiliensis Pb03]
  misc_feature (85)..(356): NCBI GI: 226287445 Blast Desc: conserved [Paracoccidioides brasiliensis Pb18]
  misc_feature (104)..(356): NCBI GI: 226278999 Blast Desc: conserved [Paracoccidioides brasiliensis Pb01]
MQTGPVSSWRGRTIHTAFHTTWAMIFLLLASAALTTAISVPEPAAPTTLLIDTRIPVLIDGRWHIMSAEEHRDLRKRELAERKHKHTTTTTTFEVTVSTVTASATTTTTTAAASPLPSPFDGALAANFSSDTCPTFINAFLSSEEFKACYPVSLLLQGSNSFFEAEKELTSITQVLDAACAANVTSCTDYLHDLASQLIASDNCGKDYKDQNAIVVEAYQGMRTYKTVYEATCLMANSTTYCFASAVTNVTTASNSYLYYLPLNQSLPETAVPACNLCTRQTMEIYQAATSDRKADISHTYEAAAQQIDSICGGNFVNTSLSLEVAESGANTIRHSASPSLIMLSLLFMTVSRWLL

SEQ ID NO: 18037 - DNA, 2158 bp, Muscodor strobelii
  misc_feature: SGI EST ID NO. CUFF.42677.0
  misc_feature: Variant of the nucleotide sequence at SEQ ID NO 18035
cgactaagagggtggatgaacggctctcaagattgctcctaggcttggctggttcttaagccacttcgaacccttgccataggattaattactgctcttattgctcagtactcactcggccagtccagctccgtctgcctctatctcttgtttaataacaacggcggctctccaagttcttgagattcatctttgcttgcgtccgtgccgtgaagtctcctctttcgccgcatttacccgtcggccaaatctatattgcgacggcctcctagcccgataactgcccgggttctcgcagtcgacaacacctatctcagatgcgtgtacttaattaggtgaatgcagctgaagtcgctcgaggcaagtatacaaatgaccgatcgctgccgacactggtcgaacttgcaatttccaacaataattggacaccgacaccgttgcgtctactgctcggtacgtgacaatcgatcgacacgcctcgcggaaccaaaaaaagcgcggatgtcgagggcggatagcgagagtagtaaaacacgttacacacaaaccagcgatcgacactgcaacacatggcttcggcatcgaccatgcagacgggtcctgtttctagttggcgtgggttagtgcagtgtccccgccgtcgcgatttctaggtggctcatttaacattctcaggaggacgatccatacagcgtttcataccacttgggcaatgatcttccttctcttggcctccgccgctctcaccacagctatttcagtccccgagcctgcggcaccaacaaccttgctgatcgatactcgcattcccgtcttgatcgacggtcgctggcacatcatgtcggccgaagagcatcgtgacctgcgcaagcgcgagctggcagagcggaagcacaaacacaccactaccaccaccacgttcgaagtcaccgtctcgaccgtcacggccagtgcgaccacgacaaccaccactgccgctgcgagccctctgccgagccccttcgacggtgctctagccgccaacttctcgtcggatacgtgtccgactttcatcaatgcattcctgtccagcgaggagttcaaggcctgttatccggtctcactgcttctacagggctccaactcgttcttcgaggccgaaaaggagttgaccagcataacgcaggtgctcgacgccgcctgcgcagccaacgtcacatcttgcaccgattatttacatgacctcgccagccagctcatcgcgtctgacaattgcggcaaggattataaagaccaaaatgcgatcgttgtagaggcgtatcagggcatgagaacatacaagacggtatacgaagcgacctgtctcatggcaaactcgaccacctactgttttgcgagtgctgtgacgaacgtgacgacagcgtccaattcatacctctattatctacccctcaatcaatcactccccgaaactgccgtacccgcctgcaacttatgcactaggcaaacaatggagatataccaggcagcgacgagcgaccggaaagccgacatttcgcacacatacgaggccgctgctcagcagatcgactcgatatgcggcggaaatttcgtcaataccagtttgtcattagaagtagccgagtccggtgccaacacgatacgacactctgcatcgccctctttgatcatgctatctttattattcatgacagtatcgcgttggcttctctaagaacaccagctcatcgaatgtcatttttggcgataattgattacggcgtacacggcaaaaggcggaattggttgaacgagcgattttactcgactcgggagtttttgggctagactactttttggatttggattttggaaatatggcaagcgaaacagacggcttggtcatatctgggcgatacatctgcttctttgataccctttcacaatatctacacgtagcatcgtgtgattttcattttgtgcaatttttggatagcgaaggagaaaacggaggattgggcatggcatgactgattgaacatatacgagtcgttacgagcgttggagaccgttggaactttgattctggccacatatattgacaactagtacatttattaataattagcacataagatgaaatctggcttcatgggcgctgtgatgatgtagatttccg

SEQ ID NO: 18038 - DNA, 4044 bp, Muscodor strobelii
  misc_feature: SGI cDNA ID NO. 566038
  misc_feature: Encodes the peptide sequence at SEQ ID NO 18039
atggccatcgaactgtcggacatgcctgggaaggcagatgacaaggctactgacaaggctagtcggccaggaagccaggacgactcagctgctagtaccatattaccaccatccactcgtgacggtaactcgcaaaacaacgagaagaagctgaaaggcgcaaagggtaaaggggatccagagaagtcaggaaatgatccgtatcaacaccttcctgagcatgaggccactatcattaaaagacaagttctcactccggaggtcaaggctggatttgccaccctctaccgatacgcgtctaggaacgatcttatcatcatatcctttgccgccataggagcgattgcagctggcgccgccttaccgctcatgacagtccttttcggtggtcttcaaggttccttccagggctacttcaacggccaggtttccaaggcagacttcagcgctcaactaaaccatctggtcctgtacttcgtctatctggccattgcctctttcttcgccacatatatcgctactgttggcttcatatatacgggcgagcacattagcgccaagatccgagagcactacctcgagagttgcatgcggcaaaacataggtttcttcgataacatgggctcgggcgaggtaaccacacgtattacggccgacaccaacttagtgcaagacggcatttccgagaagacgagcttgactctcacctccgtcgccactttcgtgtctgctttcgtcattggcttctatttctactggaagctgacactgattctgacatccaccctgtttgcgctactccttgtcacaggtattggatccacgtttattgtgaaatatacgagactgtctatccaatcctacgccgtgggaggcacagtcgccgaagaagtttttagctccatccgaaatgctgtcgcttttggtacggaagatcgcctcgcaaaacaatatgacgaccatcttgctcgcgctcaatgggctggtatccgcaagtcgacttccgtcgccattcttatcggcttcataatgattctggtgtacctcaattatggccttgccttttgggtaggcagtgggtacctggtgcagggtgccgtctctctgtctcatgttctgactgtgatgttggccgtcatcatcggagctttcaatttgagcaatattgcccctaatcttcaagccttcggcactgcattggccgctagtggcaggattttcaatactattgatcgagtttctcctctagacccaaccaacgacgttggggaaaaattagaaaaggtagaaggctcgattcggcttcaaaatgtgaagcacatctatccatctcggcccgaggttgtggtaatgaaagatgtcactctcgatattccggcaggcaaaacgactgcattggtaggagcttctggttcaggaaaaagtactattgttgggttagtagagcgattttatgatcccgttggagggcaggttcttttggatggccacgatgtcagcaccctcaaccttcgctggctacgtcagcaaatctctcttgtcagtcaagagccaacattgttcggtaccacaattttccataacgtccgttacggcttgttcggcaccaaatatgaacacgcttctaccgaagagcagagggagcttgtgatcgaggcagccaagaaggcaaatgcacacgacttcatatcagcgctgccagaagggtacgaaacccatgtaggccagcgtggatttctcctatccggaggtcaaaagcaacgtatagctatcgcccgtgctattgtctctgatcccaaaattcttctacttgacgaagccacaagtgctcttgacaccaagtccgaaggtgtagtacaggctgctttggaggcggctgcggaagggcggactactatcacaatcgcccatcgtctgtcgactatcaaagatgctcacaatattgtagtcatgcaggagggaaggatcgttgaacagggaaaccatgacgagcttttagcaaaaaagggtgcatattataatcttgtcacagcccagaacattgccgcaaccgttgcaccgacaaatgaggaagacggtgccgaggaagaggatgatgacacacggttgattcggagattgtctactcgacgcagtgatgctgatcttgattatcttcaagatccgaacgacgatattgctgcgagactgaagcgatccggtacccaagcctctgtttctagccgagttattgcagagcacaagaacccggaaaagcaaccaaagtttagcaccggcactttgatcaagctcattgcctcattcaacaagactgaatggaagacaatggtgtggggtctcttctgggctatcatttgcggtggcggaaacccaactcaggccgtcttcttcgccaaacaaatcttgacgctcagtgttcctatcacagatgcgaacaagcaccaggtcaagaaggacagcgacttctggagtctcatgtatcttgtcttggccattgtgatattcattgcccagatcgcccaaggtattgcgttcgcgaactgctctgaaattctcattcgtcgagtccgagaccgatctttccggaccatgctccgccaagacgtagcatttttcgacaaggaggagaatacggcgggcgccctgactaccttcttgtcaacggaaacaacgtatgttgcagggctaagtggctccactctcgggacgctgctcaccgtcacaacaacattggtgtcatcctttgttgtcggtcttgtttttggatggaaactgtccctcgtctgtatctcggtggtcccagtcatcattggttgtggtttcttccgttacttcctgttggcacattttcaacggcgctccaagagagcttatgaaacgagcgcttcatatgcggcggaggcaatttctgctatccgcactgttgcctctctgacaagagaagacgatgttcttgctcagtataaggcggccctggtaacacagcaaaggtccagtctgatatctatcctgaagtcctctctcctttacgcggctgcgcaatccttcctattcctggtctttgcactaggcttctggtacggaggcatgctcattgctaacagggagtacacgctctttcaattcttcatttgcttcatgtccatcgtatacggtgcacagtcagcgggtacggtattctctttcgctcccgacttcggcaaggcccatcatgctgcaacagaactaaaaatcttgtttgaccgagaaccgaaaatcgacacttggtccgaaggtggcgaaaagctggatgctgttgatggtcacatcgaattccgggatgtgcacttccggtatccaactcggcccgagcagcctgtgctgcgtggtcttgatttgtcggttcgtcctggtcaatacatcgcgctcgtcggtgcctcaggttgcggaaagagtaccacgattgcgcttctcgagcgtttctacgatccgctctctggtggcgtgttcattgatggcaaagacattagtactttgaacatcaacgaatatcgctcttgcatcgctctcgtatctcaggaaccgactctctaccaaggcacgatcaaagaaaacattctcctcggctcggcgaatgaagctgtgacggatgaggccattgaacacgcctgccgggaagccaacatttatgacttcatcatgtctctgcctgatggattcaacactgtggtgggatccaaaggcgctctcctcagtggcggtcagaagcagcgtattgcaatcgcacgcgccctagtgcgtgatccgagggtgttgttgttagacgaggcgacgagcgctttagattccgaatctgagcacgttgtgcaagcagcgcttgacaaagccgccaagggacgtaccacgattgccgttgcgcatcgtctcagcacgatccagaaagccgacatcatctacgtctttgatcagggccgagtcgtagagcacggtacgcacagcgagctcatgcgccagaatggtcgttatgcagagctggtaaatctgcagagcttagagaagcattag

SEQ ID NO: 18039 - protein, 1347 aa, Muscodor strobelii
  misc_feature: SGI Peptide ID NO. 566038
  misc_feature (776)..(1056): Pfam Id: PF00664 Pfam Desc: ABC transporter transmembrane region
  misc_feature (104)..(386): Pfam Id: PF00664 Pfam Desc: ABC transporter transmembrane region
  misc_feature (461)..(654): Pfam Id: PF00005 Pfam Desc: ABC transporter
  misc_feature (1131)..(1317): Pfam Id: PF00005 Pfam Desc: ABC transporter
  misc_feature (78)..(1347): NCBI GI: 256733188 Blast Desc: NECHADRAFT_104160 [Nectria haematococca mpVI 77-13-4]
  misc_feature (39)..(1347): NCBI GI: 171686392 Blast Desc: protein product [Podospora anserina] gi|170943157|emb|CAP68810.1| protein product [Podospora anserina]
  misc_feature (17)..(1344): NCBI GI: 156051760 Blast Desc: SS1G_07287 [Sclerotinia sclerotiorum 1980] gi|154705065|gb|EDO04804.1| SS1G_07287 [Sclerotinia sclerotiorum 1980]
  misc_feature (40)..(1347): NCBI GI: 145611760 Blast Desc: MGG_00141 [Magnaporthe grisea 70-15] gi|145019012|gb|EDK03291.1| MGG_00141 [Magnaporthe grisea 70-15]
  misc_feature (60)..(1347): NCBI GI: 164423939 Blast Desc: NCU07546 [Neurospora crassa OR74A] gi|157070297|gb|EAA29823.2| NCU07546 [Neurospora crassa OR74A]
  misc_feature (41)..(1347): NCBI GI: 261354035 Blast Desc: multidrug resistance protein [Verticillium albo-atrum VaMs.102]
  misc_feature (22)..(1346): NCBI GI: 121712662 Blast Desc: ABC multidrug transporter Mdr1 [Aspergillus clavatus NRRL 1] gi|119402095|gb|EAW12516.1| ABC multidrug transporter Mdr1 [Aspergillus clavatus NRRL 1]
  misc_feature (65)..(1346): NCBI GI: 18033873 Blast Desc: AF375879_1 ATP-binding cassette transporter ABC4 [Venturia inaequalis]
  misc_feature (82)..(1345): NCBI GI: 145253787 Blast Desc: An17g01770 [Aspergillus niger] gi|134083978|emb|CAK43073.1| protein product [Aspergillus niger]
  misc_feature (10)..(1346): NCBI GI: 119498541 Blast Desc: ABC multidrug transporter Mdr1 [Neosartorya fischeri NRRL 181] gi|119414192|gb|EAW24131.1| ABC multidrug transporter Mdr1 [Neosartorya fischeri NRRL 181]
  misc_feature (94)..(1343): SWISSPROT Homolog: EC 3.6.3.44 Xenobiotic-transporting ATPase
MAIELSDMPGKADDKATDKASRPGSQDDSAASTILPPSTRDGNSQNNEKKLKGAKGKGDPEKSGNDPYQHLPEHEATIIKRQVLTPEVKAGFATLYRYASRNDLIIISFAAIGAIAAGAALPLMTVLFGGLQGSFQGYFNGQVSKADFSAQLNHLVLYFVYLAIASFFATYIATVGFIYTGEHISAKIREHYLESCMRQNIGFFDNMGSGEVTTRITADTNLVQDGISEKTSLTLTSVATFVSAFVIGFYFYWKLTLILTSTLFALLLVTGIGSTFIVKYTRLSIQSYAVGGTVAEEVFSSIRNAVAFGTEDRLAKQYDDHLARAQWAGIRKSTSVAILIGFIMILVYLNYGLAFWVGSGYLVQGAVSLSHVLTVMLAVIIGAFNLSNIAPNLQAFGTALAASGRIFNTIDRVSPLDPTNDVGEKLEKVEGSIRLQNVKHIYPSRPEVVVMKDVTLDIPAGKTTALVGASGSGKSTIVGLVERFYDPVGGQVLLDGHDVSTLNLRWLRQQISLVSQEPTLFGTTIFHNVRYGLFGTKYEHASTEEQRELVIEAAKKANAHDFISALPEGYETHVGQRGFLLSGGQKQRIAIARAIVSDPKILLLDEATSALDTKSEGVVQAALEAAAEGRTTITIAHRLSTIKDAHNIVVMQEGRIVEQGNHDELLAKKGAYYNLVTAQNIAATVAPTNEEDGAEEEDDDTRLIRRLSTRRSDADLDYLQDPNDDIAARLKRSGTQASVSSRVIAEHKNPEKQPKFSTGTLIKLIASFNKTEWKTMVWGLFWAIICGGGNPTQAVFFAKQILTLSVPITDANKHQVKKDSDFWSLMYLVLAIVIFIAQIAQGIAFANCSEILIRRVRDRSFRTMLRQDVAFFDKEENTAGALTTFLSTETTYVAGLSGSTLGTLLTVTTTLVSSFVVGLVFGWKLSLVCISVVPVIIGCGFFRYFLLAHFQRRSKRAYETSASYAAEAISAIRTVASLTREDDVLAQYKAALVTQQRSSLISILKSSLLYAAAQSFLFLVFALGFWYGGMLIANREYTLFQFFICFMSIVYGAQSAGTVFSFAPDFGKAHHAATELKILFDREPKIDTWSEGGEKLDAVDGHIEFRDVHFRYPTRPEQPVLRGLDLSVRPGQYIALVGASGCGKSTTIALLERFYDPLSGGVFIDGKDISTLNINEYRSCIALVSQEPTLYQGTIKENILLGSANEAVTDEAIEHACREANIYDFIMSLPDGFNTVVGSKGALLSGGQKQRIAIARALVRDPRVLLLDEATSALDSESEHVVQAALDKAAKGRTTIAVAHRLSTIQKADIIYVFDQGRVVEHGTHSELMRQNGRYAELVNLQSLEKH

SEQ ID NO: 18040 - DNA, 5341 bp, Muscodor strobelii
  misc_feature: SGI EST ID NO. CUFF.42543.0
  misc_feature: Variant of the nucleotide sequence at SEQ ID NO 18038
tctgcatacaacttaagtagtaaccttagtgatgtaggtaagagaagaggaactgaagctgggcgcaggcaccaatgtgagatcaacgtgactggctgaagtgaggaggttcgatgtcgttcgaacatgagatgaaccaaccgtgcgggcgcggagtgaggtaggacaccgaaactcatatcatgcgtaagtactaacaatgttgtttcggtttcgcttatctgattcaatgaactgtgccgatatacgacgaattacgataaatacgagtagaactggtctggggaccgagaattgtgcaccggaataccgtggttccgtatttttgctggctgttagaccgagctaggttaggaagccccgtctggacgacctgtcgtacagggtctgcgagactatgtgcagctcctatacaccttccagactgtgcccgacctgggcaatgaatcgataatttggactaatccccgagactcagatgccacttcaactcatcgagcaaacattcactaccaatcatacctactgacctatacttactaactgattgttctttttgacctaaacaaccgtgatcacacgtgtgttttcttgctgctcatacttacctaacatcgccaacaagcatcagtctttggctgtatgtacagcgtcacataggcccaccctcaataccatcgcctcgcggaactcgatttggcctgctgtgtattgattgcctaccttgattttgggcgcgacgcccgctacgcctactcataatacagccggcttgatagccttaacgccgtcttgcatggacgcgctctcctgaagatctcgccgcagactccgggtgccggatatcaacagtcaccatggccatcgaactgtcggacatgcctgggaaggcagatgacaaggctactgacaaggctagtcggccaggaagccaggacgactcagctgctagtaccatattaccaccatccactcgtgacggtaactcgcaaaacaacgagaagaagctgaaaggcgcaaagggtaaaggggatccagagaagtcaggaaatgatccgtatcaacaccttcctgagcatgaggccactatcattaaaagacaagttctcactccggaggtcaaggctggatttgccaccctctaccgatacgcgtctaggaacgatcttatcatcatatcctttgccgccataggagcgattgcagctggcgccgccttaccgctcatgacagtccttttcggtggtcttcaaggttccttccagggctacttcaacggccaggtttccaaggcagacttcagcgctcaactaaaccatctggtcctgtacttcgtctatctggccattgcctctttcttcgccacatatatcgctactgttggcttcatatatacgggcgagcacattagcgccaagatccgagagcactacctcgagagttgcatgcggcaaaacataggtttcttcgataacatgggctcgggcgaggtaaccacacgtattacggccgacaccaacttagtgcaagacggcatttccgagaagacgagcttgactctcacctccgtcgccactttcgtgtctgctttcgtcattggcttctatttctactggaagctgacactgattctgacatccaccctgtttgcgctactccttgtcacaggtattggatccacgtttattgtgaaatatacgagactgtctatccaatcctacgccgtgggaggcacagtcgccgaagaagtttttagctccatccgaaatgctgtcgcttttggtacggaagatcgcctcgcaaaacaatatgacgaccatcttgctcgcgctcaatgggctggtatccgcaagtcgacttccgtcgccattcttatcggcttcataatgattctggtgtacctcaattatggccttgccttttgggtaggcagtgggtacctggtgcagggtgccgtctctctgtctcatgttctgactgtgatgttggccgtcatcatcggagctttcaatttgagcaatattgcccctaatcttcaagccttcggcactgcattggccgctagtggcaggattttcaatactattgatcgagtttctcctctagacccaaccaacgacgttggggaaaaattagaaaaggtagaaggctcgattcggcttcaaaatgtgaagcacatctatccatctcggcccgaggttgtggtaatgaaagatgtcactctcgatattccggcaggcaaaacgactgcattggtaggagcttctggttcaggaaaaagtactattgttgggttagtagagcgattttatgatcccgttggagggcaggttcttttggatggccacgatgtcagcaccctcaaccttcgctggctacgtcagcaaatctctcttgtcagtcaagagccaacattgttcggtaccacaattttccataacgtccgttacggcttgttcggcaccaaatatgaacacgcttctaccgaagagcagagggagcttgtgatcgaggcagccaagaaggcaaatgcacacgacttcatatcagcgctgccagaagggtacgaaacccatgtaggccagcgtggatttctcctatccggaggtcaaaagcaacgtatagctatcgcccgtgctattgtctctgatcccaaaattcttctacttgacgaagccacaagtgctcttgacaccaagtccgaaggtgtagtacaggctgctttggaggcggctgcggaagggcggactactatcacaatcgcccatcgtctgtcgactatcaaagatgctcacaatattgtagtcatgcaggagggaaggatcgttgaacagggaaaccatgacgagcttttagcaaaaaagggtgcatattataatcttgtcacagcccagaacattgccgcaaccgttgcaccgacaaatgaggaagacggtgccgaggaagaggatgatgacacacggttgattcggagattgtctactcgacgcagtgatgctgatcttgattatcttcaagatccgaacgacgatattgctgcgagactgaagcgatccggtacccaagcctctgtttctagccgagttattgcagagcacaagaacccggaaaagcaaccaaagtttagcaccggcactttgatcaagctcattgcctcattcaacaagactgaatggaagacaatggtgtggggtctcttctgggctatcatttgcggtggcggaaacccaactcaggccgtcttcttcgccaaacaaatcttgacgctcagtgttcctatcacagatgcgaacaagcaccaggtcaagaaggacagcgacttctggagtctcatgtatcttgtcttggccattgtgatattcattgcccagatcgcccaaggtattgcgttcgcgaactgctctgaaattctcattcgtcgagtccgagaccgatctttccggaccatgctccgccaagacgtagcatttttcgacaaggaggagaatacggcgggcgccctgactaccttcttgtcaacggaaacaacgtatgttgcagggctaagtggctccactctcgggacgctgctcaccgtcacaacaacattggtgtcatcctttgttgtcggtcttgtttttggatggaaactgtccctcgtctgtatctcggtggtcccagtcatcattggttgtggtttcttccgttacttcctgttggcacattttcaacggcgctccaagagagcttatgaaacgagcgcttcatatgcggcggaggcaatttctgctatccgcactgttgcctctctgacaagagaagacgatgttcttgctcagtataaggcggccctggtaacacagcaaaggtccagtctgatatctatcctgaagtcctctctcctttacgcggctgcgcaatccttcctattcctggtctttgcactaggcttctggtacggaggcatgctcattgctaacagggagtacacgctctttcaattcttcatttgcttcatgtccatcgtatacggtgcacagtcagcgggtacggtattctctttcgctcccgacttcggcaaggcccatcatgctgcaacagaactaaaaatcttgtttgaccgagaaccgaaaatcgacacttggtccgaaggtggcgaaaagctggatgctgttgatggtcacatcgaattccgggatgtgcacttccggtatccaactcggcccgagcagcctgtgctgcgtggtcttgatttgtcggttcgtcctggtcaatacatcgcgctcgtcggtgcctcaggttgcggaaagagtaccacgattgcgcttctcgagcgtttctacgatccgctctctggtggcgtgttcattgatggcaaagacattagtactttgaacatcaacgaatatcgctcttgcatcgctctcgtatctcaggaaccgactctctaccaaggcacgatcaaagaaaacattctcctcggctcggcgaatgaagctgtgacggatgaggccattgaacacgcctgccgggaagccaacatttatgacttcatcatgtctctgcctgatggattcaacactgtggtgggatccaaaggcgctctcctcagtggcggtcagaagcagcgtattgcaatcgcacgcgccctagtgcgtgatccgagggtgttgttgttagacgaggcgacgagcgctttagattccgaatctgagcacgttgtgcaagcagcgcttgacaaagccgccaagggacgtaccacgattgccgttgcgcatcgtctcagcacgatccagaaagccgacatcatctacgtctttgatcagggccgagtcgtagagcacggtacgcacagcgagctcatgcgccagaatggtcgttatgcagagctggtaaatctgcagagcttagagaagcattagtcaactgtgatgaagctttggcggtatagagtttgaagaagtccttgagcatatagacggggcgtgagaatttcgggtatggatgcatactcaagtcatatttctctttttgataatcagcgttgcatagttcaaagagggaagaagcatttgcaaacatgagagtggactcatagagaatagttggcttgccacttgcatacggccagcctggattatttttggacggcgttaaatggtttgggctgcacatcccgtaggaatagtgcattgtgtattatctgttgagttcctaggatatcgtcgcgaatccgatatcattctgctcaacgttaggagatattgacgaatgaatgtttgattaattgattgaccggtgttgtttattaacattccttagtatagactagcaactggtgaacgaagacattacattctca

SEQ ID NO: 18041 - DNA, 975 bp, Muscodor strobelii
  misc_feature: SGI cDNA ID NO. 566039
  misc_feature: Reduced expression when VOC is produced
  misc_feature: Encodes the peptide sequence at SEQ ID NO 18042
atgcttagccatgctattatgcttctcgcggcattgctatgtctatctgataggacatcggcaaaggcacagcctaagaatgcaatactcctctcgtcagtcaagactctgacgcttcgctcgggagctcaaaccacgcataggcgcgtgtcttctattccccagctgcaatgtgtctcatcaaaacaaatatgcgccctctacacgcccacagtaatgcgctgcacaaatcaaggttcatcctacggtgaagaagacatagagtggtcctgcgaggcttccttaccaccagagctaaaactcggctccacagacgtaatctgcgaaggctacgccaacgccgacgatcccttcgtcctgaaaggcagctgtggcgtagagtaccgactccaactaaccgaggagggcgaaaaacggtatcccaacatcgctaagggcgatagttggttctcaggctggggatccagtagcaaacccaaggagaagccacagaacctatatccagagggcgagagcacggcaggtgacgtgatagctaagtggctattcataatcatcttcgtcggcgtcctaggatggatcatcatcagcggttgcacagcgctggacacacccgtggaccaacgcagacgacggcctagatggggaggtggcggaggcggtggtttcgatcccggcttcggccccggtggaggaggctacgacgactattatgatcccccgccaccatatagcaagacttcgcggacccaagaaggatggcgccccggtttctggtccggcactgcagctggagccgcggctggttatgctgcaggccgttatgggggtgctcgtggaaacaacgactctcgtgggccagatccaggaccaagttcaagatcaggctcaggatttggttcctcctctagttctgggcttggctcgtccgcgaaccggtcgagcacaggattcggatcaacacgccgcagatag

SEQ ID NO: 18042 - protein, 324 aa, Muscodor strobelii
  misc_feature: SGI Peptide ID NO. 566039
  misc_feature (1)..(324): Pfam Id: PF06682 Pfam Desc: Domain of function (DUF1183)
  misc_feature (29)..(139): Pfam Id: PF06682 Pfam Desc: Domain of function (DUF1183)
  misc_feature (9)..(324): NCBI GI: 46124785 Blast Desc: FG06770.1 [Gibberella zeae PH-1]
  misc_feature (8)..(201): NCBI GI: 256732730 Blast Desc: NECHADRAFT_79229 [Nectria haematococca mpVI 77-13-4]
  misc_feature (6)..(324): NCBI GI: 238842929 Blast Desc: transmembrane protein 66 [Microsporum canis CBS 113480]
  misc_feature (5)..(324): NCBI GI: 255945853 Blast Desc: Pc20g12080 [Penicillium chrysogenum Wisconsin 54-1255] gi|211588429|emb|CAP86537.1| Pc20g12080 [Penicillium chrysogenum Wisconsin 54-1255]
  misc_feature (29)..(201): NCBI GI: 39975427 Blast Desc: MGG_00140 [Magnaporthe grisea 70-15] gi|145019013|gb|EDK03292.1| MGG_00140 [Magnaporthe grisea 70-15]
  misc_feature (9)..(197): NCBI GI: 154315310 Blast Desc: BC1G_04694 [Botryotinia fuckeliana B05.10] gi|150847657|gb|EDN22850.1| BC1G_04694 [Botryotinia fuckeliana B05.10]
  misc_feature (27)..(144): NCBI GI: 261354037 Blast Desc: transmembrane protein [Verticillium albo-atrum VaMs.102]
  misc_feature (2)..(144): NCBI GI: 258569521 Blast Desc: [Uncinocarpus reesii 1704] gi|237903834|gb|EEP78235.1| [Uncinocarpus reesii 1704]
  misc_feature (9)..(197): NCBI GI: 156037810 Blast Desc: SS1G_12619 [Sclerotinia sclerotiorum 1980] gi|154698027|gb|EDN97765.1| SS1G_12619 [Sclerotinia sclerotiorum 1980]
  misc_feature (26)..(197): NCBI GI: 212546303 Blast Desc: DUF1183 domain protein [Penicillium marneffei ATCC 18224] gi|210064825|gb|EEA18920.1| DUF1183 domain protein [Penicillium marneffei ATCC 18224]
  misc_feature: Useful for introducing or modulating the production of volatile compounds
MLSHAIMLLAALLCLSDRTSAKAQPKNAILLSSVKTLTLRSGAQTTHRRVSSIPQLQCVSSKQICALYTPTVMRCTNQGSSYGEEDIEWSCEASLPPELKLGSTDVICEGYANADDPFVLKGSCGVEYRLQLTEEGEKRYPNIAKGDSWFSGWGSSSKPKEKPQNLYPEGESTAGDVIAKWLFIIIFVGVLGWIIISGCTALDTPVDQRRRRPRWGGGGGGGFDPGFGPGGGGYDDYYDPPPPYSKTSRTQEGWRPGFWSGTAAGAAAGYAAGRYGGARGNNDSRGPDPGPSSRSGSGFGSSSSSGLGSSANRSSTGFGSTRRR

SEQ ID NO: 18043 - DNA, 7763 bp, Muscodor strobelii
  misc_feature: SGI EST ID NO. CUFF.43097.0
  misc_feature: Variant of the nucleotide sequence at SEQ ID NO 18041
tgacgcaagacgatgaacagcctggcaacatctcggaaagctgtccttagcaggtgttctttgtgtcacaccttcattctcatttcacttccaaacctaccgactcacgaattcgacgtttcggataatacccgaccctcttattaaagttgcatgcctctgcgttatagtacattgaaggaatcggtacttcctgaaattgttagagcctccccacgaccgagatcaaaatcgacatcattgttcacattgtccaagaatctacatcgccctgttatcacgagataattagccctagaggctacctaaaacaaactcataattggtctaatcgacctaataaaagaccctttaacgcctacctagtatcgtagagcacatcacaatgcttagccatgctattatgcttctcgcggcattgctatgtctatctgataggacatcggcaaaggcacagcctaagaatgcaatactcctctcgtcagtcaagactctgacgcttcgctcgggagctcaaaccacgcataggcgcgtgtcttctattccccagctgcaatgtgtctcatcaaaacaaatatgcgccctctacacgcccacagtaatgcgctgcacaaatcaaggttcatcctacggtgaagaagacatagagtggtcctgcgaggcttccttaccaccagagctaaaactcggctccacagacgtaatctgcgaaggctacgccaacgccgacgatcccttcgtcctgaaaggcagctgtggcgtagagtaccgactccaactaaccgaggagggcgaaaaacggtatcccaacatcgctaagggcgatagttggttctcaggctggggatccagtagcaaacccaaggagaagccacagaacctatatccagagggcgagagcacggcaggtgacgtgatagctaagtggctattcataatcatcttcgtcggcgtcctaggatggatcatcatcagcggttgcacagcgctggacacacccgtggaccaacgcagacgacggcctagatggggaggtggcggaggcggtggtttcgatcccggcttcggccccggtggaggaggctacgacgactattatgatcccccgccaccatatagcaagacttcgcggacccaagaaggatggcgccccggtttctggtccggcactgcagctggagccgcggctggttatgctgcaggccgttatgggggtgctcgtggaaacaacgactctcgtgggccagatccaggaccaagttcaagatcaggctcaggatttggttcctcctctagttctgggcttggctcgtccgcgaaccggtcgagcacaggattcggatcaacacgccgcagatagagatgtctaagatcacgatcggacgataagcaagcacaagcattcacgaaatgacaaggacaaattacgccgcttattgatacatgttagtattacagggtctccgtagccatgctctcatctcagtgaccggactatcctgcgtatctacaccgaaatcccttttctgtaagccctcaatagtcttacacatgcaacagcgatgagcgggggtctatcgttctcatcacaaacccaacccatggaactgctcatttgccatttgttttatgtacaatcaatcgatacagccactgactgtgtccatccaagtcgtagtatcgtacagttagaattcttgcggaagcgaacctcctaggcccctatctagaggtgaatcgtcatgatgtcactcttgtcgaaagccttattacagtttggacatttgcgcatccgattcgcaagtctgtcatcaacgcatccccgacagaatatgtggccacagcctcgtatgacagtgtttttgaagtccttcttgcaaattgaacacgtagccatactctatcagttatgttagcgaggcatgtacaggaataccagtagataacgacagagtcatgactcacgcgtagcatttcttcttcttcggatgagttactaaggctcttcgtcttccacttctctcgttccttggctgttgaatcgaggcgtactttgagcttctcaacctcggattctagactgctagcccgctccttcgttaacgaattagtggaatccttcgtcttggcgagctccgtcaattcttgaatctgtgtctttagcacctcgaatcgtctggtcatgtcctgggtactcgactctagcttcttgttatcattcatgacggaggtgttggtctgcttcatatcggccatctgcttgtcaagactcgtgactaatagtcgattttgcgcctcggtttctttaatctgtgagatgatctcggagctctttgtattttgacaacgcaatcgcttgatctcttcaatctttgcgtcgctctcttttcgtgcattgaagtatttatggtcggccttgctcttttccgccatcgctgttgttactcgctcttcttgagctgcaaagtccatgactttcttgttcgcaagagcttggaacttcttaacggcggcagtcattccaggtagctcagcttcgatagattcgtagtctcgccttagcttcttgtatttctcacgaagctgatcggccgacatatcgtcgatttcagagggggctgtcatttcggtgtcttcactagttctcaatctctccacctcggattctaacgctgagatgcgatcatccttcgcgctgacaaggtccttcatgtgatctagtgctgttttctcttgctctttgctggcctttagggtaacgacatcagcatggagttcgtctcgcgcagctcttactctcgccaatgttgtatccgcctgttggagttggtcttcgagatcagcagtcgaagactgcgcttcgttctcaaacttctggcggcaagattctctctctttctctagctgaagcttctcctgcttgagattgacgtgttcagcctccagattgttgaccttgttgacaagttcttcgttctgggccttgaacaacttgaaagtttccgtgcgagagtagtcttcatctgtgagactcgttagacgaagttgaagggctgttagttcggtctgtaaagctttgttctgtgccaaggcagcgtccagctgctccttctgcttggtagataccgcgctgagttcctggagagcgacttgctgtgatgcatggttcgtgtttccatcgtcagcagatgcgccattctcttggtctccagtagatggtcgggcagttgagttggccagggcctgttgctcaagtttctgaacttgagcgctctttgtgcggtccagcttcctctcggctttcatgtagcgtagcgtggccttgttgaggttatcagacatgatctctttctccgccgtgagccgttcgagcttgacagcatagtctttctgcttggccatgaggttgttgacctgggattccaagtttgtgatattgggggagatcttcccacgattgcttgccaattgcgaaaagagcgtgtcaagcctagacttgatcgtcgcgcctttctccttcagatgcgactcaaattcctcgatatcgtggaactcggtctttctctcaaatggctggtccccctcatcttggtacggtacagtaccatcggctagtacagcgacttcttgtaacaccttttgaaaatactcagccactatattccatgaacagcttgatgtgggcggcggcgactgacctgtatccaccaagcgtctatgactcgtatatggtcgtcgtggtggaggcacttcctatcgagctcttctaacttggtctcgagagtattcttctcccgcttatactcaagcatctgtcgatatatagcatctttttgatattcctaagccattcccatgtacccgttagcgcgactcatctcggtatagcaacttgttgcacatgtatgaccggtctgcgggtgaggatagagcttgttgcagaagactgtaatagagagaagagagagacggagagagcgcatggcgcatgcattctgggattgtgagtacactggtggtagagagcgggaaggtcgatggcatgtcgggaccttttgtgaatgaggccagtgggggcgggcacggttcaagacgtgcaacggcagggagggaaagggtgcgatgtgatttgaagggggccagtcgacttacctcaacccatgtttcgctgctgaggtcggcctcttccttgatcttgccgccgccgttgacagcctggcgtttgctggggggcgcgatgtcgtcggtgctgttgacggcgggcctcttgcgatcttccatcttgacccgtgtggagcgcggcacgtcagaaggcgatgtagacacaggcatcagaaagacagagaggtggtcgcgagagggcagacagggcagacaggatgcatgtgtgtgtcgggatcagcggcggcacagacagcagagaaatgcagagtggcagagtcacagagagcggtggaggaaagaagggcgtaaggcgagaggagtggcaccagaggacacgcgtgcccggtggaatgaatcagggcgaccgcccagcaagggcccgggcgcgagaaatgatggtgatggcgatgacagttgcaggagtagagccgacgggaggggaaacagaggcgatggaatggcgatggagagaatggtgaaaggcaggcggaaaatgcgagtgggttggcgggaacgaggatgagaacgggttgaatgagattgagcacgagcaaaggagaagacctcagttaatcgcggccgcagtacgtcgaaggcaaaggcaaaggcaaaggcagaggctctggtgctctggtctctggcaagactcgcagcgcagtgcagtcagtgccaggctctgcaaaccagaccttggtgcttggagccaggcgagcccgagccaggctgggcctgggagggaaagagtcaagactccagcgtcgaagactggaatctgctgcgaaaattgaaggtcgattgggcccccagcccagatgcagcgtagtgtaatgaggatagttgacactaggccgggcctggttgggcttttggcaattgggctttgcagggggtttacaggcgagcaggggcttcaaatgcggcgggtaaaaatccgattgtaaggttggacgacatggaggcttatcgcaggttatcagacattggcacattcgaagtcttgcctgtaggtacgtaccatgccgcgatgtaccttaaagtttccgttgtaatcgccaattcatctgcccctctacgttgcgacttctaattcttgaatgaaggattgcaccaccaaaaccatcagaggggcagtcacacctcttctttccttccttataatccttcctttgcctctatccatgtgcgcgctttgaatgtctatttgttcagcactgcacagtccttcgattctcattcccgtcccacactggcgttcctatctcggggctgtcctcgcatcctttcaatgaagagcatctgaagaattccgatcgccgccgccgcactcaagaggcgacagatgcctttcgagggcatgactgcactgccgacaaccttggtctagctacgcccacccggcacggtcgcttgtcaccatgagttccatgttcaagaagggcggaggcttgtccttcaagcccaaagccggtcgtcgtcccggagccgcgcgccctgccaccaccagctctacttctgcgagcacaactcctgctcctgctaccactcctaccaccactcccactcctctcccctccgctgatgccgagccgacccaatctcaaccagaccctcaaccagaatctcaagagcccacccccaccacctccagtcagcccgcgcctgctgctaccgtcgacgccaacgagaccacctcagccaacactgtcgacgttacaagcagcaaaccgagttcgagtacacaggcacagcctactccagccgaatcttcaccaccttctcgcactccggattccaatacgcagacggagcagcctgtagctacaacagctgttccgccctcccaagaacctacaaagcagccttcgcccaccgtccaacagcgcactcccctgccgaagctgacgtcctcccgtgcccgacgaccgccggccgacatcgggtctccgacacgagcatcgggttctgacagccaagacaggcagcctactccgagcattgacgagcagaatgacacgaacgtgcccagtgcgcctgccatacaagaacaagtaccggaagcccctgccccgtcacctcctgtgccggactcggatgcaaatgcatcgacgccctcggcagaaggagccgctgtctctcgccgaccgcttcccaagaaaccagcaccgaagaagcgcaagtcggcaacaactgatggtgaaactgaggctgaaggtcctgcacctaagaagacacgccagagaaagccacgcgctgctgccacgggcaacactggcgaaggagcggacgccgaaccccagccagcgaagaagagaaaaccacgcgctcctcgagcagcagccgagtctggcgagggagcaaccacggaacctcgcccagagaagcagcgccgcaagcgccccgtgactcccgaagatgccaggaatcaaaaggtagatcactcgacgatgacggtcggcgagctcgtcaaagacctgggcattggtaaacccttcgcacatgccgaagagatccagcagcgagctcgagaagcacgtgctgccaacaagctcaagagactggagcgacaaaaaatccgagccggcctcatgcctgcgccacaggattcagcagacaacaggggcacagccgatcgtcaagagcgtggagctgccctagctcagctgggagccgctatgagtgtcgacgcctctgagggatttgattacgagattatcaatggccagattagggtcacacaagagtctctcgtgatagacagacacaatcaggatacctctgcgatggagatagtggaagaaaccgatttttcaacgctgatcacatcaaattcatatatgaggaagaagagaggtttcggcggatggtcggacgatgaaacagagaaattctatcaactgcttggccagttcggtatggactttgaagctatatccaatttcttccccctgaagtctcgagatcagtgccgacgcaagttcatcaaagaggagagaacccgtccgaaccgcgtgaatgctgcgatcatggtgcgcggggaaaagaagacagagatccctattgaggagtacaaagctacacagcttgaatggttcactaaagataagatcgaggctgaacagtctaagcttgcagcagagcataccaaagacatcgagaggctcaaggaggaacgacgccgccaaggtcttatggatgatgacgatgagaacactgctaaggacatgggaaagagtggcccgggacaggatgaagatgaggacgagattgaggaagaggacgccgatgccatgggtctgaatggtggagtcgtggagagcatcgagagcttttaagtaagcttttaagtccaagtgtcaaaagatcgatgagagatcgacactctgtccatgttaagatacccctacagccatttggttgttattactccagcagtttgctaggaacatattgttatagtaactatggttgcatgatggcacccagattagctgggtagatgagctgtgtgctctgacccaagcaacgagagagaaagggaataaagcaataaagacaacacattcatagaaagcactcttgtctattgacatcgaatttta

SEQ ID NO: 18044 - DNA, 2118 bp, Muscodor strobelii
  misc_feature: SGI cDNA ID NO. 566040
  misc_feature: Reduced expression when VOC is produced
  misc_feature: Encodes the peptide sequence at SEQ ID NO 18045
atggaagatcgcaagaggcccgccgtcaacagcaccgacgacatcgcgccccccagcaaacgccaggctgtcaacggcggcggcaagatcaaggaagaggccgacctcagcagcgaaacatgggttgaggaatatcaaaaagatgctatatatcgacagatgcttgagtataagcgggagaagaatactctcgagaccaagttagaagagctcgataggaagtgcctccaccacgacgaccatatacgagtcatagacgcttggtggatacaggtgttacaagaagtcgctgtactagccgatggtactgtaccgtaccaagatgagggggaccagccatttgagagaaagaccgagttccacgatatcgaggaatttgagtcgcatctgaaggagaaaggcgcgacgatcaagtctaggcttgacacgctcttttcgcaattggcaagcaatcgtgggaagatctcccccaatatcacaaacttggaatcccaggtcaacaacctcatggccaagcagaaagactatgctgtcaagctcgaacggctcacggcggagaaagagatcatgtctgataacctcaacaaggccacgctacgctacatgaaagccgagaggaagctggaccgcacaaagagcgctcaagttcagaaacttgagcaacaggccctggccaactcaactgcccgaccatctactggagaccaagagaatggcgcatctgctgacgatggaaacacgaaccatgcatcacagcaagtcgctctccaggaactcagcgcggtatctaccaagcagaaggagcagctggacgctgccttggcacagaacaaagctttacagaccgaactaacagcccttcaacttcgtctaacgagtctcacagatgaagactactctcgcacggaaactttcaagttgttcaaggcccagaacgaagaacttgtcaacaaggtcaacaatctggaggctgaacacgtcaatctcaagcaggagaagcttcagctagagaaagagagagaatcttgccgccagaagtttgagaacgaagcgcagtcttcgactgctgatctcgaagaccaactccaacaggcggatacaacattggcgagagtaagagctgcgcgagacgaactccatgctgatgtcgttaccctaaaggccagcaaagagcaagagaaaacagcactagatcacatgaaggaccttgtcagcgcgaaggatgatcgcatctcagcgttagaatccgaggtggagagattgagaactagtgaagacaccgaaatgacagccccctctgaaatcgacgatatgtcggccgatcagcttcgtgagaaatacaagaagctaaggcgagactacgaatctatcgaagctgagctacctggaatgactgccgccgttaagaagttccaagctcttgcgaacaagaaagtcatggactttgcagctcaagaagagcgagtaacaacagcgatggcggaaaagagcaaggccgaccataaatacttcaatgcacgaaaagagagcgacgcaaagattgaagagatcaagcgattgcgttgtcaaaatacaaagagctccgagatcatctcacagattaaagaaaccgaggcgcaaaatcgactattagtcacgagtcttgacaagcagatggccgatatgaagcagaccaacacctccgtcatgaatgataacaagaagctagagtcgagtacccaggacatgaccagacgattcgaggtgctaaagacacagattcaagaattgacggagctcgccaagacgaaggattccactaattcgttaacgaaggagcgggctagcagtctagaatccgaggttgagaagctcaaagtacgcctcgattcaacagccaaggaacgagagaagtggaagacgaagagccttagtaactcatccgaagaagaagaaatgctacgcagtatggctacgtgttcaatttgcaagaaggacttcaaaaacactgtcatacgaggctgtggccacatattctgtcggggatgcgttgatgacagacttgcgaatcggatgcgcaaatgtccaaactgtaataaggctttcgacaagagtgacatcatgacgattcacctctag

SEQ ID NO: 18045 - protein, 705 aa, Muscodor strobelii
  misc_feature: SGI Peptide ID NO. 566040
  misc_feature (653)..(691): Pfam Id: PF00097 Pfam Desc: Zinc finger, C3HC4 type (RING finger)
  misc_feature (457)..(552): Pfam Id: PF08647 Pfam Desc: BRE1 E3 ubiquitin ligase
  misc_feature (1)..(705): NCBI GI: 85091755 Blast Desc: ubiquitin ligase protein BRE1 [Neurospora crassa OR74A] gi|74662563|sp|Q7S304.1|BRE1_NEUCR RecName: Full=E3 ubiquitin-protein ligase bre-1 gi|28920454|gb|EAA29821.1| ligase
  misc_feature (1)..(704): NCBI GI: 46124783 Blast Desc: FG06769.1 [Gibberella zeae PH-1] gi|84027770|sp|Q4I7N9.1|BRE1_GIBZE RecName: Full=E3 ubiquitin-protein ligase BRE1
  misc_feature (1)..(704): NCBI GI: 116090835 Blast Desc: RING-12 protein [Gibberella zeae]
  misc_feature (1)..(705): NCBI GI: 154315308 Blast Desc: BC1G_04693 [Botryotinia fuckeliana B05.10] gi|150847656|gb|EDN22849.1| BC1G_04693 [Botryotinia fuckeliana B05.10]
  misc_feature (1)..(705): NCBI GI: 156037812 Blast Desc: SS1G_12620 [Sclerotinia sclerotiorum 1980] gi|154698028|gb|EDN97766.1| SS1G_12620 [Sclerotinia sclerotiorum 1980]
  misc_feature (1)..(705): NCBI GI: 171686388 Blast Desc: protein product [Podospora anserina] gi|170943155|emb|CAP68808.1| protein product [Podospora anserina]
  misc_feature (1)..(649): NCBI GI: 116207856 Blast Desc: CHGG_03221 [Chaetomium globosum CBS 148.51] gi|88183818|gb|EAQ91286.1| CHGG_03221 [Chaetomium globosum CBS 148.51]
  misc_feature (1)..(704): NCBI GI: 256733189 Blast Desc: [Nectria haematococca mpVI 77-13-4]
  misc_feature (1)..(705): NCBI GI: 110278899 Blast Desc: [Nectria haematococca mpVI 77-13-4]
  misc_feature (1)..(705): NCBI GI: 121703676 Blast Desc: histone ubiquitinationc protein (Bre1), [Aspergillus clavatus NRRL 1] gi|119398246|gb|EAW08676.1| histone ubiquitinationc protein (Bre1), [Aspergillus clavatus NRRL 1]
  misc_feature: Useful for introducing or modulating the production of volatile compounds
MEDRKRPAVNSTDDIAPPSKRQAVNGGGKIKEEADLSSETWVEEYQKDAIYRQMLEYKREKNTLETKLEELDRKCLHHDDHIRVIDAWWIQVLQEVAVLADGTVPYQDEGDQPFERKTEFHDIEEFESHLKEKGATIKSRLDTLFSQLASNRGKISPNITNLESQVNNLMAKQKDYAVKLERLTAEKEIMSDNLNKATLRYMKAERKLDRTKSAQVQKLEQQALANSTARPSTGDQENGASADDGNTNHASQQVALQELSAVSTKQKEQLDAALAQNKALQTELTALQLRLTSLTDEDYSRTETFKLFKAQNEELVNKVNNLEAEHVNLKQEKLQLEKERESCRQKFENEAQSSTADLEDQLQQADTTLARVRAARDELHADVVTLKASKEQEKTALDHMKDLVSAKDDRISALESEVERLRTSEDTEMTAPSEIDDMSADQLREKYKKLRRDYESIEAELPGMTAAVKKFQALANKKVMDFAAQEERVTTAMAEKSKADHKYFNARKESDAKIEEIKRLRCQNTKSSEIISQIKETEAQNRLLVTSLDKQMADMKQTNTSVMNDNKKLESSTQDMTRRFEVLKTQIQELTELAKTKDSTNSLTKERASSLESEVEKLKVRLDSTAKEREKWKTKSLSNSSEEEEMLRSMATCSICKKDFKNTVIRGCGHIFCRGCVDDRLANRMRKCPNCNKAFDKSDIMTIHL

SEQ ID NO: 18046 - DNA, 6257 bp, Muscodor strobelii
  misc_feature: SGI EST ID NO. CUFF.43098.1
  misc_feature: Variant of the nucleotide sequence at SEQ ID NO 18044
cctctttgatgaacttgcgtcggcactgatctcgagacttcagggggaagaaattggatatagcttcaaagtccataccgaactggccaagcagttgatagaatttctctgtttcatcgtccgaccatccgccgaaacctctcttcttcctcatatatgaatttgatgtgatcactgaagacaacaattagcaagcagcaaaaggggtaatattgtccgcagttgagggaaaggacatacgcgttgaaaaatcggtttcttccactatctccatcgcagaggtatcctgattgtgtctgtctatcacgagagactcttgtgtgaccctaatctggccattgataatctcgtaatcaaatccctcagaggcgtcgacactcatagcggctcccagctgagctagggcagctccacgctcttgacgatcggctgtgcccctgttgtctgctgaatcctgtggcgcaggcatgaggccggctcggattttttgtcgctccagtctcttgagcttgttggcagcacgtgcttctcgagctcgctgctggatctcttcggcatgtgcgaagggtttaccaatgcccaggtctttgacgagctcgccgaccgtcatcgtcgagtgatctaccttttgattcctggcatcttcgggagtcacggggcgcttgcggcgctgcttctctgggcgaggttccgtggttgctccctcgccagactcggctgctgctcgaggagcgcgtggttttctcttcttcgctggctggggttcggcgtccgctccttcgccagtgttgcccgtggcagcagcgcgtggctttctctggcgtgtcttcttaggtgcaggaccttcagcctcagtttcaccatcagttgttgccgacttgcgcttcttcggtgctggtttcttgggaagcggtcggcgagagacagcggctccttctgccgagggcgtcgatgcatttgcatccgagtccggcacaggaggtgacggggcaggggcttccggtacttgttcttgtatggcaggcgcactgggcacgttcgtgtcattctgctcgtcaatgctcggagtaggctgcctgtcttggctgtcagaacccgatgctcgtgtcggagacccgatgtcggccggcggtcgtcgggcacgggaggacgtcagcttcggcaggggagtgcgctgttggacggtgggcgaaggctgctttgtaggttcttgggagggcggaacagctgttgtagctacaggctgctccgtctgcgtattggaatccggagtgcgagaaggtggtgaagattcggctggagtaggctgtgcctgtgtactcgaactcggtttgctgcttgtaacgtcgacagtgttggctgaggtggtctcgttggcgtcgacggtagcagcaggcgcgggctgactggaggtggtgggggtgggctcttgagattctggttgagggtctggttgagattgggtcggctcggcatcagcggaggggagaggagtgggagtggtggtaggagtggtagcaggagcaggagttgtgctcgcagaagtagagctggtggtggcagggcgcgcggctccgggacgacgaccggctttgggcttgaaggacaagcctccgcccttcttgaacatggaactcatggtgacaagcgaccgtgccgggtgggcgtagctagaccaaggttgtcggcagtgcagtcatgccctcgaaaggcatctgtcgcctcttgagtgcggcggcggcgatcggaattcttcagatgctcttcattgaaaggatgcgaggacagccccgagataggaacgccagtgtgggacgggaatgagaatcgaaggactgtgcagtgctgaacaaatagacattcaaagcgcgcacatggatagaggcaaaggaaggattataaggaaggaaagaagaggtgtgactgcccctctgatggttttggtggtgcaatccttcattcaagaattagaagtcgcaacgtagaggggcagatgaattggcgattacaacggaaactttaaggtacatcgcggcatggtacgtacctacaggcaagacttcgaatgtgccaatgtctgataacctgcgataagcctccatgtcgtccaaccttacaatcggatttttacccgccgcatttgaagcccctgctcgcctgtaaaccccctgcaaagcccaattgccaaaagcccaaccaggcccggcctagtgtcaactatcctcattacactacgctgcatctgggctgggggcccaatcgaccttcaattttcgcagcagattccagtcttcgacgctggagtcttgactctttccctcccaggcccagcctggctcgggctcgcctggctccaagcaccaaggtctggtttgcagagcctggcactgactgcactgcgctgcgagtcttgccagagaccagagcaccagagcctctgcctttgcctttgcctttgccttcgacgtactgcggccgcgattaactgaggtcttctcctttgctcgtgctcaatctcattcaacccgttctcatcctcgttcccgccaacccactcgcattttccgcctgcctttcaccattctctccatcgccattccatcgcctctgtttcccctcccgtcggctctactcctgcaactgtcatcgccatcaccatcatttctcgcgcccgggcccttgctgggcggtcgccctgattcattccaccgggcacgcgtgtcctctggtgccactcctctcgccttacgcccttctttcctccaccgctctctgtgactctgccactctgcatttctctgctgtctgtgccgccgctgatcccgacacacacatgcatcctgtctgccctgtctgccctctcgcgaccacctctctgtctttctgatgcctgtgtctacatcgccttctgacgtgccgcgctccacacgggtcaagatggaagatcgcaagaggcccgccgtcaacagcaccgacgacatcgcgccccccagcaaacgccaggctgtcaacggcggcggcaagatcaaggaagaggccgacctcagcagcgaaacatgggttgaggaatatcaaaaagatgctatatatcgacagatgcttgagtataagcgggagaagaatactctcgagaccaagttagaagagctcgataggaagtgcctccaccacgacgaccatatacgagtcatagacgcttggtggatacaggtgttacaagaagtcgctgtactagccgatggtactgtaccgtaccaagatgagggggaccagccatttgagagaaagaccgagttccacgatatcgaggaatttgagtcgcatctgaaggagaaaggcgcgacgatcaagtctaggcttgacacgctcttttcgcaattggcaagcaatcgtgggaagatctcccccaatatcacaaacttggaatcccaggtcaacaacctcatggccaagcagaaagactatgctgtcaagctcgaacggctcacggcggagaaagagatcatgtctgataacctcaacaaggccacgctacgctacatgaaagccgagaggaagctggaccgcacaaagagcgctcaagttcagaaacttgagcaacaggccctggccaactcaactgcccgaccatctactggagaccaagagaatggcgcatctgctgacgatggaaacacgaaccatgcatcacagcaagtcgctctccaggaactcagcgcggtatctaccaagcagaaggagcagctggacgctgccttggcacagaacaaagctttacagaccgaactaacagcccttcaacttcgtctaacgagtctcacagatgaagactactctcgcacggaaactttcaagttgttcaaggcccagaacgaagaacttgtcaacaaggtcaacaatctggaggctgaacacgtcaatctcaagcaggagaagcttcagctagagaaagagagagaatcttgccgccagaagtttgagaacgaagcgcagtcttcgactgctgatctcgaagaccaactccaacaggcggatacaacattggcgagagtaagagctgcgcgagacgaactccatgctgatgtcgttaccctaaaggccagcaaagagcaagagaaaacagcactagatcacatgaaggaccttgtcagcgcgaaggatgatcgcatctcagcgttagaatccgaggtggagagattgagaactagtgaagacaccgaaatgacagccccctctgaaatcgacgatatgtcggccgatcagcttcgtgagaaatacaagaagctaaggcgagactacgaatctatcgaagctgagctacctggaatgactgccgccgttaagaagttccaagctcttgcgaacaagaaagtcatggactttgcagctcaagaagagcgagtaacaacagcgatggcggaaaagagcaaggccgaccataaatacttcaatgcacgaaaagagagcgacgcaaagattgaagagatcaagcgattgcgttgtcaaaatacaaagagctccgagatcatctcacagattaaagaaaccgaggcgcaaaatcgactattagtcacgagtcttgacaagcagatggccgatatgaagcagaccaacacctccgtcatgaatgataacaagaagctagagtcgagtacccaggacatgaccagacgattcgaggtgctaaagacacagattcaagaattgacggagctcgccaagacgaaggattccactaattcgttaacgaaggagcgggctagcagtctagaatccgaggttgagaagctcaaagtacgcctcgattcaacagccaaggaacgagagaagtggaagacgaagagccttagtaactcatccgaagaagaagaaatgctacgcagtatggctacgtgttcaatttgcaagaaggacttcaaaaacactgtcatacgaggctgtggccacatattctgtcggggatgcgttgatgacagacttgcgaatcggatgcgcaaatgtccaaactgtaataaggctttcgacaagagtgacatcatgacgattcacctctagataggggcctaggaggttcgcttccgcaagaattctaactgtacgatactacgacttggatggacacagtcagtggctgtatcgattgattgtacataaaacaaatggcaaatgagcagttccatgggttgggtttgtgatgagaacgatagacccccgctcatcgctgttgcatgtgtaagactattgagggcttacagaaaagggatttcggtgtagatacgcaggatagtccggtcactgagatgagagcatggctacggagaccctgtaatactaacatgtatcaataagcggcgtaatttgtccttgtcatttcgtgaatgcttgtgcttgcttatcgtccgatcgtgatcttagacatctctatctgcggcgtgttgatccgaatcctgtgctcgaccggttcgcggacgagccaagcccagaactagaggaggaaccaaatcctgagcctgatcttgaacttggtcctggatctggcccacgagagtcgttgtttccacgagcacccccataacggcctgcagcataaccagccgcggctccagctgcagtgccggaccagaaaccggggcgccatccttcttgggtccgcgaagtcttgctatatggtggcgggggatcataatagtcgtcgtagcctcctccaccggggccgaagccgggatcgaaaccaccgcctccgccacctccccatctaggccgtcgtctgcgttggtccacgggtgtgtccagcgctgtgcaaccgctgatgatgatccatcctaggacgccgacgaagatgattatgaatagccacttagctatcacgtcacctgccgtgctctcgccctctggatataggttctgtggcttctccttgggtttgctactggatccccagcctgagaaccaactatcgcccttagcgatgttgggataccgtttttcgccctcctcggttagttggagtcggtactctacgccacagctgcctttcaggacgaagggatcgtcggcgttggcgtagccttcgcagattacgtctgtggagccgagttttagctctggtggtaaggaagcctcgcaggaccactctatgtcttcttcaccgtaggatgaaccttgatttgtgcagcgcattactgtgggcgtgtagagggcgcatatttgttttgatgagacctggtgaggtttagttttacattttggagattggg

SEQ ID NO: 18047 - DNA, 1917 bp, Muscodor strobelii
  misc_feature: SGI cDNA ID NO. 566041
  misc_feature: Reduced expression when VOC is produced
  misc_feature: Encodes the peptide sequence at SEQ ID NO 18048
atgagttccatgttcaagaagggcggaggcttgtccttcaagcccaaagccggtcgtcgtcccggagccgcgcgccctgccaccaccagctctacttctgcgagcacaactcctgctcctgctaccactcctaccaccactcccactcctctcccctccgctgatgccgagccgacccaatctcaaccagaccctcaaccagaatctcaagagcccacccccaccacctccagtcagcccgcgcctgctgctaccgtcgacgccaacgagaccacctcagccaacactgtcgacgttacaagcagcaaaccgagttcgagtacacaggcacagcctactccagccgaatcttcaccaccttctcgcactccggattccaatacgcagacggagcagcctgtagctacaacagctgttccgccctcccaagaacctacaaagcagccttcgcccaccgtccaacagcgcactcccctgccgaagctgacgtcctcccgtgcccgacgaccgccggccgacatcgggtctccgacacgagcatcgggttctgacagccaagacaggcagcctactccgagcattgacgagcagaatgacacgaacgtgcccagtgcgcctgccatacaagaacaagtaccggaagcccctgccccgtcacctcctgtgccggactcggatgcaaatgcatcgacgccctcggcagaaggagccgctgtctctcgccgaccgcttcccaagaaaccagcaccgaagaagcgcaagtcggcaacaactgatggtgaaactgaggctgaaggtcctgcacctaagaagacacgccagagaaagccacgcgctgctgccacgggcaacactggcgaaggagcggacgccgaaccccagccagcgaagaagagaaaaccacgcgctcctcgagcagcagccgagtctggcgagggagcaaccacggaacctcgcccagagaagcagcgccgcaagcgccccgtgactcccgaagatgccaggaatcaaaaggtagatcactcgacgatgacggtcggcgagctcgtcaaagacctgggcattggtaaacccttcgcacatgccgaagagatccagcagcgagctcgagaagcacgtgctgccaacaagctcaagagactggagcgacaaaaaatccgagccggcctcatgcctgcgccacaggattcagcagacaacaggggcacagccgatcgtcaagagcgtggagctgccctagctcagctgggagccgctatgagtgtcgacgcctctgagggatttgattacgagattatcaatggccagattagggtcacacaagagtctctcgtgatagacagacacaatcaggatacctctgcgatggagatagtggaagaaaccgatttttcaacgctgatcacatcaaattcatatatgaggaagaagagaggtttcggcggatggtcggacgatgaaacagagaaattctatcaactgcttggccagttcggtatggactttgaagctatatccaatttcttccccctgaagtctcgagatcagtgccgacgcaagttcatcaaagaggagagaacccgtccgaaccgcgtgaatgctgcgatcatggtgcgcggggaaaagaagacagagatccctattgaggagtacaaagctacacagcttgaatggttcactaaagataagatcgaggctgaacagtctaagcttgcagcagagcataccaaagacatcgagaggctcaaggaggaacgacgccgccaaggtcttatggatgatgacgatgagaacactgctaaggacatgggaaagagtggcccgggacaggatgaagatgaggacgagattgaggaagaggacgccgatgccatgggtctgaatggtggagtcgtggagagcatcgagagcttttaa

SEQ ID NO: 18048 - protein, 638 aa, Muscodor strobelii
  misc_feature: SGI Peptide ID NO. 566041
  misc_feature (480)..(525): Pfam Id: PF00249 Pfam Desc: Myb-like DNA-binding domain
  misc_feature (1)..(600): NCBI GI: 46124781 Blast Desc: FG06768.1 [Gibberella zeae PH-1]
  misc_feature (4)..(585): NCBI GI: 39975431 Blast Desc: MGG_00138 [Magnaporthe grisea 70-15] gi|145019015|gb|EDK03294.1| MGG_00138 [Magnaporthe grisea 70-15]
  misc_feature (243)..(609): NCBI GI: 85091753 Blast Desc: NCU07543 [Neurospora crassa OR74A] gi|28920453|gb|EAA29820.1| [Neurospora crassa OR74A]
  misc_feature (250)..(585): NCBI GI: 116207854 Blast Desc: CHGG_03220 [Chaetomium globosum CBS 148.51] gi|88183817|gb|EAQ91285.1| CHGG_03220 [Chaetomium globosum CBS 148.51]
  misc_feature (322)..(575): NCBI GI: 154315306 Blast Desc: BC1G_04692 [Botryotinia fuckeliana B05.10] gi|150847655|gb|EDN22848.1| BC1G_04692 [Botryotinia fuckeliana B05.10]
  misc_feature (342)..(593): NCBI GI: 261354039 Blast Desc: conserved [Verticillium albo-atrum VaMs.102]
  misc_feature (300)..(576): NCBI GI: 156037814 Blast Desc: SS1G_12621 [Sclerotinia sclerotiorum 1980] gi|154698029|gb|EDN97767.1| SS1G_12621 [Sclerotinia sclerotiorum 1980]
  misc_feature (314)..(590): NCBI GI: 226285714 Blast Desc: conserved [Paracoccidioides brasiliensis Pb01]
  misc_feature (286)..(598): NCBI GI: 169626333 Blast Desc: SNOG_16451 [Phaeosphaeria nodorum SN15] gi|111055029|gb|EAT76149.1| SNOG_16451 [Phaeosphaeria nodorum SN15]
  misc_feature (302)..(590): NCBI GI: 225678535 Blast Desc: conserved [Paracoccidioides brasiliensis Pb03]
  misc_feature: Useful for introducing or modulating the production of volatile compounds
MSSMFKKGGGLSFKPKAGRRPGAARPATTSSTSASTTPAPATTPTTTPTPLPSADAEPTQSQPDPQPESQEPTPTTSSQPAPAATVDANETTSANTVDVTSSKPSSSTQAQPTPAESSPPSRTPDSNTQTEQPVATTAVPPSQEPTKQPSPTVQQRTPLPKLTSSRARRPPADIGSPTRASGSDSQDRQPTPSIDEQNDTNVPSAPAIQEQVPEAPAPSPPVPDSDANASTPSAEGAAVSRRPLPKKPAPKKRKSATTDGETEAEGPAPKKTRQRKPRAAATGNTGEGADAEPQPAKKRKPRAPRAAAESGEGATTEPRPEKQRRKRPVTPEDARNQKVDHSTMTVGELVKDLGIGKPFAHAEEIQQRAREARAANKLKRLERQKIRAGLMPAPQDSADNRGTADRQERGAALAQLGAAMSVDASEGFDYEIINGQIRVTQESLVIDRHNQDTSAMEIVEETDFSTLITSNSYMRKKRGFGGWSDDETEKFYQLLGQFGMDFEAISNFFPLKSRDQCRRKFIKEERTRPNRVNAAIMVRGEKKTEIPIEEYKATQLEWFTKDKIEAEQSKLAAEHTKDIERLKEERRRQGLMDDDDENTAKDMGKSGPGQDEDEDEIEEEDADAMGLNGGVVESIESF

SEQ ID NO: 18049 - DNA, 7763 bp, Muscodor strobelii; identical to SEQ ID NO: 18043
  misc_feature: SGI EST ID NO. CUFF.43097.0
  misc_feature: Variant of the nucleotide sequence at SEQ ID NO 18047

SEQ ID NO: 18050 - DNA, 1116 bp, Muscodor strobelii
  misc_feature: SGI cDNA ID NO. 566042
  misc_feature: Reduced expression when VOC is produced
  misc_feature: Encodes the peptide sequence at SEQ ID NO 18051
atgaagatcacgttcaaggatctcaagcagaataagttctctatcgacatcgagcccaccgatctcgtctccactctaaagagcaagatcgaggcccaggagaagctcaatgccaagcaactcaagctcatttactctggcaagatcctcaaagatgaggacaaggtcgaggtctataagatcgaggagaagggcttcgttgtctgcatggttagcaagcccaaagccgctcccgctgccacacccgctccagccgccgcttcgtcgagtgccgtccccgagacgcctgcccgagctgcctcctcgactcctgcggctcctgccgccccttctcactccgccgtaaataccagtgctgcacctcccgcgactccctctccggcctccgctgctcctagtcaggctcccggcgacggctccatggccatgggcgccgagcgagaaggtgtcattgccaacatggaagctatgggtttcgagcgttcccagatcgaagccgctctccgcgccgcgttctacaaccctgaccgcgctgttgagtacctattgactggcatccccgagagcgccagatcacagcagccccagccagcccaggccgcttcgtctgccagatccccggcagccgccccagctgctcccgctacccagaccgccagcgctcctgagggcgatgacaactttgtcaacctcttcgacctcgctgcccagaatgcacagggcggaaaccggggcggacctgctggagctggacagggcgctggagccggagccggagttagggacctcggtaatcttgatttcttgcgcaacaacccccagttccagcaacttcgtcaggttgtccaacaacaaccacagatgctcgagcccatcctccagcagctcggagcaggtaatcctcagcttgctcagcttatttcgcagcaccctgagcagttcctgcagttgcttggagaggatgaggaggagcgcgacgctatcgagagactgtgccgacttggctttgaccgagatgccgccatccaggcctactttgcctgtgacaagaacgaggagcttgctgccaatttcctcttcgatcagccagacgacgacgagcccgctgcacagtaa

SEQ ID NO: 18051 - protein, 371 aa, Muscodor strobelii
  misc_feature: SGI Peptide ID NO. 566042
  misc_feature (323)..(359): Pfam Id: PF00627 Pfam Desc: UBA/TS-N domain
  misc_feature (146)..(182): Pfam Id: PF00627 Pfam Desc: UBA/TS-N domain
  misc_feature (6)..(75): Pfam Id: PF00240 Pfam Desc: Ubiquitin family
  misc_feature (266)..(324): Pfam Id: PF09280 Pfam Desc: XPC-binding domain
  misc_feature (1)..(367): NCBI GI: 261354040 Blast Desc: nucleotide excision repair protein RAD23 [Verticillium albo-atrum VaMs.102]
  misc_feature (1)..(367): NCBI GI: 256733190 Blast Desc: NECHADRAFT_60284 [Nectria haematococca mpVI 77-13-4]
  misc_feature (1)..(367): NCBI GI: 116207852 Blast Desc: CHGG_03219 [Chaetomium globosum CBS 148.51] gi|88183816|gb|EAQ91284.1| CHGG_03219 [Chaetomium globosum CBS 148.51]
  misc_feature (1)..(367): NCBI GI: 154292520 Blast Desc: nucleotide excision repair protein RAD23 [Botryotinia fuckeliana B05.10] gi|150846096|gb|EDN21289.1| nucleotide excision repair protein RAD23 [Botryotinia fuckeliana B05.10]
  misc_feature (1)..(367): NCBI GI: 115438372 Blast Desc: conserved [Aspergillus terreus NIH2624] gi|114188864|gb|EAU30564.1| conserved [Aspergillus terreus NIH2624]
  misc_feature (1)..(365): NCBI GI: 189195060 Blast Desc: DNA repair protein RAD23-like protein [Pyrenophora tritici-repentis Pt-1C-BFP] gi|187979747|gb|EDU46373.1| DNA repair protein RAD23-like protein [Pyrenophora tritici-repentis
  misc_feature (1)..(368): NCBI GI: 164423937 Blast Desc: NCU07542 [Neurospora crassa OR74A] gi|157070296|gb|EAA29819.2| conserved [Neurospora crassa OR74A]
  misc_feature (1)..(369): NCBI GI: 46124779 Blast Desc: FG06767.1 [Gibberella zeae PH-1]
  misc_feature (1)..(365): NCBI GI: 121712652 Blast Desc: UV excision repair protein (RadW), [Aspergillus clavatus NRRL 1] gi|119402090|gb|EAW12511.1| UV excision repair protein (RadW), [Aspergillus clavatus NRRL 1]
  misc_feature (1)..(365): NCBI GI: 225562098 Blast Desc: nucleotide excision repair protein RAD23 [Ajellomyces capsulatus G186AR]
  misc_feature: Useful for introducing or modulating the production of volatile compounds
MKITFKDLKQNKFSIDIEPTDLVSTLKSKIEAQEKLNAKQLKLIYSGKILKDEDKVEVYKIEEKGFVVCMVSKPKAAPAATPAPAAASSSAVPETPARAASSTPAAPAAPSHSAVNTSAAPPATPSPASAAPSQAPGDGSMAMGAEREGVIANMEAMGFERSQIEAALRAAFYNPDRAVEYLLTGIPESARSQQPQPAQAASSARSPAAAPAAPATQTASAPEGDDNFVNLFDLAAQNAQGGNRGGPAGAGQGAGAGAGVRDLGNLDFLRNNPQFQQLRQVVQQQPQMLEPILQQLGAGNPQLAQLISQHPEQFLQLLGEDEEERDAIERLCRLGFDRDAAIQAYFACDKNEELAANFLFDQPDDDEPAAQ

SEQ ID NO: 18052 - DNA, 2095 bp, Muscodor strobelii
  misc_feature: SGI EST ID NO. CUFF.42574.0
  misc_feature: Variant of the nucleotide sequence at SEQ ID NO 18050
tgcggtttcttcctgtaacaataggactcagtctgagcttctttatttgacaaatgggccagctccagctagtcaggtaggtacgtgaggcctgggtaggagtagcagctgcctctgacggtacctacgaaagtgtgtgtaaggcggccgtgccccacttggcccaaaaagccagacctcgctgctgttgcccatcccgcatccagaactgcacctcttatttaattccatcattgccttacggcgacatcccacacactacatcacaacaccacaacaacaccacatcgcggccctccacgcccctctcttctgtcctcaccctcgccaactcccaccgcacttccgcacaccctcacgcccgctgcagctgtcgacaggctgcacccaccgccaacatgaagatcacgttcaaggatctcaagcagaataagttctctatcgacatcgagcccaccgatctcgtctccactctaaagagcaagatcgaggcccaggagaagctcaatgccaagcaactcaagctcatttactctggcaagatcctcaaagatgaggacaaggtcgaggtctataagatcgaggagaagggcttcgttgtctgcatggttagcaagcccaaagccgctcccgctgccacacccgctccagccgccgcttcgtcgagtgccgtccccgagacgcctgcccgagctgcctcctcgactcctgcggctcctgccgccccttctcactccgccgtaaataccagtgctgcacctcccgcgactccctctccggcctccgctgctcctagtcaggctcccggcgacggctccatggccatgggcgccgagcgagaaggtgtcattgccaacatggaagctatgggtttcgagcgttcccagatcgaagccgctctccgcgccgcgttctacaaccctgaccgcgctgttgagtacctattgactggcatccccgagagcgccagatcacagcagccccagccagcccaggccgcttcgtctgccagatccccggcagccgccccagctgctcccgctacccagaccgccagcgctcctgagggcgatgacaactttgtcaacctcttcgacctcgctgcccagaatgcacagggcggaaaccggggcggacctgctggagctggacagggcgctggagccggagccggagttagggacctcggtaatcttgatttcttgcgcaacaacccccagttccagcaacttcgtcaggttgtccaacaacaaccacagatgctcgagcccatcctccagcagctcggagcaggtaatcctcagcttgctcagcttatttcgcagcaccctgagcagttcctgcagttgcttggagaggatggtgacgatgacgccccccctccctcctggcgcccaagcaatcagtgtgacagaggaggagcgcgacgctatcgagagactgtgccgacttggctttgaccgagatgccgccatccaggcctactttgcctgtgacaagaacgaggagcttgctgccaatttcctcttcgatcagccagacgacgacgagcccgctgcacagtaagcgggggaaagagaatggttcagttgtgtttatcgcgcccacagggcagcgaattctgcagatcgcccgagggcgaaaggggcatgattctatgatatccacgtaattctcgcaagagactcattacgctttctctctggcttcttttcggttctccaggaaaactggagatatacagctatggcgtacggtcgtaagcagggtacgaattaagcgggagagagaaaacacgcaagttccggggcaatgtgtttcgggacaaaatcaggaaagtcttgatgccggtcgtggggtagctagccataggctagatgctacattagcaacgagaataaatgaagtaagagagaacttgtcattattaatccatgatagcgtaaccattgaaatggtgcagcgtgagcgcccatacacttggaagacgtatgttgggaggctatgtatgtactctttacgtgatgttttgatggaagtatgtatacgtcgaatcacaatgtctcctaagtgacaagatagaagtgtgtagtca

SEQ ID NO: 18053 - DNA, 654 bp, Muscodor strobelii
  misc_feature: SGI cDNA ID NO. 566043
  misc_feature: Encodes the peptide sequence at SEQ ID NO 18054
atgaagttcctcaacatcgtagccattgctacttccgtagctgcctatgtcatcgacacctcattctcaagccaggaagaagcagggttggtatctcggcatcacgcaggaaggcaaggcggaaaaaatagaaatggcaatggtaatgcaaacaacaatggaaacacgaacaataatggtgcagctaccggtggcgctgttgccgatggaaatacgtcgactaccgacgcagcaacaggacaaactgttgtcttgacagagatcaatggcgtccctggaaatgaatgtctgactttccgaaataatggtgaaatcgttgacgctgcatgcgtcaacgaggcagcagacaggcagatgaccccaacaaccgtgaacggagccgacgccttacaagttcaacgaagtttcgatgctggctttagggcagatctcgtgggcgtgcaagcgtgtgttggattcaacggcactcatttccgcgcatctgactgtgctgattcaaacatcgaactggtttctttcactggaggtgaattgcgagcaacaggaggcgcctgcgctagtggccacgatgatcttgcacaaatgacagttgacacagcaggacagacttgcgctcagtacacaagcacatcagttacccctacagcaccataa

SEQ ID NO: 18054 - protein, 217 aa, Muscodor strobelii
  misc_feature: SGI Peptide ID NO. 566043
  misc_feature (81)..(214): NCBI GI: 212533091 Blast Desc: PMAA_072350 [Penicillium marneffei ATCC 18224] gi|210072066|gb|EEA26155.1| PMAA_072350 [Penicillium marneffei ATCC 18224]
  misc_feature (82)..(217): NCBI GI: 171689968 Blast Desc: protein product [Podospora anserina] gi|170944946|emb|CAP71057.1| protein product [Podospora anserina]
MKFLNIVAIATSVAAYVIDTSFSSQEEAGLVSRHHAGRQGGKNRNGNGNANNNGNTNNNGAATGGAVADGNTSTTDAATGQTVVLTEINGVPGNECLTFRNNGEIVDAACVNEAADRQMTPTTVNGADALQVQRSFDAGFRADLVGVQACVGFNGTHFRASDCADSNIELVSFTGGELRATGGACASGHDDLAQMTVDTAGQTCAQYTSTSVTPTAP

SEQ ID NO: 18055 - DNA, 593 bp, Muscodor strobelii
  misc_feature: SGI EST ID NO. CUFF.42566.0
  misc_feature: Variant of the nucleotide sequence at SEQ ID NO 18053
gcagcagacaggcagatgaccccaacaaccgtgaacggagccgacgccttacaagttcaacgaagtttcgatgctggctttagggcagatctcgtgggcgtgcaagcgtgtgttggattcaacggcactcatttccgcgcatctgactgtgctgattcaaacatcgaactggtttctttcactggaggtgaattgcgagcaacaggaggcgcctgcgctagtggccacgatgatcttgcacaaatgacagttgacacagcaggacagacttgcgctcagtacacaagcacatcagttacccctacagcaccataaacagctttgtacagaggattgtttcttgcggctgagctcggaatccatgtggtgcagttcaacctctcatgtcttctagaatgcataacatacagccacgacacaacaatcaaagacaaagaaatatgtgtaatcagaagacaaataatacgagggagatgctaaagagaaatctcgagagcttcaaaatgcatggtctctgtttcatgttagctgcattaatgaactgctgctgtgaagtcgggatagatccatggataccgtaccagatctggctg

SEQ ID NO: 18056 - DNA, 654 bp, Muscodor strobelii
  misc_feature: SGI cDNA ID NO. 566044
  misc_feature: Reduced expression when VOC is produced
  misc_feature: Encodes the peptide sequence at SEQ ID NO 18057
atgtctaaaatcacagtcgccggagtgcgtacccaggtcggggagctcctcgaatactctctcgagaccaagaagcgcaatttcctcgagaccgtcgagcttcagatcggcctcaagaactatgaccctcagcgtgacaagcgtttctccggcaccatcaagctgccctcgatcccccgccccaacatggccatctgcattctcggtgaccagcacgatatcgatcgtgccaagcacggcggagttgatgcgatgtctgccgacgacttgaagaagctcaacaagaacaagaagcttatcaagaagctcgctcgcaagtacgacgcattcgtcgcttccgagactctgatcaagcagattccccgtctcttgggtcccggtctgtccaaggctggcaagttccccacccccgtctcccacgccgacgaccttactggcaagatcaacgaggtcaagtccaccatcaagttccagctcaagaaggttctttgcatgggtgtcgccgtcggcaatgtcggtatgacccaggaggagctcgtcggcaacatcatgttggctatcaactaccttgtctcgctgctgaagaagggctggcagaacgtcggtagcttgaccatcaaggctaccatgtctcctcctaagcgtctctactaa

SEQ ID NO: 18057 - protein, 217 aa, Muscodor strobelii
  misc_feature: SGI Peptide ID NO. 566044
  misc_feature (10)..(213): Pfam Id: PF00687 Pfam Desc: Ribosomal protein L1p/L10e family
  misc_feature (22)..(213): Pfam Id: PF00687 Pfam Desc: Ribosomal protein L1p/L10e family
  misc_feature (1)..(217): NCBI GI: 46125093 Blast Desc: FG06924.1 [Gibberella zeae PH-1]
  misc_feature (1)..(217): NCBI GI: 256733141 Blast Desc: [Nectria haematococca mpVI 77-13-4]
  misc_feature (1)..(217): NCBI GI: 85086835 Blast Desc: 60S ribosomal protein L10a [Neurospora crassa OR74A] gi|51701796|sp|Q7RZS0.1|RL10A_NEUCR RecName: Full=60S ribosomal protein L10a gi|28918860|gb|EAA28529.1| 60S ribosomal protein
  misc_feature (1)..(217): NCBI GI: 145614482 Blast Desc: MGG_04696 [Magnaporthe grisea 70-15] gi|145021400|gb|EDK05529.1| MGG_04696 [Magnaporthe grisea 70-15]
  misc_feature (1)..(217): NCBI GI: 50313412 Blast Desc: 60S ribosomal protein L10A [Chaetomium globosum]
  misc_feature (1)..(217): NCBI GI: 171686044 Blast Desc: protein product [Podospora anserina] gi|170942983|emb|CAP68636.1| protein product [Podospora anserina]
  misc_feature (1)..(217): NCBI GI: 156065049 Blast Desc: 60S ribosomal protein L1 [Sclerotinia sclerotiorum 1980] gi|154691394|gb|EDN91132.1| 60S ribosomal protein L1 [Sclerotinia sclerotiorum 1980]
  misc_feature (1)..(217): NCBI GI: 154320003 Blast Desc: 60S ribosomal protein L10a [Botryotinia fuckeliana B05.10] gi|150854721|gb|EDN29913.1| 60S ribosomal protein L10a [Botryotinia fuckeliana B05.10]
  misc_feature (1)..(217): NCBI GI: 261358187 Blast Desc: 60S ribosomal protein L10a [Verticillium albo-atrum VaMs.102]
  misc_feature (1)..(217): NCBI GI: 119184370 Blast Desc: CIMG_07001 [Coccidioides immitis RS] gi|240109859|gb|EER28028.1| 60S ribosomal protein L10A, [Coccidioides posadasii C735 delta SOWgp]
  misc_feature: Useful for introducing or modulating the production of volatile compounds
MSKITVAGVRTQVGELLEYSLETKKRNFLETVELQIGLKNYDPQRDKRFSGTIKLPSIPRPNMAICILGDQHDIDRAKHGGVDAMSADDLKKLNKNKKLIKKLARKYDAFVASETLIKQIPRLLGPGLSKAGKFPTPVSHADDLTGKINEVKSTIKFQLKKVLCMGVAVGNVGMTQEELVGNIMLAINYLVSLLKKGWQNVGSLTIKATMSPPKRLY

SEQ ID NO: 18058 - DNA, 935 bp, Muscodor strobelii
  misc_feature: SGI EST ID NO. CUFF.42583.0
  misc_feature: Variant of the nucleotide sequence at SEQ ID NO 18056
ggcaaaatagctaaaatcatagacggcagttaacctttgttgtctccttccttcctcttctcaactctaaccatcgcaacaatccacaccattagattctatctactggaagactgtcaccatgtctaaaatcacagtcgccggagtgcgtacccaggtcggggagctcctcgaatactctctcgagaccaagaagcgcaatttcctcgagaccgtcgagcttcagatcggcctcaagaactatgaccctcagcgtgacaagcgtttctccggcaccatcaagctgccctcgatcccccgccccaacatggccatctgcattctcggtgaccagcacgatatcgatcgtgccaagcacggcggagttgatgcgatgtctgccgacgacttgaagaagctcaacaagaacaagaagcttatcaagaagctcgctcgcaagtacgacgcattcgtcgcttccgagactctgatcaagcagattccccgtctcttgggtcccggtctgtccaaggctggcaagttccccacccccgtctcccacgccgacgaccttactggcaagatcaacgaggtcaagtccaccatcaagttccagctcaagaaggttctttgcatgggtgtcgccgtcggcaatgtcggtatgacccaggaggagctcgtcggcaacatcatgttggctatcaactaccttgtctcgctgctgaagaagggctggcagaacgtcggtagcttgaccatcaaggctaccatgtctcctcctaagcgtctctactaagcgaccatctggaggtcatgggaggatgtaggaatggttatcacgaatctttggcgctgctgttaaatcagacgtgccacaacttctagcattcagatagtcaatcgcactgaaccttccaacccaatttgaaatccccataagcataaattgtgatgcg

SEQ ID NO: 18059 - DNA, 1230 bp, Muscodor strobelii
  misc_feature: SGI cDNA ID NO. 566045
  misc_feature: Encodes the peptide sequence at SEQ ID NO 18060
atgagcgcatcaattccagacctaccggtcctcgatcacgacgactctatgttgtcacgtaaattcggccgcgaggttatcaactacttctccggcagtcctcttaatcgtgtttccttcttgcggacagatcacgcctttttgaatgcagcgtttgctcatcccacgacgtctttcttactgctcgacaactactcaccgcttgctaaagataccgccaatcttgcctatgtgtcaagagaagacatcacaccgctcacaggaccagagcccttcacaaaaactgaagaagaacagataaagcaatttaattcgaccatcactcagccgctcatactatttctcggtcttgacgagaagaagcagacaggcttcgagtatcgtgactacaaaggtagcccatattttgcaatcgatattactcccaaaggttctactcaagacacggccaagaatgtgattgagagcgtcaaaacaaaatatggattatcctttacaccagggggccgattacttaccctcaatgctcctgaagccgccatttatgcacaagcgcgtgcattgctcgactggaatgctcgaaatccattctgcggcggatgtgggaagcgtacgatgtccattaatgcaggcacaaagcgtgtatgcccgccaactgaccttgccggtgttcccgaaggcggagagcccacgcaacgagaagactgccccacacggaaaggcatcagtaacctctgcttccccagaactgacccgactgtaatcatggcgattgtgtcggcagacggaacaaaactgcttcttggtcgcggtaagcggtaccccccaggttggtacagcaccttggctggctttcttgaaccaggagagtcgattgaagaagccgtccgccgcgagacgtgggaagaggctggtgttcatgttggccgcgtcgtaatacatagttcgcaaccatggccatatcctgcgaaccttatggttggtgccatcggccaagccaaacccgacggcgagactatcaacctgggtaatgatcctgaactcgaggatgccaagtggtatccgttggacgaggttagggaagctctgatgaagggaggtactgccttggatgcccccatgaccgaagaggataaagggaaactccgcatacctccacagaccgcaattgccaatcgcttgatgaacgctgttgtggagggctatctaggagaaagcccaaaaatttga

SEQ ID NO: 18060 - protein, 409 aa, Muscodor strobelii
  misc_feature: SGI Peptide ID NO. 566045
  misc_feature (250)..(378): Pfam Id: PF00293 Pfam Desc: NUDIX domain
  misc_feature (56)..(191): Pfam Id: PF09296 Pfam Desc: NADH pyrophosphatase-like rudimentary NUDIX domain
  misc_feature (193)..(224): Pfam Id: PF09297 Pfam Desc: NADH pyrophosphatase zinc ribbon domain
  misc_feature (6)..(409): NCBI GI: 156050243 Blast Desc: SS1G_07708 [Sclerotinia sclerotiorum 1980] gi|154692109|gb|EDN91847.1| SS1G_07708 [Sclerotinia sclerotiorum 1980]
  misc_feature (6)..(409): NCBI GI: 154317780 Blast Desc: BC1G_02873 [Botryotinia fuckeliana B05.10] gi|150843531|gb|EDN18724.1| BC1G_02873 [Botryotinia fuckeliana B05.10]
  misc_feature (1)..(409): NCBI GI: 169624535 Blast Desc: SNOG_15528 [Phaeosphaeria nodorum SN15] gi|111056073|gb|EAT77193.1| SNOG_15528 [Phaeosphaeria nodorum SN15]
  misc_feature (6)..(409): NCBI GI: 189209998 Blast Desc: NADH pyrophosphatase [Pyrenophora tritici-repentis Pt-1C-BFP] gi|187977424|gb|EDU44050.1| NADH pyrophosphatase [Pyrenophora tritici-repentis Pt-1C-BFP]
  misc_feature (4)..(401): NCBI GI: 226277721 Blast Desc: peroxisomal NADH pyrophosphatase NUDT12 [Paracoccidioides brasiliensis Pb01]
  misc_feature (6)..(401): NCBI GI: 119498881 Blast Desc: NADH pyrophosphatase, [Neosartorya fischeri NRRL 181] gi|119414362|gb|EAW24301.1| NADH pyrophosphatase, [Neosartorya fischeri NRRL 181]
  misc_feature (3)..(401): NCBI GI: 255955721 Blast Desc: Pc21g16050 [Penicillium chrysogenum Wisconsin 54-1255] gi|211590324|emb|CAP96502.1| Pc21g16050 [Penicillium chrysogenum Wisconsin 54-1255]
  misc_feature (4)..(401): NCBI GI: 226287237 Blast Desc: peroxisomal NADH pyrophosphatase NUDT12 [Paracoccidioides brasiliensis Pb18]
  misc_feature (2)..(402): NCBI GI: 171686046 Blast Desc: protein product [Podospora anserina] gi|170942984|emb|CAP68637.1| protein product [Podospora anserina]
  misc_feature (4)..(401): NCBI GI: 225683612 Blast Desc: NADH pyrophosphatase [Paracoccidioides brasiliensis Pb03]
  misc_feature (28)..(397): SWISSPROT Homolog: EC 3.6.1.22 NAD(+) diphosphatase
MSASIPDLPVLDHDDSMLSRKFGREVINYFSGSPLNRVSFLRTDHAFLNAAFAHPTTSFLLLDNYSPLAKDTANLAYVSREDITPLTGPEPFTKTEEEQIKQFNSTITQPLILFLGLDEKKQTGFEYRDYKGSPYFAIDITPKGSTQDTAKNVIESVKTKYGLSFTPGGRLLTLNAPEAAIYAQARALLDWNARNPFCGGCGKRTMSINAGTKRVCPPTDLAGVPEGGEPTQREDCPTRKGISNLCFPRTDPTVIMAIVSADGTKLLLGRGKRYPPGWYSTLAGFLEPGESIEEAVRRETWEEAGVHVGRVVIHSSQPWPYPANLMVGAIGQAKPDGETINLGNDPELEDAKWYPLDEVREALMKGGTALDAPMTEEDKGKLRIPPQTAIANRLMNAVVEGYLGESPKI

SEQ ID NO: 18061 - DNA, 1591 bp, Muscodor strobelii
  misc_feature: SGI EST ID NO. CUFF.42614.0
  misc_feature: Variant of the nucleotide sequence at SEQ ID NO 18059
cccgtcagtcccgcgttaggttgggggtagatgaacttctcacttgatatctgctaacatctcacggtcattatcctgcttactcgcttaatgcgttgtattttatgattacaaacactatatacaaaaagcctacttctgacactgagttcttcacaattcgttgtttgttctcgccttaaatgagcgcatcaattccagacctaccggtcctcgatcacgacgactctatgttgtcacgtaaattcggccgcgaggttatcaactacttctccggcagtcctcttaatcgtgtttccttcttgcggacagatcacgcctttttgaatgcagcgtttgctcatcccacgacgtctttcttactgctcgacaactactcaccgcttgctaaagataccgccaatcttgcctatgtgtcaagagaagacatcacaccgctcacaggaccagagcccttcacaaaaactgaagaagaacagataaagcaatttaattcgaccatcactcagccgctcatactatttctcggtcttgacgagaagaagcagacaggcttcgagtatcgtgactacaaaggtagcccatattttgcaatcgatattactcccaaaggttctactcaagacacggccaagaatgtgattgagagcgtcaaaacaaaatatggattatcctttacaccagggggccgattacttaccctcaatgctcctgaagccgccatttatgcacaagcgcgtgcattgctcgactggaatgctcgaaatccattctgcggcggatgtgggaagcgtacgatgtccattaatgcaggcacaaagcgtgtatgcccgccaactgaccttgccggtgttcccgaaggcggagagcccacgcaacgagaagactgccccacacggaaaggcatcagtaacctctgcttccccagaactgacccgactgtaatcatggcgattgtgtcggcagacggaacaaaactgcttcttggtcgcggtaagcggtaccccccaggttggtacagcaccttggctggctttcttgaaccaggagagtcgattgaagaagccgtccgccgcgagacgtgggaagaggctggtgttcatgttggccgcgtcgtaatacatagttcgcaaccatggccatatcctgcgaaccttatggttggtgccatcggccaagccaaacccgacggcgagactatcaacctgggtaatgatcctgaactcgaggatgccaagtggtatccgttggacgaggttagggaagctctgatgaagggaggtactgccttggatgcccccatgaccgaagaggataaagggaaactccgcatacctccacagaccgcaattgccaatcgcttgatgaacgctgttgtggagggctatctaggagaaagcccaaaaatttgagagaatgggcattatatcatccgataaggtcaatttgcacaagtatgcactgctcttttttcacgtctatagatctgatcgggtctacgttgaatcattggatagaccctcttgctcttgatatacaatagacagaacgctgcaagatgcatcacttctagatgcataatatacaatca

SEQ ID NO: 18062 - DNA, 678 bp, Muscodor strobelii
  misc_feature: SGI cDNA ID NO. 566046
  misc_feature: Elevated expression when VOC is produced
  misc_feature: Encodes the peptide sequence at SEQ ID NO 18063
atgactgccaacgactctcccttcacgcttcgagcggagcctggaacagacatttggaggaagcccccttcaactgatatctggaatgcccctatatcacggactgtgtcgggggaacttacgaaattcagttcggcccgcgtgactttctgggcaccatggactgagcgatatgatcaagccggtctccttcttgtcccaaaacgttcctcggatcccaaaaccaggcaatcgggagcgcctgagaaatggatcaaaacaggcattgagtattaccagtcgaagccccacctttctaccgtaggttgcgatcgttacgcagactggagcattggaccgttaacaaccacaattgatccagctaaagtaagtaatttaccggccacatatgacaacccacatcctcgtctcagcatttggaactctggtgtgacgctagaagtcaggcgagagggggatgaacatggcaaatctatctggatatatcagctcgtacttgatggtagcggtgaagttgttgaacgccttccgctccgcgaggtttgttggatttttgccgatgagcaagatggcgactggacgcttgaagttagccccctgattgcgcgacctgagaagaacgccacaggagtgctagaagctgagttcacggagtttatcgtcaaatgggacacgtga

SEQ ID NO: 18063 - protein, 225 aa, Muscodor strobelii
  misc_feature: SGI Peptide ID NO. 566046
  misc_feature (8)..(224): NCBI GI: 261352919 Blast Desc: conserved [Verticillium albo-atrum VaMs.102]
  misc_feature (8)..(224): NCBI GI: 85082521 Blast Desc: NCU04522 [Neurospora crassa OR74A] gi|28918014|gb|EAA27697.1| [Neurospora crassa OR74A]
  misc_feature (1)..(222): NCBI GI: 154305080 Blast Desc: BC1G_08630 [Botryotinia fuckeliana B05.10] gi|150853793|gb|EDN28985.1| BC1G_08630 [Botryotinia fuckeliana B05.10]
  misc_feature (4)..(223): NCBI GI: 171691420 Blast Desc: protein product [Podospora anserina] gi|170945658|emb|CAP71771.1| protein product [Podospora anserina]
  misc_feature (1)..(222): NCBI GI: 156045317 Blast Desc: SS1G_09847 [Sclerotinia sclerotiorum 1980] gi|154694242|gb|EDN93980.1| SS1G_09847 [Sclerotinia sclerotiorum 1980]
  misc_feature (5)..(225): NCBI GI: 256723134 Blast Desc: NECHADRAFT_42618 [Nectria haematococca mpVI 77-13-4]
  misc_feature (6)..(223): NCBI GI: 39975479 Blast Desc: MGG_00114 [Magnaporthe grisea 70-15] gi|145019042|gb|EDK03321.1| MGG_00114 [Magnaporthe grisea 70-15]
  misc_feature (5)..(224): NCBI GI: 46116322 Blast Desc: FG04003.1 [Gibberella zeae PH-1]
  misc_feature (8)..(223): NCBI GI: 116195416 Blast Desc: CHGG_04306 [Chaetomium globosum CBS 148.51] gi|88180219|gb|EAQ87687.1| CHGG_04306 [Chaetomium globosum CBS 148.51]
  misc_feature (2)..(220): NCBI GI: 189190936 Blast Desc: conserved [Pyrenophora tritici-repentis Pt-1C-BFP] gi|187973413|gb|EDU40912.1| conserved [Pyrenophora tritici-repentis Pt-1C-BFP]
  misc_feature: Useful for introducing or modulating the production of volatile compounds
MTANDSPFTLRAEPGTDIWRKPPSTDIWNAPISRTVSGELTKFSSARVTFWAPWTERYDQAGLLLVPKRSSDPKTRQSGAPEKWIKTGIEYYQSKPHLSTVGCDRYADWSIGPLTTTIDPAKVSNLPATYDNPHPRLSIWNSGVTLEVRREGDEHGKSIWIYQLVLDGSGEVVERLPLREVCWIFADEQDGDWTLEVSPLIARPEKNATGVLEAEFTEFIVKWDT

SEQ ID NO: 18064 - DNA, 531 bp, Muscodor strobelii
  misc_feature: SGI EST ID NO. CUFF.42585.0
  misc_feature: Variant of the nucleotide sequence at SEQ ID NO 18062
cggagttgacattttggggaaaaagtggccccaacgaccactcctcttatatactcacttgtactatttaacgaagtatataagagagcacgtcggcatttacatccactatctgtcaattctacgctattcattcgtatgacagtcttgaacgagtagtaattattcattctatcatgactgccaacgactctcccttcacgcttcgagcggagcctggaacagacatttggaggaagcccccttcaactgatatctggaatgcccctatatcacggactgtgtcgggggaacttacgaaattcagttcggcccgcgtgactttctgggcaccatggactgagcgatatgatcaagccggtctccttcttgtcccaaaacgttcctcggatcccaaaaccaggcaatcgggagcgcctgagaaatggatcaaaacaggcattgagtattaccagtcgaagccccacctttctaccgtaggttgcgatcgttacgcagactggagcattggaccgttaacaaccacaattg

SEQ ID NO: 18065 - DNA, 690 bp, Muscodor strobelii
  misc_feature: SGI cDNA ID NO. 566047
  misc_feature: Encodes the peptide sequence at SEQ ID NO 18066
atgactgccaacgactctcccttcacgcttcgagcggagcctggaacagacatttggaggaagcccccttcaactgatatctggaatgtatacttctcagcccctatatcacggactgtgtcgggggaacttacgaaattcagttcggcccgcgtgactttctgggcaccatggactgagcgatatgatcaagccggtctccttcttgtcccaaaacgttcctcggatcccaaaaccaggcaatcgggagcgcctgagaaatggatcaaaacaggcattgagtattaccagtcgaagccccacctttctaccgtaggttgcgatcgttacgcagactggagcattggaccgttaacaaccacaattgatccagctaaagtaagtaatttaccggccacatatgacaacccacatcctcgtctcagcatttggaactctggtgtgacgctagaagtcaggcgagagggggatgaacatggcaaatctatctggatatatcagctcgtacttgatggtagcggtgaagttgttgaacgccttccgctccgcgaggtttgttggatttttgccgatgagcaagatggcgactggacgcttgaagttagccccctgattgcgcgacctgagaagaacgccacaggagtgctagaagctgagttcacggagtttatcgtcaaatgggacacgtga

SEQ ID NO: 18066 - protein, 229 aa, Muscodor strobelii
  misc_feature: SGI Peptide ID NO. 566047
  misc_feature (8)..(228): NCBI GI: 85082521 Blast Desc: NCU04522 [Neurospora crassa OR74A] gi|28918014|gb|EAA27697.1| [Neurospora crassa OR74A]
  misc_feature (8)..(228): NCBI GI: 261352919 Blast Desc: conserved [Verticillium albo-atrum VaMs.102]
  misc_feature (4)..(227): NCBI GI: 171691420 Blast Desc: protein product [Podospora anserina] gi|170945658|emb|CAP71771.1| protein product [Podospora anserina]
  misc_feature (1)..(226): NCBI GI: 154305080 Blast Desc: BC1G_08630 [Botryotinia fuckeliana B05.10] gi|150853793|gb|EDN28985.1| BC1G_08630 [Botryotinia fuckeliana B05.10]
  misc_feature (1)..(226): NCBI GI: 156045317 Blast Desc: SS1G_09847 [Sclerotinia sclerotiorum 1980] gi|154694242|gb|EDN93980.1| SS1G_09847 [Sclerotinia sclerotiorum 1980]
  misc_feature (6)..(227): NCBI GI: 39975479 Blast Desc: MGG_00114 [Magnaporthe grisea 70-15] gi|145019042|gb|EDK03321.1| MGG_00114 [Magnaporthe grisea 70-15]
  misc_feature (5)..(229): NCBI GI: 256723134 Blast Desc: NECHADRAFT_42618 [Nectria haematococca mpVI 77-13-4]
  misc_feature (8)..(227): NCBI GI: 116195416 Blast Desc: CHGG_04306 [Chaetomium globosum CBS 148.51] gi|88180219|gb|EAQ87687.1| CHGG_04306 [Chaetomium globosum CBS 148.51]
  misc_feature (5)..(228): NCBI GI: 46116322 Blast Desc: FG04003.1 [Gibberella zeae PH-1]
  misc_feature (2)..(224): NCBI GI: 189190936 Blast Desc: conserved [Pyrenophora tritici-repentis Pt-1C-BFP] gi|187973413|gb|EDU40912.1| conserved [Pyrenophora tritici-repentis Pt-1C-BFP]
MTANDSPFTLRAEPGTDIWRKPPSTDIWNVYFSAPISRTVSGELTKFSSARVTFWAPWTERYDQAGLLLVPKRSSDPKTRQSGAPEKWIKTGIEYYQSKPHLSTVGCDRYADWSIGPLTTTIDPAKVSNLPATYDNPHPRLSIWNSGVTLEVRREGDEHGKSIWIYQLVLDGSGEVVERLPLREVCWIFADEQDGDWTLEVSPLIARPEKNATGVLEAEFTEFIVKWDT

SEQ ID NO: 18067 - DNA, 531 bp, Muscodor strobelii; identical to SEQ ID NO: 18064
  misc_feature: SGI EST ID NO. CUFF.42585.0
  misc_feature: Variant of the nucleotide sequence at SEQ ID NO 18065

SEQ ID NO: 18068 - DNA, 867 bp, Muscodor strobelii
  misc_feature: SGI cDNA ID NO. 566048
  misc_feature: Encodes the peptide sequence at SEQ ID NO 18069
atggccacttccgccctccagacatcattcgccgagcttgacgatgtaaagacggcagacagagagaatgcgccctttcttgtgggaaatattgatgatcgtctcattccagagacgcgggaactattagaggaatacagtaaagtgccgagagaccaacagattgagcacgcgaacgtgcttggcaaatccgtgcctggccgtgcatgtggacttgcattctttctaacgccacagctttcacgctcacccgtctatgctgaaatcttggagcgtgtcaagaacggacaaactctcatggacataggaacatttctgggccatgatctccggcgtctggtctacgatggtgcaccatcagacaacttgttcggcattgacattgtcaacttctacgatctcggctacgagttctttcgcgatcgagagcattttaaaggccatttcatcgaggccaacttcttatccaccagctctgacgagctcacagcattgaaggaaagaaaggtatcggtcgttgtaatttctcaagtcctgcatcagtgggggtgggatgaccagttgaaagccactgaggctctggttgcttttactgagccgaataccttgattgtgggtaatatgataggaaacgtaaaagcgcaggaagtatcacttccatatattccaacgcctgcgtggcgacatgacgacgacagttttgcccggcttttccaagcagtaggcggcgcgacagggacagtctgggaaacgaaggtgtggccaacgagtctagaagacatgggctggaagagcacgaaagaagacacagcatggatggaggaaggctgccgtctcatttacttcatggcaagaaggattaagtga

SEQ ID NO: 18069 - protein, 288 aa, Muscodor strobelii
  misc_feature: SGI Peptide ID NO. 566048
  misc_feature (1)..(288): NCBI GI: 154291843 Blast Desc: BC1G_14998 [Botryotinia fuckeliana B05.10] gi|150846606|gb|EDN21799.1| BC1G_14998 [Botryotinia fuckeliana B05.10]
  misc_feature (41)..(288): NCBI GI: 156034847 Blast Desc: SS1G_13359 [Sclerotinia sclerotiorum 1980] gi|154698762|gb|EDN98500.1| SS1G_13359 [Sclerotinia sclerotiorum 1980]
  misc_feature (7)..(288): NCBI GI: 242816296 Blast Desc: conserved [Talaromyces stipitatus ATCC 10500] gi|218715086|gb|EED14509.1| conserved [Talaromyces stipitatus ATCC 10500]
  misc_feature (28)..(286): NCBI GI: 156056699 Blast Desc: SS1G_04080 [Sclerotinia sclerotiorum 1980] gi|154701866|gb|EDO01605.1| SS1G_04080 [Sclerotinia sclerotiorum 1980]
  misc_feature (38)..(287): NCBI GI: 169611624 Blast Desc: SNOG_08927 [Phaeosphaeria nodorum SN15] gi|160702331|gb|EAT84095.2| SNOG_08927 [Phaeosphaeria nodorum SN15]
  misc_feature (19)..(287): NCBI GI: 242809401 Blast Desc: conserved [Talaromyces stipitatus ATCC 10500] gi|218715986|gb|EED15408.1| conserved [Talaromyces stipitatus ATCC 10500]
  misc_feature (36)..(252): NCBI GI: 255936301 Blast Desc: Pc13g07470 [Penicillium chrysogenum Wisconsin 54-1255] gi|211583797|emb|CAP91816.1| Pc13g07470 [Penicillium chrysogenum Wisconsin 54-1255]
  misc_feature (31)..(286): NCBI GI: 238839094 Blast Desc: conserved [Microsporum canis CBS 113480]
  misc_feature (2)..(287): NCBI GI: 189207667 Blast Desc: conserved [Pyrenophora tritici-repentis Pt-1C-BFP] gi|187976260|gb|EDU42886.1| conserved [Pyrenophora tritici-repentis Pt-1C-BFP]
  misc_feature (40)..(253): NCBI GI: 145246226 Blast Desc: An12g02830 [Aspergillus niger] gi|134080076|emb|CAK41122.1| protein product [Aspergillus niger]
MATSALQTSFAELDDVKTADRENAPFLVGNIDDRLIPETRELLEEYSKVPRDQQIEHANVLGKSVPGRACGLAFFLTPQLSRSPVYAEILERVKNGQTLMDIGTFLGHDLRRLVYDGAPSDNLFGIDIVNFYDLGYEFFRDREHFKGHFIEANFLSTSSDELTALKERKVSVVVISQVLHQWGWDDQLKATEALVAFTEPNTLIVGNMIGNVKAQEVSLPYIPTPAWRHDDDSFARLFQAVGGATGTVWETKVWPTSLEDMGWKSTKEDTAWMEEGCRLIYFMARRIK

SEQ ID NO: 18070 - DNA, 453 bp, Muscodor strobelii
  misc_feature: SGI cDNA ID NO. 566049
  misc_feature: Encodes the peptide sequence at SEQ ID NO 18071
atggctcgacgtcaaagcgtccttccccttgcatatcggctcttttttctcacgattgagcccatctctgccctggttggagccttctatgcgcacttcaagcaagacgcatacttgtctatgacccatgccgactctgccccgtcgccgattcctctggggacgtcggtcgttttgtcccagcttgcgaacctgtatctgctattcgctttgaacgaggcgcttgtactgcggagcaccggcgatctgaatgtgtggaggactgtgctcctcgtattgctcatagcagattttggacacttgtactctttacagattcacgggtcctgggtctactgggacatcacgcgctataacgccattgactttggaaacgttctgtttgtctatctgggggcatctatgagaattgctttcttgtcgggagttggcctccataagaaaacagcttga

SEQ ID NO: 18071 - protein, 150 aa, Muscodor strobelii
  misc_feature: SGI Peptide ID NO. 566049
  misc_feature (8)..(147): NCBI GI: 85086689 Blast Desc: NCU11178 [Neurospora crassa OR74A] gi|28918825|gb|EAA28494.1| conserved [Neurospora crassa OR74A]
  misc_feature (8)..(148): NCBI GI: 261354010 Blast Desc: conserved [Verticillium albo-atrum VaMs.102]
  misc_feature (8)..(145): NCBI GI: 171685216 Blast Desc: protein product [Podospora anserina] gi|170942569|emb|CAP68221.1| protein product [Podospora anserina]
  misc_feature (12)..(150): NCBI GI: 256726501 Blast Desc: NECHADRAFT_79505 [Nectria haematococca mpVI 77-13-4]
  misc_feature (12)..(147): NCBI GI: 46124485 Blast Desc: FG06620.1 [Gibberella zeae PH-1]
  misc_feature (8)..(150): NCBI GI: 156037522 Blast Desc: SS1G_12475 [Sclerotinia sclerotiorum 1980] gi|154697883|gb|EDN97621.1| SS1G_12475 [Sclerotinia sclerotiorum 1980]
  misc_feature (8)..(149): NCBI GI: 169616987 Blast Desc: SNOG_11668 [Phaeosphaeria nodorum SN15] gi|111059592|gb|EAT80712.1| SNOG_11668 [Phaeosphaeria nodorum SN15]
  misc_feature (8)..(148): NCBI GI: 189188296 Blast Desc: conserved [Pyrenophora tritici-repentis Pt-1C-BFP] gi|187972093|gb|EDU39592.1| conserved [Pyrenophora tritici-repentis Pt-1C-BFP]
  misc_feature (1)..(150): NCBI GI: 154316155 Blast Desc: BC1G_03663 [Botryotinia fuckeliana B05.10] gi|150846449|gb|EDN21642.1| BC1G_03663 [Botryotinia fuckeliana B05.10]
  misc_feature (8)..(145): NCBI GI: 242220966 Blast Desc: [Postia placenta Mad-698-R] gi|242220974|ref|XP_002476245.1| [Postia placenta Mad-698-R] gi|220724523|gb|EED78559.1| [Postia placenta Mad-698-R] [Postia
MARRQSVLPLAYRLFFLTIEPISALVGAFYAHFKQDAYLSMTHADSAPSPIPLGTSVVLSQLANLYLLFALNEALVLRSTGDLNVWRTVLLVLLIADFGHLYSLQIHGSWVYWDITRYNAIDFGNVLFVYLGASMRIAFLSGVGLHKKTA

SEQ ID NO: 18072 - DNA, 1042 bp, Muscodor strobelii
  misc_feature: SGI EST ID NO. CUFF.42597.0
  misc_feature: Variant of the nucleotide sequence at SEQ ID NO 18070
tggggagggggctctaaaagggaggcggcatcaaatggagtctcgaattgcctagcaatcgattgatagccacctgcaccatctctcaaacctcggacatattcaacatcaccctagaatagctgcatcgctacccgcgtctacatcaagcaaatctggcttcttttcccatcgagacttctattacttattgatatcagataccaactgaacacaatggctcgacgtcaaagcgtccttccccttgcatatcggctcttttttctcacgattgagcccatctctgccctggttggagccttctatgcgcacttcaagcaagacgcatacttgtctatgacccatgccgactctgccccgtcgccgattcctctggggacgtcggtcgttttgtcccagcttgcgaacctgtatctgctattcgctttgaacgaggcgcttgtactgcggagcaccggcgatctgaatgtgtggaggactgtgctcctcgtattgctcatagcagattttggacacttgtactctttacagattcacgggtcctgggtctactgggacatcacgcgctataacgccattgactttggaaacgttctgtttgtctatctgggggcatctatgagaattgctttcttgtcgggagttggcctccataagaaaacagcttgacaacctaatgatttgattttaacatagacatgctattttctactacaagctagatcctagacggactatttaatctaacgaaaacatatcagaagttatctggcactatggatgaatctggacctcaagtataggcatctgattgagtaggtaattagaagcatcgctatacgtagattgtatgctgatgatctagagcgactgacttggaattccccgacaccacatcctactatcatcggtcgggttctgtcctcagtgacgtccttgagtattagattatgtttcctgtgattttaagcctgttgatcacttcaatatcatgggaaattgcaaatgcatgtataattgaggacttttcaatatgccacga

SEQ ID NO: 18073 - DNA, 603 bp, Muscodor strobelii
  misc_feature: SGI cDNA ID NO. 566050
  misc_feature: Reduced expression when VOC is produced
  misc_feature: Encodes the peptide sequence at SEQ ID NO 18074
atgtctgccaacaagattgcccccaactccccttcgcgggccaacccctccgagctcgagagcagcatcgcctctgctctctacgacctcgagaccaacaccgccgacctcaaggccgccctccgccccctccagttcgtctctgccagagagatcgaagttggccacggcaagaaggctattgtcatctttgtccccgtcccctcccttcagggcttccaccgcgtccagcagcgcctgactcgtgagctcgagaagaagttctccgaccgccacgtcctcatcctcgcctcgcgccgcatccttccccgccccaagcgttccgcccgctcccgcaacaccctcaagcagaagcgtccccgctcgcgaactctgaccgctgtccacgacgccatcctcgctgacctcgtctatcccgtcgagatcgtcggcaagcgcgtccgcaccaaggaggacaactccaagcttctcaaggtcatcctagacgagaaggagcgtggcggtgtcgactacagactcgatacctactccgaggtctaccgccgcctcaccggccgcaccgtcaccttcgagttcccccagtctggaggctctgagtactag

SEQ ID NO: 18074 - protein, 200 aa, Muscodor strobelii
  misc_feature: SGI Peptide ID NO. 566050
  misc_feature (4)..(197): Pfam Id: PF01251 Pfam Desc: Ribosomal protein S7e
  misc_feature (4)..(200): NCBI GI: 39975265 Blast Desc: 40S ribosomal protein S7 [Magnaporthe grisea 70-15] gi|145018911|gb|EDK03190.1| 40S ribosomal protein S7 [Magnaporthe grisea 70-15]
  misc_feature (2)..(200): NCBI GI: 116208716 Blast Desc: 40S ribosomal protein S7 [Chaetomium globosum CBS 148.51] gi|88184248|gb|EAQ91716.1| 40S ribosomal protein S7 [Chaetomium globosum CBS 148.51]
  misc_feature (1)..(200): NCBI GI: 261354129 Blast Desc: 40S ribosomal protein S7 [Verticillium albo-atrum VaMs.102]
  misc_feature (1)..(200): NCBI GI: 46124419 Blast Desc: RS7_NEUCR 40S ribosomal protein S7 [Gibberella zeae PH-1]
  misc_feature (4)..(200): NCBI GI: 171685214 Blast Desc: protein product [Podospora anserina] gi|170942568|emb|CAP68220.1| protein product [Podospora anserina]
  misc_feature (1)..(193): NCBI GI: 85086685 Blast Desc: 40S ribosomal protein S7 [Neurospora crassa OR74A] gi|49066032|sp|O43105.2|RS7_NEUCR RecName: Full=40S ribosomal protein S7 gi|28918824|gb|EAA28493.1| 40S ribosomal protein S7
  misc_feature (4)..(200): NCBI GI: 212527722 Blast Desc: 40S ribosomal protein S7e [Penicillium marneffei ATCC 18224] gi|210073416|gb|EEA27503.1| 40S ribosomal protein S7e [Penicillium marneffei ATCC 18224]
  misc_feature (1)..(193): NCBI GI: 2737908 Blast Desc: ribosomal protein [Neurospora crassa]
  misc_feature (4)..(200): NCBI GI: 242784479 Blast Desc: 40S ribosomal protein S7e [Talaromyces stipitatus ATCC 10500] gi|218720542|gb|EED19961.1| 40S ribosomal protein S7e [Talaromyces stipitatus ATCC 10500]
  misc_feature (4)..(200): NCBI GI: 225555844 Blast Desc: 40S ribosomal protein S7E [Ajellomyces capsulatus G186AR]
  misc_feature: Useful for introducing or modulating the production of volatile compounds
MSANKIAPNSPSRANPSELESSIASALYDLETNTADLKAALRPLQFVSAREIEVGHGKKAIVIFVPVPSLQGFHRVQQRLTRELEKKFSDRHVLILASRRILPRPKRSARSRNTLKQKRPRSRTLTAVHDAILADLVYPVEIVGKRVRTKEDNSKLLKVILDEKERGGVDYRLDTYSEVYRRLTGRTVTFEFPQSGGSEY

SEQ ID NO: 18075 - DNA, 3063 bp, Muscodor strobelii
  misc_feature: SGI EST ID NO. CUFF.42616.0
  misc_feature: Variant of the nucleotide sequence at SEQ ID NO 18073
ccgtgcttcaatgccttatcgcccacaatcgcacaaacccaccgaaaatccatcgccaaattgtatgtgggttcattttcgcgcggcatctcaggcggaacttatcgacctctcttttcctcctcgttcctttcgacgtcccagaagcacgacaagagacaacaagcaaccatgtctgccaacaagattgcccccaactccccttcgcgggccaacccctccgagctcgagagcagcatcgcctctgctctctacgacctcgagaccaacaccgccgacctcaaggccgccctccgccccctccagttcgtctctgccagagagatcgaagttggccacggcaagaaggctattgtcatctttgtccccgtcccctcccttcagggcttccaccgcgtccagcagcgcctgactcgtgagctcgagaagaagttctccgaccgccacgtcctcatcctcgcctcgcgccgcatccttccccgccccaagcgttccgcccgctcccgcaacaccctcaagcagaagcgtccccgctcgcgaactctgaccgctgtccacgacgccatcctcgctgacctcgtctatcccgtcgagatcgtcggcaagcgcgtccgcaccaaggaggacaactccaagcttctcaaggtcatcctagacgagaaggagcgtggcggtgtcgactacagactcgatacctactccgaggtctaccgccgcctcaccggccgcaccgtcaccttcgagttcccccagtctggaggctctgagtactaggtttatcgaggatagatcggtggcgttggcatgaaggggttcatgaataaaagggaaaggctaatatgagatgattactggcatgtgctgtacgatgatatgatagcactaactacagaggtttctcatgggccgcaaaaaggcatcggcgttctgagtgaagagcttgtgggttcaataaacaagctttcgtttctaggcccatctttgctcttgatgatgatgataactgttcagtatgtgcattcgtgtttttttcggaaaacgaaatcaatttaccggatggaacggggtatcgtagattctgatctgaagtctaatgtctaatcctggcttatgcgtccaatgccaatggcacaccagtaggccaactcctttttctccttggcatcacgctccttggccgtggtcgtgccgacctgatcctgtgacacttcgccctcccactcgaggcgcacaaacatgggtatctccagcacatcctcgtcttccttcaacgggctgagatccggctccgggtcgccctctttccgcagcagagcgggcggcggctcgatgcggagtgatgaggggacaacctcgacgacgatgctcacccagtttcgtcctcgttcccagatcttgcctgcttccgcctggtgcataccttcgtctacccgcctgggctggcgctccttttctccgtccttcagcacgtcctctaggtacatgtctgtgtctgtgttggcgtcgatttcgaactcggggcagaggatggtgactcgtgatgcgaaacggccgggtgtggtggctggactggctagcgtgactctgacgttgtcgaatagggggttcttgaatgtgaagatgaactgagccggttggaggggtttgagcagacctgagccgggtggtgggttgagcggcttgatggagatggacggtatggagttgttggctacgagtctgatgcgccagcgcgtgttgccgactttggactcgggcttgcttatgatgtggcggcagacgggacagcgtttcgaccgcttggtgcggaggagatagggtatgggccatagctggtctgcgaagcgggagccctcttcggtttgcgtgttggcttgttcggtcgtcactgtgccatcccagccatctcgtcgtagttgagagattgcggcatcttcgtcgagggaggcgagcttaaacccctcctttgcgacgtctgcttctcgcatgatgtttgacttgttcttttgtttcagtccaccgccagtgttaccagagtatatgctcatgattcgcgagagggtgccgggtgagttcagaccgtagtcgccgagtccgttaagcccggcgctggggtttgagctggcgttctgcgaggcgtagaatgcttttagcgcggcgaagcgagccttgttgttttcgggctcggagtcgatcttgacgggcgatgtgtcgccgctgatggcgtgtttggatggttcgtcgccgtagcgaagcttctgtagctgggcgaatattccctggggcttgtcgaacttgactccaatctcggtggagttccagtgacagtacgagcatgtcaagatccaggggcccgagggcgcggtgctgggggcgccagcattgtctgcggacaggagggacggctctggagcggattcgagagcttggatagctagtggcccgatgcatattggacattggaaacagctgcgcgtgcatctgttgccctctgtcttgagactgctgctgccgacttcaaatagacagttggggcagtagatggagacaagctcctcggagatgcagcgcggacagcggatttggtgacagacatcgcagtagagaagatattcgaggggatagagactgaagctggagcgaggggcgcgcgggtcgaacgcgttgtcgtcgtcgtcgagctggctggcggagctcgtcgagggggcctcatcgccggcccggccctgggcggtagagtcgtgacaggggcattgtatgtacgtgtagggtacaaacgatgccatttagaagtgtcgtgggtattcacatcgctgtcgtcactcacgcggggtgacggttacacccacgaacccagcaccatacacgaacaaacgcaatcgcaagctttgccaggagaagctactgctgaattattgcagcaatacgatacggcgataggcgggcttgaatcggtcttagaacggcagttagtgagtgaattggcgctagatttggaagcctgcgtagtcgaagaagtgcttcaagatgtttcaccgtcagctgtgtctttgactatagtgc

SEQ ID NO: 18076 - DNA, 1689 bp, Muscodor strobelii
  misc_feature: SGI cDNA ID NO. 566051
  misc_feature: Reduced expression when VOC is produced
  misc_feature: Encodes the peptide sequence at SEQ ID NO 18077
atggcatcgtttgtaccctacacgtacatacaatgcccctgtcacgactctaccgcccagggccgggccggcgatgaggccccctcgacgagctccgccagccagctcgacgacgacgacaacgcgttcgacccgcgcgcccctcgctccagcttcagtctctatcccctcgaatatcttctctactgcgatgtctgtcaccaaatccgctgtccgcgctgcatctccgaggagcttgtctccatctactgccccaactgtctatttgaagtcggcagcagcagtctcaagacagagggcaacagatgcacgcgcagctgtttccaatgtccaatatgcatcgggccactagctatccaagctctcgaatccgctccagagccgtccctcctgtccgcagacaatgctggcgcccccagcaccgcgccctcgggcccctggatcttgacatgctcgtactgtcactggaactccaccgagattggagtcaagttcgacaagccccagggaatattcgcccagctacagaagcttcgctacggcgacgaaccatccaaacacgccatcagcggcgacacatcgcccgtcaagatcgactccgagcccgaaaacaacaaggctcgcttcgccgcgctaaaagcattctacgcctcgcagaacgccagctcaaaccccagcgccgggcttaacggactcggcgactacggtctgaactcacccggcaccctctcgcgaatcatgagcatatactctggtaacactggcggtggactgaaacaaaagaacaagtcaaacatcatgcgagaagcagacgtcgcaaaggaggggtttaagctcgcctccctcgacgaagatgccgcaatctctcaactacgacgagatggctgggatggcacagtgacgaccgaacaagccaacacgcaaaccgaagagggctcccgcttcgcagaccagctatggcccataccctatctcctccgcaccaagcggtcgaaacgctgtcccgtctgccgccacatcataagcaagcccgagtccaaagtcggcaacacgcgctggcgcatcagactcgtagccaacaactccataccgtccatctccatcaagccgctcaacccaccacccggctcaggtctgctcaaacccctccaaccggctcagttcatcttcacattcaagaaccccctattcgacaacgtcagagtcacgctagccagtccagccaccacacccggccgtttcgcatcacgagtcaccatcctctgccccgagttcgaaatcgacgccaacacagacacagacatgtacctagaggacgtgctgaaggacggagaaaaggagcgccagcccaggcgggtagacgaaggtatgcaccaggcggaagcaggcaagatctgggaacgaggacgaaactgggtgagcatcgtcgtcgaggttgtcccctcatcactccgcatcgagccgccgcccgctctgctgcggaaagagggcgacccggagccggatctcagcccgttgaaggaagacgaggatgtgctggagatacccatgtttgtgcgcctcgagtgggagggcgaagtgtcacaggatcaggtcggcacgaccacggccaaggagcgtgatgccaaggagaaaaaggagttggcctactggtgtgccattggcattggacgcataagccaggattag

SEQ ID NO: 18077 - protein, 562 aa, Muscodor strobelii
  misc_feature: SGI Peptide ID NO. 566051
  misc_feature (56)..(468): Pfam Id: PF05502 Pfam Desc: Dynactin p62 family
  misc_feature (56)..(181): Pfam Id: PF05502 Pfam Desc: Dynactin p62 family
  misc_feature (314)..(432): Pfam Id: PF05502 Pfam Desc: Dynactin p62 family
  misc_feature (1)..(559): NCBI GI: 116208720 Blast Desc: CHGG_03653 [Chaetomium globosum CBS 148.51] gi|88184250|gb|EAQ91718.1| CHGG_03653 [Chaetomium globosum CBS 148.51]
  misc_feature (1)..(561): NCBI GI: 171685220 Blast Desc: protein product [Podospora anserina] gi|170942571|emb|CAP68223.1| protein product [Podospora anserina]
  misc_feature (1)..(562): NCBI GI: 256726379 Blast Desc: [Nectria haematococca mpVI 77-13-4]
  misc_feature (4)..(562): NCBI GI: 39975263 Blast Desc: MGG_00222 [Magnaporthe grisea 70-15] gi|145018910|gb|EDK03189.1| MGG_00222 [Magnaporthe grisea 70-15]
  misc_feature (1)..(562): NCBI GI: 46124421 Blast Desc: FG06588.1 [Gibberella zeae PH-1]
  misc_feature (1)..(561): NCBI GI: 8453185 Blast Desc: AF264758_1 dynactin Arp1 p62 subunit RO2 [Neurospora crassa]
  misc_feature (1)..(561): NCBI GI: 164428975 Blast Desc: NCU11177 [Neurospora crassa OR74A] gi|157072360|gb|EAA28492.2| conserved [Neurospora crassa OR74A]
  misc_feature (1)..(561): NCBI GI: 261354130 Blast Desc: dynactin Arp1 p62 subunit RO2 [Verticillium albo-atrum VaMs.102]
  misc_feature (1)..(561): NCBI GI: 261200663 Blast Desc: dynactin Arp1 p62 subunit [Ajellomyces dermatitidis SLH14081] gi|239593804|gb|EEQ76385.1| dynactin Arp1 p62 subunit [Ajellomyces dermatitidis SLH14081] gi|239607322|gb|EEQ84309.1|
  misc_feature (1)..(562): NCBI GI: 115396280 Blast Desc: conserved [Aspergillus terreus NIH2624] gi|114193348|gb|EAU35048.1| conserved [Aspergillus terreus NIH2624]
  misc_feature: Useful for introducing or modulating the production of volatile compounds
MASFVPYTYIQCPCHDSTAQGRAGDEAPSTSSASQLDDDDNAFDPRAPRSSFSLYPLEYLLYCDVCHQIRCPRCISEELVSIYCPNCLFEVGSSSLKTEGNRCTRSCFQCPICIGPLAIQALESAPEPSLLSADNAGAPSTAPSGPWILTCSYCHWNSTEIGVKFDKPQGIFAQLQKLRYGDEPSKHAISGDTSPVKIDSEPENNKARFAALKAFYASQNASSNPSAGLNGLGDYGLNSPGTLSRIMSIYSGNTGGGLKQKNKSNIMREADVAKEGFKLASLDEDAAISQLRRDGWDGTVTTEQANTQTEEGSRFADQLWPIPYLLRTKRSKRCPVCRHIISKPESKVGNTRWRIRLVANNSIPSISIKPLNPPPGSGLLKPLQPAQFIFTFKNPLFDNVRVTLASPATTPGRFASRVTILCPEFEIDANTDTDMYLEDVLKDGEKERQPRRVDEGMHQAEAGKIWERGRNWVSIVVEVVPSSLRIEPPPALLRKEGDPEPDLSPLKEDEDVLEIPMFVRLEWEGEVSQDQVGTTTAKERDAKEKKELAYWCAIGIGRISQD

SEQ ID NO: 18078 - DNA, 2358 bp, Muscodor strobelii
  misc_feature: SGI cDNA ID NO. 566052
  misc_feature: Encodes the peptide sequence at SEQ ID NO 18079
atgcgcggccaacagtcctcgttgtacaacgggatctctgatcgatcgcgcgggtggaagacgaggaagacgagagaaacggagaaagaacttgatgtggtcgcaaccaatcctaccattctaaagtgggacggagcgtcgagatcatccgaggtgtgggataatctgagaagagatcctgaactatggtatcgaaatggagactgttatgtccatctatacggcaaaggacaaagccaacgtggcccggccttcaagatccccctctcaacactccgggaggcacgatgccatcctctaatcaacagacatatcagtgatgagactgacctggatgctgctgtggctaagaatggccttttccatctctttattcctgcaccacctcactccgacaaacgtcaatcatacaactaccacttggcaacgcggaatttctttgccttcctctttcgaagatccatggctggcgaaacactcggcagcgccttgatcggacttatgcacagcatggcacagttccgcagtcaaaacgcggacaatgttgaggatctaatgagctccatggatgaagagggctacttggatatgaactgtcaaccgaatcacgcattggcattgcttcgtctctctgaagaattccagatccgagaactttatgttgtcgcttttacacactgttgcggtatgaccgatgtgcttttaggccctgaatatcagctcttatcctccatgactcgcaaatcaatccggaaagctaggcttgagattgatgtaagattagcacagagctcgaaaatgctgcggtctttcctacaagatgacttatcagaagtcaatatgaatctgtacccaggggcacgtgcccacatggaaaggtttagaactctgctacacggtctgtatgcggcgcgttttggatattatccaccacaatcgaagcactcttcgaacgagattttcgaggtagacgtgctccgcatcatgcggggtgactttgaggcgctatacgattatctggtggacgagggatttgacacaactcgagcttgtccttctttggttaaaggaggcatatctgctttgcagagtattcaagcgttcgacgccagatatgggcttgacacgttgcctcatccgcttcctcttttacctgaggtcactgaagtacccatgtcttcgaagaggatgtcctgggtgaagaagcgaactggagccgaccagtctcatcgttgcaagaccttagcagcattactcatcgccacaaatgcgcgtcgaaccgacataataagaaatcctctggttcgcgcgtatagaaaatttgaagaagactctgttttttcgccaatcaaagcagataaaatggaaggactcggcccatctgacgctcgcaaagtccgctggatcctgatatatgcggtgtatcagactttacgacgtgctactgaagtcccaaacgaagtgcagaatacaactgcaccttaccatttatgcgtttcaaaggctaatattcccgattggccagaagaacggccggatgtgcgcccccacagcttgtcaggtcaaaccaattgtgtaccttcactatgttccacagatctgacttcgagatcgtcctcacccgctcccctcatgccgctagagatcaaacctgatattgactatctggcaaatcaaaggtcagaggtcagggatcgaacggcagacaagttgcgaaggaattcgagttttattgacagcattgccaatccaatctcacggacatctttaagtgttcgtcgatcattcgggtttctcaaatcgttccataatgagaactctgcacgcggttacggtaatgggaccggagatgtgcacggtgataccggaactgcgcgcgagacgccactgttgatgtatgataacagcataacctcttcgacatccgatgcgtcatactcgtcgagttcttatagcaactccgacgctggaagctctgaaagttcaaacacgtcggtttcttctagcccgactgaatcgactttggagaaatgggagaattccaatcagcaggagagtgtatgcacacgctgtggccaccatgagttaactaaggcgacaagcactccatcattgagaaccagatactacaccatacgagacaagacctcctctgatgatactatgactatacagaaactagccaatattccaaccaacacatcattagaatctgattcactcaccatccggaagaatcagtaccttgacgcttcagattacatcaaagctgtcatggaggctgaggccacgactatgatggattcgaaaccagggacgccacgatgtcatgccgctaatgaaggcaatcggtggtaa

SEQ ID NO: 18079 - protein, 785 aa, Muscodor strobelii
  misc_feature: SGI Peptide ID NO. 566052
  misc_feature (38)..(618): NCBI GI: 46124423 Blast Desc: FG06589.1 [Gibberella zeae PH-1]
  misc_feature (38)..(619): NCBI GI: 256726515 Blast Desc: NECHADRAFT_79537 [Nectria haematococca mpVI 77-13-4]
  misc_feature (16)..(610): NCBI GI: 261354131 Blast Desc: conserved [Verticillium albo-atrum VaMs.102]
  misc_feature (42)..(619): NCBI GI: 39972519 Blast Desc: MGG_07561 [Magnaporthe grisea 70-15] gi|145016762|gb|EDK01192.1| MGG_07561 [Magnaporthe grisea 70-15]
  misc_feature (18)..(511): NCBI GI: 156051078 Blast Desc: SS1G_06946 [Sclerotinia sclerotiorum 1980] gi|154704724|gb|EDO04463.1| SS1G_06946 [Sclerotinia sclerotiorum 1980]
  misc_feature (18)..(674): NCBI GI: 154295251 Blast Desc: BC1G_13439 [Botryotinia fuckeliana B05.10] gi|150844166|gb|EDN19359.1| BC1G_13439 [Botryotinia fuckeliana B05.10]
  misc_feature (40)..(498): NCBI GI: 189202922 Blast Desc: conserved [Pyrenophora tritici-repentis Pt-1C-BFP] gi|187984896|gb|EDU50384.1| conserved [Pyrenophora tritici-repentis Pt-1C-BFP]
  misc_feature (123)..(504): NCBI GI: 171685222 Blast Desc: protein product [Podospora anserina] gi|170942572|emb|CAP68224.1| protein product [Podospora anserina]
  misc_feature (35)..(240): NCBI GI: 85086678 Blast Desc: NCU00256 [Neurospora crassa OR74A] gi|28918822|gb|EAA28491.1| [Neurospora crassa OR74A]
  misc_feature (43)..(525): NCBI GI: 156060979 Blast Desc: SS1G_02632 [Sclerotinia sclerotiorum 1980] gi|154700036|gb|EDN99774.1| SS1G_02632 [Sclerotinia sclerotiorum 1980]
MRGQQSSLYNGISDRSRGWKTRKTRETEKELDVVATNPTILKWDGASRSSEVWDNLRRDPELWYRNGDCYVHLYGKGQSQRGPAFKIPLSTLREARCHPLINRHISDETDLDAAVAKNGLFHLFIPAPPHSDKRQSYNYHLATRNFFAFLFRRSMAGETLGSALIGLMHSMAQFRSQNADNVEDLMSSMDEEGYLDMNCQPNHALALLRLSEEFQIRELYVVAFTHCCGMTDVLLGPEYQLLSSMTRKSIRKARLEIDVRLAQSSKMLRSFLQDDLSEVNMNLYPGARAHMERFRTLLHGLYAARFGYYPPQSKHSSNEIFEVDVLRIMRGDFEALYDYLVDEGFDTTRACPSLVKGGISALQSIQAFDARYGLDTLPHPLPLLPEVTEVPMSSKRMSWVKKRTGADQSHRCKTLAALLIATNARRTDIIRNPLVRAYRKFEEDSVFSPIKADKMEGLGPSDARKVRWILIYAVYQTLRRATEVPNEVQNTTAPYHLCVSKANIPDWPEERPDVRPHSLSGQTNCVPSLCSTDLTSRSSSPAPLMPLEIKPDIDYLANQRSEVRDRTADKLRRNSSFIDSIANPISRTSLSVRRSFGFLKSFHNENSARGYGNGTGDVHGDTGTARETPLLMYDNSITSSTSDASYSSSSYSNSDAGSSESSNTSVSSSPTESTLEKWENSNQQESVCTRCGHHELTKATSTPSLRTRYYTIRDKTSSDDTMTIQKLANIPTNTSLESDSLTIRKNQYLDASDYIKAVMEAEATTMMDSKPGTPRCHAANEGNRW

SEQ ID NO: 18080 - DNA, 639 bp, Muscodor strobelii
  misc_feature: SGI EST ID NO. CUFF.42604.0
  misc_feature: Variant of the nucleotide sequence at SEQ ID NO 18078
gccaacagtcctcgttgtacaacgggatctctgatcgatcgcgcgggtggaagacgaggaagacgagagaaacggagaaagaacttgatgtggtcgcaaccaatcctaccattctaaagtgggacggagcgtcgagatcatccgaggtgtgggataatctgagaagagatcctgaactatggtatcgaaatggagactgttatgtccatctatacggcaaaggacaaagccaacgtggcccggccttcaagatccccctctcaacactccgggaggcacgatgccatcctctaatcaacagacatatcagtgatgagactgacctggatgctgctgtggctaagaatggccttttccatctctttattcctgcaccacctcactccgacaaacgtcaatcatacaactaccacttggcaacgcggaatttctttgccttcctctttcgaagatccatggctggcgaaacactcggcagcgccttgatcggacttatgcacagcatggcacagttccgcagtcaaaacgcggacaatgttgaggatctaatgagctccatggatgaagagggctacttggatatgaactgtcaaccgaatcacgcattggcattgcttcgtctctctgaagaattccaga

SEQ ID NO: 18081 - DNA, 636 bp, Muscodor strobelii
  misc_feature: SGI cDNA ID NO. 566053
  misc_feature: Encodes the peptide sequence at SEQ ID NO 18082
atggcggtagctacaagatcatccaacaaaaccagcccctccaaatctggatcaacgatgacgacattcacacacgcgccatccggcctaagtatcttctggctcgccatctctctcccgctcgtagtttgggactgcggatacgtcctcatgcgcccacggacgatgcctggcggtgaccttcactggccactatgggtaccgtacaaactctacggcgaggtcgaccatgtatatgggtggaaatctttcaatgccggcaacgggttcacaagcgcccaaggccttctcaacgtcgtggagacgctcatgtacatgttctactactggagttattacaccaacggcagacagattgccggcaagggaaaagtactcgtgggtaaacaggccagcaccgccattttggtggcatttaccgctgccgctatgacgctaagcaagaccgttctgtactggctttgcgaatacttttctggctttgacaacattggccacaaccctccgctggatctgatctttctgtggatcattcccaacggcgcttggctcgtcttccccgttttcatgctcgctgagctgggcagtgaattggtcaatggagttgttgttggtgataatgtcaaggaagagtaa

SEQ ID NO: 18082 - protein, 211 aa, Muscodor strobelii
  misc_feature: SGI Peptide ID NO. 566053
  misc_feature (4)..(211): NCBI GI: 256726376 Blast Desc: NECHADRAFT_68763 [Nectria haematococca mpVI 77-13-4]
  misc_feature (7)..(203): NCBI GI: 261354132 Blast Desc: conserved [Verticillium albo-atrum VaMs.102]
  misc_feature (4)..(202): NCBI GI: 255942545 Blast Desc: Pc18g01970 [Penicillium chrysogenum Wisconsin 54-1255] gi|211586774|emb|CAP94421.1| Pc18g01970 [Penicillium chrysogenum Wisconsin 54-1255]
  misc_feature (5)..(204): NCBI GI: 156051988 Blast Desc: SS1G_07402 [Sclerotinia sclerotiorum 1980] gi|154705179|gb|EDO04918.1| SS1G_07402 [Sclerotinia sclerotiorum 1980]
  misc_feature (5)..(204): NCBI GI: 154309708 Blast Desc: BC1G_07324 [Botryotinia fuckeliana B05.10] gi|150851785|gb|EDN26978.1| BC1G_07324 [Botryotinia fuckeliana B05.10]
  misc_feature (23)..(211): NCBI GI: 39975165 Blast Desc: MGG_00271 [Magnaporthe grisea 70-15] gi|145018857|gb|EDK03136.1| MGG_00271 [Magnaporthe grisea 70-15]
  misc_feature (7)..(211): NCBI GI: 119187677 Blast Desc: CIMG_03886 [Coccidioides immitis RS] gi|240108113|gb|EER26287.1| CPC735_004580 [Coccidioides posadasii C735 delta SOWgp]
  misc_feature (25)..(199): NCBI GI: 115389446 Blast Desc: conserved [Aspergillus terreus NIH2624] gi|114194624|gb|EAU36324.1| conserved [Aspergillus terreus NIH2624]
  misc_feature (14)..(199): NCBI GI: 121702641 Blast Desc: conserved [Aspergillus clavatus NRRL 1] gi|119397728|gb|EAW08159.1| conserved [Aspergillus clavatus NRRL 1]
  misc_feature (6)..(199): NCBI GI: 70990950 Blast Desc: AFUA_1G05745 [Aspergillus fumigatus Af293] gi|66847956|gb|EAL88286.1| AFUA_1G05745 [Aspergillus fumigatus Af293] gi|159130798|gb|EDP55911.1| AFUB_006130 [Aspergillus
MAVATRSSNKTSPSKSGSTMTTFTHAPSGLSIFWLAISLPLVVWDCGYVLMRPRTMPGGDLHWPLWVPYKLYGEVDHVYGWKSFNAGNGFTSAQGLLNVVETLMYMFYYWSYYTNGRQIAGKGKVLVGKQASTAILVAFTAAAMTLSKTVLYWLCEYFSGFDNIGHNPPLDLIFLWIIPNGAWLVFPVFMLAELGSELVNGVVVGDNVKEE

SEQ ID NO: 18083 - DNA, 1702 bp, Muscodor strobelii
  misc_feature: SGI EST ID NO. CUFF.42817.0
  misc_feature: Variant of the nucleotide sequence at SEQ ID NO 18081
cgcggaatgtaagggaggcccgaggagatttcttcaacgagagcacaaaagcaggtaacgaggcgcagccatgccaattgctatcaaatacaccgcatgcgtatttcgcattgcagagacatttgcaaaattgccattcgcgtcggatgcaattatgtgttcgcgagcgagtagcgtgagggatgcacgcgagcctgtacatggatactatgtgtagtcatggtcgcttcaccagatcgacgtcgcatcttgtcgaagcgctgccgaaaatggaaaatcccccgcagttttcaacatatgacatcgattcacaatagagctgccgaaaatgtgcctgcataaacaacaaacacgccatgaacgaggcaaagggctgtgaaccatggatcaaatagtataaagttctcaagatctctcatgaaaagtcatagtctatccatctagttgtttcactgtttgccattgtttgccattacttgactcctaatatcactacctcgaaaatagtcaccccacaaccctatttacttacgtattagctacttagagcgaccgcccaagttaattttctcgatcattgtctggaataggaattgtttcatataacgagacccttgtatcagagttcatctggtcacttttcaaacgatagctaccatactttaacgactcggatacggatctcacgcagaacgccgtcctcataaaatcgacgggaaagacaacccttcgaaagtttcttgtaaattacacgaaggcagtaaagaatcatggcggtagctacaagatcatccaacaaaaccagcccctccaaatctggatcaacgatgacgacattcacacacgcgccatccggcctaagtatcttctggctcgccatctctctcccgctcgtagtttgggactgcggatacgtcctcatgcgcccacggacgatgcctggcggtgaccttcactggccactatgggtaccgtacaaactctacggcgaggtcgaccatgtatatgggtggaaatctttcaatgccggcaacgggttcacaagcgcccaaggccttctcaacgtcgtggagacgctcatgtacatgttctactactggagttattacaccaacggcagacagattgccggcaagggaaaagtactcgtgggtaaacaggccagcaccgccattttggtggcatttaccgctgccgctatgacgctaagcaagaccgttctgtactgtgagttttactgaatctgcttgtggcgattgacttgggacgatttctaatggagttattcacagggctttgcgaatacttttctggctttgacaacattggccacaaccctccgctggatctgatctttctgtggatcattcccaacggcgcttggctcgtcttccccgttttcatgctcgctgagctgggcagtgaattggtcaatggagttgttgttggtgataatgtcaaggaagagtaaaatcgcaatctttgatgacacataaaacatatgtcctcctgaaatttgatgcaagagcgattgacccgggcgttcatgttcacgataatacgaaagatcccagcgttggcctgcggcacataaaccgaagctacccaagtcggacagttggcaggaatatttatgggcataatcagaggaggatggtagccgattgttcaaaatcttagcaaatttcaatgcaacttctag

SEQ ID NO: 18084 - DNA, 696 bp, Muscodor strobelii
  misc_feature: SGI cDNA ID NO. 566054
  misc_feature: Reduced expression when VOC is produced
  misc_feature: Encodes the peptide sequence at SEQ ID NO 18085
atgggtatcttacggacagccgcattgacgggtctcttcggcgtcaccagcggcgtagccggtgtcggcgctggcatggcatttctaaccggtgccacgagcttggtaccattaaccaaagaagatcgggtcttcaagaccaaaacatgggcgcgattcaaccccagagaaaaccctgcactcaaagatgactgcattaaagccgttccgctcagcaaggtccgccctgaattgcgcaacaacgaagaagctctcacacttgagttctgccggggcgtgtggagccgctggggcttctggggccagagcagactgcaagagcggtacgacaagccaccaggtactgacgataatctctggcgaacatcagagctggctgtgtccaagtttgatgaaggattgaggttttccaaccattttgaagtcgttcagaactccggtaatgaaatagtggttcgatgcggcggttcaccattggaaccaggactgcgcaaatcagatggcctcatctttctcagcgcaaggatcgatcacgaacagcaacaggcagttttccatttcaaatcagcgctattcagcagcggcgctcctaaggttgaaggcgcaccgcattccatccctccgaagatcgtgttcctgcataattggtacgtcaggatgctgacggccagcgcaatgaagaatatcacagtataa

SEQ ID NO: 18085 - protein, 231 aa, Muscodor strobelii
  misc_feature: SGI Peptide ID NO. 566054
  misc_feature (1)..(225): NCBI GI: 256722518 Blast Desc: NECHADRAFT_67001 [Nectria haematococca mpVI 77-13-4]
  misc_feature (1)..(231): NCBI GI: 154313330 Blast Desc: BC1G_05362 [Botryotinia fuckeliana B05.10] gi|150849431|gb|EDN24624.1| BC1G_05362 [Botryotinia fuckeliana B05.10]
  misc_feature (31)..(220): NCBI GI: 116203401 Blast Desc: CHGG_09584 [Chaetomium globosum CBS 148.51] gi|88175712|gb|EAQ83180.1| CHGG_09584 [Chaetomium globosum CBS 148.51]
  misc_feature (1)..(229): NCBI GI: 259487811 Blast Desc: TPA: conserved [Aspergillus nidulans FGSC A4]
  misc_feature (1)..(220): NCBI GI: 46127243 Blast Desc: FG07999.1 [Gibberella zeae PH-1]
  misc_feature (1)..(229): NCBI GI: 169772395 Blast Desc: [Aspergillus oryzae RIB40] gi|238490296|ref|XP_002376385.1| conserved [Aspergillus flavus NRRL3357] gi|83768527|dbj|BAE58664.1| protein product oryzae]
  misc_feature (1)..(231): NCBI GI: 156042984 Blast Desc: SS1G_11291 [Sclerotinia sclerotiorum 1980] gi|154695676|gb|EDN95414.1| SS1G_11291 [Sclerotinia sclerotiorum 1980]
  misc_feature (1)..(229): NCBI GI: 115383734 Blast Desc: conserved [Aspergillus terreus NIH2624] gi|114196106|gb|EAU37806.1| conserved [Aspergillus terreus NIH2624]
  misc_feature (1)..(230): NCBI GI: 226283599 Blast Desc: conserved [Paracoccidioides brasiliensis Pb01]
  misc_feature (1)..(229): NCBI GI: 226288346 Blast Desc: conserved [Paracoccidioides brasiliensis Pb18]
  misc_feature: Useful for introducing or modulating the production of volatile compounds
MGILRTAALTGLFGVTSGVAGVGAGMAFLTGATSLVPLTKEDRVFKTKTWARFNPRENPALKDDCIKAVPLSKVRPELRNNEEALTLEFCRGVWSRWGFWGQSRLQERYDKPPGTDDNLWRTSELAVSKFDEGLRFSNHFEVVQNSGNEIVVRCGGSPLEPGLRKSDGLIFLSARIDHEQQQAVFHFKSALFSSGAPKVEGAPHSIPPKIVFLHNWYVRMLTASAMKNITV

SEQ ID NO: 18086 - DNA, 1983 bp, Muscodor strobelii
  misc_feature: SGI EST ID NO. CUFF.42743.0
  misc_feature: Variant of the nucleotide sequence at SEQ ID NO 18084
cttcacacttttaaaacatcgcacgattaatcaaccgattttgattatctcactcactatcggtcatatttgcgtgccagagtgactcctgaatgctgccttttgccatcttggcaatgatactcgcccttcaagcggctatcgccttcacggtgtgcactcatacactaatgctctcgcaataagtgctgtaagaagcttctgaataaaagggcttcgctcaacccgtcctctccaaattcgaaaatggatgagcgtgtttaaatttcgtatgagctgaaataaagctcacgaaaatctcgttggctcagatgactattggccatggccctccaatgcgccttaactgttatctcaacggggtcaacttggctgcgggaaaatgcattacgcagaaatcagtcctgaaaatatgtgcggtctcctgctccccgagctcctaatcatgtcgtgtaattgtaaggtgataagaaatcaagaattgttatgagcctttcggtatcgatgttctgttagcctcgcgaagtgagagagtccttgcagcatttacggcttgatttgataagctctctcgactgtggaaccaaactcacgatcacaatgcacacaaaaagcatgcgtgcataaagttcaatagatagaacagaaatagtccgtttcggcgaaatccccgatttccgattgccccagtttatcctatttaccttatctcagtcgagctgcgagctggctagtagcgacattgcgcgtgctcgattgaaaactcgcttgtgacaacctcatctttcatttgttctgaacacctgtcaccagtttcgcaaaattcggcattatgggtatcttacggacagccgcattgacgggtctcttcggcgtcaccagcggcgtagccggtgtcggcgctggcatggcatttctaaccggtgccacgagcttggtaccattaaccaaagaagatcgggtcttcaagaccaaaacatgggcgcgattcaaccccagagaaaaccctgcactcaaagatgactgcattaaagccgttccgctcagcaaggtccgccctgaattgcgcaacaacgaagaagctctcacacttgagttctgccggggcgtgtggagccgctggggcttctggggccagagcagactgcaagagcggtacgacaagccaccaggtactgacgataatctctggcgaacatcagagctggctgtgtccaagtttgatgaaggattgaggttttccaaccattttgaagtcgttcagaactccggtaatgaaatagtggttcgatgcggcggttcaccattggaaccaggactgcgcaaatcagatggcctcatctttctcagcgcaaggatcgatcacgaacagcaacaggcagttttccatttcaaatcagcgctattcagcagcggcgctcctaaggttgaaggcgcaccgcattccatccctccgaagatcgtgttcctgcataattggtacgtcaggatgctgacggccagcgcaatgaagaatatcacagtataaaattggccggataaggttcttacgtggttcttggctatgatgctagcaggttaaacattggtgctggatgaaactgcacatatgtattcgtcgcggtatcagatcatgaacatgtaacaaacttcgtagctgatgggtgctactagttatattcttatacatcacggtgaacgacgtcaagatgcggcaaggcgagagtgcaaaacaagtcgtacgtgcggcaagtgatttgtggcattaccaacctgacacgtgtgagctattccgcaccaaatggaacaaatggtatagcttcttatgtctcgtacattgcacagctccccatagccgaattgccaattattcgagattgctgtaattcggatcaacaaggtatcttaagaatacgatttttcgtatacggatgctagacatcgtcatatgaggtatacctgatacttgtagttggtggtttg

SEQ ID NO: 18087 - DNA, 804 bp, Muscodor strobelii
  misc_feature: SGI cDNA ID NO. 566055
  misc_feature: Elevated expression when VOC is produced
  misc_feature: Encodes the peptide sequence at SEQ ID NO 18088
atgcattctcaacagagctttgtggctgtaggcctgacgttcctggctgcctccatggtcagtggttcgccatttagactaacagcgcgagacccgccgcgagctctgccacagaaagcaacggcgaacgacttaaagttccaaccggcgatggattttgatactgatgggtgctacaatacgccagccattggccccgatggaacaataaatccgggcttgcctcacgataacgttgggcttgcggaagactgccatgatctttcggacctccagaacaacaacgtgtactctcgtgctcgttgcaacaacggctggtgtggctacatctatgactattatttcgagaaggacgttgctttccaagacgcacccttcgatattggtcataccaatgactgggaacacatcgctgtttggacgaaggatggtgttgtcaagtacgtttgtgcttcaatgcatgggggctatcagatcaagaacgccactgatgtacgctgggacggcacgcaccccaaaatggtctacaacaaagatggcctgggtacgcatgacttccgctttgcgaatgcggacgatgacaacattgagaacgatactggtgcctggttctacggtgctcttgtctcatggaacggctttcccaccacacagcttcgtgatcaattatctgcgcatgattttggtagcgctacgatggcgattcgagatgccaattttgctagcaatcttgatactgccaaaggcgactatattccagaattcaatagcaatgtcgacgacggatcaccaggaactccgtag

SEQ ID NO: 18088 - protein, 267 aa, Muscodor strobelii
  misc_feature: SGI Peptide ID NO. 566055
  misc_feature (7)..(257): Pfam Id: PF05630 Pfam Desc: Necrosis inducing protein (NPP1)
  misc_feature (48)..(257): Pfam Id: PF05630 Pfam Desc: Necrosis inducing protein (NPP1)
  misc_feature (24)..(267): NCBI GI: 116179466 Blast Desc: CHGG_00361 [Chaetomium globosum CBS 148.51] gi|88184658|gb|EAQ92126.1| CHGG_00361 [Chaetomium globosum CBS 148.51]
  misc_feature (29)..(267): NCBI GI: 171681357 Blast Desc: protein product [Podospora anserina] gi|170940637|emb|CAP65865.1| protein product [Podospora anserina]
  misc_feature (28)..(267): NCBI GI: 85093779 Blast Desc: NCU02338 [Neurospora crassa OR74A] gi|28921216|gb|EAA30528.1| NCU02338 [Neurospora crassa OR74A] gi|40804603|emb|CAF05864.1| conserved [Neurospora crassa]
  misc_feature (26)..(265): NCBI GI: 39974905 Blast Desc: MGG_00401 [Magnaporthe grisea 70-15] gi|145018708|gb|EDK02987.1| MGG_00401 [Magnaporthe grisea 70-15]
  misc_feature (38)..(267): NCBI GI: 254381756 Blast Desc: FG-GAP repeat domain containing protein [Streptomyces sp. Mg1] gi|194340665|gb|EDX21631.1| FG-GAP repeat domain containing protein [Streptomyces sp. Mg1]
  misc_feature (1)..(257): NCBI GI: 256730144 Blast Desc: NECHADRAFT_95038 [Nectria haematococca mpVI 77-13-4]
  misc_feature (44)..(248): NCBI GI: 254405410 Blast Desc: necrosis-inducing protein [Streptomyces sviceus ATCC 29083] gi|197714860|gb|EDY58894.1| necrosis-inducing protein [Streptomyces sviceus ATCC 29083]
  misc_feature (2)..(253): NCBI GI: 254385319 Blast Desc: necrosis-inducing protein [Streptomyces sp. Mg1] gi|194344193|gb|EDX25159.1| necrosis-inducing protein [Streptomyces sp. Mg1]
  misc_feature (8)..(247): NCBI GI: 260649000 Blast Desc: secreted protein [Streptomyces scabiei 87.22]
  misc_feature (32)..(248): NCBI GI: 256799482 Blast Desc: secreted protein [Streptomyces viridochromogenes DSM 40736]
  misc_feature: Useful for introducing or modulating the production of volatile compounds
MHSQQSFVAVGLTFLAASMVSGSPFRLTARDPPRALPQKATANDLKFQPAMDFDTDGCYNTPAIGPDGTINPGLPHDNVGLAEDCHDLSDLQNNNVYSRARCNNGWCGYIYDYYFEKDVAFQDAPFDIGHTNDWEHIAVWTKDGVVKYVCASMHGGYQIKNATDVRWDGTHPKMVYNKDGLGTHDFRFANADDDNIENDTGAWFYGALVSWNGFPTTQLRDQLSAHDFGSATMAIRDANFASNLDTAKGDYIPEFNSNVDDGSPGTP

SEQ ID NO: 18089 - DNA, 1504 bp, Muscodor strobelii
  misc_feature: SGI EST ID NO. CUFF.42620.0
  misc_feature: Variant of the nucleotide sequence at SEQ ID NO 18087
cggtttccaaggttgacgaactatcagcaatgctatgtgcattcggcagacgaaactcatatataatgggggctcttacttcatcaccagtgacttttgacttagtcgttctggctggaacatctcggagtcttattgttagacacggtatcaaacgccatgcattctcaacagagctttgtggctgtaggcctgacgttcctggctgcctccatggtcagtggttcgccatttagactaacagcgcgagacccgccgcgagctctgccacagaaagcaacggcgaacgacttaaagttccaaccggcgatggattttgatactgatgggtgctacaatacgccagccattggccccgatggaacaataaatccgggcttgcctcacgataacgttgggcttgcggaagactgccatgatctttcggacctccagaacaacaacgtgtactctcgtgctcgttgcaacaacggctggtgtggctacatctatgactattatttcgagaaggacgttgctttccaagacgcacccttcgatattggtcataccaatgactgggaacacatcgctgtttggacgaaggatggtgttgtcaagtacgtttgtgcttcaatgcatgggggctatcagatcaagaacgccactgatgtacgctgggacggcacgcaccccaaaatggtctacaacaaagatggcctgggtacgcatgacttccgctttgcgaatgcggacgatgacaacattgagaacgatactggtgcctggttctacggtgctcttgtctcatggaacggctttcccaccacacagcttcgtgatcaattatctgcgcatgattttggtagcgctacgatggcgattcgagatgccaattttgctagcaatcttgatactgccaaaggcgactatattccagaattcaatagcaatgtcgacgacggatcaccaggaactccgtaggatagatagcttttagaccttgacagctaggcgaccagttcgacttacatttcaattttgatggtttatgaaagagctgtgactaggtcttggggttagtgtagcttctcaagaatctaagcgctgtatagcattcgcggctcaactacaagctaaacacgattggaaaagtacctgcgaatttttatgtttgtccgcgttagtcctgttgtcgcactaaattctacgacaacagggtggattggactggctgtctaggccgtggtttattattccacttcgaacgataaaagaagttgactttctgcgcattgaagcgtcgcaaaaagtaggcatttcgtggttcgtttgttaactaccagagtgggagacccgtcgagaatctacgtgaaacgatgaaagcgaaccattcaggcaatcgccgtttgaaggtacaaacctcatctgctacaatgttgcaactagtaagtcgttaccgtagctcggcaatcgtgtacggcgcagacatgcctcgaattgaacgctgattgggataaatgtg

SEQ ID NO: 18090 - DNA, 798 bp, Muscodor strobelii
  misc_feature: SGI cDNA ID NO. 566056
  misc_feature: Elevated expression when VOC is produced
  misc_feature: Encodes the peptide sequence at SEQ ID NO 18091
atggctgtagaagagtccaacttcattgctgcattacccatgtacgactggcctgagcgtcgggatgtagtcgacaggcaatgggctgaggtgcgtagtcgcctgcaagcagctggagttaatgcaccgcggcaactcgttcgccgtaatgctgaaatacctcctgtagctggcggtattcgggacgcggatggcaatctgatagccccagatcccgcaactcttgatcccgatgggttggatctccatacactttggcgacatcccttgttgttgtgggcgcagacctgctggggtccaatggaattcggacttgctcaacacgtccaggttgtcggaaagccagattattcggaggtcgagggtggtgacaatgagttttaccgcagcgcaattgtcgcgagacgaacaacggacgatgctccggtaccaccggacggtaattcctatctgccgttgtctcaactacgtggtaagcgtttggctttcaactcgaaggactctatgtctggtatcatcggtctgacccgtgatcttgctgctgtccgtgaaacactggacatcttctcggggcgtctggagagtggaggccaccgccaatcaatcattgctgtagcagaggggagagctgatattgctcccatcgattgcttcacctggcaacttgcgaagcaattcgaaccagtcgccgcggaattgtgcgtcattggatggaccgctcgccgaaaggggttgccgttcattgcctctaggcacattccttcaaagataatgcatatagcgcggagtgtcgaatag

SEQ ID NO: 18091 - protein, 265 aa, Muscodor strobelii
  misc_feature: SGI Peptide ID NO. 566056
  misc_feature (6)..(262): NCBI GI: 13471287 Blast Desc: mll1215 [Mesorhizobium loti MAFF303099] gi|14022031|dbj|BAB48642.1| mll1215 [Mesorhizobium loti MAFF303099]
  misc_feature (6)..(262): NCBI GI: 260459677 Blast Desc: conserved [Mesorhizobium opportunistum WSM2075] gi|259034479|gb|EEW35736.1| conserved [Mesorhizobium opportunistum WSM2075]
  misc_feature (7)..(250): NCBI GI: 162146167 Blast Desc: GDI_0339 [Gluconacetobacter diazotrophicus PAl 5] gi|209544531|ref|YP_002276760.1| Gdia_2395 [Gluconacetobacter diazotrophicus PAl 5] gi|161784742|emb|CAP54282.1| conserved PAl
  misc_feature (9)..(265): NCBI GI: 163758836 Blast Desc: HPDFL43_15472 [Hoeflea phototrophica DFL-43] gi|162284126|gb|EDQ34410.1| HPDFL43_15472 [Hoeflea phototrophica DFL-43]
  misc_feature (6)..(261): NCBI GI: 89056005 Blast Desc: Jann_3514 [Jannaschia sp. CCS1] gi|88865554|gb|ABD56431.1| Jann_3514 [Jannaschia sp. CCS1]
  misc_feature (12)..(253): NCBI GI: 254500533 Blast Desc: SADFL11_569 [Labrenzia alexandrii DFL-11] gi|222436604|gb|EEE43283.1| SADFL11_569 [Labrenzia alexandrii DFL-11]
  misc_feature (8)..(258): NCBI GI: 84502694 Blast Desc: OB2597_00680 [Oceanicola batsensis HTCC2597] gi|84389089|gb|EAQ01887.1| OB2597_00680 [Oceanicola batsensis HTCC2597]
  misc_feature (67)..(262): NCBI GI: 170690041 Blast Desc: ABC phosphate/phosphonate transporter, periplasmic ligand binding protein [Burkholderia graminis C4D1M] gi|170144476|gb|EDT12637.1| ABC phosphate/phosphonate periplasmic
  misc_feature (8)..(261): NCBI GI: 254465388 Blast Desc: conserved [Rhodobacterales bacterium Y4I] gi|206686296|gb|EDZ46778.1| conserved [Rhodobacterales bacterium Y4I]
  misc_feature (14)..(250): NCBI GI: 118588267 Blast Desc: SIAM614_23337 [Stappia aggregata IAM 12614] gi|118438973|gb|EAV45605.1| SIAM614_23337 [Stappia aggregata IAM 12614]
  misc_feature: Useful for introducing or modulating the production of volatile compounds
MAVEESNFIAALPMYDWPERRDVVDRQWAEVRSRLQAAGVNAPRQLVRRNAEIPPVAGGIRDADGNLIAPDPATLDPDGLDLHTLWRHPLLLWAQTCWGPMEFGLAQHVQVVGKPDYSEVEGGDNEFYRSAIVARRTTDDAPVPPDGNSYLPLSQLRGKRLAFNSKDSMSGIIGLTRDLAAVRETLDIFSGRLESGGHRQSIIAVAEGRADIAPIDCFTWQLAKQFEPVAAELCVIGWTARRKGLPFIASRHIPSKIMHIARSVE

SEQ ID NO: 18092 - DNA, 1221 bp, Muscodor strobelii
  misc_feature: SGI EST ID NO. CUFF.42628.0
  misc_feature: Variant of the nucleotide sequence at SEQ ID NO 18090
gccccgcggatctgcattgtaacgacaacaactccgttccattagcgctacgatacaactgcaggtgccggcgctagcaatcgaaacagcccctcgtccggtacgatttgaaatttcgtcccggcatttcattttatcatgcttgtaggaattacttgtgacttacggtatactacaaattgtctcatagcctgagacgacacgcagaagaagcatggctgtagaagagtccaacttcattgctgcattacccatgtacgactggcctgagcgtcgggatgtagtcgacaggcaatgggctgaggtgcgtagtcgcctgcaagcagctggagttaatgcaccgcggcaactcgttcgccgtaatgctgaaatacctcctgtagctggcggtattcgggacgcggatggcaatctgatagccccagatcccgcaactcttgatcccgatgggttggatctccatacactttggcgacatcccttgttgttgtgggcgcagacctgctggggtccaatggaattcggacttgctcaacacgtccaggttgtcggaaagccagattattcggaggtcgagggtggtgacaatgagttttaccgcagcgcaattgtcgcgagacgaacaacggacgatgctccggtaccaccggacggtaattcctatctgccgttgtctcaactacgtggtaagcgtttggctttcaactcgaaggactctatgtctggtatcatcggtctgacccgtgatcttgctgctgtccgtgaaacactggacatcttctcggggcgtctggagagtggaggccaccgccaatcaatcattgctgtagcagaggggagagctgatattgctcccatcgattgcttcacctggcaacttgcgaagcaattcgaaccagtcgccgcggaattgtgcgtcattggatggaccgctcgccgaaaggggttgccgttcattgcctctaggcacattccttcaaagataatgcatatagcgcggagtgtcgaatagaaccgtggtaatgctcatatcctttgagacgtccgcacataatttgctgactggcaattcgcaaatgttggtcttctactgtctattggtcactagatgtgttgcgacattgcttttggaactatttgttcgatccatgaacagcatggctcccctcatgctagatatgttatgttaacacaatagtcgctgtagtacctatactgttg

SEQ ID NO: 18093 - DNA, 573 bp, Muscodor strobelii
  misc_feature: SGI cDNA ID NO. 566057
  misc_feature: Encodes the peptide sequence at SEQ ID NO 18094
atggcagaacgcaaccctccagcaatttctccaacaattttccgcattcagaatgggaccacgttgagcaaatatttgctatcgctgcagaaactgctgcaacactgcgtgaacgatgagccatccatgtcatctatcggcttccttgctcctctcactgaccaggatgcatgcaattactggctcggcttacttccgtctattgtaggagagaaaccagcgaacactctggttgtggcgaagctggcaggaaacaataacatcattgctacagtgactattgcccgcatgatgaaggaaacacatgcctataaaggcgaaattcggaagcttttagtgcatcctgactatcggcatgtcggccttggccgggtaatgatgaatgaagctgagcgcatcgctcgtgaagatctgaatcttgaaatgctcgttcttgacactgctactgcgacacctgcgaggtcattttacttgaaagctggctggaatgaatggggaatatgcccggattatgcaatggatgcgacaggcgtaaagcatgattgcagcttcttcgtcaagcgattgcggtaa

SEQ ID NO: 18094 - protein, 190 aa, Muscodor strobelii
  misc_feature: SGI Peptide ID NO. 566057
  misc_feature (80)..(163): Pfam Id: PF00583 Pfam Desc: Acetyltransferase (GNAT) family
  misc_feature (22)..(189): NCBI GI: 62953166 Blast Desc: histone acetyltransferase [Gibberella fujikuroi]
  misc_feature (28)..(189): NCBI GI: 190889916 Blast Desc: acetyltransferase protein [Rhizobium etli CIAT 652] gi|190695195|gb|ACE89280.1| acetyltransferase protein [Rhizobium etli CIAT 652]
  misc_feature (28)..(189): NCBI GI: 218462688 Blast Desc: acetyltransferase protein [Rhizobium etli Kim 5] gi|218663329|ref|ZP_03519259.1| acetyltransferase protein [Rhizobium etli IE4771]
  misc_feature (29)..(189): NCBI GI: 222084520 Blast Desc: acetyltransferase protein [Agrobacterium radiobacter K84] gi|221721968|gb|ACM25124.1| acetyltransferase protein [Agrobacterium radiobacter K84]
  misc_feature (14)..(189): NCBI GI: 15887596 Blast Desc: acetyltransferase [Agrobacterium tumefaciens str. C58] gi|15155137|gb|AAK86062.1| acetyltransferase [Agrobacterium tumefaciens str. C58]
  misc_feature (16)..(182): NCBI GI: 228965771 Blast Desc: GCN5-related N-acetyltransferase [Bacillus thuringiensis serovar sotto str. T04001] gi|228793931|gb|EEM41457.1| GCN5-related N-acetyltransferase str.
  misc_feature (16)..(189): NCBI GI: 15964025 Blast Desc: acetyltransferase protein [Sinorhizobium meliloti 1021] gi|15073201|emb|CAC41709.1| acetyltransferase [Sinorhizobium meliloti 1021]
  misc_feature (15)..(187): NCBI GI: 228992444 Blast Desc: GCN5-related N-acetyltransferase [Bacillus pseudomycoides DSM 12442] gi|228767265|gb|EEM15900.1| GCN5-related N-acetyltransferase [Bacillus pseudomycoides DSM
  misc_feature (16)..(177): NCBI GI: 228939945 Blast Desc: GCN5-related N-acetyltransferase [Bacillus thuringiensis serovar berliner ATCC 10792] gi|228972839|ref|ZP_04133436.1| GCN5-related N-acetyltransferase
  misc_feature (16)..(177): NCBI GI: 229018138 Blast Desc: GCN5-related N-acetyltransferase [Bacillus cereus AH1273] gi|229024319|ref|ZP_04180777.1| GCN5-related N-acetyltransferase [Bacillus cereus AH1272] GCN5-related cereus
MAERNPPAISPTIFRIQNGTTLSKYLLSLQKLLQHCVNDEPSMSSIGFLAPLTDQDACNYWLGLLPSIVGEKPANTLVVAKLAGNNNIIATVTIARMMKETHAYKGEIRKLLVHPDYRHVGLGRVMMNEAERIAREDLNLEMLVLDTATATPARSFYLKAGWNEWGICPDYAMDATGVKHDCSFFVKRLR

SEQ ID NO: 18095 - DNA, 985 bp, Muscodor strobelii
  misc_feature: SGI EST ID NO. CUFF.42634.0
  misc_feature: Variant of the nucleotide sequence at SEQ ID NO 18093
cacaccatcaactgaattttcgatgaacaatcattttcatgacaactacgcaaccgcccaaaatataagcatgaatttctgttgacatatcataattgcgaccccagaactcctttgtttctcgaagatcattcgatgatcgacgaataagaatggcagaacgcaaccctccagcaatttctccaacaattttccgcattcagaatgggaccacgttgagcaaatatttgctatcgctgcagaaactgctgcaacactgcgtgaacgatgagccatccatgtcatctatcggcttccttgctcctctcactgaccaggatgcatgcaattactggctcggcttacttccgtctattgtaggagagaaaccagcgaacactctggttgtggcgaagctggcaggaaacaataacatcattgctacagtgactattgcccgcatgatgaaggaaacacatgcctataaaggcgaaattcggaagcttttagtgcatcctgactatcggcatgtcggccttggccgggtaatgatgaatgaagctgagcgcatcgctcgtgaagatctgaatcttgaaatgctcgttcttgacactgctactgcgacacctgcgaggtcattttacttgaaagctggctggaatgaatggggaatatgcccggattatgcaatggatgcgacaggcgtaaagcatgattgcagcttcttcgtcaagcgattgcggtaaatattcaggaccatctggacctgctctgtgaaattatgcgatagatgttggacattggtttggtgtgtgagaagcatccaacataattggtgttaacatcaagttggtgaagtttaagacggcgttaatgcattgttgatctcatccatcatttacatgaagttgcacgcaccattagtggataggtagtcaaggaggcgaacaaggcaaccatattatggggcggtttatcatgtctagggaagaacaacatatataaa

SEQ ID NO: 18096 - DNA, 1551 bp, Muscodor strobelii
  misc_feature: SGI cDNA ID NO. 566058
  misc_feature: Encodes the peptide sequence at SEQ ID NO 18097
atgcgcgcctatcagtccgtgagaccctcgtttgcactgcctttctacggctatggtggacagagcgagtctcacttccccagatataaccagaaagacctttggtccctgtttcatcaaagacagcttgccaacacactagaattcgatggtgttccactctggatgtggaaaatggctggtataggacaatatcaacagtgtgacaacggcagcgatgaagcctattccgagctgattccagacctctttgctgaaagccattccacgcttactatgggcatgacaaacataggaagtcaaacaaccggaccagctgtctcagctgtaaacagcgggagggaagttattccgaatcatacccaatacaacaacaaagaggatccgggaaatgagcagatgttcatacaccccgctacaaacgcctatacacgggatctggtcagcaatttcgactacccgcagttttcttattcttcttacgccgccactgatctctctgataataattcatcctttgttactcaacacggattaccgtcagtggacccatactcgagtatatacggcgttccagaccctatgagttacacacacgagagcgtaaacacactcaacggtagcttctcgtcgtcgctaggtactggggtcacatctgaaaggtttgcttcaatgactctcgggtctaatgtaccacaaagaagtacaccacccttcgatctccatagtggccatgtctcatcaggtccaggcgtcgagggacatagttggagtgcaaactattctgcgaccatttctccaaagatgcttcggctaaacccgtcaccaacgccaccttcttcatccgagtcggtacaaactagcatattacacactggctttgactcggacactggtgcaacggtctggaaccacgaaaatgcccggaacacgcttcctacaaagcgttcgactcagtcatcccgcaaagaactgcctagtaagccttctaagccccgacgacgtttgccctcactgggcaggtcatcatcctcaaatagcaagattccgctggacgcacatcgtcaccggaaaagtcaatctccggcgaacgaagtcatactgcccccgctgaagcctacggccggtgagggcatcgcagtaagagcagaacgtgccccagaatcagcattttcggggtttggcgattccgaacgtcaggccaagaatcagttcttgatcgactctaagcgaaaaggcctaacctatcgcgagatcaagcgaataggcgatttcccggaggcagagtccaccttacggggacgttatcgaacattgactaaaaacaaggaacaccgggtgcgaaagcctgagtggcaggagaaagacatccgcctcctccaaagggccgtacgcaaacttgccggcaacgactccacctccgccaaggtgccttggaagaaagttgccgcatacatctccgaacatggcggttcttatcattttggcaacgcgacatgccggaagaaatgggacgacttggtggaagagagcgccgaagctttgggatga
